United States Patent Application Publication US 2011/0183924 A1 - sequence listing, part 189

SEQ ID NO: 454389 - DNA, 7642 bp, Homo sapiens
agggagcgtgcgggcggtactactggcgggaggagtaaagatggcggcgcgagggtctccgccctctgctccgggctgaagcgctctgagagaggcggcagcggcaactcgagccccaacagtaatttagtgttggtagttttggcagcagctgccgaggccggagcaatggcggaactggagcacctaggagggaagcgggcagagtcggcgcgaatgcggcgggcagagcagcttcggcgctggcggggctcgctgacagagcaggagcctgcggagcgacgaggcgcggggcggcagccgctgaccaggcgcgggagccccagggtccgcttcgaggacggtgctgtctttctggccgcctgctctagcggggacaccgacgaggtgagaaagcttctggcaagaggtgctgatatcaacacggtcaacgtggacggcttgacagccctgcaccaggcatgtattgatgaaaatttggacatggtgaagtttctggtggagaacagagccaatgtaaaccagcaagacaacgagggctggacaccccttcatgcagcagcttcctgtggctatctcaacatagcagagtatttcattaatcacggagccagtgtaggtattgtcaatagtgaaggtgaagttccctctgaccttgcagaagagccagccatgaaggatcttcttctggagcaagtaaagaagcaaggaattgatctagagcagtcaagaaaagaagaagagcagcagatgttgcaggatgcccgccagtggctcaacagtgggaaaatagaggatgtgaggcaggctcgctcaggggctacagcccttcatgtggctgctgccaagggctactctgaagtcctcagacttttaattcaggctggctatgaactcaatgttcaggattatgatggctggactcccctccatgctgctgcacactggggagtgaaggaggcttgctccatcctggcagaagcactttgtgacatggatattcgaaataaactgggccagacaccatttgatgtggctgatgagggtctcgtggagcatttggagttgctccagaagaagcagaatgtgcttcgaagtgaaaaggagacacggaataaactcattgagtcagatctgaacagcaagattcagagtgggttctttaagaacaaagagaagatgctctatgaggaggagacacctaagtcccaagaaatggaggaagaaaataaagaatctagtagctccagctcagaggaggaggaaggtgaagatgaagcttctgagtcagaaactgagaaggaggcagataaaaagccagaagcctttgtcaatcattccaactctgaaagcaagagtagtatcacagagcagataccagcaccagctcaaaataccttctctgcctcttctgctaggaggttctcttctggcctttttaacaagccagaagagcccaaagatgaatctccttcttcatggagattgggactgagaaaaactggcagccacaacatgctgagtgaggtggccaattccagggaacctataagggaccgaggctcttccatctatcgctcctcttcaagccctcgaatttctgctctactggacaacaaagataaggagagagaaaacaaaagctatattagttcactagcaccccggaagctcaacagcacaagtgatattgaagaaaaggagaacagagaatcagctgttaatctagtgaggagtggctcctatacccggcagctatggagggatgaagcaaaaggaaatgaaatcccacagacaattgctccctccacctatgtatcaacttacttgaaaaggactcctcacaaatcccaggccgacacaacagcagagaaaacagcagacaatgtctcttctagcaccccgctctgtgtgatcaccaatcgccctcttcctagcactgccaatggggttacagctactcctgtgctctccattactggaacagattcctctgtggaagccagggagaagaggaggtcctatctgactcctgtacgggatgaggaagcagagtctttacggaaagcacgctccagacaagctcggcagacacgaaggtctactcaaggtgtcaccctaacagaccttcaagaagcagaaaggacattcagccggtcgagggcagagaggcaagctcaggagcagcctcgtgagaagcccacagacactgaagggcttgaggggagccctgagaagcatgagccctcagcagttccagcaacagaagctggggagggccagcagccctggggcaggagtctggatgaagagcctatctgtcatcgcctgaggtgcccagctcagccagacaaacccaccacgccagcatctccttctacgtcaagaccctcactctacaccagttcccacctgctatggacaaatagattttcagtccctgattctgagagttcagagactaccacaaacactacaactgcaaaggaaatggacaaaaatgagaatgaagaagcagatttggatgagcagtcctctaagaggctgtccatccgagagaggaggcggcccaaggaacgacgaagaggcacaggcatcaatttctggacaaaggatgaggatgaaactgatggctctgaagaggtcaaagaaacgtggcatgaaagactttctaggttggaatcgggaggtagtaatcctacaaccagtgattcttacggtgaccgggcttcagcaagagcccgtcgggaggcccgggaggcccgcctagccaccctgaccagccgtgtagaagaagacagcaacagagattataaaaaactctatgagagtgctctgactgaaaaccaaaaactgaaaacaaaacttcaggaagcccagctagagctagcagatataaagtccaagcttgagaaggtggcccagcagaaacaagaaaagacctctgaccgatcatcagtgctggagatggagaaacgggagaggcgagccttggagcgcaaaatgtcagaaatggaggaagaaatgaaggtgttaacagaactgaaatccgacaaccagaggctgaaagatgaaaatggtgccctcatcagagtcatcagcaaactgtccaagtaggctaggctccagatttatgaggaaagaaagggacagcatttgctgcccccacccctcttttccagtccttgccttccaaccaaaagaaatggatgttttggtggaaggacacttctttctatcaccctcttcagtcacctctatacactctacattttctctgcactttcaatgccctgttcttccaaacccctatcccaagttttatgacagttttaattgaagcatgattgtggtaattcgagccatctggagaatgctctggggagtacaccaggctcagctgtggacccctcaacttcctgctgctcagctactttgtccacattggatttggtccaaacatgtaagacttctaccctaatcagtatccttcagctttttacattaacccagtgtcctctgatataggtgagtcttgtggtagccactccaggatcctgattggggtgccaagagaaacagcaggatgttgaattgatcatcagatgccctctggaatggttagcatccaaggtgacagtgactgcattgaggcgctctattcttcttcacctctcaggaactgacttttattttttctatcaacacccagtaatctccctaactagttttaacccttattcctccctcatacctagccatttctccaaggcgcaaatggccctggcttcatttattcctttcctttctatccttttatatttttcccttccccaccccctcactcaatggtataaaagctaggacagagcacctgacctcagttgtctttggccattgtgggaagtcattattctggagacaagaaaatcatcactctggtgccttggtggcagcaccactgcctgctccctggaaggtagactatggcataagtgtcagctcattgttttcgtctcccacttatcttcccccttcaaagtgattttctttataagaaaatttgggctctgaatactccattctgcctcacttccttgaccttgttttcctctcttcgccctgacacctgcttctaatgagaaatgaagtcagtgcaaggaggaatgagaggtggggaggggagattgttgagagatggactaggaagtggaagcaggctggaaagacacatatggcgaaagtcaagtatctgaggccacttgcaacattgtgacaaagaagatggaagatagcagcctactgggctgtgagaatagtggtgaatttgattatttccagtggttagatttagcagagagatttactttcttagaaattaataggggaaatggcacttaatagaggtttaatggaatgaagtactttcaacccattgatgagagtcatggaagtttagagtggcaagacccagaggtcattaggtccagctttctattattgtgtcacagggacccctgctaccacagctttcacccatgggcatggtcaggtagcctctggtggctatgcatttattactcaaaagttgggcaactctaataacgagagagtttttcctcatatcagctgaagtctgcctgtggattctccttgtagtccagatctactatctgcaactctttaacggcacttgagatatgtgcagtgggtggtctccccctcagtcttactttgagctgctgttactctagtcctttaagtcattcctcatatggcatgcttttcttacctgtcacatcttggccatcctcctctagacaaaaccagcctttaaaatatcatgtccaggcctggaaagaatacaaatccagtgcaaaattaaaccattagttcttgatgataacctagcattaatacttacagtattttctttttgtaggagttttatcccttggttcacttgagtgtgcaagtcattaaatcctcatcattttagggttgccagtgatattcagtgtttagagtggttcattcccttaatatatactacctctgtctgttaattctttcctaacatgacatgtagctctccatggtcctccctctgaaacaccacatgctgtttaaactagaagctgtaattcaagatcccaattccaccaggtgcagtggctcatgcctgtaatcccagcacttcaggaggccgaggtggacagatcacgaggtcaggagttcgagaccatcctggctaacacggtgaaacccaatctctactaaaaatacaaaaaattagccaggcgtggtggcaggcgcctgtagtcccagctactcaggaggctgaggcaggagaatggcgtgaacccgggaggcggagcttgcagtgagccttgatcacgccactgcactccagcctgggtgacagagcaagactccatctcaaaaaaaataataataataaataaataaaaaatcccaattacagaacaggagatatgtttcctctgacaaaaccccatttttagagtgtataaaattctgtctttcatttccaaccatttttcaagagaagctgctactatcttgagacttcgtattatcatgggagtactgtaagttcagttctcagggaatgctaaattagagtaataagttttatatccttcattctgggagaggaaatcaacataaggtgttgactaattgattatcctggaacattttgaatattggggaaggaagatgatacttctttctcaagaaaagaaaattggattattaggaatacatcttgacccttttccactcaatagaccagggaaaggggttacagagagcctcctcagatctgtttgtgcctttcaaaagtactgggggcagattctcaaaactcttagattggtgttgcatccctgccacttcacatgacccttccatgttaaagctgacttttcttgccagaaagttttccttgtgacaagaaatttgcaagcttttcaatctcaggaatactggattctatagccaagaactcatgaaagtaagtgtaaactatcctaggtaatttcaggtactttctcttatgcaattaattttattaactgatttctggtctatctccagagataaaataccattccttcacaactgtattgtctggaagccccatgagatggtaattataggccttctactagccagcagttctctctggatactggcatcagcaggtctcctttttcttgtgctgcttggacaggtacctactgctggcctcttcagtggccacaatcctcagtcctcacctgctggtttggagactcatgagcaccccaggcagctcaagctgaataaatagctgcagacatggccaacaacatggggctcaggtctgtcacttaacttagagtctttacatgaaatatcagaatgggaaagagaatgttcctggtaaaactctgttttcattaatttgttatttttcaaaaaccgagccacacctttggaagtaatgatttggccattccagagattctggggctaaagtttgtttttccagggctgctgatccttttccagatagctccagagtatgatgaccccagccccatcccaatctctagcgaaagggttatgcaaatctcagggtgttgcctctaaagaatctaaagaatagacatgctttgggcttactcagtgtaccagattctctagtgggccattctcatttgatgttccctagaacctccctgtcttccaactgcaggatgtgtttacttctcttctgggcttcccctggtttctgtcctagttcccaccccaagtttaagaagacttagattcatttattgctatctgaggccactagtgagatttcagatctctcttttgcaacattttacccatttcccttccccaaaccatgtgcttattagatggttccactcaggaagcaaggaagctaaaactcaagttaatggtctgtggatcccacgaaagtgtgtgtaaactactgactgtttctccactagaggcatttaattgagccaaagatgatggaagaagaaactctcaaagccatgtactttgttaggtgtctggatttttggcctgtttgcagcctctcctagccacagacagacactgtctcctctcagagaaaggccagtgtttcggtccaggccactggtgagtgtcggcacccttgaggtgggcatggagtgagcagaagaagcctggagaagagagaactatttaaaagtgttgccagttattcagcttccaggcggctttgcacctccaaaggtgcaaaaaggaaaaagaaagcagaaaggattcagcatttaagcagaaagaaaagggaaattctactctaccagatgagccactggttccactggagcttatcagtgaagtaacactgcaggagccctggtatccttccctcagagatatcatcaggggccctcaaaccccattgtttatgccagcactgaccgcactttaagcacacacttaccaatcagaggtcgtgtaattggcctaaatctaggcccagttattactacaaatcttagtcaccatactctccagcctgggtgacagagcaagactccatctcaaaaaaaataataataataat

SEQ ID NO: 454390 - DNA, 7555 bp, Homo sapiens
agggagcgtgcgggcggtactactggcgggaggagtaaagatggcggcgcgagggtctccgccctctgctccgggctgaagcgctctgagagaggcggcagcggcaactcgagccccaacagtaatttagtgttggtagttttggcagcagctgccgaggccggagcaatggcggaactggagcacctaggagggaagcgggcagagtcggcgcgaatgcggcgggcagagcagcttcggcgctggcggggctcgctgacagagcaggagcctgcggagcgacgaggcgcggggcggcagccgctgaccaggcgcgggagccccagggtccgcttcgaggacggtgctgtctttctggccgcctgctctagcggggacaccgacgaggtgagaaagcttctggcaagaggtgctgatatcaacacggtcaacgtggacggcttgacagccctgcaccaggcatgtattgatgaaaatttggacatggtgaagtttctggtggagaacagagccaatgtaaaccagcaagacaacgagggctggacaccccttcatgcagcagcttcctgtggctatctcaacatagcagagtatttcattaatcacggagccagtgtaggtattgtcaatagtgaaggtgaagttccctctgaccttgcagaagagccagccatgaaggatcttcttctggagcaagtaaagaagcaaggaattgatctagagcagtcaagaaaagaagaagagcagcagatgttgcaggatgcccgccagtggctcaacagtgggaaaatagaggatgtgaggcaggctcgctcaggggctacagcccttcatgtggctgctgccaagggctactctgaagtcctcagacttttaattcaggctggctatgaactcaatgttcaggattatgatggctggactcccctccatgctgctgcacactggggagtgaaggaggcttgctccatcctggcagaagcactttgtgacatggatattcgaaataaactgggccagacaccatttgatgtggctgatgagggtctcgtggagcatttggagttgctccagaagaagcagaatgtgcttcgaagtgaaaaggagacacggaataaactcattgagtcagatctgaacagcaagattcagagtgggttctttaagaacaaagagaagatgctctatgaggaggagacacctaagtcccaagaaatggaggaagaaaataaagaatctagtagctccagctcagaggaggaggaaggtgaagatgaagcttctgagtcagaaactgagaaggaggcagataaaaagccagaagcctttgtcaatcattccaactctgaaagcaagagtagtatcacagagcagataccagcaccagctcaaaataccttctctgcctcttctgctaggaggttctcttctggcctttttaacaagccagaagagcccaaagatgaatctccttcttcatggagattgggactgagaaaaactggcagccacaacatgctgagtgaggtggccaattccagggaacctataagggaccgaggctcttccatctatcgctcctcttcaagccctcgaatttctgctctactggacaacaaagataaggagagagaaaacaaaagctatattagttcactagcaccccggaagctcaacagcacaagtgatattgaagaaaaggagaacagagaatcagctgttaatctagtgaggagtggctcctatacccggcagctatggagggatgaagcaaaaggaaatgaaatcccacagacaattgctccctccacctatgtatcaacttacttgaaaaggactcctcacaaatcccaggccgacacaacagcagagaaaacagcagacaatgtctcttctagcaccccgctctgtgtgatcaccaatcgccctcttcctagcactgccaatggggttacagctactcctgtgctctccattactggaacagattcctctgtggaagccagggagaagaggaggtcctatctgactcctgtacgggatgaggaagcagagtctttacggaaagcacgctccagacaagctcggcagacacgaaggtctactcaaggtgtcaccctaacagaccttcaagaagcagaaaggacattcagccggtcgagggcagagaggcaagctcaggagcagcctcgtgagaagcccacagacactgaagggcttgaggggagccctgagaagcatgagccctcagcagttccagcaacagaagctggggagggccagcagccctggggcaggagtctggatgaagagcctatctgtcatcgcctgaggtgcccagctcagccagacaaacccaccacgccagcatctccttctacgtcaagaccctcactctacaccagttcccacctgctatggacaaatagattttcagtccctgattctgagagttcagagactaccacaaacactacaactgcaaaggaaatggacaaaaatgagaatgaagaagcagatttggatgagcagtcctctaagaggctgtccatccgagagaggaggcggcccaaggaacgacgaagaggcacaggcatcaatttctggacaaaggatgaggatgaaactgatggctctgaagaggtcaaagaaacgtggcatgaaagactttctaggttggaatcgggaggtagtaatcctacaaccagtgattcttacggtgaccgggcttcagcaagagcccgtcgggaggcccgggaggcccgcctagccaccctgaccagccgtgtagaagaagacagcaacagagattataaaaaactctatgagagtgctctgactgaaaaccaaaaactgaaaacaaaacttcaggaagcccagctagagctagcagatataaagtccaagcttgagaaggtggcccagcagaaacaagaaaagacctctgaccgatcatcagtgctggagatggagaaacgggagaggcgagccttggagcgcaaaatgtcagaaatggaggaagaaatgaaggtgttaacagaactgaaatccgacaaccagaggctgaaagatgaaaatggtgccctcatcagagtcatcagcaaactgtccaagtaggctaggctccagatttatgaggaaagaaagggacagcatttgctgcccccacccctcttttccagtccttgccttccaaccaaaagaaatggatgttttggtggaaggacacttctttctatcaccctcttcagtcacctctatacactctacattttctctgcactttcaatgccctgttcttccaaacccctatcccaagttttatgacagttttaattgaagcatgattgtggtaattcgagccatctggagaatgctctggggagtacaccaggctcagctgtggacccctcaacttcctgctgctcagctactttgtccacattggatttggtccaaacatgtaagacttctaccctaatcagtatccttcagctttttacattaacccagtgtcctctgatataggtgagtcttgtggtagccactccaggatcctgattggggtgccaagagaaacagcaggatgttgaattgatcatcagatgccctctggaatggttagcatccaaggtgacagtgactgcattgaggcgctctattcttcttcacctctcaggaactgacttttattttttctatcaacacccagtaatctccctaactagttttaacccttattcctccctcatacctagccatttctccaaggcgcaaatggccctggcttcatttattcctttcctttctatccttttatatttttcccttccccaccccctcactcaatggtataaaagctaggacagagcacctgacctcagttgtctttggccattgtgggaagtcattattctggagacaagaaaatcatcactctggtgccttggtggcagcaccactgcctgctccctggaaggtagactatggcataagtgtcagctcattgttttcgtctcccacttatcttcccccttcaaagtgattttctttataagaaaatttgggctctgaatactccattctgcctcacttccttgaccttgttttcctctcttcgccctgacacctgcttctaatgagaaatgaagtcagtgcaaggaggaatgagaggtggggaggggagattgttgagagatggactaggaagtggaagcaggctggaaagacacatatggcgaaagtcaagtatctgaggccacttgcaacattgtgacaaagaagatggaagatagcagcctactgggctgtgagaatagtggtgaatttgattatttccagtggttagatttagcagagagatttactttcttagaaattaataggggaaatggcacttaatagaggtttaatggaatgaagtactttcaacccattgatgagagtcatggaagtttagagtggcaagacccagaggtcattaggtccagctttctattattgtgtcacagggacccctgctaccacagctttcacccatgggcatggtcaggtagcctctggtggctatgcatttattactcaaaagttgggcaactctaataacgagagagtttttcctcatatcagctgaagtctgcctgtggattctccttgtagtccagatctactatctgcaactctttaacggcacttgagatatgtgcagtgggtggtctccccctcagtcttactttgagctgctgttactctagtcctttaagtcattcctcatatggcatgcttttcttacctgtcacatcttggccatcctcctctagacaaaaccagcctttaaaatatcatgtccaggcctggaaagaatacaaatccagtgcaaaattaaaccattagttcttgatgataacctagcattaatacttacagtattttctttttgtaggagttttatcccttggttcacttgagtgtgcaagtcattaaatcctcatcattttagggttgccagtgatattcagtgtttagagtggttcattcccttaatatatactacctctgtctgttaattctttcctaacatgacatgtagctctccatggtcctccctctgaaacaccacatgctgtttaaactagaagctgtaattcaagatcccaattccaccaggtgcagtggctcatgcctgtaatcccagcacttcaggaggccgaggtggacagatcacgaggtcaggagttcgagaccatcctggctaacacggtgaaacccaatctctactaaaaatacaaaaaattagccaggcgtggtggcaggcgcctgtagtcccagctactcaggaggctgaggcaggagaatggcgtgaacccgggaggcggagcttgcagtgagccttgatcacgccactgcactccagcctgggtgacagagcaagactccatctcaaaaaaaataataataataaataaataaaaaatcccaattacagaacaggagatatgtttcctctgacaaaaccccatttttagagtgtataaaattctgtctttcatttccaaccatttttcaagagaagctgctactatcttgagacttcgtattatcatgggagtactgtaagttcagttctcagggaatgctaaattagagtaataagttttatatccttcattctgggagaggaaatcaacataaggtgttgactaattgattatcctggaacattttgaatattggggaaggaagatgatacttctttctcaagaaaagaaaattggattattaggaatacatcttgacccttttccactcaatagaccagggaaaggggttacagagagcctcctcagatctgtttgtgcctttcaaaagtactgggggcagattctcaaaactcttagattggtgttgcatccctgccacttcacatgacccttccatgttaaagctgacttttcttgccagaaagttttccttgtgacaagaaatttgcaagcttttcaatctcaggaatactggattctatagccaagaactcatgaaagtaagtgtaaactatcctaggtaatttcaggtactttctcttatgcaattaattttattaactgatttctggtctatctccagagataaaataccattccttcacaactgtattgtctggaagccccatgagatggtaattataggccttctactagccagcagttctctctggatactggcatcagcaggtctcctttttcttgtgctgcttggacaggtacctactgctggcctcttcagtggccacaatcctcagtcctcacctgctggtttggagactcatgagcaccccaggcagctcaagctgaataaatagctgcagacatggccaacaacatggggctcaggtctgtcacttaacttagagtctttacatgaaatatcagaatgggaaagagaatgttcctggtaaaactctgttttcattaatttgttatttttcaaaaaccgagccacacctttggaagtaatgatttggccattccagagattctggggctaaagtttgtttttccagggctgctgatccttttccagatagctccagagtatgatgaccccagccccatcccaatctctagcgaaagggttatgcaaatctcagggtgttgcctctaaagaatctaaagaatagacatgctttgggcttactcagtgtaccagattctctagtgggccattctcatttgatgttccctagaacctccctgtcttccaactgcaggatgtgtttacttctcttctgggcttcccctggtttctgtcctagttcccaccccaagtttaagaagacttagattcatttattgctatctgaggccactagtgagatttcagatctctcttttgcaacattttacccatttcccttccccaaaccatgtgcttattagatggttccactcaggaagcaaggaagctaaaactcaagttaatggtctgtggatcccacgaaagtgtgtgtaaactactgactgtttctccactagaggcatttaattgagccaaagatgatggaagaagaaactctcaaagccatgtactttgttaggtgtctggatttttggcctgtttgcagcctctcctagccacagacagacactgtctcctctcagagaaaggccagtgtttcggtccaggccactggtgagtgtcggcacccttgaggtgggcatggagtgagcagaagaagcctggagaagagagaactatttaaaagtgttgccagttattcagcttccaggcggctttgcacctccaaaggtgcaaaaaggaaaaagaaagcagaaaggattcagcatttaagcagaaagaaaagggaaattctactctaccagatgagccactggttccactggagcttatcagtgaagtaacactgcaggagccctggtatccttccctcagagatatcatcaggggccctcaaaccccattgtttatgccagcactgaccgcactcagcctgggtgacagagcaagactccatctcaaaaaaaataataataataat

SEQ ID NO: 454391 - DNA, 3139 bp, Homo sapiens
agggagcgtgcgggcggtactactggcgggaggagtaaagatggcggcgcgagggtctccgccctctgctccgggctgaagcgctctgagagaggcggcagcggcaactcgagccccaacagtaatttagtgttggtagttttggcagcagctgccgaggccggagcaatggcggaactggagcacctaggagggaagcgggcagagtcggcgcgaatgcggcgggcagagcagcttcggcgctggcggggctcgctgacagagcaggagcctgcggagcgacgaggcgcggggcggcagccgctgaccaggcgcgggagccccagggtccgcttcgaggacggtgctgtctttctggccgcctgctctagcggggacaccgacgaggtgagaaagcttctggcaagaggtgctgatatcaacacggtcaacgtggacggcttgacagccctgcaccaggcatgtattgatgaaaatttggacatggtgaagtttctggtggagaacagagccaatgtaaaccagcaagacaacgagggctggacaccccttcatgcagcagcttcctgtggctatctcaacatagcagagtatttcattaatcacggagccagtgtaggtattgtcaatagtgaaggtgaagttccctctgaccttgcagaagagccagccatgaaggatcttcttctggagcaagtaaagaagcaaggaattgatctagagcagtcaagaaaagaagaagagcagcagatgttgcaggatgcccgccagtggctcaacagtgggaaaatagaggatgtgaggcaggctcgctcaggggctacagcccttcatgtggctgctgccaagggctactctgaagtcctcagacttttaattcaggctggctatgaactcaatgttcaggattatgatggctggactcccctccatgctgctgcacactggggagtgaaggaggcttgctccatcctggcagaagcactttgtgacatggatattcgaaataaactgggccagacaccatttgatgtggctgatgagggtctcgtggagcatttggagttgctccagaagaagcagaatgtgcttcgaagtgaaaaggagacacggaataaactcattgagtcagatctgaacagcaagattcagagtgggttctttaagaacaaagagaagatgctctatgaggaggagacacctaagtcccaagaaatggaggaagaaaataaagaatctagtagctccagctcagaggaggaggaaggtgaagatgaagcttctgagtcagaaactgagaaggaggcagataaaaagccagaagcctttgtcaatcattccaactctgaaagcaagagtagtatcacagagcagataccagcaccagctcaaaataccttctctgcctcttctgctaggaggttctcttctggcctttttaacaagccagaagagcccaaagatgaatctccttcttcatggagattgggactgagaaaaactggcagccacaacatgctgagtgaggtggccaattccagggaacctataagggaccgaggctcttccatctatcgctcctcttcaagccctcgaatttctgctctactggacaacaaagataaggagagagaaaacaaaagctatattagttcactagcaccccggaagctcaacagcacaagtgatattgaagaaaaggagaacagagaatcagctgttaatctagtgaggagtggctcctatacccggcagctatggagggatgaagcaaaaggaaatgaaatcccacagacaattgctccctccacctatgtatcaacttacttgaaaaggactcctcacaaatcccaggccgacacaacagcagagaaaacagcagacaatgtctcttctagcaccccgctctgtgtgatcaccaatcgccctcttcctagcactgccaatggggttacagctactcctgtgctctccattactggaacagattcctctgtggaagccagggagaagaggaggtcctatctgactcctgtacgggatgaggaagcagagtctttacggaaagcacgctccagacaagctcggcagacacgaaggtctactcaaggtgtcaccctaacagaccttcaagaagcagaaaggacattcagccggtcgagggcagagaggcaagctcaggagcagcctcgtgagaagcccacagacactgaagggcttgaggggagccctgagaagcatgagccctcagcagttccagcaacagaagctggggagggccagcagccctggggcaggagtctggatgaagagcctatctgtcatcgcctgaggtgcccagctcagccagacaaacccaccacgccagcatctccttctacgtcaagaccctcactctacaccagttcccacctgctatggacaaatagattttcagtccctgattctgagagttcagagactaccacaaacactacaactgcaaaggaaatggacaaaaatgagaatgaagaagcagatttggatgagcagtcctctaagaggctgtccatccgagagaggaggcggcccaaggaacgacgaagaggcacaggcatcaatttctggacaaaggatgaggatgaaactgatggctctgaagaggtcaaagaaacgtggcatgaaagactttctaggttggaatcgggaggtagtaatcctacaaccagtgattcttacggtgaccgggcttcagcaagagcccgtcgggaggcccgggaggcccgcctagccaccctgaccagccgtgtagaagaagacagcaacagagattataaaaaactctatgagagtgctctgactgaaaaccaaaaactgaaaacaaaacttcaggaagcccagctagagctagcagatataaagtccaagcttgagaaggtggcccagcagaaacaagaaaagacctctgaccgatcatcagtgctggagatggagaaacgggagaggcgagccttggagcgcaaaatgtcagaaatggaggaagaaatgaaggtatgaagagattttctttctttttgtatgcctgttctctgaatgcctgccaagactggatatttgagcataggcctgccccctccagatttcactacaaactcaatat

SEQ ID NO: 454392 - DNA, 1843 bp, Homo sapiens
agggagcgtgcgggcggtactactggcgggaggagtaaagatggcggcgcgagggtctccgccctctgctccgggctgaagcgctctgagagaggcggcagcggcaactcgagccccaacagtaatttagtgttggtagttttggcagcagctgccgaggccggagcaatggcggaactggagcacctaggagggaagcgggcagagtcggcgcgaatgcggcgggcagagcagcttcggcgctggcggggctcgctgacagagcaggagcctgcggagcgacgaggcgcggggcggcagccgctgaccaggcgcgggagccccagggtccgcttcgaggacggtgctgtctttctggccgcctgctctagcggggacaccgacgaggtgagaaagcttctggcaagaggtgctgatatcaacacggtcaacgtggacggcttgacagccctgcaccaggcatgtattgatgaaaatttggacatggtgaagtttctggtggagaacagagccaatgtaaaccagcaagacaacgagggctggacaccccttcatgcagcagcttcctgtggctatctcaacatagcagagtatttcattaatcacggagccagtgtaggtattgtcaatagtgaaggtgaagttccctctgaccttgcagaagagccagccatgaaggatcttcttctggagcaagtaaagaagcaaggaattgatctagagcagtcaagaaaagaagaagagcagcagatgttgcaggatgcccgccagtggctcaacagtgggaaaatagaggatgtgaggcaggctcgctcaggggctacagcccttcatgtggctgctgccaagggctactctgaagtcctcagacttttaattcaggctggctatgaactcaatgttcaggattatgatggctggactcccctccatgctgctgcacactggggagtgaaggaggcttgctccatcctggcagaagcactttgtgacatggatattcgaaataaactgggccagacaccatttgatgtggctgatgagggtctcgtggagcatttggagttgctccagaagaagcagaatgtgcttcgaagtgaaaaggagacacggaataaactcattgagtcagatctgaacagcaagattcagagtgggttctttaagaacaaagagaagatgctctatgaggaggagacacctaagtcccaagaaatggaggaagaaaataaagaatctagtagctccagctcagaggaggaggaaggtgaagatgaagcttctgagtcagaaactgagaaggaggcagataaaaagccagaagcctttgtcaatcattccaactctgaaagcaagagtagtatcacagagcagataccagcaccagctcaaaataccttctctgcctcttctgctaggaggttctcttctggcctttttaacaagccagaagagcccaaagatgaatctccttcttcatggagattgggactgagaaaaactggcagccacaacatgctgagtgaggtggccaattccagggaacctataagggaccgaggctcttccatctatcgctcctcttcaagccctcgaatttctgctctactggacaacaaagataaggtgcagtttgggagggtatgggggaattccaaggcagttttttttttccatgaaaattcaatcttaggaacaaatgaaaatattttctagtccttaagttgattttggaaatgcaaagtctttaaagagagagaggcacactgatagtttattcaagtagctatttgcttgctattgtttgcttgaccaaaaaagaaaataaaaaagctttaaaaat

SEQ ID NO: 454393 - DNA, 181 bp, Homo sapiens
atccatcaagatgtgaaactcgcaagtttggtgcagagaaggtacatgggtttccttcttttctcatctgtattcccttttctgcaattattttctttgccacatactagccagcaaaccaggcacctttgccagagccattaagctacaaaaatacttaatattttaatttgaactctgc

SEQ ID NO: 454394 - DNA, 1045 bp, Homo sapiens
agggagcgtgcgggcggtactactggcgggaggagtaaagatggcggcgcgagggtctccgccctctgctccgggctgaagcgctctgagagaggcggcagcggcaactcgagccccaacagtaatttagtgttggtagttttggcagcagctgccgaggccggagcaatggcggaactggagcacctaggagggaagcgggcagagtcggcgcgaatgcggcgggcagagcagcttcggcgctggcggggctcgctgacagagcaggagcctgcggagcgacgaggcgcggggcggcagccgctgaccaggcgcgggagccccagggtccgcttcgaggacggtgctgtctttctggccgcctgctctagcggggacaccgacgaggtgagaaagcttctggcaagaggtgctgatatcaacacggtcaacgtggacggcttgacagccctgcaccaggtaactcctttcttggtcttagaggcgtccagtctcctacagatgcgcctttgaccctgcgagccaccccatggggagtatcagtgttgccgccgactccttctgcatggacactgcccttttgggctaatcggtttcattcttggccagcttcctccactaatcaagtctttttctgaccccagggtcttaggaatagcgtcaccccgctgcttggtcagtgtttgtatttccctccacctacttgtgttgtcatggttactggtgatttttgtccctggtcttatccctgtagattagttatcttcacttatgtctggttggcgtgcctgcacaccgcgtcactcataggcacagtgtcatttgtttgatgccctttcagaaaattcagttgttgtgtgtccccgttatagaatatcttatatcacttaaagagtaaagccctttactgggtaaagacaagcaggtctgaaaccacacctcttgttttgttgatttgtagtacttcaaaacagtttgtgttgcctctaggctacagctcctagaacacgctggacctcgttgttttaggtatcttaacttcctt

SEQ ID NO: 454395 - DNA, 2349 bp, Homo sapiens
gttgctggtacaatctcataaaatgggctccagtgtttagagaaggacagtcagaggagtggccacctgtttgttgaaaattgggcttctgggaaagttgctgcacaagtgtgtggcaaggtgtgtctgaggtagcttgacctgctttcacctggaatgatttgatctggcaatagagttccttgccattcctggttttatggaaatcagaggcacaggaagttgatctgggtgttctggggaattgagacaagcctctgccatagtttgttagtactctgtgtttggaggctaactccagtgtgctgagttgagacatcagcaagtgctgggcctggaatgtcagaagcagcaggtcctatctgactcctgtacgggatgaggaagcagagtctttacggaaagcacgctccagacaagctcggcagacacgaaggtctactcaaggtgtcaccctaacagaccttcaagaagcagaaaggacattcagccggtcgagggcagagaggcaagctcaggagcagcctcgtgagaagcccacagacactgaagggcttgaggggagccctgagaagcatgagccctcagcagttccagcaacagaagctggggagggccagcagccctggggcaggagtctggatgaagagcctatctgtcatcgcctgaggtgcccagctcagccagacaaacccaccacgccagcatctccttctacgtcaagaccctcactctacaccagttcccacctgctatggacaaatagattttcagtccctgattctgagagttcagagactaccacaaacactacaactgcaaaggaaatggacaaaaatgagaatgaagaagcagatttggatgagcagtcctctaagaggctgtccatccgagagaggaggcggcccaaggaacgacgaagaggcacaggcatcaatttctggacaaaggatgaggatgaaactgatggctctgaagaggtcaaagaaacgtggcatgaaagactttctaggttggaatcgggaggtagtaatcctacaaccagtgattcttacggtgaccgggcttcagcaagagcccgtcgggaggcccgggaggcccgcctagccaccctgaccagccgtgtagaagaagacagcaacagagattataaaaaactctatgagagtgctctgactgaaaaccaaaaactgaaaacaaaacttcaggaagcccagctagagctagcagatataaagtccaagcttgagaaggtggcccagcagaaacaagaaaagacctctgaccgatcatcagtgctggagatggagaaacgggagaggcgagccttggagcgcaaaatgtcagaaatggaggaagaaatgaagaacctccaccagctaaaacagattcaaaccttgaagcagatgaacgagcaactgcaggctgagaacagggccctgacccgagtggtggccagactctcggagtccatcgagtcctcggacacccaggagctctagttcttgcccctactctccaactcacttccctcctccactactccaggtgttaacagaactgaaatccgacaaccagaggctgaaagatgaaaatggtgccctcatcagagtcatcagcaaactgtccaagtaggctaggctccagatttatgaggaaagaaagggacagcatttgctgcccccacccctcttttccagtccttgccttccaaccaaaagaaatggatgttttggtggaaggacacttctttctatcaccctcttcagtcacctctatacactctacattttctctgcactttcaatgccctgttcttccaaacccctatcccaagttttatgacagttttaattgaagcatgattgtggtaattcgagccatctggagaatgctctggggagtacaccaggctcagctgtggacccctcaacttcctgctgctcagctactttgtccacattggatttggtccaaacatgtaagacttctaccctaatcagtatccttcagctttttacattaacccagtgtcctctgatataggtgagtcttgtggtagccactccaggatcctgattggggtgccaagagaaacagcaggatgttgaattgatcatcagatgccctctggaatggttagcatccaaggtgacagtgactgcattgaggcgctctattcttcttcacctctcaggaactgacttttattttttctatcaacacccagtaatctccctaactagttttaacccttattcctccctcatacctagcctaggacacagcctcgtgtttttgattttagagcagcaggaggaggacagcggcaggaggaggacctggaaa

SEQ ID NO: 454396 - DNA, 9487 bp, Homo sapiens
agggagcgtgcgggcggtactactggcgggaggagtaaagatggcggcgcgagggtctccgccctctgctccgggctgaagcgctctgagagaggcggcagcggcaactcgagccccaacagtaatttagtgttggtagttttggcagcagctgccgaggccggagcaatggcggaactggagcacctaggagggaagcgggcagagtcggcgcgaatgcggcgggcagagcagcttcggcgctggcggggctcgctgacagagcaggagcctgcggagcgacgaggcgcggggcggcagccgctgaccaggcgcgggagccccagggtccgcttcgaggacggtgctgtctttctggccgcctgctctagcggggacaccgacgaggtgagaaagcttctggcaagaggtgctgatatcaacacggtcaacgtggacggcttgacagccctgcaccaggcatgtattgatgaaaatttggacatggtgaagtttctggtggagaacagagccaatgtaaaccagcaagacaacgagggctggacaccccttcatgcagcagcttcctgtggctatctcaacatagcagagtatttcattaatcacggagccagtgtaggtattgtcaatagtgaaggtgaagttccctctgaccttgcagaagagccagccatgaaggatcttcttctggagcaagtaaagaagcaaggaattgatctagagcagtcaagaaaagaagaagagcagcagatgttgcaggatgcccgccagtggctcaacagtgggaaaatagaggatgtgaggcaggctcgctcaggggctacagcccttcatgtggctgctgccaagggctactctgaagtcctcagacttttaattcaggctggctatgaactcaatgttcaggattatgatggctggactcccctccatgctgctgcacactggggagtgaaggaggcttgctccatcctggcagaagcactttgtgacatggatattcgaaataaactgggccagacaccatttgatgtggctgatgagggtctcgtggagcatttggagttgctccagaagaagcagaatgtgcttcgaagtgaaaaggagacacggaataaactcattgagtcagatctgaacagcaagattcagagtgggttctttaagaacaaagagaagatgctctatgaggaggagacacctaagtcccaagaaatggaggaagaaaataaagaatctagtagctccagctcagaggaggaggaaggtgaagatgaagcttctgagtcagaaactgagaaggaggcagataaaaagccagaagcctttgtcaatcattccaactctgaaagcaagagtagtatcacagagcagataccagcaccagctcaaaataccttctctgcctcttctgctaggaggttctcttctggcctttttaacaagccagaagagcccaaagatgaatctccttcttcatggagattgggactgagaaaaactggcagccacaacatgctgagtgaggtggccaattccagggaacctataagggaccgaggctcttccatctatcgctcctcttcaagccctcgaatttctgctctactggacaacaaagataaggagagagaaaacaaaagctatattagttcactagcaccccggaagctcaacagcacaagtgatattgaagaaaaggagaacagagaatcagctgttaatctagtgaggagtggctcctatacccggcagctatggagggatgaagcaaaaggaaatgaaatcccacagacaattgctccctccacctatgtatcaacttacttgaaaaggactcctcacaaatcccaggccgacacaacagcagagaaaacagcagacaatgtctcttctagcaccccgctctgtgtgatcaccaatcgccctcttcctagcactgccaatggggttacagctactcctgtgctctccattactggaacagattcctctgtggaagccagggagaagaggaggtcctatctgactcctgtacgggatgaggaagcagagtctttacggaaagcacgctccagacaagctcggcagacacgaaggtctactcaaggtgtcaccctaacagaccttcaagaagcagaaaggacattcagccggtcgagggcagagaggcaagctcaggagcagcctcgtgagaagcccacagacactgaagggcttgaggggagccctgagaagcatgagccctcagcagttccagcaacagaagctggggagggccagcagccctggggcaggagtctggatgaagagcctatctgtcatcgcctgaggtgcccagctcagccagacaaacccaccacgccagcatctccttctacgtcaagaccctcactctacaccagttcccacctgctatggacaaatagattttcagtccctgattctgagagttcagagactaccacaaacactacaactgcaaaggaaatggacaaaaatgagaatgaagaagcagatttggatgagcagtcctctaagaggctgtccatccgagagaggaggcggcccaaggaacgacgaagaggcacaggcatcaatttctggacaaaggatgaggatgaaactgatggctctgaagaggtcaaagaaacgtggcatgaaagactttctaggttggaatcgggaggtagtaatcctacaaccagtgattcttacggtgaccgggcttcagcaagagcccgtcgggaggcccgggaggcccgcctagccaccctgaccagccgtgtagaagaagacagcaacagagattataaaaaactctatgagagtgctctgactgaaaaccaaaaactgaaaacaaaacttcaggaagcccagctagagctagcagatataaagtccaagcttgagaaggtggcccagcagaaacaagaaaagacctctgaccgatcatcagtgctggagatggagaaacgggagaggcgagccttggagcgcaaaatgtcagaaatggaggaagaaatgaaggtgttaacagaactgaaatccgacaaccagaggctgaaagatgaaaatggtgccctcatcagagtcatcagcaaactgtccaagtaggctaggctccagatttatgaggaaagaaagggacagcatttgctgcccccacccctcttttccagtccttgccttccaaccaaaagaaatggatgttttggtggaaggacacttctttctatcaccctcttcagtcacctctatacactctacattttctctgcactttcaatgccctgttcttccaaacccctatcccaagttttatgacagttttaattgaagcatgattgtggtaattcgagccatctggagaatgctctggggagtacaccaggctcagctgtggacccctcaacttcctgctgctcagctactttgtccacattggatttggtccaaacatgtaagacttctaccctaatcagtatccttcagctttttacattaacccagtgtcctctgatataggtgagtcttgtggtagccactccaggatcctgattggggtgccaagagaaacagcaggatgttgaattgatcatcagatgccctctggaatggttagcatccaaggtgacagtgactgcattgaggcgctctattcttcttcacctctcaggaactgacttttattttttctatcaacacccagtaatctccctaactagttttaacccttattcctccctcatacctagccatttctccaaggcgcaaatggccctggcttcatttattcctttcctttctatccttttatatttttcccttccccaccccctcactcaatggtataaaagctaggacagagcacctgacctcagttgtctttggccattgtgggaagtcattattctggagacaagaaaatcatcactctggtgccttggtggcagcaccactgcctgctccctggaaggtagactatggcataagtgtcagctcattgttttcgtctcccacttatcttcccccttcaaagtgattttctttataagaaaatttgggctctgaatactccattctgcctcacttccttgaccttgttttcctctcttcgccctgacacctgcttctaatgagaaatgaagtcagtgcaaggaggaatgagaggtggggaggggagattgttgagagatggactaggaagtggaagcaggctggaaagacacatatggcgaaagtcaagtatctgaggccacttgcaacattgtgacaaagaagatggaagatagcagcctactgggctgtgagaatagtggtgaatttgattatttccagtggttagatttagcagagagatttactttcttagaaattaataggggaaatggcacttaatagaggtttaatggaatgaagtactttcaacccattgatgagagtcatggaagtttagagtggcaagacccagaggtcattaggtccagctttctattattgtgtcacagggacccctgctaccacagctttcacccatgggcatggtcaggtagcctctggtggctatgcatttattactcaaaagttgggcaactctaataacgagagagtttttcctcatatcagctgaagtctgcctgtggattctccttgtagtccagatctactatctgcaactctttaacggcacttgagatatgtgcagtgggtggtctccccctcagtcttactttgagctgctgttactctagtcctttaagtcattcctcatatggcatgcttttcttacctgtcacatcttggccatcctcctctagacaaaaccagcctttaaaatatcatgtccaggcctggaaagaatacaaatccagtgcaaaattaaaccattagttcttgatgataacctagcattaatacttacagtattttctttttgtaggagttttatcccttggttcacttgagtgtgcaagtcattaaatcctcatcattttagggttgccagtgatattcagtgtttagagtggttcattcccttaatatatactacctctgtctgttaattctttcctaacatgacatgtagctctccatggtcctccctctgaaacaccacatgctgtttaaactagaagctgtaattcaagatcccaattccaccaggtgcagtggctcatgcctgtaatcccagcacttcaggaggccgaggtggacagatcacgaggtcaggagttcgagaccatcctggctaacacggtgaaacccaatctctactaaaaatacaaaaaattagccaggcgtggtggcaggcgcctgtagtcccagctactcaggaggctgaggcaggagaatggcgtgaacccgggaggcggagcttgcagtgagccttgatcacgccactgcactccagcctgggtgacagagcaagactccatctcaaaaaaaataataataataaataaataaaaaatcccaattacagaacaggagatatgtttcctctgacaaaaccccatttttagagtgtataaaattctgtctttcatttccaaccatttttcaagagaagctgctactatcttgagacttcgtattatcatgggagtactgtaagttcagttctcagggaatgctaaattagagtaataagttttatatccttcattctgggagaggaaatcaacataaggtgttgactaattgattatcctggaacattttgaatattggggaaggaagatgatacttctttctcaagaaaagaaaattggattattaggaatacatcttgacccttttccactcaatagaccagggaaaggggttacagagagcctcctcagatctgtttgtgcctttcaaaagtactgggggcagattctcaaaactcttagattggtgttgcatccctgccacttcacatgacccttccatgttaaagctgacttttcttgccagaaagttttccttgtgacaagaaatttgcaagcttttcaatctcaggaatactggattctatagccaagaactcatgaaagtaagtgtaaactatcctaggtaatttcaggtactttctcttatgcaattaattttattaactgatttctggtctatctccagagataaaataccattccttcacaactgtattgtctggaagccccatgagatggtaattataggccttctactagccagcagttctctctggatactggcatcagcaggtctcctttttcttgtgctgcttggacaggtacctactgctggcctcttcagtggccacaatcctcagtcctcacctgctggtttggagactcatgagcaccccaggcagctcaagctgaataaatagctgcagacatggccaacaacatggggctcaggtctgtcacttaacttagagtctttacatgaaatatcagaatgggaaagagaatgttcctggtaaaactctgttttcattaatttgttatttttcaaaaaccgagccacacctttggaagtaatgatttggccattccagagattctggggctaaagtttgtttttccagggctgctgatccttttccagatagctccagagtatgatgaccccagccccatcccaatctctagcgaaagggttatgcaaatctcagggtgttgcctctaaagaatctaaagaatagacatgctttgggcttactcagtgtaccagattctctagtgggccattctcatttgatgttccctagaacctccctgtcttccaactgcaggatgtgtttacttctcttctgggcttcccctggtttctgtcctagttcccaccccaagtttaagaagacttagattcatttattgctatctgaggccactagtgagatttcagatctctcttttgcaacattttacccatttcccttccccaaaccatgtgcttattagatggttccactcaggaagcaaggaagctaaaactcaagttaatggtctgtggatcccacgaaagtgtgtgtaaactactgactgtttctccactagaggcatttaattgagccaaagatgatggaagaagaaactctcaaagccatgtactttgttaggtgtctggatttttggcctgtttgcagcctctcctagccacagacagacactgtctcctctcagagaaaggccagtgtttcggtccaggccactggtgagtgtcggcacccttgaggtgggcatggagtgagcagaagaagcctggagaagagagaactatttaaaagtgttgccagttattcagcttccaggcggctttgcacctccaaaggtgcaaaaaggaaaaagaaagcagaaaggattcagcatttaagcagaaagaaaagggaaattctactctaccagatgagccactggttccactggagcttatcagtgaagtaacactgcaggagccctggtatccttccctcagagatatcatcaggggccctcaaaccccattgtttatgccagcactgaccgcactttaagcacacacttaccaatcagaggtcgtgtaattggcctaaatctaggcccagttattactacaaatcttagtcaccatactctctcgcccaggctggagtgcagtggtgtgatctcagctcactgcaacctccacctcccaggctcaagggatcctctcacctcagctcccgagcagctaggactgcaggtgtgcaccaccatgcccagctaatttttgaatttttttgtagagatggggttttgccatgttgcccaggctggtctgaagctgctgggctcaagcaatccacctggctgggcctcccaaagcgataggattacaggcgtaagggcccacgcccagcctaccatactgattttcaaggcagggtctaacccttcataagatgtgagttcttccaacccaataagcaggcagctttgaggacaaaaaggcaacattaaaagataagaccctagaagtcagaacatctgtattccaaggccaccccttctccttttagtcatgtgactttgggcaggtcaccctccctgtctgtaaaatgaggttggactggataatctttatgtgccctttccttttggcttaaaattctgtgatttattcattcttaggaagatcagcatatttattgggatttctgcttcaaaaattctttctaacctcaaaaatccaagtccagaattttttgttttcttctggatttaaactgtttaatatgagcacatcaaggttgacttctcatcctttttgggaagtgaatttaatattgagggtaattgaatgatgttgcaatggctttccctcctgctggcttggtaagaatattaaagcctgcagaggtggaaattggagctcatggagaaatggatagaaagcaatttgttgcaggcagcctttggacaagttgttttaataggaaatagacctgctgcttcataggtttcctcaaccacctttcctcagctttcttaaaatgggatctacattggctcttcacacccaaatagcagactaatcgtttttctgcttagcaccgtctggttcattgtcttgaactctgccttacagcagcaagaaaattttcctcgacaagaacctcaatctttagttccattgagctccccctctggattttggacttaccagaagtaggaggttctgataccattcaagatggtctttccttcaaagcaggtctgaagaggagactaccaaagcagtgtttacaaacccagagtccacacaaccatattgcatagaacagcacttggctttcacaagcctcctacaggacctggtgtaattggagtgaaagggcagagaccctggaagtggaggtggctgtgtgctgcgatgggaagaaggcagaaggcccaggggctttggacatagagcagggtggaagctgcaagtactgggaaggaagagagtttcacagaaacaaagctttgtcacacagaaatgagttctgtctcactggtgacttcatccctcaggctccagctgagcagagattttaatcagcttccttaatgggtattgacactgctcaggaagcagtagaccctgtcagggacagctattgatcttttgtgttctgattagattggaaaatagatcaacttcattgtagtccaggaactgttggtcacagctactaggaatgaggtgatttctgagggctgagaaaaaacacagaatcttggccagcagccagcagctgcatggtgaaagatgcattcacttctcctttgagagttggggttgagggcaaacatagaacccaggtttggcttacaacccagtgtcccggaagccctccttcgggagaactgtaagtaagagcgggtacaagcacttattatagtaagtttgaaaactggagtttattccaaaaagtagaaaaactgcttagtactttgtctatgtcttccggcgctgctgttgcatatggtttaatatagatagttgatgt

SEQ ID NO: 454397 - DNA, 10654 bp, Homo sapiens
agggagcgtgcgggcggtactactggcgggaggagtaaagatggcggcgcgagggtctccgccctctgctccgggctgaagcgctctgagagaggcggcagcggcaactcgagccccaacagtaatttagtgttggtagttttggcagcagctgccgaggccggagcaatggcggaactggagcacctaggagggaagcgggcagagtcggcgcgaatgcggcgggcagagcagcttcggcgctggcggggctcgctgacagagcaggagcctgcggagcgacgaggcgcggggcggcagccgctgaccaggcgcgggagccccagggtccgcttcgaggacggtgctgtctttctggccgcctgctctagcggggacaccgacgaggtgagaaagcttctggcaagaggtgctgatatcaacacggtcaacgtggacggcttgacagccctgcaccaggcatgtattgatgaaaatttggacatggtgaagtttctggtggagaacagagccaatgtaaaccagcaagacaacgagggctggacaccccttcatgcagcagcttcctgtggctatctcaacatagcagagtatttcattaatcacggagccagtgtaggtattgtcaatagtgaaggtgaagttccctctgaccttgcagaagagccagccatgaaggatcttcttctggagcaagtaaagaagcaaggaattgatctagagcagtcaagaaaagaagaagagcagcagatgttgcaggatgcccgccagtggctcaacagtgggaaaatagaggatgtgaggcaggctcgctcaggggctacagcccttcatgtggctgctgccaagggctactctgaagtcctcagacttttaattcaggctggctatgaactcaatgttcaggattatgatggctggactcccctccatgctgctgcacactggggagtgaaggaggcttgctccatcctggcagaagcactttgtgacatggatattcgaaataaactgggccagacaccatttgatgtggctgatgagggtctcgtggagcatttggagttgctccagaagaagcagaatgtgcttcgaagtgaaaaggagacacggaataaactcattgagtcagatctgaacagcaagattcagagtgggttctttaagaacaaagagaagatgctctatgaggaggagacacctaagtcccaagaaatggaggaagaaaataaagaatctagtagctccagctcagaggaggaggaaggtgaagatgaagcttctgagtcagaaactgagaaggaggcagataaaaagccagaagcctttgtcaatcattccaactctgaaagcaagagtagtatcacagagcagataccagcaccagctcaaaataccttctctgcctcttctgctaggaggttctcttctggcctttttaacaagccagaagagcccaaagatgaatctccttcttcatggagattgggactgagaaaaactggcagccacaacatgctgagtgaggtggccaattccagggaacctataagggaccgaggctcttccatctatcgctcctcttcaagccctcgaatttctgctctactggacaacaaagataaggagagagaaaacaaaagctatattagttcactagcaccccggaagctcaacagcacaagtgatattgaagaaaaggagaacagagaatcagctgttaatctagtgaggagtggctcctatacccggcagctatggagggatgaagcaaaaggaaatgaaatcccacagacaattgctccctccacctatgtatcaacttacttgaaaaggactcctcacaaatcccaggccgacacaacagcagagaaaacagcagacaatgtctcttctagcaccccgctctgtgtgatcaccaatcgccctcttcctagcactgccaatggggttacagctactcctgtgctctccattactggaacagattcctctgtggaagccagggagaagaggaggtcctatctgactcctgtacgggatgaggaagcagagtctttacggaaagcacgctccagacaagctcggcagacacgaaggtctactcaaggtgtcaccctaacagaccttcaagaagcagaaaggacattcagccggtcgagggcagagaggcaagctcaggagcagcctcgtgagaagcccacagacactgaagggcttgaggggagccctgagaagcatgagccctcagcagttccagcaacagaagctggggagggccagcagccctggggcaggagtctggatgaagagcctatctgtcatcgcctgaggtgcccagctcagccagacaaacccaccacgccagcatctccttctacgtcaagaccctcactctacaccagttcccacctgctatggacaaatagattttcagtccctgattctgagagttcagagactaccacaaacactacaactgcaaaggaaatggacaaaaatgagaatgaagaagcagatttggatgagcagtcctctaagaggctgtccatccgagagaggaggcggcccaaggaacgacgaagaggcacaggcatcaatttctggacaaaggatgaggatgaaactgatggctctgaagaggtcaaagaaacgtggcatgaaagactttctaggttggaatcgggaggtagtaatcctacaaccagtgattcttacggtgaccgggcttcagcaagagcccgtcgggaggcccgggaggcccgcctagccaccctgaccagccgtgtagaagaagacagcaacagagattataaaaaactctatgagagtgctctgactgaaaaccaaaaactgaaaacaaaacttcaggaagcccagctagagctagcagatataaagtccaagcttgagaaggtggcccagcagaaacaagaaaagacctctgaccgatcatcagtgctggagatggagaaacgggagaggcgagccttggagcgcaaaatgtcagaaatggaggaagaaatgaaggtgttaacagaactgaaatccgacaaccagaggctgaaagatgaaaatggtgccctcatcagagtcatcagcaaactgtccaagtaggctaggctccagatttatgaggaaagaaagggacagcatttgctgcccccacccctcttttccagtccttgccttccaaccaaaagaaatggatgttttggtggaaggacacttctttctatcaccctcttcagtcacctctatacactctacattttctctgcactttcaatgccctgttcttccaaacccctatcccaagttttatgacagttttaattgaagcatgattgtggtaattcgagccatctggagaatgctctggggagtacaccaggctcagctgtggacccctcaacttcctgctgctcagctactttgtccacattggatttggtccaaacatgtaagacttctaccctaatcagtatccttcagctttttacattaacccagtgtcctctgatataggtgagtcttgtggtagccactccaggatcctgattggggtgccaagagaaacagcaggatgttgaattgatcatcagatgccctctggaatggttagcatccaaggtgacagtgactgcattgaggcgctctattcttcttcacctctcaggaactgacttttattttttctatcaacacccagtaatctccctaactagttttaacccttattcctccctcatacctagccatttctccaaggcgcaaatggccctggcttcatttattcctttcctttctatccttttatatttttcccttccccaccccctcactcaatggtataaaagctaggacagagcacctgacctcagttgtctttggccattgtgggaagtcattattctggagacaagaaaatcatcactctggtgccttggtggcagcaccactgcctgctccctggaaggtagactatggcataagtgtcagctcattgttttcgtctcccacttatcttcccccttcaaagtgattttctttataagaaaatttgggctctgaatactccattctgcctcacttccttgaccttgttttcctctcttcgccctgacacctgcttctaatgagaaatgaagtcagtgcaaggaggaatgagaggtggggaggggagattgttgagagatggactaggaagtggaagcaggctggaaagacacatatggcgaaagtcaagtatctgaggccacttgcaacattgtgacaaagaagatggaagatagcagcctactgggctgtgagaatagtggtgaatttgattatttccagtggttagatttagcagagagatttactttcttagaaattaataggggaaatggcacttaatagaggtttaatggaatgaagtactttcaacccattgatgagagtcatggaagtttagagtggcaagacccagaggtcattaggtccagctttctattattgtgtcacagggacccctgctaccacagctttcacccatgggcatggtcaggtagcctctggtggctatgcatttattactcaaaagttgggcaactctaataacgagagagtttttcctcatatcagctgaagtctgcctgtggattctccttgtagtccagatctactatctgcaactctttaacggcacttgagatatgtgcagtgggtggtctccccctcagtcttactttgagctgctgttactctagtcctttaagtcattcctcatatggcatgcttttcttacctgtcacatcttggccatcctcctctagacaaaaccagcctttaaaatatcatgtccaggcctggaaagaatacaaatccagtgcaaaattaaaccattagttcttgatgataacctagcattaatacttacagtattttctttttgtaggagttttatcccttggttcacttgagtgtgcaagtcattaaatcctcatcattttagggttgccagtgatattcagtgtttagagtggttcattcccttaatatatactacctctgtctgttaattctttcctaacatgacatgtagctctccatggtcctccctctgaaacaccacatgctgtttaaactagaagctgtaattcaagatcccaattccaccaggtgcagtggctcatgcctgtaatcccagcacttcaggaggccgaggtggacagatcacgaggtcaggagttcgagaccatcctggctaacacggtgaaacccaatctctactaaaaatacaaaaaattagccaggcgtggtggcaggcgcctgtagtcccagctactcaggaggctgaggcaggagaatggcgtgaacccgggaggcggagcttgcagtgagccttgatcacgccactgcactccagcctgggtgacagagcaagactccatctcaaaaaaaataataataataaataaataaaaaatcccaattacagaacaggagatatgtttcctctgacaaaaccccatttttagagtgtataaaattctgtctttcatttccaaccatttttcaagagaagctgctactatcttgagacttcgtattatcatgggagtactgtaagttcagttctcagggaatgctaaattagagtaataagttttatatccttcattctgggagaggaaatcaacataaggtgttgactaattgattatcctggaacattttgaatattggggaaggaagatgatacttctttctcaagaaaagaaaattggattattaggaatacatcttgacccttttccactcaatagaccagggaaaggggttacagagagcctcctcagatctgtttgtgcctttcaaaagtactgggggcagattctcaaaactcttagattggtgttgcatccctgccacttcacatgacccttccatgttaaagctgacttttcttgccagaaagttttccttgtgacaagaaatttgcaagcttttcaatctcaggaatactggattctatagccaagaactcatgaaagtaagtgtaaactatcctaggtaatttcaggtactttctcttatgcaattaattttattaactgatttctggtctatctccagagataaaataccattccttcacaactgtattgtctggaagccccatgagatggtaattataggccttctactagccagcagttctctctggatactggcatcagcaggtctcctttttcttgtgctgcttggacaggtacctactgctggcctcttcagtggccacaatcctcagtcctcacctgctggtttggagactcatgagcaccccaggcagctcaagctgaataaatagctgcagacatggccaacaacatggggctcaggtctgtcacttaacttagagtctttacatgaaatatcagaatgggaaagagaatgttcctggtaaaactctgttttcattaatttgttatttttcaaaaaccgagccacacctttggaagtaatgatttggccattccagagattctggggctaaagtttgtttttccagggctgctgatccttttccagatagctccagagtatgatgaccccagccccatcccaatctctagcgaaagggttatgcaaatctcagggtgttgcctctaaagaatctaaagaatagacatgctttgggcttactcagtgtaccagattctctagtgggccattctcatttgatgttccctagaacctccctgtcttccaactgcaggatgtgtttacttctcttctgggcttcccctggtttctgtcctagttcccaccccaagtttaagaagacttagattcatttattgctatctgaggccactagtgagatttcagatctctcttttgcaacattttacccatttcccttccccaaaccatgtgcttattagatggttccactcaggaagcaaggaagctaaaactcaagttaatggtctgtggatcccacgaaagtgtgtgtaaactactgactgtttctccactagaggcatttaattgagccaaagatgatggaagaagaaactctcaaagccatgtactttgttaggtgtctggatttttggcctgtttgcagcctctcctagccacagacagacactgtctcctctcagagaaaggccagtgtttcggtccaggccactggtgagtgtcggcacccttgaggtgggcatggagtgagcagaagaagcctggagaagagagaactatttaaaagtgttgccagttattcagcttccaggcggctttgcacctccaaaggtgcaaaaaggaaaaagaaagcagaaaggattcagcatttaagcagaaagaaaagggaaattctactctaccagatgagccactggttccactggagcttatcagtgaagtaacactgcaggagccctggtatccttccctcagagatatcatcaggggccctcaaaccccattgtttatgccagcactgaccgcactttaagcacacacttaccaatcagaggtcgtgtaattggcctaaatctaggcccagttattactacaaatcttagtcaccatactctctcgcccaggctggagtgcagtggtgtgatctcagctcactgcaacctccacctcccaggctcaagggatcctctcacctcagctcccgagcagctaggactgcaggtgtgcaccaccatgcccagctaatttttgaatttttttgtagagatggggttttgccatgttgcccaggctggtctgaagctgctgggctcaagcaatccacctggctgggcctcccaaagcgataggattacaggcgtaagggcccacgcccagcctaccatactgattttcaaggcagggtctaacccttcataagatgtgagttcttccaacccaataagcaggcagctttgaggacaaaaaggcaacattaaaagataagaccctagaagtcagaacatctgtattccaaggccaccccttctccttttagtcatgtgactttgggcaggtcaccctccctgtctgtaaaatgaggttggactggataatctttatgtgccctttccttttggcttaaaattctgtgatttattcattcttaggaagatcagcatatttattgggatttctgcttcaaaaattctttctaacctcaaaaatccaagtccagaattttttgttttcttctggatttaaactgtttaatatgagcacatcaaggttgacttctcatcctttttgggaagtgaatttaatattgagggtaattgaatgatgttgcaatggctttccctcctgctggcttggtaagaatattaaagcctgcagaggtggaaattggagctcatggagaaatggatagaaagcaatttgttgcaggcagcctttggacaagttgttttaataggaaatagacctgctgcttcataggtttcctcaaccacctttcctcagctttcttaaaatgggatctacattggctcttcacacccaaatagcagactaatcgtttttctgcttagcaccgtctggttcattgtcttgaactctgccttacagcagcaagaaaattttcctcgacaagaacctcaatctttagttccattgagctccccctctggattttggacttaccagaagtaggaggttctgataccattcaagatggtctttccttcaaagcaggtctgaagaggagactaccaaagcagtgtttacaaacccagagtccacacaaccatattgcatagaacagcacttggctttcacaagcctcctacaggacctggtgtaattggagtgaaagggcagagaccctggaagtggaggtggctgtgtgctgcgatgggaagaaggcagaaggcccaggggctttggacatagagcagggtggaagctgcaagtactgggaaggaagagagtttcacagaaacaaagctttgtcacacagaaatgagttctgtctcactggtgacttcatccctcaggctccagctgagcagagattttaatcagcttccttaatgggtattgacactgctcaggaagcagtagaccctgtcagggacagctattgatcttttgtgttctgattagattggaaaatagatcaacttcattgtagtccaggaactgttggtcacagctactaggaatgaggtgatttctgagggctgagaaaaaacacagaatcttggccagcagccagcagctgcatggtgaaagatgcattcacttctcctttgagagttggggttgagggcaaacatagaacccaggtttggcttacaacccagtgtcccggaagccctccttcgggagaactgtaagtaagaggtgggtgtgtctaaagacaataccattaatgaatgttctggccttacctaaaaaggtttagcaatttggggataactcttggatctagcttatgtgcgttcacatgcacatttgctagcccagagcttttaaaatgaggtctggcatatacttgattacaaatgaaaactcagaaaccaattttatttattaaatcatatcttttgtttttccccctcccttctaatcccccaaaggacctatttgagctgttccccaattcatctgcttattttggaccatgaatctgccagagtgatattttctgttatttctcctccaaatttttccctgatgtttccaataaagatttacttgggtggccccttaaggtgacatcaggatgctcttatgtccttccagaataagcatacacttcactcctctccctttcatctccctctgcattcttaattccttgcttttctcacttggagccgagggtgctttagagaggtggttttccatgaatcagccaagattcctgtagaagttgggtataccaaccaccaccaccaccgccccctattccagtttcaaagctcctcggctatgctaatgtcccctcagagatgaggtttgacttttaggcccgtatgactcctccatagcctggccaaggagaccatgagtagccatgtctggtttactctttatcctgagactgtttgtttatagcttaaaacagaagtgtgtcttcccagcacaaacctaatcaatcagtgtatcagtgcatccttcttggagaagctacagcctgtgctcagttgagtggttcacactcagactttggctttatggttttccttcctccttgtctttgccctgaccttgatcaacaggggtgaaaagaaccaccctgaggtttccatgcctctcccattttagtggtagcattttgtgtctttactccacccttcaccctagttccaccaaggttcacacaccagatgtaactgtttttcagctgagttgtatggattaacttcagtccactgtaaatacacctgggatggggtggggttggggttgtttagggagaagcagccagacttgctttgtgaactgaatgtatttttatgcaattttgagtggcctttcaaccctaagatgaatggttttgttttactggttgttgttatatagttttgagtattctgtgtttgaaagtttgggaataataatattcacttctatatgatgcctgtaaacacaacagtatttataaatgagtaaataaaactgtgttttaactttg

SEQ ID NO: 454398 - DNA, 9467 bp, Homo sapiens
gttgctggtacaatctcataaaatgggctccagtgtttagagaaggacagtcagaggagtggccacctgtttgttgaaaattgggcttctgggaaagttgctgcacaagtgtgtggcaaggtgtgtctgaggtagcttgacctgctttcacctggaatgatttgatctggcaatagagttccttgccattcctggttttatggaaatcagaggcacaggaagttgatctgggtgttctggggaattgagacaagcctctgccatagtttgttagtactctgtgtttggaggctaactccagtgtgctgagttgagacatcagcaagtgctgggcctggaatgtcagaagcagcaggtcctatctgactcctgtacgggatgaggaagcagagtctttacggaaagcacgctccagacaagctcggcagacacgaaggtctactcaaggtgtcaccctaacagaccttcaagaagcagaaaggacattcagccggtcgagggcagagaggcaagctcaggagcagcctcgtgagaagcccacagacactgaagggcttgaggggagccctgagaagcatgagccctcagcagttccagcaacagaagctggggagggccagcagccctggggcaggagtctggatgaagagcctatctgtcatcgcctgaggtgcccagctcagccagacaaacccaccacgccagcatctccttctacgtcaagaccctcactctacaccagttcccacctgctatggacaaatagattttcagtccctgattctgagagttcagagactaccacaaacactacaactgcaaaggaaatggacaaaaatgagaatgaagaagcagatttggatgagcagtcctctaagaggctgtccatccgagagaggaggcggcccaaggaacgacgaagaggcacaggcatcaatttctggacaaaggatgaggatgaaactgatggctctgaagaggtcaaagaaacgtggcatgaaagactttctaggttggaatcgggaggtagtaatcctacaaccagtgattcttacggtgaccgggcttcagcaagagcccgtcgggaggcccgggaggcccgcctagccaccctgaccagccgtgtagaagaagacagcaacagagattataaaaaactctatgagagtgctctgactgaaaaccaaaaactgaaaacaaaacttcaggaagcccagctagagctagcagatataaagtccaagcttgagaaggtggcccagcagaaacaagaaaagacctctgaccgatcatcagtgctggagatggagaaacgggagaggcgagccttggagcgcaaaatgtcagaaatggaggaagaaatgaaggtgttaacagaactgaaatccgacaaccagaggctgaaagatgaaaatggtgccctcatcagagtcatcagcaaactgtccaagtaggctaggctccagatttatgaggaaagaaagggacagcatttgctgcccccacccctcttttccagtccttgccttccaaccaaaagaaatggatgttttggtggaaggacacttctttctatcaccctcttcagtcacctctatacactctacattttctctgcactttcaatgccctgttcttccaaacccctatcccaagttttatgacagttttaattgaagcatgattgtggtaattcgagccatctggagaatgctctggggagtacaccaggctcagctgtggacccctcaacttcctgctgctcagctactttgtccacattggatttggtccaaacatgtaagacttctaccctaatcagtatccttcagctttttacattaacccagtgtcctctgatataggtgagtcttgtggtagccactccaggatcctgattggggtgccaagagaaacagcaggatgttgaattgatcatcagatgccctctggaatggttagcatccaaggtgacagtgactgcattgaggcgctctattcttcttcacctctcaggaactgacttttattttttctatcaacacccagtaatctccctaactagttttaacccttattcctccctcatacctagccatttctccaaggcgcaaatggccctggcttcatttattcctttcctttctatccttttatatttttcccttccccaccccctcactcaatggtataaaagctaggacagagcacctgacctcagttgtctttggccattgtgggaagtcattattctggagacaagaaaatcatcactctggtgccttggtggcagcaccactgcctgctccctggaaggtagactatggcataagtgtcagctcattgttttcgtctcccacttatcttcccccttcaaagtgattttctttataagaaaatttgggctctgaatactccattctgcctcacttccttgaccttgttttcctctcttcgccctgacacctgcttctaatgagaaatgaagtcagtgcaaggaggaatgagaggtggggaggggagattgttgagagatggactaggaagtggaagcaggctggaaagacacatatggcgaaagtcaagtatctgaggccacttgcaacattgtgacaaagaagatggaagatagcagcctactgggctgtgagaatagtggtgaatttgattatttccagtggttagatttagcagagagatttactttcttagaaattaataggggaaatggcacttaatagaggtttaatggaatgaagtactttcaacccattgatgagagtcatggaagtttagagtggcaagacccagaggtcattaggtccagctttctattattgtgtcacagggacccctgctaccacagctttcacccatgggcatggtcaggtagcctctggtggctatgcatttattactcaaaagttgggcaactctaataacgagagagtttttcctcatatcagctgaagtctgcctgtggattctccttgtagtccagatctactatctgcaactctttaacggcacttgagatatgtgcagtgggtggtctccccctcagtcttactttgagctgctgttactctagtcctttaagtcattcctcatatggcatgcttttcttacctgtcacatcttggccatcctcctctagacaaaaccagcctttaaaatatcatgtccaggcctggaaagaatacaaatccagtgcaaaattaaaccattagttcttgatgataacctagcattaatacttacagtattttctttttgtaggagttttatcccttggttcacttgagtgtgcaagtcattaaatcctcatcattttagggttgccagtgatattcagtgtttagagtggttcattcccttaatatatactacctctgtctgttaattctttcctaacatgacatgtagctctccatggtcctccctctgaaacaccacatgctgtttaaactagaagctgtaattcaagatcccaattccaccaggtgcagtggctcatgcctgtaatcccagcacttcaggaggccgaggtggacagatcacgaggtcaggagttcgagaccatcctggctaacacggtgaaacccaatctctactaaaaatacaaaaaattagccaggcgtggtggcaggcgcctgtagtcccagctactcaggaggctgaggcaggagaatggcgtgaacccgggaggcggagcttgcagtgagccttgatcacgccactgcactccagcctgggtgacagagcaagactccatctcaaaaaaaataataataataaataaataaaaaatcccaattacagaacaggagatatgtttcctctgacaaaaccccatttttagagtgtataaaattctgtctttcatttccaaccatttttcaagagaagctgctactatcttgagacttcgtattatcatgggagtactgtaagttcagttctcagggaatgctaaattagagtaataagttttatatccttcattctgggagaggaaatcaacataaggtgttgactaattgattatcctggaacattttgaatattggggaaggaagatgatacttctttctcaagaaaagaaaattggattattaggaatacatcttgacccttttccactcaatagaccagggaaaggggttacagagagcctcctcagatctgtttgtgcctttcaaaagtactgggggcagattctcaaaactcttagattggtgttgcatccctgccacttcacatgacccttccatgttaaagctgacttttcttgccagaaagttttccttgtgacaagaaatttgcaagcttttcaatctcaggaatactggattctatagccaagaactcatgaaagtaagtgtaaactatcctaggtaatttcaggtactttctcttatgcaattaattttattaactgatttctggtctatctccagagataaaataccattccttcacaactgtattgtctggaagccccatgagatggtaattataggccttctactagccagcagttctctctggatactggcatcagcaggtctcctttttcttgtgctgcttggacaggtacctactgctggcctcttcagtggccacaatcctcagtcctcacctgctggtttggagactcatgagcaccccaggcagctcaagctgaataaatagctgcagacatggccaacaacatggggctcaggtctgtcacttaacttagagtctttacatgaaatatcagaatgggaaagagaatgttcctggtaaaactctgttttcattaatttgttatttttcaaaaaccgagccacacctttggaagtaatgatttggccattccagagattctggggctaaagtttgtttttccagggctgctgatccttttccagatagctccagagtatgatgaccccagccccatcccaatctctagcgaaagggttatgcaaatctcagggtgttgcctctaaagaatctaaagaatagacatgctttgggcttactcagtgtaccagattctctagtgggccattctcatttgatgttccctagaacctccctgtcttccaactgcaggatgtgtttacttctcttctgggcttcccctggtttctgtcctagttcccaccccaagtttaagaagacttagattcatttattgctatctgaggccactagtgagatttcagatctctcttttgcaacattttacccatttcccttccccaaaccatgtgcttattagatggttccactcaggaagcaaggaagctaaaactcaagttaatggtctgtggatcccacgaaagtgtgtgtaaactactgactgtttctccactagaggcatttaattgagccaaagatgatggaagaagaaactctcaaagccatgtactttgttaggtgtctggatttttggcctgtttgcagcctctcctagccacagacagacactgtctcctctcagagaaaggccagtgtttcggtccaggccactggtgagtgtcggcacccttgaggtgggcatggagtgagcagaagaagcctggagaagagagaactatttaaaagtgttgccagttattcagcttccaggcggctttgcacctccaaaggtgcaaaaaggaaaaagaaagcagaaaggattcagcatttaagcagaaagaaaagggaaattctactctaccagatgagccactggttccactggagcttatcagtgaagtaacactgcaggagccctggtatccttccctcagagatatcatcaggggccctcaaaccccattgtttatgccagcactgaccgcactttaagcacacacttaccaatcagaggtcgtgtaattggcctaaatctaggcccagttattactacaaatcttagtcaccatactctctcgcccaggctggagtgcagtggtgtgatctcagctcactgcaacctccacctcccaggctcaagggatcctctcacctcagctcccgagcagctaggactgcaggtgtgcaccaccatgcccagctaatttttgaatttttttgtagagatggggttttgccatgttgcccaggctggtctgaagctgctgggctcaagcaatccacctggctgggcctcccaaagcgataggattacaggcgtaagggcccacgcccagcctaccatactgattttcaaggcagggtctaacccttcataagatgtgagttcttccaacccaataagcaggcagctttgaggacaaaaaggcaacattaaaagataagaccctagaagtcagaacatctgtattccaaggccaccccttctccttttagtcatgtgactttgggcaggtcaccctccctgtctgtaaaatgaggttggactggataatctttatgtgccctttccttttggcttaaaattctgtgatttattcattcttaggaagatcagcatatttattgggatttctgcttcaaaaattctttctaacctcaaaaatccaagtccagaattttttgttttcttctggatttaaactgtttaatatgagcacatcaaggttgacttctcatcctttttgggaagtgaatttaatattgagggtaattgaatgatgttgcaatggctttccctcctgctggcttggtaagaatattaaagcctgcagaggtggaaattggagctcatggagaaatggatagaaagcaatttgttgcaggcagcctttggacaagttgttttaataggaaatagacctgctgcttcataggtttcctcaaccacctttcctcagctttcttaaaatgggatctacattggctcttcacacccaaatagcagactaatcgtttttctgcttagcaccgtctggttcattgtcttgaactctgccttacagcagcaagaaaattttcctcgacaagaacctcaatctttagttccattgagctccccctctggattttggacttaccagaagtaggaggttctgataccattcaagatggtctttccttcaaagcaggtctgaagaggagactaccaaagcagtgtttacaaacccagagtccacacaaccatattgcatagaacagcacttggctttcacaagcctcctacaggacctggtgtaattggagtgaaagggcagagaccctggaagtggaggtggctgtgtgctgcgatgggaagaaggcagaaggcccaggggctttggacatagagcagggtggaagctgcaagtactgggaaggaagagagtttcacagaaacaaagctttgtcacacagaaatgagttctgtctcactggtgacttcatccctcaggctccagctgagcagagattttaatcagcttccttaatgggtattgacactgctcaggaagcagtagaccctgtcagggacagctattgatcttttgtgttctgattagattggaaaatagatcaacttcattgtagtccaggaactgttggtcacagctactaggaatgaggtgatttctgagggctgagaaaaaacacagaatcttggccagcagccagcagctgcatggtgaaagatgcattcacttctcctttgagagttggggttgagggcaaacatagaacccaggtttggcttacaacccagtgtcccggaagccctccttcgggagaactgtaagtaagaggtgggtgtgtctaaagacaataccattaatgaatgttctggccttacctaaaaaggtttagcaatttggggataactcttggatctagcttatgtgcgttcacatgcacatttgctagcccagagcttttaaaatgaggtctggcatatacttgattacaaatgaaaactcagaaaccaattttatttattaaatcatatcttttgtttttccccctcccttctaatcccccaaaggacctatttgagctgttccccaattcatctgcttattttggaccatgaatctgccagagtgatattttctgttatttctcctccaaatttttccctgatgtttccaataaagatttacttgggtggccccttaaggtgacatcaggatgctcttatgtccttccagaataagcatacacttcactcctctccctttcatctccctctgcattcttaattccttgcttttctcacttggagccgagggtgctttagagaggtggttttccatgaatcagccaagattcctgtagaagttgggtataccaaccaccaccaccaccgccccctattccagtttcaaagctcctcggctatgctaatgtcccctcagagatgaggtttgacttttaggcccgtatgactcctccatagcctggccaaggagaccatgagtagccatgtctggtttactctttatcctgagactgtttgtttatagcttaaaacagaagtgtgtcttcccagcacaaacctaatcaatcagtgtatcagtgcatctggtggcaacagctcagcccattcaaagagcaaggattcaggaaaggcacactgatggtggggagcctcttaagagcctctaatgttctcccaaaaccagagttgagagtcggagtgccagtcgtcggggcccactattcctgaataagggacatgcaagggccagaagtagcttgactctcgcctaaatatctgtgcctttgcctgtcctttctcccactctactgaaacccggaacagattcccgcttgccttctgatgaagagaggttaggtaaagagagtttggaggaaaaaagacaccaggaggcaggctgcggggtaggagagggttctgagaggaggcagcaatccagaatacctccttttctagccagcatcccttgaacttttgaaaggttgtgcctaccactggctggcacaccagggcaatgatttccctgcagaaggaaggaaagaatgtttcacccttgcatccttcttggagaagctacagcctgtgctcagttgagtggttcacactcagactttggctttatggttttccttcctccttgtctttgccctgaccttgatcaacaggggtgaaaagaaccaccctgaggtttccatgcctctcccattttagtggtagcattttgtgtctttactccacccttcaccctagttccaccaaggttcacacaccagatgtaactgtttttcagctgagttgtatggattaacttcagtccactgtaaatacacctgggatggggtggggttggggttgtttagggagaagcagccagacttgctttgtgaactgaatgtatttttatgcaattttgagtggcctttcaaccctaagatgaatggttttgttttactggttgttgttatatagttttgagtattctgtgtttgaaagtttgggaataataatattcacttctatatgatgcctgtaaacacaacagtatttataaatgagtaaataaaactgtgttttaactttg

SEQ ID NO: 454399 - DNA, 478 bp, Homo sapiens
ggggcaggggcgccctcgggctttgacgacgccccgtcccgctgggccaggtcgtccatccgcaacgtgcacagcatccaccagcggtcgcggaagcgcctcagccaggacgcctatcgccgcaacagcgtccgttttctgcagcagcgacgccgccaggcgcggccgggaccgcagagccccgggagcccgctcgaggaggagcggcagacgcagcgctctaaaccgcagccggcggtgcccccgcggccgagcgccgacctcatcctgaaccgctgcagcgagagcaccaagcggaagctggcgtctgccgtctgaggctggagcgcagtccccagctagcgtctcggcccttgccgccccgtgcctgtatatacgtgttctatagagcctggcgtctggacgccgagggcagccccgacccctgtccagcgcggctcccgccaccctcaataaatgttgcttggagtggaccgag

SEQ ID NO: 454400 - DNA, 338 bp, Homo sapiens
aaaaaaaaaaacccccccagggcggcggggtccataaaccccgggaccccctctaaaggggaggggggaagagagggtttttaacccaacaccggcggtgcccccgcggccgagcgccgacctcatcctgaaccgctgcagcgagagcaccaagcggaagctggcgtctgccgtctgaggctggagcgcagtccccagctagcgtctcggcccttgccgccccgtgcctgtatatacgtgttctatagagcctggcgtctggacgccgagggcagccccgacccctgtccagcgcggctcccgccaccctcaataaatgttgcttggagtggaccgag

SEQ ID NO: 454401 - DNA, 1341 bp, Homo sapiens
ttaaggcgcagcctggaagtgccagggagcactggaggccacccagtcatgggggacaccttcatccgtcacatcgccctgctgggctttgagaagcgcttcgtacccagccagcactatgtacatgttcctggtgaaatggcaggacctgtcggagaaggtggtctaccggcgcttcaccgagatctacgagttccataaaaccttaaaagaaatgttccctattgaggcaggggcgatcaatccagagaacaggatcatcccccacctcccagctcccaagtggtttgacgggcagcgggccgccgagaaccaccagggcacacttaccgagtactgcggcacgctcatgagcctgcccaccaagatctcccgctgtccccacctccttgacttcttcaaggtgcgccctgatgacctcaagctccccacggacaaccagacaaaaaagccagagacatacttgatgcccaaagatggcaagagtaccgcgacagacatcaccggccccatcatcctgcagacgtaccgcgccattgccaactacgagaagacctcgggctccgagatggctctgtccacgggggacgtggtggaggtcgtggagaagagcgagagcggttggtggttctgtcagatgaaagcaaagcgaggctggatcccagcatccttcctcgagcccctggacagtcctgacgagacggaagaccctgagcccaactatgcaggtgagccatacgtcgccatcaaggcctacactgctgtggagggggacgaggtgtccctgctcgagggtgaagctgttgaggaaagacgacgtcacaggctacttcccgtccatgtacctgcaaaagtcagggcaagacgtgtcccaggcccaacgccagatcaagcggggggcgccgccccgcaggtcgtccatccgcaacgtgcacagcatccaccagcggtcgcggaagcgcctcagccaggacgcctatcgccgcaacagcgtccgttttctgcagcagcgacgccgccaggcgcggccgggaccgcagagccccgggagcccgctcgaggaggagcggcagacgcagcgctctaaaccgcagccggcggtgcccccgcggccgagcgccgacctcatcctgaaccgctgcagcgagagcaccaagcggaagctggcgtctgccgtctgaggctggagcgcagtccccagctagcgtctcggcccttgccgccccgtgcctgtatatacgtgttctatagagcctggcgtctggacgccgagggcagccccgacccctgtccagcgcggctcccgccaccctcaataaatgttgcttggagtggaccgag

SEQ ID NO: 454402 - DNA, 1488 bp, Homo sapiens
  misc_feature (18)..(18): n is a, c, g, or t
  misc_feature (21)..(22): n is a, c, g, or t
  misc_feature (25)..(25): n is a, c, g, or t
aaggctaggtacgaggcnggnntgnaatcggccgaccagtcatgggggacaccttcatccgtcacatcgccctgctgggctttgagaagcgcttcgtacccagccagcactatgtacatgttcctggtgaaatggcaggacctgtcggagaaggtggtctaccggcgcttcaccgagatctacgagttccataaaaccttaaaagaaatgttccctattgaggcaggggcgatcaatccagagaacaggatcatcccccacctcccagctcccaagtggtttgacgggcagcgggccgccgagaaccaccagggcacacttaccgagtactgcggcacgctcatgagcctgcccaccaagatctcccgctgtccccacctccttgacttcttcaaggtgcgccctgatgacctcaagctccccacggacaaccagacaaaaaagccagagacatacttgatgcccaaagatggcaagagtaccgcgacagacatcaccggccccatcatcctgcagacgtaccgcgccattgccaactacgagaagacctcgggctccgagatggctctgtccacgggggacgtggtggaggtcgtggagaagagcgagagcggttggtggttctgtcagatgaaagcaaagcgaggctggatcccagcatccttcctcgagcccctggacagtcctgacgagacggaagaccctgagcccaactatgcaggtgagccatacgtcgccatcaaggcctacactgctgtggagggggacgaggtgtccctgctcgagggtgaagctgttgaggtcattcacaagctcctggacggctggtgggtcatcagcaaatacctgtcccctgcggtgacctggatctgctaacctccacccctgcctagactgtggaaggattgctggaagggtctcagttgcacagaccaggaaactgaggcccacagaggaaagacgacgtcacaggctacttcccgtccatgtacctgcaaaagtcagggcaagacgtgtcccaggcccaacgccagatcaagcggggggcgccgccccgcaggtcgtccatccgcaacgtgcacagcatccaccagcggtcgcggaagcgcctcagccaggacgcctatcgccgcaacagcgtccgttttctgcagcagcgacgccgccaggcgcggccgggaccgcagagccccgggagcccgctcgaggaggagcggcagacgcagcgctctaaaccgcagccggcggtgcccccgcggccgagcgccgacctcatcctgaaccgctgcagcgagagcaccaagcggaagctggcgtctgccgtctgaggctggagcgcagtccccagctagcgtctcggcccttgccgccccgtgcctgtatatacgtgttctatagagcctggcgtctggacgccgagggcagccccgacccctgtccagcgcggctcccgccaccctcaataaatgttgcttggagtggaccgag

SEQ ID NO: 454403 - DNA, 1676 bp, Homo sapiens
ttaaggcgcagcctggaagtgccagggagcactggaggccacccagtcatgggggacaccttcatccgtcacatcgccctgctgggctttgagaagcgcttcgtacccagccagcactatgtacatgttcctggtgaaatggcaggacctgtcggagaaggtggtctaccggcgcttcaccgagatctacgagttccataaaaccttaaaagaaatgttccctattgaggcaggggcgatcaatccagagaacaggatcatcccccacctcccagctcccaagtggtttgacgggcagcgggccgccgagaaccaccagggcacacttaccgagtactgcggcacgctcatgagcctgcccaccaagatctcccgctgtccccacctccttgacttcttcaaggtgcgccctgatgacctcaagctccccacggacaaccagacaaaaaagccagagacatacttgatgcccaaagatggcaagagtaccgcgacagacatcaccggccccatcatcctgcagacgtaccgcgccattgccaactacgagaagacctcgggctccgagatggctctgtccacgggggacgtggtggaggtcgtggagaagagcgagagcggttggtggttctgtcagatgaaagcaaagcgaggctggatcccagcatccttcctcgagcccctggacagtcctgacgagacggaagaccctgagcccaactatgcaggtgagccatacgtcgccatcaaggcctacactgctgtggagggggacgaggtgtccctgctcgagggtgaagctgttgaggaaagacgacgtcacaggctacttcccgtccatgtacctgcaaaagtcagggcaagacgtgtcccaggcccaacgccagatcaagcggggggcgccgccccgcaggtcgtccatccgcaacgtgcacagcatccaccagcggtcgcggaagcgcctcagccaggacgcctatcgccgcaacagcgtccgttttctgcagcagcgacgccgccaggcgcggccgggaccgcagagccccgggagcccgctcgaggaggagcggcagacgcagcgctctaaaccgcagccggcggtgcccccgcggccgagcgccgacctcatcctgaaccgctgcagcgagagcaccaagcggaagctggcgtctgccgtctgaggctggagcgcagtccccagctagcgtctcggcccttgccgccccgtgcctgtatatacgtgttctatagagcctggcgtctggacgccgagggcagccccgacccctgtccagcgcggctcccgccaccctcaataaatgttgcttggagtggaccgagaaaaaaaaaaaaaagaaaaaaaagaaaacagacaagagcacaaacacaaaacagaagtacacaagactggggcgcggacgcgacagcagaagtagcacacgaccggagggcgggcacaacacagaaacacacgccgacaacgcgagcgcggtacgcgagagaccagaacggtgggccccactcagcggagagacggagataacataacaaagacgacgagacacagagcaaaagcaaccgacagggcgaggcggcaccacgcggcgagacgagacactcgaagaccggaaaaccacaagcggacgggggaggacataggcgagccagaaacccac

SEQ ID NO: 454404 - DNA, 1581 bp, Homo sapiens
  misc_feature (18)..(18): n is a, c, g, or t
  misc_feature (21)..(22): n is a, c, g, or t
  misc_feature (25)..(25): n is a, c, g, or t
aaggctaggtacgaggcnggnntgnaatcggccgaccagtcatgggggacaccttcatccgtcacatcgccctgctgggctttgagaagcgcttcgtacccagccagcactatgtacatgttcctggtgaaatggcaggacctgtcggagaaggtggtctaccggcgcttcaccgagatctacgagttccatagatgggatttcgctatgttgcccaggctggtctctaactcctggactcaagtgatcctcccgcctcagcttcccaaattgctaggattacagaaaaccttaaaagaaatgttccctattgaggcaggggcgatcaatccagagaacaggatcatcccccacctcccagctcccaagtggtttgacgggcagcgggccgccgagaaccaccagggcacacttaccgagtactgcggcacgctcatgagcctgcccaccaagatctcccgctgtccccacctccttgacttcttcaaggtgcgccctgatgacctcaagctccccacggacaaccagacaaaaaagccagagacatacttgatgcccaaagatggcaagagtaccgcgacagacatcaccggccccatcatcctgcagacgtaccgcgccattgccaactacgagaagacctcgggctccgagatggctctgtccacgggggacgtggtggaggtcgtggagaagagcgagagcggttggtggttctgtcagatgaaagcaaagcgaggctggatcccagcatccttcctcgagcccctggacagtcctgacgagacggaagaccctgagcccaactatgcaggtgagccatacgtcgccatcaaggcctacactgctgtggagggggacgaggtgtccctgctcgagggtgaagctgttgaggtcattcacaagctcctggacggctggtgggtcatcagcaaatacctgtcccctgcggtgacctggatctgctaacctccacccctgcctagactgtggaaggattgctggaagggtctcagttgcacagaccaggaaactgaggcccacagaggaaagacgacgtcacaggctacttcccgtccatgtacctgcaaaagtcagggcaagacgtgtcccaggcccaacgccagatcaagcggggggcgccgccccgcaggtcgtccatccgcaacgtgcacagcatccaccagcggtcgcggaagcgcctcagccaggacgcctatcgccgcaacagcgtccgttttctgcagcagcgacgccgccaggcgcggccgggaccgcagagccccgggagcccgctcgaggaggagcggcagacgcagcgctctaaaccgcagccggcggtgcccccgcggccgagcgccgacctcatcctgaaccgctgcagcgagagcaccaagcggaagctggcgtctgccgtctgaggctggagcgcagtccccagctagcgtctcggcccttgccgccccgtgcctgtatatacgtgttctatagagcctggcgtctggacgccgagggcagccccgacccctgtccagcgcggctcccgccaccctcaataaatgttgcttggagtggaccgag

SEQ ID NO: 454405 - DNA, 1823 bp, Homo sapiens
  misc_feature (18)..(18): n is a, c, g, or t
  misc_feature (21)..(22): n is a, c, g, or t
  misc_feature (25)..(25): n is a, c, g, or t
aaggctaggtacgaggcnggnntgnaatcggccgaccagtcatgggggacaccttcatccgtcacatcgccctgctgggctttgagaagcgcttcgtacccagccagcactatgtacatgttcctggtgaaatggcaggacctgtcggagaaggtggtctaccggcgcttcaccgagatctacgagttccataaaaccttaaaagaaatgttccctattgaggcaggggcgatcaatccagagaacaggatcatcccccacctcccagctcccaagtggtttgacgggcagcgggccgccgagaaccaccagggcacacttaccgagtactgcggcacgctcatgagcctgcccaccaagatctcccgctgtccccacctccttgacttcttcaaggtgcgccctgatgacctcaagctccccacggacaaccagacaaaaaagccagagacatacttgatgcccaaagatggcaagagtaccgcgacagacatcaccggccccatcatcctgcagacgtaccgcgccattgccaactacgagaagacctcgggctccgagatggctctgtccacgggggacgtggtggaggtcgtggagaagagcgagagcggttggtggttctgtcagatgaaagcaaagcgaggctggatcccagcatccttcctcgagcccctggacagtcctgacgagacggaagaccctgagcccaactatgcaggtgagccatacgtcgccatcaaggcctacactgctgtggagggggacgaggtgtccctgctcgagggtgaagctgttgaggtcattcacaagctcctggacggctggtgggtcatcagcaaatacctgtcccctgcggtgacctggatctgctaacctccacccctgcctagactgtggaaggattgctggaagggtctcagttgcacagaccaggaaactgaggcccacagaggaaagacgacgtcacaggctacttcccgtccatgtacctgcaaaagtcagggcaagacgtgtcccaggcccaacgccagatcaagcggggggcgccgccccgcaggtcgtccatccgcaacgtgcacagcatccaccagcggtcgcggaagcgcctcagccaggacgcctatcgccgcaacagcgtccgttttctgcagcagcgacgccgccaggcgcggccgggaccgcagagccccgggagcccgctcgaggaggagcggcagacgcagcgctctaaaccgcagccggcggtgcccccgcggccgagcgccgacctcatcctgaaccgctgcagcgagagcaccaagcggaagctggcgtctgccgtctgaggctggagcgcagtccccagctagcgtctcggcccttgccgccccgtgcctgtatatacgtgttctatagagcctggcgtctggacgccgagggcagccccgacccctgtccagcgcggctcccgccaccctcaataaatgttgcttggagtggaccgagaaaaaaaaaaaaaagaaaaaaaagaaaacagacaagagcacaaacacaaaacagaagtacacaagactggggcgcggacgcgacagcagaagtagcacacgaccggagggcgggcacaacacagaaacacacgccgacaacgcgagcgcggtacgcgagagaccagaacggtgggccccactcagcggagagacggagataacataacaaagacgacgagacacagagcaaaagcaaccgacagggcgaggcggcaccacgcggcgagacgagacactcgaagaccggaaaaccacaagcggacgggggaggacataggcgagccagaaacccac

SEQ ID NO: 454406 - DNA, 922 bp, Homo sapiens
gaagaaagcatagaatttggtggcttggaggtaggcaaaggttcgtaggagacagaaggcagttaacataaaagaaaaattggcaaatataatctgccagtgtcttcttttttctttaattttttcgggaggtagagataggggtcttgctatgttacccaggctgatctccaactcctggcctcaagcgatcctcccacctagatccctcaaagtactgggattacaggcgtgagcgaccgtgccctgcccattcttgccaatgtcttatagcaaatacctgtcccctgcggtgacctggatctgctaacctccacccctgcctagactgtggaaggattgctggaagggtctcagttgcacagaccaggaaactgaggcccacagaggaaagacgacgtcacaggctacttcccgtccatgtacctgcaaaagtcagggcaagacgtgtcccaggcccaacgccagatcaagcggggggcgccgccccgcaggtcgtccatccgcaacgtgcacagcatccaccagcggtcgcggaagcgcctcagccaggacgcctatcgccgcaacagcgtccgttttctgcagcagcgacgccgccaggcgcggccgggaccgcagagccccgggagcccgctcgaggaggagcggcagacgcagcgctctaaaccgcagccggcggtgcccccgcggccgagcgccgacctcatcctgaaccgctgcagcgagagcaccaagcggaagctggcgtctgccgtctgaggctggagcgcagtccccagctagcgtctcggcccttgccgccccgtgcctgtatatacgtgttctatagagcctggcgtctggacgccgagggcagccccgacccctgtccagcgcggctcccgccaccctcaataaatgttgcttggagtggaccgag

SEQ ID NO: 454407 - DNA, 384 bp, Homo sapiens
  misc_feature (18)..(18): n is a, c, g, or t
  misc_feature (21)..(22): n is a, c, g, or t
  misc_feature (25)..(25): n is a, c, g, or t
aaggctaggtacgaggcnggnntgnaatcggccgaccagtcatgggggacaccttcatccgtcacatcgccctgctgggctttgagaagcgcttcgtacccagccagcactatgtacatgttcctggtgaaatggcaggacctgtcggagaaggtggtctaccggcgcttcaccgagatctacgagttccataaaaccttaaaagaaatgttccctattgaggcaggggcgatcaatccagagaacaggatcatcccccacctcccagctcccaagtggtttgacgggcagcgggccgccgagaaccaccagggcacacttaccgagtactgcggcacgctcatgagcctgcccacgcataaggtgggagggatcctctaggca

SEQ ID NO: 454408 - DNA, 912 bp, Homo sapiens
ttaaggcgcagcctggaagtgccagggagcactggaggccacccagtcatgggggacaccttcatccgtcacatcgccctgctgggctttgagaagcgcttcgtacccagccagcactatgtacatgttcctggtgaaatggcaggacctgtcggagaaggtggtctaccggcgcttcaccgagatctacgagttccataaaaccttaaaagaaatgttccctattgaggcaggggcgatcaatccagagaacaggatcatcccccacctcccagctcccaagtggtttgacgggcagcgggccgccgagaaccaccagggcacacttaccgagtactgcggcacgctcatgagcctgcccaccaagatctcccgctgtccccacctccttgacttcttcaaggtgcgccctgatgacctcaagctccccacggacaaccagacaaaaaagccagagacatacttgatgcccaaagatggcaagagtaccgcgacagacatcaccggccccatcatcctgcagacgtaccgcgccattgccaactacgagaagacctcgggctccgagatggctctgtccacgggggacgtggtggaggtcgtggagaagagcgagagcggtcagacctcccaccttacggggctccttcccctggtgctcaggaacccacagccacaagccccctgccaaggctcaggcagcctggcccctgggaggactccagctctgttaggggccctaaatgtcctccccacactgtgggtcgccttctctcttagtgtgcaccctgtggtggctgtgggcatctgtgcatggcaggccggggcggggcatgtctgcgtgttctgtctggatgggtatgggaccgtctgttcattatgaagtgtgctcgcgccgaaaggattctgtga

SEQ ID NO: 454409 - DNA, 1372 bp, Homo sapiens
  misc_feature (18)..(18): n is a, c, g, or t
  misc_feature (21)..(22): n is a, c, g, or t
  misc_feature (25)..(25): n is a, c, g, or t
aaggctaggtacgaggcnggnntgnaatcggccgaccagtcatgggggacaccttcatccgtcacatcgccctgctgggctttgagaagcgcttcgtacccagccagcactatgtacatgttcctggtgaaatggcaggacctgtcggagaaggtggtctaccggcgcttcaccgagatctacgagttccataaaaccttaaaagaaatgttccctattgaggcaggggcgatcaatccagagaacaggatcatcccccacctcccagctcccaagtggtttgacgggcagcgggccgccgagaaccaccagggcacacttaccgagtactgcggcacgctcatgagcctgcccaccaagatctcccgctgtccccacctccttgacttcttcaaggtgcgccctgatgacctcaagctccccacggacaaccagacaaaaaagccagagacatacttgatgcccaaagatggcaagagtaccgcgacagacatcaccggccccatcatcctgcagacgtaccgcgccattgccaactacgagaagacctcgggctccgagatggctctgtccacgggggacgtggtggaggtcgtggagaagagcgagagcggttggtggttctgtcagatgaaagcaaagcgaggctggatcccagcatccttcctcgagcccctggacagtcctgacgagacggaagaccctgagcccaactatgcaggtgagccatacgtcgccatcaaggcctacactgctgtggagggggacgaggtgtccctgctcgagggtgaagctgttgaggtcattcacaagctcctggacggctggtgggtcatcaggaaagacgacgtcacaggctacttcccgtccatgtacctgcaaaagtcagggcaagacgtgtcccaggcccaacgccagatcaagcggggggcgccgccccgcaggtcgtccatccgcaacgtgcacagcatccaccagcggtcgcggaagcgcctcagccaggacgcctatcgccgcaacagcgtccgttttctgcagcagcgacgccgccaggcgcggccgggaccgcagagccccgggagcccgctcgaggaggagcggcagacgcagcgctctaaaccgcagccggcggtgcccccgcggccgagcgccgacctcatcctgaaccgctgcagcgagagcaccaagcggaagctggcgtctgccgtctgaggctggagcgcagtccccagctagcgtctcggcccttgccgccccgtgcctgtatatacgtgttctatagagcctggcgtctggacgccgagggcagccccgacccctgtccagcgcggctcccgccaccctcaataaatgttgcttggagtggaccgag

SEQ ID NO: 454410 - DNA, 1401 bp, Homo sapiens
ttaaggcgcagcctggaagtgccagggagcactggaggccacccagtcatgggggacaccttcatccgtcacatcgccctgctgggctttgagaagcgcttcgtacccagccagcactatgtacatgttcctggtgaaatggcaggacctgtcggagaaggtggtctaccggcgcttcaccgagatctacgagttccataaaaccttaaaagaaatgttccctattgaggcaggggcgatcaatccagagaacaggatcatcccccacctcccagctcccaagtggtttgacgggcagcgggccgccgagaaccaccagggcacacttaccgagtactgcggcacgctcatgagcctgcccaccaagatctcccgctgtccccacctccttgacttcttcaaggtgcgccctgatgacctcaagctccccacggacaaccagacaaaaaagccagagacatacttgatgcccaaagatggcaagagtaccgcgacagacatcaccggccccatcatcctgcagacgtaccgcgccattgccaactacgagaagacctcgggctccgagatggctctgtccacgggggacgtggtggaggtcgtggagaagagcgagagcggttggtggttctgtcagatgaaagcaaagcgaggctggatcccagcatccttcctcgagcccctggacagtcctgacgagacggaagaccctgagcccaactatgcaggtgagccatacgtcgccatcaaggcctacactgctgtggagggggacgaggtgtccctgctcgagggtgaagctgttgaggaaagacgacgtcacaggctacttcccgtccatgtacctgcaaaagtcagggcaagacgtgtcccaggcccaacgccagatcaagcggggggcgccgccccgcaggtcgtccatccgcaacgtgcacagcatccaccagcggtcgcggaagcgcctcagccaggacgcctatcgccgcaacagcgtccgttttctgcagcagcgacgccgccaggcgcggccgggaccgcagagccccgggagcccgctcgaggaggagcggcagacgcagcgctctaaaccgcagccggcggtgcccccgcggccgagcgccgacctcatcctgaaccgctgcagcgagagcaccaagcggaagctggcgtctgccgtctgaggctggagcgcagtccccagctagcgtctcggcccttgccgccccgtgcctgtatatacgtgttctatagagcctggcgtctggacgccgagggcagccccgacccctgtccagcgcggctcccgccaccctcaataaatgttgcttggagtggaccgaggctctgcaggaatgcagggagggccgggctccgccccagggttatttctaagttgaaaca

SEQ ID NO: 454411 - DNA, 1456 bp, Homo sapiens
  misc_feature (18)..(18): n is a, c, g, or t
  misc_feature (21)..(22): n is a, c, g, or t
  misc_feature (25)..(25): n is a, c, g, or t
aaggctaggtacgaggcnggnntgnaatcggccgaccagtcatgggggacaccttcatccgtcacatcgccctgctgggctttgagaagcgcttcgtacccagccagcactatacagagtcttgatctgttgcccaggccagagtgcagtggcacgatctcagctcactgcaacctccgccttccaggttcaactggttctcctgcctcagcctccagagtagttgggattacaggtacatgttcctggtgaaatggcaggacctgtcggagaaggtggtctaccggcgcttcaccgagatctacgagttccataaaaccttaaaagaaatgttccctattgaggcaggggcgatcaatccagagaacaggatcatcccccacctcccagctcccaagtggtttgacgggcagcgggccgccgagaaccaccagggcacacttaccgagtactgcggcacgctcatgagcctgcccaccaagatctcccgctgtccccacctccttgacttcttcaaggtgcgccctgatgacctcaagctccccacggacaaccagacaaaaaagccagagacatacttgatgcccaaagatggcaagagtaccgcgacagacatcaccggccccatcatcctgcagacgtaccgcgccattgccaactacgagaagacctcgggctccgagatggctctgtccacgggggacgtggtggaggtcgtggagaagagcgagagcggttggtggttctgtcagatgaaagcaaagcgaggctggatcccagcatccttcctcgagcccctggacagtcctgacgagacggaagaccctgagcccaactatgcaggtgagccatacgtcgccatcaaggcctacactgctgtggagggggacgaggtgtccctgctcgagggtgaagctgttgaggaaagacgacgtcacaggctacttcccgtccatgtacctgcaaaagtcagggcaagacgtgtcccaggcccaacgccagatcaagcggggggcgccgccccgcaggtcgtccatccgcaacgtgcacagcatccaccagcggtcgcggaagcgcctcagccaggacgcctatcgccgcaacagcgtccgttttctgcagcagcgacgccgccaggcgcggccgggaccgcagagccccgggagcccgctcgaggaggagcggcagacgcagcgctctaaaccgcagccggcggtgcccccgcggccgagcgccgacctcatcctgaaccgctgcagcgagagcaccaagcggaagctggcgtctgccgtctgaggctggagcgcagtccccagctagcgtctcggcccttgccgccccgtgcctgtatatacgtgttctatagagcctggcgtctggacgccgagggcagccccgacccctgtccagcgcggctcccgccaccctcaataaatgttgcttggagtggaccgag

SEQ ID NO: 454412 - DNA, 1219 bp, Homo sapiens
  misc_feature (56)..(56): n is a, c, g, or t
ttttggattcattcagcatttattgtagcaaagagtgggtagggacaccgggagancttggtgcggcacgctcatgagcctgcccaccaagatctcccgctgtccccacctccttgacttcttcaaggtgcgccctgatgacctcaagctccccacggacaaccagacaaaaaagccagagacatacttgatgcccaaagatggcaagagtaccgcgacagacatcaccggccccatcatcctgcagacgtaccgcgccattgccaactacgagaagacctcgggctccgagatggctctgtccacgggggacgtggtggaggtcgtggagaagagcgagagcggttggtggttctgtcagatgaaagcaaagcgaggctggatcccagcatccttcctcgagcccctggacagtcctgacgagacggaagaccctgagcccaactatgcaggtgagccatacgtcgccatcaaggcctacactgctgtggagggggacgaggtgtccctgctcgagggtgaagctgttgaggtcattcacaagctcctggacggctggtgggtcatcagcaaatacctgtcccctgcggtgacctggatctgctaacctccacccctgcctagactgtggaaggattgctggaagggtctcagttgcacagaccaggaaactgaggcccacagaggaaagacgacgtcacaggctacttcccgtccatgtacctgcaaaagtcagggcaagacgtgtcccaggcccaacgccagatcaagcggggggcgccgccccgcaggtcgtccatccgcaacgtgcacagcatccaccagcggtcgcggaagcgcctcagccaggacgcctatcgccgcaacagcgtccgttttctgcagcagcgacgccgccaggcgcggccgggaccgcagagccccgggagcccgctcgaggaggagcggcagacgcagcgctctaaaccgcagccggcggtgcccccgcggccgagcgccgacctcatcctgaaccgctgcagcgagagcaccaagcggaagctggcgtctgccgtctgaggctggagcgcagtccccagctagcgtctcggcccttgccgccccgtgcctgtatatacgtgttctatagagcctggcgtctggacgccgagggcagccccgacccctgtccagcgcggctcccgccaccctcaataaatgttgcttggagtggaccgag

SEQ ID NO: 454413 - DNA, 663 bp, Homo sapiens
  misc_feature (18)..(18): n is a, c, g, or t
  misc_feature (21)..(22): n is a, c, g, or t
  misc_feature (25)..(25): n is a, c, g, or t
aaggctaggtacgaggcnggnntgnaatcggccgaccagtcatgggggacaccttcatccgtcacatcgccctgctgggctttgagaagcgcttcgtacccagccagcactatgtacatgttcctggtgaaatggcaggacctgtcggagaaggtggtctaccggcgcttcaccgagatctacgagttccatgacaaaaaagccagagacatacttgatgcccaaagatggcaagagtaccgcgacagacatcaccggccccatcatcctgcagacgtaccgcgccattgccaactacgagaagacctcgggctccgagatggctctgtccacgggggacgtggtggaggtcgtggagaagagcgagagcggtcagacctcccaccttacggggctccttcccctggtgctcaggaacccacagccacaagccccctgccaaggctcaggcagcctggcccctgggaggactccagctctgttaggggccctaaatgtcctccccacactgtgggtcgccttctctcttagtgtgcaccctgtggtggctgtgggcatctgtgcatggcaggccggggcggggcatgtctgcgtgttctgtctggatgggtatgggaccgtctgttcattatgaagtgtgctcgcgccgaaaggattctgtga

SEQ ID NO: 454414 - DNA, 492 bp, Homo sapiens
aaatccatgtcaaaatcacagcattctatacacacaacagacaacagagagccaaatatgagtgactccattccaatgcttcaaagagaataaatactaggaatcaacttcaagggatgtgaaggacccttcaaggagaactcaaaccactgctcaaggaaataaaagaggacacaaacaaatggaagaacattccatgctcatgggtaggaagaatcaatagtgtgaaaatggccatactgcccaaggtaatttacagattcaatgccatccccatcaagctaccaatgactttcttcacagaattggaaaaaactactttaaagttcatatggaaccaaaaaagagcccgcatcgccaagtcaatcctaagccatgacatcccagaagaggacagtgaattactcctaggtcggctcttatagagtggccatagtgttctgtcaaaacacttgcttccattttcagagataaaaatcattgattacaaaa

SEQ ID NO: 454415 - DNA, 173 bp, Homo sapiens
gcggccgcctactactactactgctcgaattcaagcttctaacgatgtacggggccatgacatcccagaagaggacagtgaattactcctaggtcggctcttatagagtggccatagtgttctgtcaaaacacttgcttccattttcagagataaaaatcattgattacaaaa

SEQ ID NO: 454416 - DNA, 3893 bp, Homo sapiens
ccgcgcggcgcgggggcggggcctacgcgcggtggcgggggcggtggcggctgcccgcgcccctcccccgcacggcgctcagtgccaggctggaggcggcagcggttggaggcttcgcccggctttgcagcggggacttcggcggcggcgcctcaggcacctcggcccggacacgatgaggcgagtggtacgacagagcaagtttcggcatgtatttgggcaagcggtgaaaaatgaccagtgctatgatgacatccgggtttctcgtgtgacctgggatagttccttttgtgctgtcaatcccagatttgttgccataatcatagaggcaagtgggggaggagcgttccttgtcctccctctgcacaagactggtcgaattgacaaatcttaccctacagtatgtggccacacaggaccagtgctggacatagactggtgcccacataacgatcaggtcattgccagcggttcagaggactgcacggtcatggtatggcagatcccagaaaatggactcaccctttccctgactgaacctgtggtgattttggaaggccactcaaagagagtcggcatcgtggcttggcatccaacggcccgcaatgtgcttcttagtgcaggctgtgataatgccattatcatctggaatgtgggaacaggggaagcccttataaacttggacgatatgcattcagacatgatttacaatgtgagctggaaccggaatggcagtctgatctgcacagcttccaaagacaagaaagtgagagtcattgatcccaggaaacaagagattgttgctgagaaggagaaagcacatgaaggagcaagacccatgagagccatcttcctggccgatggcaatgtcttcaccactgggttcagccgcatgagcgagcggcagctggctctctggaatccgaaaaatatgcaggaaccaattgctcttcatgagatggacactagcaatggggtgttgctgcctttctatgaccctgacaccagcatcatttacttatgtggaaagggtgacagcagtattcgctattttgagatcacggatgaatccccgtacgtccactacctcaacacattcagcagcaaggagcctcagagagggatgggttacatgcccaagaggggacttgatgttaacaaatgtgagattgccagattcttcaaacttcatgagagaaagtgtgaacctattattatgactgttcccaggaagtctgaccttttccaagatgacctgtatcctgacacagcggggccagaggccgcgctggaggcagaagagtggttcgaaggcaagaatgcagacccaatcctcatctccttgaagcacgggtacattccaggcaaaaacagggatctcaaggtggtcaagaagaacattctggatagcaagcccactgcaaacaagaagtgcgacctgatcagcatccccaagaaaaccacagacacggccagtgtgcaaaatgaagccaagttggatgagattttaaaagagatcaaatctataaaagacacaatctgcaatcaagatgagcgtatttccaagttagaacagcagatggcaaagatagcagcctgaaggtcccacccccacccctacagaaaaaatgggagcaagaacttgtgcttgggagctggttattggtgtggtcctagggagggcggaaagggaggcactgccatttggagacattccatttcagatttgtcaaccagcgataggccacattccagtaagaactcaatttgtctcccaaatttgcagaaacaaaacgtgatttaaaagctgagctttttatcagaaagcttttttgatgttttaagtgttatgtgacttgttgaactttttaaaaagtgctacttttaaaatcccagatactctgaattttagaaaacaaactaattctgattgtgtcgtgcccaagtaccctttttttttaatgaatagggaccaatgccacattgctttttatatttctttcttttttaatgttgccaaaaccaaaagtagctttgttttcctttgtattttgctactttgcagtatttgtgtgtgtggttttttttccttaatttgaaagggacagcactgtgtatgtttataaactaaatgaagataagatattattttgtataaacattcatctgagaacaatcaaagcagtagccacatggtgctggctcctttgcagcacaaacctggtcattttgatgactgtacaacaggaagacttgaaaaatcacgtggattcatattaccaccgctctcatttcatggagtcttctgatcaaaaaagctcacgtcgtatttcttcttttcctttctcttttctagaaattgggtgtttgtaccagaatggaattttgcttctcggttatcctgtgcttcagatgattataatctaacccaaactagcatgtgtttctgcagtttgttacacacctaggatcatattgcattcatcactttaaacatcatgtttcaggttttggtcaatacttgacaagggtgcccaggacaggaagacgtgtactgctgagtgttccttcttgcccttttcagcagcttgcccagctcttgagtacagtggtggggactaaaaatgtgggcatgtggagaggggtatttgccctgggtgatcctgtttccctgtgctgtccccatgctgtgttggaggaggaagtggctctccttccaccaacaaagctcctgctctaccctcttcctcacatgtgctgcgacctctctcagggctcccccagccattccttctttccttcctgccttttagctctaaccacattaagctaagacaaggccagagggtgcgattgaatgagtattgagactgaggagaatgatagagagtgaagcagaaacaggagcgcagacctctgctgtagctttaatgcatacaaacatgtccctccgcacaactaacctgccctgcctctccatctcgcaccaaggctgcgtcaaagcacagaggctccccggactcggagggggccagagactgagctctggtcacctgttcattcctcggttagctggaactttgccccgtttccagtttcttatagtgcatgcttgggaaacaagatttaaggagcctctgttttggaagggctgtctgtgattgaacgtgaaatgtgtagtgccattgggaccacgaagggaattcttgcacatgctcgtgctggtgtgggcatgggactggctggaaacgtctgtatgcagggagccagggtgagggcagagtgtggtgacagccgaacttggagtaatgtccgtgtagaaaaaggaccatgttcttatccagccaatactgggagtgctgtctccacaatttcagggcatctgaatgtttgatgtggttttgtgtgtgtgtatgtatgtgtttaatattgaagtggatcatgagatgtaaagaaaacaataatggcaatgacttatattcaaatctgtatttgtttctttatcaatgtaatctgctgaggaccttttgtctaagattcagtagtgttttaaggttctgatatcgaattaatgaagtaaagttgttgatggtggtgaaacaccgtagggcatgtggttcaaagagaagcaggagggcaagggaaagttaccctgatcttagtttgtagcttatgacttatttaatgaatggatgcccagccaagctcagagtaggcgcccaaagcattgtggattattttcctgttttgtctttttttttttttttttttaagccatgacatcccagaagaggacagtgaattactcctaggtcggctcttatagagtggccatagtgttctgtcaaaacacttgcttccattttcagagataaaaatcattgattacaaaa

SEQ ID NO: 454417 - DNA, 3841 bp, Homo sapiens
  misc_feature (28)..(28): n is a, c, g, or t
ttcgggcgtttttttatccaggcgtagngaaggaatgaccgggatggcagcggttggaggcttcgcccggctttgcagcggggacttcggcggcggcgcctcaggcacctcggcccggacacgatgaggcgagtggtacgacagagcaagtttcggcatgtatttgggcaagcggtgaaaaatgaccagtgctatgatgacatccgggtttctcgtgtgacctgggatagttccttttgtgctgtcaatcccagatttgttgccataatcatagaggcaagtgggggaggagcgttccttgtcctccctctgcacaagactggtcgaattgacaaatcttaccctacagtatgtggccacacaggaccagtgctggacatagactggtgcccacataacgatcaggtcattgccagcggttcagaggactgcacggtcatggtatggcagatcccagaaaatggactcaccctttccctgactgaacctgtggtgattttggaaggccactcaaagagagtcggcatcgtggcttggcatccaacggcccgcaatgtgcttcttagtgcaggctgtgataatgccattatcatctggaatgtgggaacaggggaagcccttataaacttggacgatatgcattcagacatgatttacaatgtgagctggaaccggaatggcagtctgatctgcacagcttccaaagacaagaaagtgagagtcattgatcccaggaaacaagagattgttgctgagaaggagaaagcacatgaaggagcaagacccatgagagccatcttcctggccgatggcaatgtcttcaccactgggttcagccgcatgagcgagcggcagctggctctctggaatccgaaaaatatgcaggaaccaattgctcttcatgagatggacactagcaatggggtgttgctgcctttctatgaccctgacaccagcatcatttacttatgtggaaagggtgacagcagtattcgctattttgagatcacggatgaatccccgtacgtccactacctcaacacattcagcagcaaggagcctcagagagggatgggttacatgcccaagaggggacttgatgttaacaaatgtgagattgccagattcttcaaacttcatgagagaaagtgtgaacctattattatgactgttcccaggaagtctgaccttttccaagatgacctgtatcctgacacagcggggccagaggccgcgctggaggcagaagagtggttcgaaggcaagaatgcagacccaatcctcatctccttgaagcacgggtacattccaggcaaaaacagggatctcaaggtggtcaagaagaacattctggatagcaagcccactgcaaacaagaagtgcgacctgatcagcatccccaagaaaaccacagacacggccagtgtgcaaaatgaagccaagttggatgagattttaaaagagatcaaatctataaaagacacaatctgcaatcaagatgagcgtatttccaagttagaacagcagatggcaaagatagcagcctgaaggtcccacccccacccctacagaaaaaatgggagcaagaacttgtgcttgggagctggttattggtgtggtcctagggagggcggaaagggaggcactgccatttggagacattccatttcagatttgtcaaccagcgataggccacattccagtaagaactcaatttgtctcccaaatttgcagaaacaaaacgtgatttaaaagctgagctttttatcagaaagcttttttgatgttttaagtgttatgtgacttgttgaactttttaaaaagtgctacttttaaaatcccagatactctgaattttagaaaacaaactaattctgattgtgtcgtgcccaagtaccctttttttttaatgaatagggaccaatgccacattgctttttatatttctttcttttttaatgttgccaaaaccaaaagtagctttgttttcctttgtattttgctactttgcagtatttgtgtgtgtggttttttttccttaatttgaaagggacagcactgtgtatgtttataaactaaatgaagataagatattattttgtataaacattcatctgagaacaatcaaagcagtagccacatggtgctggctcctttgcagcacaaacctggtcattttgatgactgtacaacaggaagacttgaaaaatcacgtggattcatattaccaccgctctcatttcatggagtcttctgatcaaaaaagctcacgtcgtatttcttcttttcctttctcttttctagaaattgggtgtttgtaccagaatggaattttgcttctcggttatcctgtgcttcagatgattataatctaacccaaactagcatgtgtttctgcagtttgttacacacctaggatcatattgcattcatcactttaaacatcatgtttcaggttttggtcaatacttgacaagggtgcccaggacaggaagacgtgtactgctgagtgttccttcttgcccttttcagcagcttgcccagctcttgagtacagtggtggggactaaaaatgtgggcatgtggagaggggtatttgccctgggtgatcctgtttccctgtgctgtccccatgctgtgttggaggaggaagtggctctccttccaccaacaaagctcctgctctaccctcttcctcacatgtgctgcgacctctctcagggctcccccagccattccttctttccttcctgccttttagctctaaccacattaagctaagacaaggccagagggtgcgattgaatgagtattgagactgaggagaatgatagagagtgaagcagaaacaggagcgcagacctctgctgtagctttaatgcatacaaacatgtccctccgcacaactaacctgccctgcctctccatctcgcaccaaggctgcgtcaaagcacagaggctccccggactcggagggggccagagactgagctctggtcacctgttcattcctcggttagctggaactttgccccgtttccagtttcttatagtgcatgcttgggaaacaagatttaaggagcctctgttttggaagggctgtctgtgattgaacgtgaaatgtgtagtgccattgggaccacgaagggaattcttgcacatgctcgtgctggtgtgggcatgggactggctggaaacgtctgtatgcagggagccagggtgagggcagagtgtggtgacagccgaacttggagtaatgtccgtgtagaaaaaggaccatgttcttatccagccaatactgggagtgctgtctccacaatttcagggcatctgaatgtttgatgtggttttgtgtgtgtgtatgtatgtgtttaatattgaagtggatcatgagatgtaaagaaaacaataatggcaatgacttatattcaaatctgtatttgtttctttatcaatgtaatctgctgaggaccttttgtctaagattcagtagtgttttaaggttctgatatcgaattaatgaagtaaagttgttgatggtggtgaaacaccgtagggcatgtggttcaaagagaagcaggagggcaagggaaagttaccctgatcttagtttgtagcttatgacttatttaatgaatggatgcccagccaagctcagagtaggcgcccaaagcattgtggattattttcctgttttgtctttttttttttttttttttaagccatgacatcccagaagaggacagtgaattactcctaggtcggctcttatagagtggccatagtgttctgtcaaaacacttgcttccattttcagagataaaaatcattgattacaaaa

SEQ ID NO: 454418 - DNA, 4130 bp, Homo sapiens
gctgcgccgaaatgactgaggatgaggtcagacgtggagggtgggaatgcagaaaccgagctctcccgcctgtccccaccggcgcacgctccccagctctccgtctctcaaatgatttgaatgtgttgggggaagtggcaggctgcggtgagagctgagaagaaaggggcttcctcttggagggaggcgctggccctggcatccttttttgggagtgttcaaaggattttgaacgctggaaaaggaatcgtaggctttactgcatcacgatttagaaacacatcctatatttggccgtaatgtaggctgcccttgttttgtggtgtctaaagtgcttgctctacatgttgcaaacgtgggattcagagtgcgaagcaaattgcaagttgttcatttcccccggcatgacacgatgaggcgagtggtacgacagagcaagtttcggcatgtatttgggcaagcggtgaaaaatgaccagtgctatgatgacatccgggtttctcgtgtgacctgggatagttccttttgtgctgtcaatcccagatttgttgccataatcatagaggcaagtgggggaggagcgttccttgtcctccctctgcacaagactggtcgaattgacaaatcttaccctacagtatgtggccacacaggaccagtgctggacatagactggtgcccacataacgatcaggtcattgccagcggttcagaggactgcacggtcatggtatggcagatcccagaaaatggactcaccctttccctgactgaacctgtggtgattttggaaggccactcaaagagagtcggcatcgtggcttggcatccaacggcccgcaatgtgcttcttagtgcaggctgtgataatgccattatcatctggaatgtgggaacaggggaagcccttataaacttggacgatatgcattcagacatgatttacaatgtgagctggaaccggaatggcagtctgatctgcacagcttccaaagacaagaaagtgagagtcattgatcccaggaaacaagagattgttgctgagaaggagaaagcacatgaaggagcaagacccatgagagccatcttcctggccgatggcaatgtcttcaccactgggttcagccgcatgagcgagcggcagctggctctctggaatccgaaaaatatgcaggaaccaattgctcttcatgagatggacactagcaatggggtgttgctgcctttctatgaccctgacaccagcatcatttacttatgtggaaagggtgacagcagtattcgctattttgagatcacggatgaatccccgtacgtccactacctcaacacattcagcagcaaggagcctcagagagggatgggttacatgcccaagaggggacttgatgttaacaaatgtgagattgccagattcttcaaacttcatgagagaaagtgtgaacctattattatgactgttcccaggaagtctgaccttttccaagatgacctgtatcctgacacagcggggccagaggccgcgctggaggcagaagagtggttcgaaggcaagaatgcagacccaatcctcatctccttgaagcacgggtacattccaggcaaaaacagggatctcaaggtggtcaagaagaacattctggatagcaagcccactgcaaacaagaagtgcgacctgatcagcatccccaagaaaaccacagacacggccagtgtgcaaaatgaagccaagttggatgagattttaaaagagatcaaatctataaaagacacaatctgcaatcaagatgagcgtatttccaagttagaacagcagatggcaaagatagcagcctgaaggtcccacccccacccctacagaaaaaatgggagcaagaacttgtgcttgggagctggttattggtgtggtcctagggagggcggaaagggaggcactgccatttggagacattccatttcagatttgtcaaccagcgataggccacattccagtaagaactcaatttgtctcccaaatttgcagaaacaaaacgtgatttaaaagctgagctttttatcagaaagcttttttgatgttttaagtgttatgtgacttgttgaactttttaaaaagtgctacttttaaaatcccagatactctgaattttagaaaacaaactaattctgattgtgtcgtgcccaagtaccctttttttttaatgaatagggaccaatgccacattgctttttatatttctttcttttttaatgttgccaaaaccaaaagtagctttgttttcctttgtattttgctactttgcagtatttgtgtgtgtggttttttttccttaatttgaaagggacagcactgtgtatgtttataaactaaatgaagataagatattattttgtataaacattcatctgagaacaatcaaagcagtagccacatggtgctggctcctttgcagcacaaacctggtcattttgatgactgtacaacaggaagacttgaaaaatcacgtggattcatattaccaccgctctcatttcatggagtcttctgatcaaaaaagctcacgtcgtatttcttcttttcctttctcttttctagaaattgggtgtttgtaccagaatggaattttgcttctcggttatcctgtgcttcagatgattataatctaacccaaactagcatgtgtttctgcagtttgttacacacctaggatcatattgcattcatcactttaaacatcatgtttcaggttttggtcaatacttgacaagggtgcccaggacaggaagacgtgtactgctgagtgttccttcttgcccttttcagcagcttgcccagctcttgagtacagtggtggggactaaaaatgtgggcatgtggagaggggtatttgccctgggtgatcctgtttccctgtgctgtccccatgctgtgttggaggaggaagtggctctccttccaccaacaaagctcctgctctaccctcttcctcacatgtgctgcgacctctctcagggctcccccagccattccttctttccttcctgccttttagctctaaccacattaagctaagacaaggccagagggtgcgattgaatgagtattgagactgaggagaatgatagagagtgaagcagaaacaggagcgcagacctctgctgtagctttaatgcatacaaacatgtccctccgcacaactaacctgccctgcctctccatctcgcaccaaggctgcgtcaaagcacagaggctccccggactcggagggggccagagactgagctctggtcacctgttcattcctcggttagctggaactttgccccgtttccagtttcttatagtgcatgcttgggaaacaagatttaaggagcctctgttttggaagggctgtctgtgattgaacgtgaaatgtgtagtgccattgggaccacgaagggaattcttgcacatgctcgtgctggtgtgggcatgggactggctggaaacgtctgtatgcagggagccagggtgagggcagagtgtggtgacagccgaacttggagtaatgtccgtgtagaaaaaggaccatgttcttatccagccaatactgggagtgctgtctccacaatttcagggcatctgaatgtttgatgtggttttgtgtgtgtgtatgtatgtgtttaatattgaagtggatcatgagatgtaaagaaaacaataatggcaatgacttatattcaaatctgtatttgtttctttatcaatgtaatctgctgaggaccttttgtctaagattcagtagtgttttaaggttctgatatcgaattaatgaagtaaagttgttgatggtggtgaaacaccgtagggcatgtggttcaaagagaagcaggagggcaagggaaagttaccctgatcttagtttgtagcttatgacttatttaatgaatggatgcccagccaagctcagagtaggcgcccaaagcattgtggattattttcctgttttgtctttttttttttttttttttaagccatgacatcccagaagaggacagtgaattactcctaggtcggctcttatagagtggccatagtgttctgtcaaaacacttgcttccattttcagagataaaaatcattgattacaaaa

SEQ ID NO: 454419 - DNA, 3420 bp, Homo sapiens
gccttaaaaagcagaaagctcacactcactcaagtctctctctctctctctgcatatacatatgtgtattctcactgtatctgtagttttctgagtgtgttacataggtgtttctaatcttctaatctctgatggttttgcctgttttaggctgtgataatgccattatcatctggaatgtgggaacaggggaagcccttataaacttggacgatatgcattcagacatgatttacaatgtgagctggaaccggaatggcagtctgatctgcacagcttccaaagacaagaaagtgagagtcattgatcccaggaaacaagagattgttgctgagaaggagaaagcacatgaaggagcaagacccatgagagccatcttcctggccgatggcaatgtcttcaccactgggttcagccgcatgagcgagcggcagctggctctctggaatccgaaaaatatgcaggaaccaattgctcttcatgagatggacactagcaatggggtgttgctgcctttctatgaccctgacaccagcatcatttacttatgtggaaagggtgacagcagtattcgctattttgagatcacggatgaatccccgtacgtccactacctcaacacattcagcagcaaggagcctcagagagggatgggttacatgcccaagaggggacttgatgttaacaaatgtgagattgccagattcttcaaacttcatgagagaaagtgtgaacctattattatgactgttcccaggaagtctgaccttttccaagatgacctgtatcctgacacagcggggccagaggccgcgctggaggcagaagagtggttcgaaggcaagaatgcagacccaatcctcatctccttgaagcacgggtacattccaggcaaaaacagggatctcaaggtggtcaagaagaacattctggatagcaagcccactgcaaacaagaagtgcgacctgatcagcatccccaagaaaaccacagacacggccagtgtgcaaaatgaagccaagttggatgagattttaaaagagatcaaatctataaaagacacaatctgcaatcaagatgagcgtatttccaagttagaacagcagatggcaaagatagcagcctgaaggtcccacccccacccctacagaaaaaatgggagcaagaacttgtgcttgggagctggttattggtgtggtcctagggagggcggaaagggaggcactgccatttggagacattccatttcagatttgtcaaccagcgataggccacattccagtaagaactcaatttgtctcccaaatttgcagaaacaaaacgtgatttaaaagctgagctttttatcagaaagcttttttgatgttttaagtgttatgtgacttgttgaactttttaaaaagtgctacttttaaaatcccagatactctgaattttagaaaacaaactaattctgattgtgtcgtgcccaagtaccctttttttttaatgaatagggaccaatgccacattgctttttatatttctttcttttttaatgttgccaaaaccaaaagtagctttgttttcctttgtattttgctactttgcagtatttgtgtgtgtggttttttttccttaatttgaaagggacagcactgtgtatgtttataaactaaatgaagataagatattattttgtataaacattcatctgagaacaatcaaagcagtagccacatggtgctggctcctttgcagcacaaacctggtcattttgatgactgtacaacaggaagacttgaaaaatcacgtggattcatattaccaccgctctcatttcatggagtcttctgatcaaaaaagctcacgtcgtatttcttcttttcctttctcttttctagaaattgggtgtttgtaccagaatggaattttgcttctcggttatcctgtgcttcagatgattataatctaacccaaactagcatgtgtttctgcagtttgttacacacctaggatcatattgcattcatcactttaaacatcatgtttcaggttttggtcaatacttgacaagggtgcccaggacaggaagacgtgtactgctgagtgttccttcttgcccttttcagcagcttgcccagctcttgagtacagtggtggggactaaaaatgtgggcatgtggagaggggtatttgccctgggtgatcctgtttccctgtgctgtccccatgctgtgttggaggaggaagtggctctccttccaccaacaaagctcctgctctaccctcttcctcacatgtgctgcgacctctctcagggctcccccagccattccttctttccttcctgccttttagctctaaccacattaagctaagacaaggccagagggtgcgattgaatgagtattgagactgaggagaatgatagagagtgaagcagaaacaggagcgcagacctctgctgtagctttaatgcatacaaacatgtccctccgcacaactaacctgccctgcctctccatctcgcaccaaggctgcgtcaaagcacagaggctccccggactcggagggggccagagactgagctctggtcacctgttcattcctcggttagctggaactttgccccgtttccagtttcttatagtgcatgcttgggaaacaagatttaaggagcctctgttttggaagggctgtctgtgattgaacgtgaaatgtgtagtgccattgggaccacgaagggaattcttgcacatgctcgtgctggtgtgggcatgggactggctggaaacgtctgtatgcagggagccagggtgagggcagagtgtggtgacagccgaacttggagtaatgtccgtgtagaaaaaggaccatgttcttatccagccaatactgggagtgctgtctccacaatttcagggcatctgaatgtttgatgtggttttgtgtgtgtgtatgtatgtgtttaatattgaagtggatcatgagatgtaaagaaaacaataatggcaatgacttatattcaaatctgtatttgtttctttatcaatgtaatctgctgaggaccttttgtctaagattcagtagtgttttaaggttctgatatcgaattaatgaagtaaagttgttgatggtggtgaaacaccgtagggcatgtggttcaaagagaagcaggagggcaagggaaagttaccctgatcttagtttgtagcttatgacttatttaatgaatggatgcccagccaagctcagagtaggcgcccaaagcattgtggattattttcctgttttgtctttttttttttttttttttaagccatgacatcccagaagaggacagtgaattactcctaggtcggctcttatagagtggccatagtgttctgtcaaaacacttgcttccattttcagagataaaaatcattgattacaaaa

SEQ ID NO: 454420 - DNA, 2578 bp, Homo sapiens
ccgcgcggcgcgggggcggggcctacgcgcggtggcgggggcggtggcggctgcccgcgcccctcccccgcacggcgctcagtgccaggctggaggcggcagcggttggaggcttcgcccggctttgcagcggggacttcggcggcggcgcctcaggcacctcggcccggacacgatgaggcgagtggtacgacagagcaagtttcggcatgtatttgggcaagcggtgaaaaatgaccagtgctatgatgacatccgggtttctcgtgtgacctgggatagttccttttgtgctgtcaatcccagatttgttgccataatcatagaggcaagtgggggaggagcgttccttgtcctccctctgcacaagactggtcgaattgacaaatcttaccctacagtatgtggccacacaggaccagtgctggacatagactggtgcccacataacgatcaggtcattgccagcggttcagaggactgcacggtcatggtatggcagatcccagaaaatggactcaccctttccctgactgaacctgtggtgattttggaaggccactcaaagagagtcggcatcgtggcttggcatccaacggcccgcaatgtgcttcttagtgcaggctgtgataatgccattatcatctggaatgtgggaacaggggaagcccttataaacttggacgatatgcattcagacatgatttacaatgtgagctggaaccggaatggcagtctgatctgcacagcttccaaagacaagaaagtgagagtcattgatcccaggaaacaagagattgttgctgagaaggagaaagcacatgaaggagcaagacccatgagagccatcttcctggccgatggcaatgtcttcaccactgggttcagccgcatgagcgagcggcagctggctctctggaatccgaaaaatatgcaggaaccaattgctcttcatgagatggacactagcaatggggtgttgctgcctttctatgaccctgacaccagcatcatttacttatgtggaaagggtgacagcagtattcgctattttgagatcacggatgaatccccgtacgtccactacctcaacacattcagcagcaaggagcctcagagagggatgggttacatgcccaagaggggacttgatgttaacaaatgtgagattgccagattcttcaaacttcatgagagaaagtgtgaacctattattatgactgttcccaggaagtctgaccttttccaagatgacctgtatcctgacacagcggggccagaggccgcgctggaggcagaagagtggttcgaaggcaagaatgcagacccaatcctcatctccttgaagcacgggtacattccaggcaaaaacagggatctcaaggtggtcaagaagaacattctggatagcaagcccactgcaaacaagaagtgcgacctgatcagcatccccaagaaaaccacagacacggccagtgtgcaaaatgaagccaagttggatgagattttaaaagagatcaaatctataaaagacacaatctgcaatcaagatgagcgtatttccaagttagaacagcagatggcaaagatagcagcctgaaggtcccacccccacccctacagaaaaaatgggagcaagaacttgtgcttgggagctggttattggtgtggtcctagggagggcggaaagggaggcactgccatttggagacattccatttcagatttgtcaaccagcgataggccacattccagtaagaactcaatttgtctcccaaatttgcagaaacaaaacgtgatttaaaagctgagctttttatcagaaagcttttttgatgttttaagtgttatgtgacttgttgaactttttaaaaagtgctacttttaaaatcccagatactctgaattttagaaaacaaactaattctgattgtgtcgtgcccaagtaccctttttttttaatgaatagggaccaatgccacattgctttttatatttctttcttttttaatgttgccaaaaccaaaagtagctttgttttcctttgtattttgctactttgcagtatttgtgtgtgtggttttttttccttaatttgaaagggacagcactgtgtatgtttataaactaaatgaagataagatattattttgtataaacattcatctgagaacaatcaaagcagtagccacatggtgctggctcctttgcagcacaaacctggtcattttgatgactgtacaacaggaagacttgaaaaatcacgtggattcatattaccaccgctctcatttcatggagtcttctgatcaaaaaagctcacgtcgtatttcttcttttcctttctcttttctagaaattgggtgtttgtaccagaatggaattttgcttctcggttatcctgtgcttcagatgattataatctaacccaaaataaaaaaaaaaaaaacccaaattttttttattggggccagggtgggaaggagtgggtaacaaagggggagccagggggcctgtgaatggtgaggggaggggttccgctcaacaagatgcaagcacagggtggcgccggggaccc

SEQ ID NO: 454421 - DNA, 2501 bp, Homo sapiens
gcggataatggcggtcccggaatgcaggggcagcaagaagtgcgacctgatcagcatccccaagaaaaccacagacacggccagtgtgcaaaatgaagccaagttggatgagattttaaaagagatcaaatctataaaagacacaatctgcaatcaagatgagcgtatttccaagttagaacagcagatggcaaagatagcagcctgaaggtcccacccccacccctacagaaaaaatgggagcaagaacttgtgcttgggagctggttattggtgtggtcctagggagggcggaaagggaggcactgccatttggagacattccatttcagatttgtcaaccagcgataggccacattccagtaagaactcaatttgtctcccaaatttgcagaaacaaaacgtgatttaaaagctgagctttttatcagaaagcttttttgatgttttaagtgttatgtgacttgttgaactttttaaaaagtgctacttttaaaatcccagatactctgaattttagaaaacaaactaattctgattgtgtcgtgcccaagtaccctttttttttaatgaatagggaccaatgccacattgctttttatatttctttcttttttaatgttgccaaaaccaaaagtagctttgttttcctttgtattttgctactttgcagtatttgtgtgtgtggttttttttccttaatttgaaagggacagcactgtgtatgtttataaactaaatgaagataagatattattttgtataaacattcatctgagaacaatcaaagcagtagccacatggtgctggctcctttgcagcacaaacctggtcattttgatgactgtacaacaggaagacttgaaaaatcacgtggattcatattaccaccgctctcatttcatggagtcttctgatcaaaaaagctcacgtcgtatttcttcttttcctttctcttttctagaaattgggtgtttgtaccagaatggaattttgcttctcggttatcctgtgcttcagatgattataatctaacccaaactagcatgtgtttctgcagtttgttacacacctaggatcatattgcattcatcactttaaacatcatgtttcaggttttggtcaatacttgacaagggtgcccaggacaggaagacgtgtactgctgagtgttccttcttgcccttttcagcagcttgcccagctcttgagtacagtggtggggactaaaaatgtgggcatgtggagaggggtatttgccctgggtgatcctgtttccctgtgctgtccccatgctgtgttggaggaggaagtggctctccttccaccaacaaagctcctgctctaccctcttcctcacatgtgctgcgacctctctcagggctcccccagccattccttctttccttcctgccttttagctctaaccacattaagctaagacaaggccagagggtgcgattgaatgagtattgagactgaggagaatgatagagagtgaagcagaaacaggagcgcagacctctgctgtagctttaatgcatacaaacatgtccctccgcacaactaacctgccctgcctctccatctcgcaccaaggctgcgtcaaagcacagaggctccccggactcggagggggccagagactgagctctggtcacctgttcattcctcggttagctggaactttgccccgtttccagtttcttatagtgcatgcttgggaaacaagatttaaggagcctctgttttggaagggctgtctgtgattgaacgtgaaatgtgtagtgccattgggaccacgaagggaattcttgcacatgctcgtgctggtgtgggcatgggactggctggaaacgtctgtatgcagggagccagggtgagggcagagtgtggtgacagccgaacttggagtaatgtccgtgtagaaaaaggaccatgttcttatccagccaatactgggagtgctgtctccacaatttcagggcatctgaatgtttgatgtggttttgtgtgtgtgtatgtatgtgtttaatattgaagtggatcatgagatgtaaagaaaacaataatggcaatgacttatattcaaatctgtatttgtttctttatcaatgtaatctgctgaggaccttttgtctaagattcagtagtgttttaaggttctgatatcgaattaatgaagtaaagttgttgatggtggtgaaacaccgtagggcatgtggttcaaagagaagcaggagggcaagggaaagttaccctgatcttagtttgtagcttatgacttatttaatgaatggatgcccagccaagctcagagtaggcgcccaaagcattgtggattattttcctgttttgtctttttttttttttttttttaagccatgacatcccagaagaggacagtgaattactcctaggtcggctcttatagagtggccatagtgttctgtcaaaacacttgcttccattttcagagataaaaatcattgattacaaaa

SEQ ID NO: 454422 - DNA, 2750 bp, Homo sapiens
acgtaggacactgttgaaggagcctgttttgtcctatagtctaactgtgacccaggagaccctttgtttgagtaaatgcacaggcttcgggatcagaagtggcactgtgacactgtgacacactgttgttttgccacgggatctcagatagatcggccagtgctcattgcattcaaagccccagacatagtagggctttgacttctcttttcaacttggtgactatggcttgccgtttgcaaaatagaaatctacattttatatcttacaagttttgaacagtgttgaactttgtttactgcattttaatcactgcctcctttttttgttttcttagcaaaatgaagccaagttggatgagattttaaaagagatcaaatctataaaagacacaatctgcaatcaagatgagcgtatttccaagttagaacagcagatggcaaagatagcagcctgaaggtcccacccccacccctacagaaaaaatgggagcaagaacttgtgcttgggagctggttattggtgtggtcctagggagggcggaaagggaggcactgccatttggagacattccatttcagatttgtcaaccagcgataggccacattccagtaagaactcaatttgtctcccaaatttgcagaaacaaaacgtgatttaaaagctgagctttttatcagaaagcttttttgatgttttaagtgttatgtgacttgttgaactttttaaaaagtgctacttttaaaatcccagatactctgaattttagaaaacaaactaattctgattgtgtcgtgcccaagtaccctttttttttaatgaatagggaccaatgccacattgctttttatatttctttcttttttaatgttgccaaaaccaaaagtagctttgttttcctttgtattttgctactttgcagtatttgtgtgtgtggttttttttccttaatttgaaagggacagcactgtgtatgtttataaactaaatgaagataagatattattttgtataaacattcatctgagaacaatcaaagcagtagccacatggtgctggctcctttgcagcacaaacctggtcattttgatgactgtacaacaggaagacttgaaaaatcacgtggattcatattaccaccgctctcatttcatggagtcttctgatcaaaaaagctcacgtcgtatttcttcttttcctttctcttttctagaaattgggtgtttgtaccagaatggaattttgcttctcggttatcctgtgcttcagatgattataatctaacccaaactagcatgtgtttctgcagtttgttacacacctaggatcatattgcattcatcactttaaacatcatgtttcaggttttggtcaatacttgacaagggtgcccaggacaggaagacgtgtactgctgagtgttccttcttgcccttttcagcagcttgcccagctcttgagtacagtggtggggactaaaaatgtgggcatgtggagaggggtatttgccctgggtgatcctgtttccctgtgctgtccccatgctgtgttggaggaggaagtggctctccttccaccaacaaagctcctgctctaccctcttcctcacatgtgctgcgacctctctcagggctcccccagccattccttctttccttcctgccttttagctctaaccacattaagctaagacaaggccagagggtgcgattgaatgagtattgagactgaggagaatgatagagagtgaagcagaaacaggagcgcagacctctgctgtagctttaatgcatacaaacatgtccctccgcacaactaacctgccctgcctctccatctcgcaccaaggctgcgtcaaagcacagaggctccccggactcggagggggccagagactgagctctggtcacctgttcattcctcggttagctggaactttgccccgtttccagtttcttatagtgcatgcttgggaaacaagatttaaggagcctctgttttggaagggctgtctgtgattgaacgtgaaatgtgtagtgccattgggaccacgaagggaattcttgcacatgctcgtgctggtgtgggcatgggactggctggaaacgtctgtatgcagggagccagggtgagggcagagtgtggtgacagccgaacttggagtaatgtccgtgtagaaaaaggaccatgttcttatccagccaatactgggagtgctgtctccacaatttcagggcatctgaatgtttgatgtggttttgtgtgtgtgtatgtatgtgtttaatattgaagtggatcatgagatgtaaagaaaacaataatggcaatgacttatattcaaatctgtatttgtttctttatcaatgtaatctgctgaggaccttttgtctaagattcagtagtgttttaaggttctgatatcgaattaatgaagtaaagttgttgatggtggtgaaacaccgtagggcatgtggttcaaagagaagcaggagggcaagggaaagttaccctgatcttagtttgtagcttatgacttatttaatgaatggatgcccagccaagctcagagtaggcgcccaaagcattgtggattattttcctgttttgtctttttttttttttttttttaagccatgacatcccagaagaggacagtgaattactcctaggtcggctcttatagagtggccatagtgttctgtcaaaacacttgcttccattttcagagataaaaatcattgattacaaaa

SEQ ID NO: 454423 - DNA, 1653 bp, Homo sapiens
gcggccgcctactactactactgctcgaattcaagcttctaacgatgtacggggcatggagtcttctgatcaaaaaagctcacgtcgtatttcttcttttcctttctcttttctagaaattgggtgtttgtaccagaatggaattttgcttctcggttatcctgtgcttcagatgattataatctaacccaaactagcatgtgtttctgcagtttgttacacacctaggatcatattgcattcatcactttaaacatcatgtttcaggttttggtcaatacttgacaagggtgcccaggacaggaagacgtgtactgctgagtgttccttcttgcccttttcagcagcttgcccagctcttgagtacagtggtggggactaaaaatgtgggcatgtggagaggggtatttgccctgggtgatcctgtttccctgtgctgtccccatgctgtgttggaggaggaagtggctctccttccaccaacaaagctcctgctctaccctcttcctcacatgtgctgcgacctctctcagggctcccccagccattccttctttccttcctgccttttagctctaaccacattaagctaagacaaggccagagggtgcgattgaatgagtattgagactgaggagaatgatagagagtgaagcagaaacaggagcgcagacctctgctgtagctttaatgcatacaaacatgtccctccgcacaactaacctgccctgcctctccatctcgcaccaaggctgcgtcaaagcacagaggctccccggactcggagggggccagagactgagctctggtcacctgttcattcctcggttagctggaactttgccccgtttccagtttcttatagtgcatgcttgggaaacaagatttaaggagcctctgttttggaagggctgtctgtgattgaacgtgaaatgtgtagtgccattgggaccacgaagggaattcttgcacatgctcgtgctggtgtgggcatgggactggctggaaacgtctgtatgcagggagccagggtgagggcagagtgtggtgacagccgaacttggagtaatgtccgtgtagaaaaaggaccatgttcttatccagccaatactgggagtgctgtctccacaatttcagggcatctgaatgtttgatgtggttttgtgtgtgtgtatgtatgtgtttaatattgaagtggatcatgagatgtaaagaaaacaataatggcaatgacttatattcaaatctgtatttgtttctttatcaatgtaatctgctgaggaccttttgtctaagattcagtagtgttttaaggttctgatatcgaattaatgaagtaaagttgttgatggtggtgaaacaccgtagggcatgtggttcaaagagaagcaggagggcaagggaaagttaccctgatcttagtttgtagcttatgacttatttaatgaatggatgcccagccaagctcagagtaggcgcccaaagcattgtggattattttcctgttttgtctttttttttttttttttttaagccatgacatcccagaagaggacagtgaattactcctaggtcggctcttatagagtggccatagtgttctgtcaaaacacttgcttccattttcagagataaaaatcattgattacaaaa

SEQ ID NO: 454424 - DNA, 1659 bp, Homo sapiens
ccgcgcggcgcgggggcggggcctacgcgcggtggcgggggcggtggcggctgcccgcgcccctcccccgcacggcgctcagtgccaggctggaggcggcagcggttggaggcttcgcccggctttgcagcggggacttcggcggcggcgcctcaggcacctcggcccggacacgatgaggcgagtggtacgacagagcaagtttcggcatgtatttgggcaagcggtgaaaaatgaccagtgctatgatgacatccgggtttctcgtgtgacctgggatagttccttttgtgctgtcaatcccagatttgttgccataatcatagaggcaagtgggggaggagcgttccttgtcctccctctgcacaagactggtcgaattgacaaatcttaccctacagtatgtggccacacaggaccagtgctggacatagactggtgcccacataacgatcaggtcattgccagcggttcagaggactgcacggtcatggtatggcagatcccagaaaatggactcaccctttccctgactgaacctgtggtgattttggaaggccactcaaagagagtcggcatcgtggcttggcatccaacggcccgcaatgtgcttcttagtgcaggctgtgataatgccattatcatctggaatgtgggaacaggggaagcccttataaacttggacgatatgcattcagacatgatttacaatgtgagctggaaccggaatggcagtctgatctgcacagcttccaaagacaagaaagtgagagtcattgatcccaggaaacaagagattgttgctgagaaggagaaagcacatgaaggagcaagacccatgagagccatcttcctggccgatggcaatgtcttcaccactgggttcagccgcatgagcgagcggcagctggctctctggaatccgaaaaatatgcaggaaccaattgctcttcatgagatggacactagcaatggggtgttgctgcctttctatgaccctgacaccagcatcatttacttatgtggaaagggtgacagcagtattcgctattttgagatcacggatgaatccccgtacgtccactacctcaacacattcagcagcaaggagcctcagagagggatgggttacatgcccaagaggggacttgatgttaacaaatgtgagattgccagattcttcaaacttcatgagagaaagtgtgaacctattattatgactgttcccaggaagtctgaccttttccaagatgacctgtatcctgacacagcggggccagaggccgcgctggaggcagaagagtggttcgaaggcaagaatgcagacccaatcctcatctccttgaagcacgggtacattccaggcaaaaacagggatctcaaggtggtcaagaagaacattctggatagcaagcccactgcaaacaagaagtgcgacctgatcagcatccccaagaaaaccacagacacggccagtgtgcaaaatgaagccaagttggatgagattttaaaagagatcaaatctataaaagacacaatctgcaatcaagatgagcgtatttccaagttagaacagcagatggcaaagatagcaacacgacgatccaacacccactgtgctagatgaaagcagacaaggaaagtgtggaggagatctta

SEQ ID NO: 454425 - DNA, 1013 bp, Homo sapiens
gcctaacgatggtcctcagcttgtgagcgcagacctctgctgtagctttaatgcatacaaacatgtccctccgcacaactaacctgccctgcctctccatctcgcaccaaggctgcgtcaaagcacagaggctccccggactcggagggggccagagactgagctctggtcacctgttcattcctcggttagctggaactttgccccgtttccagtttcttatagtgcatgcttgggaaacaagatttaaggagcctctgttttggaagggctgtctgtgattgaacgtgaaatgtgtagtgccattgggaccacgaagggaattcttgcacatgctcgtgctggtgtgggcatgggactggctggaaacgtctgtatgcagggagccagggtgagggcagagtgtggtgacagccgaacttggagtaatgtccgtgtagaaaaaggaccatgttcttatccagccaatactgggagtgctgtctccacaatttcagggcatctgaatgtttgatgtggttttgtgtgtgtgtatgtatgtgtttaatattgaagtggatcatgagatgtaaagaaaacaataatggcaatgacttatattcaaatctgtatttgtttctttatcaatgtaatctgctgaggaccttttgtctaagattcagtagtgttttaaggttctgatatcgaattaatgaagtaaagttgttgatggtggtgaaacaccgtagggcatgtggttcaaagagaagcaggagggcaagggaaagttaccctgatcttagtttgtagcttatgacttatttaatgaatggatgcccagccaagctcagagtaggcgcccaaagcattgtggattattttcctgttttgtctttttttttttttttttttaagccatgacatcccagaagaggacagtgaattactcctaggtcggctcttatagagtggccatagtgttctgtcaaaacacttgcttccattttcagagataaaaatcattgattacaaaa

SEQ ID NO: 454426 - DNA, 931 bp, Homo sapiens
aacgatggtcctacagctatcctgctcagtatactttgtcctgctatgtagaaagccttccacttgtggaaacagtaataatgtggaacagtgagagaaaatgataaaagaatcatgaaaaataacatctacatgagaaggacctttatagtcaagcttcacaagaagactgggaatcaagttgaagggctgtctgtgattgaacgtgaaatgtgtagtgccattgggaccacgaagggaattcttgcacatgctcgtgctggtgtgggcatgggactggctggaaacgtctgtatgcagggagccagggtgagggcagagtgtggtgacagccgaacttggagtaatgtccgtgtagaaaaaggaccatgttcttatccagccaatactgggagtgctgtctccacaatttcagggcatctgaatgtttgatgtggttttgtgtgtgtgtatgtatgtgtttaatattgaagtggatcatgagatgtaaagaaaacaataatggcaatgacttatattcaaatctgtatttgtttctttatcaatgtaatctgctgaggaccttttgtctaagattcagtagtgttttaaggttctgatatcgaattaatgaagtaaagttgttgatggtggtgaaacaccgtagggcatgtggttcaaagagaagcaggagggcaagggaaagttaccctgatcttagtttgtagcttatgacttatttaatgaatggatgcccagccaagctcagagtaggcgcccaaagcattgtggattattttcctgttttgtctttttttttttttttttttaagccatgacatcccagaagaggacagtgaattactcctaggtcggctcttatagagtggccatagtgttctgtcaaaacacttgcttccattttcagagataaaaatcattgattacaaaa

SEQ ID NO: 454427 - DNA, 527 bp, Homo sapiens
agctcggtaccccgagtgggtccctgcgagtgggtccctgtgtgtgtatgtatgtgtttaatattgaagtggatcatgagatgtaaagaaaacaataatggcaatgacttatattcaaatctgtatttgtttctttatcaatgtaatctgctgaggaccttttgtctaagattcagtagtgttttaaggttctgatatcgaattaatgaagtaaagttgttgatggtggtgaaacaccgtagggcatgtggttcaaagagaagcaggagggcaagggaaagttaccctgatcttagtttgtagcttatgacttatttaatgaatggatgcccagccaagctcagagtaggcgcccaaagcattgtggattattttcctgttttgtctttttttttttttttttttaagccatgacatcccagaagaggacagtgaattactcctaggtcggctcttatagagtggccatagtgttctgtcaaaacacttgcttccattttcagagataaaaatcattgattacaaaa

SEQ ID NO: 454428 - DNA, 1111 bp, Homo sapiens
ccgcgcggcgcgggggcggggcctacgcgcggtggcgggggcggtggcggctgcccgcgcccctcccccgcacggcgctcagtgccaggctggaggcggcagcggttggaggcttcgcccggctttgcagcggggacttcggcggcggcgcctcaggcacctcggcccggacacgatgaggcgagtggtacgacagagcaagtttcggcatgtatttgggcaagcggtgaaaaatgaccagtgctatgatgacatccgggtttctcgtgtgacctgggatagttccttttgtgctgtcaatcccagatttgttgccataatcatagaggcaagtgggggaggagcgttccttgtcctccctctgcacaagactggtcgaattgacaaatcttaccctacagtatgtggccacacaggaccagtgctggacatagactggtgcccacataacgatcaggtcattgccagcggttcagaggactgcacggtcatggtatggcagatcccagaaaatggactcaccctttccctgactgaacctgtggtgattttggaaggccactcaaagagagtcggcatcgtggcttggcatccaacggcccgcaatgtgcttcttagtgcaggctgtgataatgccattatcatctggaatgtgggaacaggggaagcccttataaacttggacgatatgcattcagacatgatttacaatgtgagctggaaccggaatggcagtctgatctgcacagcttccaaagacaagaaagtgagagtcattgatcccaggaaacaagagattgttgctgaaaaggagaaaagcccttgaaggcgcaagaccatgacaaccattttcctgtgccgatggacaatgttcttcaacaacagggttacagaccgtattagaccagaacaggtcacctggggcatcttctggcattcccgaacaaaagtaatgcaggaaaccaagtggtccacacttccagatgtgaccctaaccaatggcgcgtcttgtactcgacatcctaataaccattcgacaagaaataactagatatctagcaccacgttcgaggcaaatacgaacattgagaaaatcgcgatatccggaata

SEQ ID NO: 454429 - DNA, 1348 bp, Homo sapiens
gctgcgccgaaatgactgaggatgaggtcagacgtggagggtgggaatgcagaaaccgagctctcccgcctgtccccaccggcgcacgctccccagctctccgtctctcaaatgatttgaatgtgttgggggaagtggcaggctgcggtgagagctgagaagaaaggggcttcctcttggagggaggcgctggccctggcatccttttttgggagtgttcaaaggattttgaacgctggaaaaggaatcgtaggctttactgcatcacgatttagaaacacatcctatatttggccgtaatgtaggctgcccttgttttgtggtgtctaaagtgcttgctctacatgttgcaaacgtgggattcagagtgcgaagcaaattgcaagttgttcatttcccccggcatgacacgatgaggcgagtggtacgacagagcaagtttcggcatgtatttgggcaagcggtgaaaaatgaccagtgctatgatgacatccgggtttctcgtgtgacctgggatagttccttttgtgctgtcaatcccagatttgttgccataatcatagaggcaagtgggggaggagcgttccttgtcctccctctgcacaagactggtcgaattgacaaatcttaccctacagtatgtggccacacaggaccagtgctggacatagactggtgcccacataacgatcaggtcattgccagcggttcagaggactgcacggtcatggtatggcagatcccagaaaatggactcaccctttccctgactgaacctgtggtgattttggaaggccactcaaagagagtcggcatcgtggcttggcatccaacggcccgcaatgtgcttcttagtgcaggctgtgataatgccattatcatctggaatgtgggaacaggggaagcccttataaacttggacgatatgcattcagacatgatttacaatgtgagctggaaccggaatggcagtctgatctgcacagcttccaaagacaagaaagtgagagtcattgatcccaggaaacaagagattgttgctgaaaaggagaaaagcccttgaaggcgcaagaccatgacaaccattttcctgtgccgatggacaatgttcttcaacaacagggttacagaccgtattagaccagaacaggtcacctggggcatcttctggcattcccgaacaaaagtaatgcaggaaaccaagtggtccacacttccagatgtgaccctaaccaatggcgcgtcttgtactcgacatcctaataaccattcgacaagaaataactagatatctagcaccacgttcgaggcaaatacgaacattgagaaaatcgcgatatccggaata

SEQ ID NO: 454430 - DNA, 4146 bp, Homo sapiens
  misc_feature (4120)..(4120): n is a, c, g, or t
ccgcgcggcgcgggggcggggcctacgcgcggtggcgggggcggtggcggctgcccgcgcccctcccccgcacggcgctcagtgccaggctggaggcggcagcggttggaggcttcgcccggctttgcagcggggacttcggcggcggcgcctcaggcacctcggcccggacacgatgaggcgagtggtacgacagagcaagtttcggcatgtatttgggcaagcggtgaaaaatgaccagtgctatgatgacatccgggtttctcgtgtgacctgggatagttccttttgtgctgtcaatcccagatttgttgccataatcatagaggcaagtgggggaggagcgttccttgtcctccctctgcacaagactggtcgaattgacaaatcttaccctacagtatgtggccacacaggaccagtgctggacatagactggtgcccacataacgatcaggtcattgccagcggttcagaggactgcacggtcatggtatggcagatcccagaaaatggactcaccctttccctgactgaacctgtggtgattttggaaggccactcaaagagagtcggcatcgtggcttggcatccaacggcccgcaatgtgcttcttagtgcaggctgtgataatgccattatcatctggaatgtgggaacaggggaagcccttataaacttggacgatatgcattcagacatgatttacaatgtgagctggaaccggaatggcagtctgatctgcacagcttccaaagacaagaaagtgagagtcattgatcccaggaaacaagagattgttgctgagaaggagaaagcacatgaaggagcaagacccatgagagccatcttcctggccgatggcaatgtcttcaccactgggttcagccgcatgagcgagcggcagctggctctctggaatccgaaaaatatgcaggaaccaattgctcttcatgagatggacactagcaatggggtgttgctgcctttctatgaccctgacaccagcatcatttacttatgtggaaagggtgacagcagtattcgctattttgagatcacggatgaatccccgtacgtccactacctcaacacattcagcagcaaggagcctcagagagggatgggttacatgcccaagaggggacttgatgttaacaaatgtgagattgccagattcttcaaacttcatgagagaaagtgtgaacctattattatgactgttcccaggaagtctgaccttttccaagatgacctgtatcctgacacagcggggccagaggccgcgctggaggcagaagagtggttcgaaggcaagaatgcagacccaatcctcatctccttgaagcacgggtacattccaggcaaaaacagggatctcaaggtggtcaagaagaacattctggatagcaagcccactgcaaacaagaagtgcgacctgatcagcatccccaagaaaaccacagacacggccagtgtgcaaaatgaagccaagttggatgagattttaaaagagatcaaatctataaaagacacaatctgcaatcaagatgagcgtatttccaagttagaacagcagatggcaaagatagcagcctgaaggtcccacccccacccctacagaaaaaatgggagcaagaacttgtgcttgggagctggttattggtgtggtcctagggagggcggaaagggaggcactgccatttggagacattccatttcagatttgtcaaccagcgataggccacattccagtaagaactcaatttgtctcccaaatttgcagaaacaaaacgtgatttaaaagctgagctttttatcagaaagcttttttgatgttttaagtgttatgtgacttgttgaactttttaaaaagtgctacttttaaaatcccagatactctgaattttagaaaacaaactaattctgattgtgtcgtgcccaagtaccctttttttttaatgaatagggaccaatgccacattgctttttatatttctttcttttttaatgttgccaaaaccaaaagtagctttgttttcctttgtattttgctactttgcagtatttgtgtgtgtggttttttttccttaatttgaaagggacagcactgtgtatgtttataaactaaatgaagataagatattattttgtataaacattcatctgagaacaatcaaagcagtagccacatggtgctggctcctttgcagcacaaacctggtcattttgatgactgtacaacaggaagacttgaaaaatcacgtggattcatattaccaccgctctcatttcatggagtcttctgatcaaaaaagctcacgtcgtatttcttcttttcctttctcttttctagaaattgggtgtttgtaccagaatggaattttgcttctcggttatcctgtgcttcagatgattataatctaacccaaactagcatgtgtttctgcagtttgttacacacctaggatcatattgcattcatcactttaaacatcatgtttcaggttttggtcaatacttgacaagggtgcccaggacaggaagacgtgtactgctgagtgttccttcttgcccttttcagcagcttgcccagctcttgagtacagtggtggggactaaaaatgtgggcatgtggagaggggtatttgccctgggtgatcctgtttccctgtgctgtccccatgctgtgttggaggaggaagtggctctccttccaccaacaaagctcctgctctaccctcttcctcacatgtgctgcgacctctctcagggctcccccagccattccttctttccttcctgccttttagctctaaccacattaagctaagacaaggccagagggtgcgattgaatgagtattgagactgaggagaatgatagagagtgaagcagaaacaggagcgcagacctctgctgtagctttaatgcatacaaacatgtccctccgcacaactaacctgccctgcctctccatctcgcaccaaggctgcgtcaaagcacagaggctccccggactcggagggggccagagactgagctctggtcacctgttcattcctcggttagctggaactttgccccgtttccagtttcttatagtgcatgcttgggaaacaagatttaaggagcctctgttttggaagggctgtctgtgattgaacgtgaaatgtgtagtgccattgggaccacgaagggaattcttgcacatgctcgtgctggtgtgggcatgggactggctggaaacgtctgtatgcagggagccagggtgagggcagagtgtggtgacagccgaacttggagtaatgtccgtgtagaaaaaggaccatgttcttatccagccaatactgggagtgctgtctccacaatttcagggcatctgaatgtttgatgtggttttgtgtgtgtgtatgtatgtgtttaatattgaagtggatcatgagatgtaaagaaaacaataatggcaatgacttatattcaaatctgtatttgtttctttatcaatgtaatctgctgaggaccttttgtctaagattcagtagtgttttaaggttctgatatcgaattaatgaagtaaagttgttgatggtggtgaaacaccgtagggcatgtggttcaaagagaagcaggagggcaagggaaagttaccctgatcttagtttgtagcttatgacttatttaatgaatggatgcccagccaagctcagagtaggcgcccaaagcattgtggattattttcctgttttgtctttttttttttttttttttaagccatgacatcccagaagaggacagtgaattactcctaggtcggctcttatagagtggccatagtgttctgtcaaaacacttgcttccattttcagagataaaaatcattgattacaaaaaaaaccagacataccaacgacaaaagcggcggggcggtaaaaaatccccgaggaggccgacgtttccggcatccccagttttggggacaaaagggcccaataggggagagtaattaaaaaaggaggggccagtaaaacaccgcgggaggaaacgccgcggcactcgtgaggaccctctgcggcggcacagggcccatccagagtagccgggcaatactagttagggnacaccattcggatgttgcctgatacg

SEQ ID NO: 454431 - DNA, 4160 bp, Homo sapiens
  misc_feature (3271)..(3271): n is a, c, g, or t
  misc_feature (3273)..(3273): n is a, c, g, or t
  misc_feature (3284)..(3284): n is a, c, g, or t
  misc_feature (3286)..(3286): n is a, c, g, or t
  misc_feature (3290)..(3291): n is a, c, g, or t
  misc_feature (3300)..(3301): n is a, c, g, or t
  misc_feature (3325)..(3325): n is a, c, g, or t
  misc_feature (3357)..(3357): n is a, c, g, or t
  misc_feature (3456)..(3456): n is a, c, g, or t
  misc_feature (3461)..(3461): n is a, c, g, or t
  misc_feature (3490)..(3490): n is a, c, g, or t
  misc_feature (3509)..(3509): n is a, c, g, or t
  misc_feature (3579)..(3579): n is a, c, g, or t
  misc_feature (3582)..(3583): n is a, c, g, or t
  misc_feature (3587)..(3587): n is a, c, g, or t
  misc_feature (3606)..(3606): n is a, c, g, or t
  misc_feature (3623)..(3623): n is a, c, g, or t
  misc_feature (3635)..(3638): n is a, c, g, or t
  misc_feature (3643)..(3643): n is a, c, g, or t
  misc_feature (3700)..(3700): n is a, c, g, or t
  misc_feature (3725)..(3725): n is a, c, g, or t
  misc_feature (3729)..(3729): n is a, c, g, or t
  misc_feature (3735)..(3735): n is a, c, g, or t
  misc_feature (3737)..(3737): n is a, c, g, or t
  misc_feature (3743)..(3743): n is a, c, g, or t
  misc_feature (3762)..(3767): n is a, c, g, or t
  misc_feature (4134)..(4134): n is a, c, g, or t
ccgcgcggcgcgggggcggggcctacgcgcggtggcgggggcggtggcggctgcccgcgcccctcccccgcacggcgctcagtgccaggctggaggcggcagcggttggaggcttcgcccggctttgcagcggggacttcggcggcggcgcctcaggcacctcggcccggacacgatgaggcgagtggtacgacagagcaagtttcggcatgtatttgggcaagcggtgaaaaatgaccagtgctatgatgacatccgggtttctcgtgtgacctgggatagttccttttgtgctgtcaatcccagatttgttgccataatcatagaggcaagtgggggaggagcgttccttgtcctccctctgcacaagactggtcgaattgacaaatcttaccctacagtatgtggccacacaggaccagtgctggacatagactggtgcccacataacgatcaggtcattgccagcggttcagaggactgcacggtcatggtatggcagatcccagaaaatggactcaccctttccctgactgaacctgtggtgattttggaaggccactcaaagagagtcggcatcgtggcttggcatccaacggcccgcaatgtgcttcttagtgcaggctgtgataatgccattatcatctggaatgtgggaacaggggaagcccttataaacttggacgatatgcattcagacatgatttacaatgtgagctggaaccggaatggcagtctgatctgcacagcttccaaagacaagaaagtgagagtcattgatcccaggaaacaagagattgttgctgagaaggagaaagcacatgaaggagcaagacccatgagagccatcttcctggccgatggcaatgtcttcaccactgggttcagccgcatgagcgagcggcagctggctctctggaatccgaaaaatatgcaggaaccaattgctcttcatgagatggacactagcaatggggtgttgctgcctttctatgaccctgacaccagcatcatttacttatgtggaaagggtgacagcagtattcgctattttgagatcacggatgaatccccgtacgtccactacctcaacacattcagcagcaaggagcctcagagagggatgggttacatgcccaagaggggacttgatgttaacaaatgtgagattgccagattcttcaaacttcatgagagaaagtgtgaacctattattatgactgttcccaggaagtctgaccttttccaagatgacctgtatcctgacacagcggggccagaggccgcgctggaggcagaagagtggttcgaaggcaagaatgcagacccaatcctcatctccttgaagcacgggtacattccaggcaaaaacagggatctcaaggtggtcaagaagaacattctggatagcaagcccactgcaaacaagaagtgcgacctgatcagcatccccaagaaaaccacagacacggccagtgtgcaaaatgaagccaagttggatgagattttaaaagagatcaaatctataaaagacacaatctgcaatcaagatgagcgtatttccaagttagaacagcagatggcaaagatagcagcctgaaggtcccacccccacccctacagaaaaaatgggagcaagaacttgtgcttgggagctggttattggtgtggtcctagggagggcggaaagggaggcactgccatttggagacattccatttcagatttgtcaaccagcgataggccacattccagtaagaactcaatttgtctcccaaatttgcagaaacaaaacgtgatttaaaagctgagctttttatcagaaagcttttttgatgttttaagtgttatgtgacttgttgaactttttaaaaagtgctacttttaaaatcccagatactctgaattttagaaaacaaactaattctgattgtgtcgtgcccaagtaccctttttttttaatgaatagggaccaatgccacattgctttttatatttctttcttttttaatgttgccaaaaccaaaagtagctttgttttcctttgtattttgctactttgcagtatttgtgtgtgtggttttttttccttaatttgaaagggacagcactgtgtatgtttataaactaaatgaagataagatattattttgtataaacattcatctgagaacaatcaaagcagtagccacatggtgctggctcctttgcagcacaaacctggtcattttgatgactgtacaacaggaagacttgaaaaatcacgtggattcatattaccaccgctctcatttcatggagtcttctgatcaaaaaagctcacgtcgtatttcttcttttcctttctcttttctagaaattgggtgtttgtaccagaatggaattttgcttctcggttatcctgtgcttcagatgattataatctaacccaaactagcatgtgtttctgcagtttgttacacacctaggatcatattgcattcatcactttaaacatcatgtttcaggttttggtcaatacttgacaagggtgcccaggacaggaagacgtgtactgctgagtgttccttcttgcccttttcagcagcttgcccagctcttgagtacagtggtggggactaaaaatgtgggcatgtggagaggggtatttgccctgggtgatcctgtttccctgtgctgtccccatgctgtgttggaggaggaagtggctctccttccaccaacaaagctcctgctctaccctcttcctcacatgtgctgcgacctctctcagggctcccccagccattccttctttccttcctgccttttagctctaaccacattaagctaagacaaggccagagggtgcgattgaatgagtattgagactgaggagaatgatagagagtgaagcagaaacaggagcgcagacctctgctgtagctttaatgcatacaaacatgtccctccgcacaactaacctgccctgcctctccatctcgcaccaaggctgcgtcaaagcacagaggctccccggactcggagggggccagagactgagctctggtcacctgttcattcctcggttagctggaactttgccccgtttccagtttcttatagtgcatgcttgggaaacaagatttaaggagcctctgttttggaagggctgtctgtgattgaacgtgaaatgtgtagtgccattgggaccacgaagggaattcttgcacatgctcgtgctggtgtgggcatgggaccccccccccacccctccccccccgcccccccngncgccgcgcccncncccnncccccgccnncccccccccccccccccccccccncccccccccccccccccccccccccccccccnccccccgcccccccccccccccccccccccacccgccccccccccccccccccgccgcccccccccccccccccccccccccccccccccccccccccnagccnccccccccccccccccccccccacccccnccccccccccccccccccncacacccccccccccccccccccccccgcccccccccccccccccccccccccccccccccccccccccnccnncccnccccccccccccccccccncccccccccccccccgncgccccccacgnnnnccccncccccccccccccccccccccgcccccccccccccgccccccgcccctcccccccgnacccccccccccccaccgccccgcncccncccccnangccccncgcgccccccccccccccnnnnnnctttttttttttttttttaagccatgacatcccagaagaggacagtgaattactcctaggtcggctcttatagagtggccatagtgttctgtcaaaacacttgcttccattttcagagataaaaatcattgattacaaaaaaaaccagacataccaacgacaaaagcggcggggcggtaaaaaatccccgaggaggccgacgtttccggcatccccagttttggggacaaaagggcccaataggggagagtaattaaaaaaggaggggccagtaaaacaccgcgggaggaaacgccgcggcactcgtgaggaccctctgcggcggcacagggcccatccagagtagccgggcaatactagttagggnacaccattcggatgttgcctgatacg

SEQ ID NO: 454432 - DNA, 3516 bp, Homo sapiens
tcgactctagcaggatcctctggccgcgtggattcctaggaccagtgctggacatagactggtgcccacataacgatcaggtcattgccagcggttcagaggactgcacggtcatggtatggcagatcccagaaaatggactcaccctttccctgactgaacctgtggtgattttggaaggccactcaaagagagtcggcatcgtggcttggcatccaacggcccgcaatgtgcttcttagtgcaggctgtgataatgccattatcatctggaatgtgggaacaggggaagcccttataaacttggacgatatgcattcagacatgatttacaatgtgagctggaaccggaatggcagtctgatctgcacagcttccaaagacaagaaagtgagagtcattgatcccaggaaacaagagattgttgctgagaaggagaaagcacatgaaggagcaagacccatgagagccatcttcctggccgatggcaatgtcttcaccactgggttcagccgcatgagcgagcggcagctggctctctggaatccgaaaaatatgcaggaaccaattgctcttcatgagatggacactagcaatggggtgttgctgcctttctatgaccctgacaccagcatcatttacttatgtggaaagggtgacagcagtattcgctattttgagatcacggatgaatccccgtacgtccactacctcaacacattcagcagcaaggagcctcagagagggatgggttacatgcccaagaggggacttgatgttaacaaatgtgagattgccagattcttcaaacttcatgagagaaagtgtgaacctattattatgactgttcccaggaagtctgaccttttccaagatgacctgtatcctgacacagcggggccagaggccgcgctggaggcagaagagtggttcgaaggcaagaatgcagacccaatcctcatctccttgaagcacgggtacattccaggcaaaaacagggatctcaaggtggtcaagaagaacattctggatagcaagcccactgcaaacaagaagtgcgacctgatcagcatccccaagaaaaccacagacacggccagtgtgcaaaatgaagccaagttggatgagattttaaaagagatcaaatctataaaagacacaatctgcaatcaagatgagcgtatttccaagttagaacagcagatggcaaagatagcagcctgaaggtcccacccccacccctacagaaaaaatgggagcaagaacttgtgcttgggagctggttattggtgtggtcctagggagggcggaaagggaggcactgccatttggagacattccatttcagatttgtcaaccagcgataggccacattccagtaagaactcaatttgtctcccaaatttgcagaaacaaaacgtgatttaaaagctgagctttttatcagaaagcttttttgatgttttaagtgttatgtgacttgttgaactttttaaaaagtgctacttttaaaatcccagatactctgaattttagaaaacaaactaattctgattgtgtcgtgcccaagtaccctttttttttaatgaatagggaccaatgccacattgctttttatatttctttcttttttaatgttgccaaaaccaaaagtagctttgttttcctttgtattttgctactttgcagtatttgtgtgtgtggttttttttccttaatttgaaagggacagcactgtgtatgtttataaactaaatgaagataagatattattttgtataaacattcatctgagaacaatcaaagcagtagccacatggtgctggctcctttgcagcacaaacctggtcattttgatgactgtacaacaggaagacttgaaaaatcacgtggattcatattaccaccgctctcatttcatggagtcttctgatcaaaaaagctcacgtcgtatttcttcttttcctttctcttttctagaaattgggtgtttgtaccagaatggaattttgcttctcggttatcctgtgcttcagatgattataatctaacccaaactagcatgtgtttctgcagtttgttacacacctaggatcatattgcattcatcactttaaacatcatgtttcaggttttggtcaatacttgacaagggtgcccaggacaggaagacgtgtactgctgagtgttccttcttgcccttttcagcagcttgcccagctcttgagtacagtggtggggactaaaaatgtgggcatgtggagaggggtatttgccctgggtgatcctgtttccctgtgctgtccccatgctgtgttggaggaggaagtggctctccttccaccaacaaagctcctgctctaccctcttcctcacatgtgctgcgacctctctcagggctcccccagccattccttctttccttcctgccttttagctctaaccacattaagctaagacaaggccagagggtgcgattgaatgagtattgagactgaggagaatgatagagagtgaagcagaaacaggagcgcagacctctgctgtagctttaatgcatacaaacatgtccctccgcacaactaacctgccctgcctctccatctcgcaccaaggctgcgtcaaagcacagaggctccccggactcggagggggccagagactgagctctggtcacctgttcattcctcggttagctggaactttgccccgtttccagtttcttatagtgcatgcttgggaaacaagatttaaggagcctctgttttggaagggctgtctgtgattgaacgtgaaatgtgtagtgccattgggaccacgaagggaattcttgcacatgctcgtgctggtgtgggcatgggactggctggaaacgtctgtatgcagggagccagggtgagggcagagtgtggtgacagccgaacttggagtaatgtccgtgtagaaaaaggaccatgttcttatccagccaatactgggagtgctgtctccacaatttcagggcatctgaatgtttgatgtggttttgtgtgtgtgtatgtatgtgtttaatattgaagtggatcatgagatgtaaagaaaacaataatggcaatgacttatattcaaatctgtatttgtttctttatcaatgtaatctgctgaggaccttttgtctaagattcagtagtgttttaaggttctgatatcgaattaatgaagtaaagttgttgatggtggtgaaacaccgtagggcatgtggttcaaagagaagcaggagggcaagggaaagttaccctgatcttagtttgtagcttatgacttatttaatgaatggatgcccagccaagctcagagtaggcgcccaaagcattgtggattattttcctgttttgtctttttttttttttttttttaagccatgacatcccagaagaggacagtgaattactcctaggtcggctcttatagagtggccatagtgttctgtcaaaacacttgcttccattttcagagataaaaatcattgattacaaaa

SEQ ID NO: 454433 - DNA, 3878 bp, Homo sapiens
ccgcgcggcgcgggggcggggcctacgcgcggtggcgggggcggtggcggctgcccgcgcccctcccccgcacggcgctcagtgccaggctggaggcggcagcggttggaggcttcgcccggctttgcagcggggacttcggcggcggcgcctcaggcacctcggcccggacacgatgaggcgagtggtacgacagagcaagtttcggcatgtatttgggcaagcggtgaaaaatgaccagtgctatgatgacatccgggtttctcgtgtgacctgggatagttccttttgtgctgtcaatcccagatttgttgccataatcatagaggcaagtgggggaggagcgttccttgtcctccctctgcacaagactggtcgaattgacaaatcttaccctacagtatgtggccacacaggaccagtgctggacatagactggtgcccacataacgatcaggtcattgccagcggttcagaggactgcacggtcatggtatggcagatcccagaaaatggactcaccctttccctgactgaacctgtggtgattttggaaggccactcaaagagagtcggcatcgtggcttggcatccaacggcccgcaatgtgcttcttagtgcaggctgtgataatgccattatcatctggaatgtgggaacaggggaagcccttataaacttggacgatatgcattcagacatgatttacaatgtgagctggaaccggaatggcagtctgatctgcacagcttccaaagacaagaaagtgagagtcattgatcccaggaaacaagagattgttgctgagaaggagaaagcacatgaaggagcaagacccatgagagccatcttcctggccgatggcaatgtcttcaccactgggttcagccgcatgagcgagcggcagctggctctctggaatccgaaaaatatgcaggaaccaattgctcttcatgagatggacactagcaatggggtgttgctgcctttctatgaccctgacaccagcatcatttacttatgtggaaagggtgacagcagtattcgctattttgagatcacggatgaatccccgtacgtccactacctcaacacattcagcagcaaggagcctcagagagggatgggttacatgcccaagaggggacttgatgttaacaaatgtgagattgccagattcttcaaacttcatgagagaaagtgtgaacctattattatgactgttcccaggaagtctgaccttttccaagatgacctgtatcctgacacagcggggccagaggccgcgctggaggcagaagagtggttcgaaggcaagaatgcagacccaatcctcatctccttgaagcacgggtacattccaggcaaaaacagggatctcaaggtggtcaagaagaacattctggatagcaagcccactgcaaacaagaagtgcgacctgatcagcatccccaagaaaaccacagacacggccagtgtgcaaaatgaagccaagttggatgagattttaaaagagatcaaatctataaaagacacaatctgcaatcaagatgagcgtatttccaagttagaacagcagatggcaaagatagcagcctgaaggtcccacccccacccctacagaaaaaatgggagcaagaacttgtgcttgggagctggttattggtgtggtcctagggagggcggaaagggaggcaattccatttcagatttgtcaaccagcgataggccacattccagtaagaactcaatttgtctcccaaatttgcagaaacaaaacgtgatttaaaagctgagctttttatcagaaagcttttttgatgttttaagtgttatgtgacttgttgaactttttaaaaagtgctacttttaaaatcccagatactctgaattttagaaaacaaactaattctgattgtgtcgtgcccaagtaccctttttttttaatgaatagggaccaatgccacattgctttttatatttctttcttttttaatgttgccaaaaccaaaagtagctttgttttcctttgtattttgctactttgcagtatttgtgtgtgtggttttttttccttaatttgaaagggacagcactgtgtatgtttataaactaaatgaagataagatattattttgtataaacattcatctgagaacaatcaaagcagtagccacatggtgctggctcctttgcagcacaaacctggtcattttgatgactgtacaacaggaagacttgaaaaatcacgtggattcatattaccaccgctctcatttcatggagtcttctgatcaaaaaagctcacgtcgtatttcttcttttcctttctcttttctagaaattgggtgtttgtaccagaatggaattttgcttctcggttatcctgtgcttcagatgattataatctaacccaaactagcatgtgtttctgcagtttgttacacacctaggatcatattgcattcatcactttaaacatcatgtttcaggttttggtcaatacttgacaagggtgcccaggacaggaagacgtgtactgctgagtgttccttcttgcccttttcagcagcttgcccagctcttgagtacagtggtggggactaaaaatgtgggcatgtggagaggggtatttgccctgggtgatcctgtttccctgtgctgtccccatgctgtgttggaggaggaagtggctctccttccaccaacaaagctcctgctctaccctcttcctcacatgtgctgcgacctctctcagggctcccccagccattccttctttccttcctgccttttagctctaaccacattaagctaagacaaggccagagggtgcgattgaatgagtattgagactgaggagaatgatagagagtgaagcagaaacaggagcgcagacctctgctgtagctttaatgcatacaaacatgtccctccgcacaactaacctgccctgcctctccatctcgcaccaaggctgcgtcaaagcacagaggctccccggactcggagggggccagagactgagctctggtcacctgttcattcctcggttagctggaactttgccccgtttccagtttcttatagtgcatgcttgggaaacaagatttaaggagcctctgttttggaagggctgtctgtgattgaacgtgaaatgtgtagtgccattgggaccacgaagggaattcttgcacatgctcgtgctggtgtgggcatgggactggctggaaacgtctgtatgcagggagccagggtgagggcagagtgtggtgacagccgaacttggagtaatgtccgtgtagaaaaaggaccatgttcttatccagccaatactgggagtgctgtctccacaatttcagggcatctgaatgtttgatgtggttttgtgtgtgtgtatgtatgtgtttaatattgaagtggatcatgagatgtaaagaaaacaataatggcaatgacttatattcaaatctgtatttgtttctttatcaatgtaatctgctgaggaccttttgtctaagattcagtagtgttttaaggttctgatatcgaattaatgaagtaaagttgttgatggtggtgaaacaccgtagggcatgtggttcaaagagaagcaggagggcaagggaaagttaccctgatcttagtttgtagcttatgacttatttaatgaatggatgcccagccaagctcagagtaggcgcccaaagcattgtggattattttcctgttttgtctttttttttttttttttttaagccatgacatcccagaagaggacagtgaattactcctaggtcggctcttatagagtggccatagtgttctgtcaaaacacttgcttccattttcagagataaaaatcattgattacaaaa

SEQ ID NO: 454434 - DNA, 1751 bp, Homo sapiens
  misc_feature (1741)..(1741): n is a, c, g, or t
ccgcgcggcgcgggggcggggcctacgcgcggtggcgggggcggtggcggctgcccgcgcccctcccccgcacggcgctcagtgccaggctggaggcggcagcggttggaggcttcgcccggctttgcagcggggacttcggcggcggcgcctcaggcacctcggcccggacacgatgaggcgagtggtacgacagagcaagtttcggcatgtatttgggcaagcggtgaaaaatgaccagtgctatgatgacatccgggtttctcgtgtgacctgggatagttccttttgtgctgtcaatcccagatttgttgccataatcatagaggcaagtgggggaggagcgttccttgtcctccctctgcacaagactggtcgaattgacaaatcttaccctacagtatgtggccacacaggaccagtgctggacatagactggtgcccacataacgatcaggtcattgccagcggttcagaggactgcacggtcatggtatggcagatcccagaaaatggactcaccctttccctgactgaacctgtggtgattttggaaggccactcaaagagagtcggcatcgtggcttggcatccaacggcccgcaatgtgcttcttagtgcaggctgtgataatgccattatcatctggaatgtgggaacaggggaagcccttataaacttggacgatatgcattcagacatgatttacaatgtgagctggaaccggaatggcagtctgatctgcacagcttccaaagacaagaaagtgagagtcattgatcccaggaaacaagagattgttgctgagaaggagaaagcacatgaaggagcaagacccatgagagccatcttcctggccgatggcaatgtcttcaccactgggttcagccgcatgagcgagcggcagctggctctctggaatccgaaaaatatgcaggaaccaattgctcttcatgagatggacactagcaatggggtgttgctgcctttctatgaccctgacaccagcatcatttacttatgtggaaagggtgacagcagtattcgctattttgagatcacggatgaatccccgtacgtccactacctcaacacattcagcagcaaggagcctcagagagggatgggttacatgcccaagaggggacttgatgttaacaaatgtgagattgccagattcttcaaacttcatgagagaaagtgtgaacctattattatgactgttcccaggaagtctgaccttttccaagatgacctgtatcctgacacagcggggccagaggccgcgctggaggcagaagagtggttcgaaggcaagaatgcagacccaatcctcatctccttgaagcacgggtacattccaggcaaaaacagggatctcaaggtggtcaagaagaacattctggatagcaagcccactgcaaacaagaagtgcgacctgatcagcatccccaagaaaaccacagacacggccagtgtgcaaaatgaagccaagttggatgagattttaaaagagatcaaatctataaaagacacaatctgcaatcaagatgagcgtatttccaagttagaacagcagatggcaaagatagcagcctgaaggtcccacccccacccctacagaaaaaatgggagcaagaacttgtgcttgggagctggttattggtgtggtcctagggagggcggaaagggaggcactgccatttggagacattccatttcagattgcctaatgaaggtnccgagctcga

SEQ ID NO: 454435 - DNA, 4004 bp, Homo sapiens
ccgcgcggcgcgggggcggggcctacgcgcggtggcgggggcggtggcggctgcccgcgcccctcccccgcacggcgctcagtgccaggctggaggcggcagcggttggaggcttcgcccggctttgcagcggggacttcggcggcggcgcctcaggcacctcggcccggacacgatgaggcgagtggtacgacagagcaagtttcggcatgtatttgggcaagcggtgaaaaatgaccagtgctatgatgacatccgggtttctcgtgtgacctgggatagttccttttgtgctgtcaatcccagatttgttgccataatcatagaggcaagtgggggaggagcgttccttgtcctccctctgcacaagactggtcgaattgacaaatcttaccctacagtatgtggccacacaggaccagtgctggacatagactggtgcccacataacgatcaggtcattgccagcggttcagaggactgcacggtcatggtatggcagatcccagaaaatggactcaccctttccctgactgaacctgtggtgattttggaaggccactcaaagagagtcggcatcgtggcttggcatccaacggcccgcaatgtgcttcttagtgcaggctgtgataatgccattatcatctggaatgtgggaacaggggaagcccttataaacttggacgatatgcattcagacatgatttacaatgtgagctggaaccggaatggcagtctgatctgcacagcttccaaagacaagaaagtgagagtcattgatcccaggaaacaagagattgttgctgagaaggagaaagcacatgaaggagcaagacccatgagagccatcttcctggccgatggcaatgtcttcaccactgggttcagccgcatgagcgagcggcagctggctctctggaatccgaaaaatatgcaggaaccaattgctcttcatgagatggacactagcaatggggtgttgctgcctttctatgaccctgacaccagcatcatttacttatgtggaaagggtgacagcagtattcgctattttgagatcacggatgaatccccgtacgtccactacctcaacacattcagcagcaaggagcctcagagagggatgggttacatgcccaagaggggacttgatgttaacaaatgtgagattgccaggtaaagaatcgagattgtcaagtattctaggttggtgtaactgtgtgacaattatttgtacttggactagcatatacttcagatctcaaaaatatctgaccattctgagcaagaaagtagtagaattgtacacattgccatgagatggcactttctaaggatatcactaaaactgagtttcttcattagaaaaaaatctcaaaaaaaaaaaaaaaagaaaagaaaaaaatctcacttttttttttttgagacggagtctggctctgttgcccaggcaggagtgcagtggtgtgatctcagctcactgcaacctccgcctccctggttcaagcaattctcctgccttagccttccaagtagctgggattacaggcgcccaccaccacacccggcacatctcactttttatcatcacctgaatgcctggtgataccagagcaatacagctacaagaaattctatgaagcccaagtctttctatccttgtgtgtactgtggaattaatacctcatttcctgcccatataactgaagtgcaacaatgaagcagcatagctggggtgtattgcacacctactgaaatagtgaaacatgcatctttaatcttcaagctgaggccatggtcagcgttccctggtgggcaagtagggagagcctggctcggggatggaaaagtgggtggttttcctaccctatgagtggaagaaccagagtcaaaactgtatttggggccccactggtcctaaaatagagaaaccaaaggtcctataatggggcggtaggttagcttgatttaggaagttcagctatgatataatttctacctctctgtactacttctgatttttagaaaattcatattctaaatgctagcaggcttcctaagggacaggcttttttctcatgctagtcaacaaatatatcctctgagactcagtgaccactggccatttcaaacaacagaataattagcactacatcatcacatataaggtcgtaccaaacatttgtgtaacactgtgtttatgtggacttttaaaacgcttgctgttctggtctcacaattaaagaattgatacttacgtcttccaaataaaaggaagagaatttttataagccccttttttatattaatctctactaaaaataaaaaatttgctatgtgtggtcgtgggtgcctgtaatcccagctaattgggaggcagagtcaggagaatcgcttgaacccaggaggcggagtgagccgagatggtgccactgcactccagcctgggcaacacagcgagactccgtctcaaacaaacaaaaacaaacaaaccaaaactctctatgtgattttttttttttagttggaataatgaaggaaagctgttaaagataattgaaaattgtggtttaaaccaaactaatcaaaattggttcaaaatagactgaattcaaatttatgattacatccaatattttgaaacacatttgttgtcatctaaaagttcgacagactataaacacagttgttcagaatgtctccgatttatgaagtgtttcttgagcatttattgtatgccaggactgtgctaaatatgctacttgctacctctttcttttcataacaatcatatgtggtaggtgtaacttttatccccattttatggatgaagaacttaaggcttggtgaggttgtcacactctcgtgggttttggtagtagagctggaagtcaaagccaagtcagtctttttattggctatactaaccacagaattttcattaaatcagtctttaaaaatgtttttgggccaggagtggtggttcaccctgtaatcccaacactttgggaggccaaggtgggaggatcacttgagcctgggagttcaagagcagtatggacaatctagtgagaccctgtctctacaaaacattaaaaaaattagccaggtgtggtagtacgtacctgtggtcccagttattccagaggctgaggatttggcttgagcccaggaggtcaagacctcaatgagcttgtgccactgcactccagcctgggcgatggagcaagacccagtcccaaaaaaaaaaaaaaaaaaaaaaaaaaggtttttggtttatctgggactcttttagtttttggttgaaatagtaaagaggcacatttgacacaaccttccttttaaagaggatgatgattttataaacctttaccaccctgagctctactcagcttttgttcccctgatgcgttagagcagtgtatctgccaggttgtcttcaatggactcctgcccagtttcagatgccaaaggctgcaggtttccaggagaaatggttttgcatatttgatgtggctgtgtcttctctgacttaaactcttggaattcagaaaacatttccccagcagcattgacgcccacattcaactccccccttgcacaccagccgtttgatctggtgatctggccaggatgctcactaaggctacctctcttgccaggagctttagagactttttttgttgtttcccgtcttgactgaaaaagaaaattggcttgaccttatcagggtcatcataagagaagtcatttctggtctgtttagttctcttgtaggatacaaataaaaatgttatacctttcttccccattacagagctctttgctcccttcttccagtattacagtgcaagtggctttacattctctttccacattttggatagtttcacatttttcttgagtgtcatgtacgatgtggtttgctaggatgagaaaatcataatcctaggattgttttcttttgctttctaaaagtcatatttatacttatatgttcaacc

SEQ ID NO: 454436 - DNA, 1210 bp, Homo sapiens
tcaaatattttccaccccaggttggttgaatccatggatgcaaaacccatggatacagggggaaaacctaactatgttttttcctttacagtagcaagcatgtggcatatacagcatgtatatgctagacgaagggatgattcatgtcccaggaggaacagagtgggaaggaatcacactacttggaatggcatacaatttaaaacttaacaaattttttatttctgaaattttccatttaatattctcagaccatggttgacagcaggaaactgaaactgcagtaagcaaaaccacaaataagaaggaactacgataatattttagctttccaaatgccattttttacccacaagtacaaggtatgtactttatggttttagcaaaagtaacgagttcttgccaaactattcacatatttaaaatgatctggtgactttgcatttacaagaggttggttgggattatctctaggatcaatggcaatgaacaagagggaaataacagagcatataattccatgaccttggaaatatggcctctgtgaacacttctatccctgaagtaattattgaggaagaaaatatttttgtccttgcttttaatgaaatctgtagaattaatatactcaaccaagcaaatgatcctggacactgctttcactttgagtggcttctttattcttgatcaggttttatataacttgtctctggtacttaccataataccatatgttgataataacctttgcattgaaaagtcctgataaatgtatttttaaaatatgtgctgctataatgcatatttatattaaagctgaatcaataaacacaatattttattgtgggaaggattttcaaccatgctgcttagcttaacagagcactcataaataccaaaagttccttagtaagcccaaactcactctaccaaatctaaaagcacactgttttgagatggaatagtatcccttagacttctatttgttaaaacaataactaaatttgagttaaataattacacatagtgcttacaatgtataaaatacttccacaaaaaagttgttattggttaaattgtgtccccaaaaagatatgttttaaatactaaccccggaaaactgtgaacataaccttatttgaaaatagggtctttttagatatagtcaaatttggaggcagatcaaatttagatataatcaaatttggat

SEQ ID NO: 454437 - DNA, 517 bp, Homo sapiens
  misc_feature (37)..(37): n is a, c, g, or t
gcaattggtccccaggacacagggttgatgggcctcntggtccacaggacttcaggacctaaggggaatatgggcttaaatttccagggacccaaaggtgaaaaaggtgagcaaggtcttcagggcccacctgggccacctgggcagatcagtgaacagaaaagaccaattgatgttttaatgtttcttacatcttgtttttactcatttctgactggacaaagttcttccaaacaattctgagaaacaaaaacacacacgcagaattaacaattcttttccctgtgcttcttatgtaagaatcctcctgtggcctctgcttgtacagaactgggaaacaacacttggttagtctcttttaagttacaaaaagccaattgatgtttcttattctttttaaattttaaatattttgttataaatactcacaggataccttatttccctagctatcatctcctgacttaatgttttttaaacccaccaatataaatttaattaaagatatatgttgtaa

SEQ ID NO: 454438 - DNA, 730 bp, Homo sapiens
aacaagagcaaaactccatcacaataaattaaataaataaataaataaataaacctcataaccagcagtttaacttgtttctatatatatagtaagcttagagaatagtacaagtagatagccatgttcaatgtgccacagaactgaaagatttaacataaatgaacaatcttattttgtacataacacacagcccaggatatttaggtaggaagtgatattttataatgttatctagactataacctttctgacttacactaaaatgtaagctgcataaagtcagagatttttgtgtatttttgttttctgatgtatcaccagcacttgacacatagtaggagcccaaaaatatttgttggaggaatgagtaagtggaatgatcacacataccatctcataataccactcacttatatagcttttaagaagaactatttatggctatatcctttccccagttgtattcagtaccaacctacagatagttgttgtatctatatgtttctgtattaaacttttccctttttagggtggaattacttttaagggtgaaagaggtccccctgggaacccaggtttaccaggcctcccagggaatatagggcctatgggtccccctggtttcggccctccaggcccagtaggtgaaaaaggcatacaaggtgtggcaggaaatccaggccagccaggaataccaggtgtttactgtgtttgttttcttgtgctt

SEQ ID NO: 454439 - DNA, 674 bp, Homo sapiens
gagccctgatcaggtgatttccaaaaccaaagccagaagtctgccagatgtttctttcaaatggccaatgggcagggggtgtgttcaagccacagtttatcttcgcagtggtttgacttgattgtacaaagggagatcctgtgacacttttacaacatctttccaagaacacaaggtatgtgacatttcccttacccaaccacggccagttggttgtgttttaactttgcgcacctcagttagccatgggaagttcattttgtctgtcagccaggggtatattttaacaatatgaactgtctcatttaattctcaccacaaccctatgaagtaaatactgttattttctccaaatttgaggtgagaaaactatgaatcaaggaggttaaataatcaactcaattcacacaagataatataaggcaaaattgagattacagtcttggaagtttgactctagaaatagtgctatatgccactatgtaattcttatgccctcaatcaccttcctcccctcgctgcaatttttttgtaacattaatgattttatttattcagggtaatcctggccggccgggtctcaatggaatgaaaggagatcctggtctccctggtgttccaggattcccaggtatttgaagggatttttgtggtttccctttatattaaactcc

SEQ ID NO: 454440 - DNA, 6467 bp, Homo sapiens
aggggggaaggaagagtagctccttcttcttcttcttttttttttcttccactcttaaaaagcttctttctcttcacccaagcctcactgtccctctccggctctagctctctccatataaaccctcaagattatgtcaattggttagagccagccgggaatttcgtgcgggtgctgaaggagctgcgggagccggagaagaatgaaactgcgtggagtcagcctggctgccggcttgttcttactggccctgagtctttgggggcagcctgcagaggctgcggcttgctatgggtgttctccaggatcaaagtgtgactgcagtggcataaaaggggaaaagggagagagagggtttccaggtttggaaggacacccaggattgcctggatttccaggtccagaagggcctccggggcctcggggacaaaagggtgatgatggaattccagggccaccaggaccaaaaggaatcagaggtcctcctggacttcctggatttccagggacaccaggtcttcctggaatgccaggccacgatggggccccaggacctcaaggtattcccggatgcaatggaaccaagggagaacgtggatttccaggcagtcccggttttcctggtttacagggtcctccaggaccccctgggatcccaggtatgaagggtgaaccaggtagtataattatgtcatcactgccaggaccaaagggtaatccaggatatccaggtcctcctggaatacaaggcctacctggtcccactggtataccagggccaattggtcccccaggaccaccaggtttgatgggccctcctggtccaccaggacttccaggacctaaggggaatatgggcttaaatttccagggacccaaaggtgaaaaaggtgagcaaggtcttcagggcccacctgggccacctgggcagatcagtgaacagaaaagaccaattgatgtagagtttcagaaaggagatcagggacttcctggtgaccgagggcctcctggacctccagggatacgtggtcctccaggtcccccaggtggtgagaaaggtgagaagggtgagcaaggagagccaggcaaaagaggtaaaccaggcaaagatggagaaaatggccaaccaggaattcctggtttgcctggtgatcctggttaccctggtgaacccggaagggatggtgaaaagggccaaaaaggtgacactggcccacctggacctcctggacttgtaattcctagacctgggactggtataactataggagaaaaaggaaacattgggttgcctgggttgcctggagaaaaaggagagcgaggatttcctggaatacagggtccacctggccttcctggacctccaggggctgcagttatgggtcctcctggccctcctggatttcctggagaaaggggtcagaaaggtgatgaaggaccacctggaatttccattcctggacctcctggacttgacggacagcctggggctcctgggcttccagggcctcctggccctgctggccctcacattcctcctagtgatgagatatgtgaaccaggccctccaggccccccaggatctccaggtgataaaggactccaaggagaacaaggagtgaaaggtgacaaaggtgacacttgcttcaactgcattggaactggtatttcagggcctccaggtcaacctggtttgccaggtctcccaggtcctccaggatctcttggtttccctggacagaaaggggaaaaaggacaagctggtgcaactggtcccaaaggattaccaggcattccaggagctccaggtgctccaggctttcctggatctaaaggtgaacctggtgatatcctcacttttccaggaatgaagggtgacaaaggagagttgggttcccctggagctccagggcttcctggtttacctggcactcctggacaggatggattgccagggcttcctggcccgaaaggagagcctggtggaattacttttaagggtgaaagaggtccccctgggaacccaggtttaccaggcctcccagggaatatagggcctatgggtccccctggtttcggccctccaggcccagtaggtgaaaaaggcatacaaggtgtggcaggaaatccaggccagccaggaataccaggtcctaaaggggatccaggtcagactataacccagccggggaagcctggcttgcctggtaacccaggcagagatggtgatgtaggtcttccaggtgaccctggacttccagggcaaccaggcttgccagggatacctggtagcaaaggagaaccaggtatccctggaattgggcttcctggaccacctggtcccaaaggctttcctggaattccaggacctccaggagcacctgggacacctggaagaattggtctagaaggccctcctgggccacccggctttccaggaccaaagggtgaaccaggatttgcattacctgggccacctgggccaccaggacttccaggtttcaaaggagcacttggtccaaaaggtgatcgtggtttcccaggacctccgggtcctccaggacgcactggcttagatgggctccctggaccaaaaggtgatgttggaccaaatggacaacctggaccaatgggacctcctgggctgccaggaataggtgttcagggaccaccaggaccaccagggattcctgggccaataggtcaacctggtttacatggaataccaggagagaagggggatccaggacctcctggacttgatgttccaggacccccaggtgaaagaggcagtccagggatccccggagcacctggtcctataggacctccaggatcaccagggcttccaggaaaagcaggtgcctctggatttccaggtaccaaaggtgaaatgggtatgatgggacctccaggcccaccaggacctttgggaattcctggcaggagtggtgtacctggtcttaaaggtgatgatggcttgcagggtcagccaggacttcctggccctacaggagaaaaaggtagtaaaggagagcctggccttccaggccctcctggaccaatggatccaaatcttctgggctcaaaaggagagaagggggaacctggcttaccaggtatacctggagtttcagggccaaaaggttatcagggtttgcctggagacccagggcaacctggactgagtggacaacctggattaccaggaccaccaggtcccaaaggtaaccctggtctccctggacagccaggtcttataggacctcctggacttaaaggaaccatcggtgatatgggttttccagggcctcagggtgtggaagggcctcctggaccttctggagttcctggacaacctggctccccaggattacctggacagaaaggcgacaaaggtgatcctggtatttcaagcattggtcttccaggtcttcctggtccaaagggtgagcctggtctgcctggatacccagggaaccctggtatcaaaggttctgtgggagatcctggtttgcccggattaccaggaacccctggagcaaaaggacaaccaggccttcctggattcccaggaaccccaggccctcctggaccaaaaggtattagtggccctcctgggaaccccggccttccaggagaacctggtcctgtaggtggtggaggtcatcctgggcaaccagggcctccaggcgaaaaaggcaaacccggtcaagatggtattcctggaccagctggacagaagggtgaaccaggtcaaccaggctttggaaacccaggaccccctggacttccaggactttctggccaaaagggtgatggaggattacctgggattccaggaaatcctggccttccaggtccaaagggcgaaccaggctttcacggtttccctggtgtgcagggtcccccaggccctcctggttctccgggtccagctctggaaggacctaaaggcaaccctgggccccaaggtcctcctgggagaccaggttattaaggtctaccaggtccagaaggtcctccaggtctccctggaaatggaggtattaaaggagagaagggaaatccaggccaacctgggctacctggcttgcctggtttgaaaggagatcaaggaccaccaggactccagggtaatcctggccggccgggtctcaatggaatgaaaggagatcctggtctccctggtgttccaggattcccaggcatgaaaggacccagtggagtacctggatcagctggccctgagggggaaccgggacttattggtcctccaggtcctcctggattacctggtccttcaggacagagtatcataattaaaggagatgctggtcctccaggaatccctggccagcctgggctaaagggtctaccaggaccccaaggacctcaaggcttaccaggtccaactggccctccaggagatcctggacgcaatggactccctggctttgatggtgcaggagggcgcaaaggagacccaggtctgccaggacagccaggtacccgtggtttggatggtccccctggtccagatggattgcaaggtcccccaggtccccctggaacctcctctgttgcacatggatttcttattacacgccacagccagacaacggatgcaccacaatgcccacagggaacacttcaggtctatgaaggcttttctctcctgtatgtacaaggaaataaaagagcccacggtcaagacttggggacggctggcagctgccttcgtcgctttagtaccatgcctttcatgttctgcaacatcaataatgtttgcaactttgcttcaagaaatgactattcttactggctctctaccccagagcccatgccaatgagcatgcaacccctaaagggccagagcatccagccattcattagtcgatgtgcagtatgtgaagctccagctgtggtgatcgcagttcacagtcagacgatccagattccccattgtcctcagggatgggattctctgtggattggttattccttcatgatgcatacaagtgcaggggcagaaggctcaggtcaagccctagcctcccctggttcctgcttggaagagtttcgttcagctcccttcatcgaatgtcatgggaggggtacctgtaactactatgccaactcctacagcttttggctggcaactgtagatgtgtcagacatgttcagtaaacctcagtcagaaacgctgaaagcaggagacttgaggacacgaattagccgatgtcaagtgtgcatgaagaggacataacattttgaagaattccttttgtgttttaaaatgtgatatatatatatataaaattcctaggatgcagtgtctcattgtccccaactttactactgctgccgtcaatggtgctactatatatgatcaagataacatgctgactagtaaccatgaagattcagatgtacctcagcaatgcgccagagcaaagtctctattatttttctactaaagaaataaggaagtgaatttactttttgggtccagaatgactttctccaagaattataagatgaaaattatatattttgcccagttactaaaatggtacattaaaaattcaattaagagaagagtcacattgagtaaaataaaagactgcagtttgtgggaagaattatttttcacggtgctactaatcctgctgtatcccgggtttttaatataaaggtgttaagcttattttgctttgtaagtaaagaatgtgtatattgtgaacagccttttagctcaaaatgttgagtcatttacatatgacatagcatgaatcactctttacagaaaatgtaggaaaccctagaatacagacagcaatattttatattcatgtttatcaaagtgagaggacttatattcctacatcaagttactactgagagtaaatttattttgagttttatcccgtaagttctgttttgattttttttaaaaaacaaacccttttagtcactttaatcagaattttaaatgttcatgttacataccaaattataatatctaatggagcaatttgtcttttgctatattctccaagattatctcttaagaccatatgccccctgttttaatgtttcttacatcttgtttttactcatttctgactggacaaagttcttccaaacaattctgagaaacaaaaacacacacgcagaattaacaattcttttccctgtgcttcttatgtaagaatcctcctgtggcctctgcttgtacagaactgggaaacaacacttggttagtctcttttaagttacaaaaagccaattgatgtttcttattctttttaaattttaaatattttgttataaatactcacaggataccttatttccctagctatcatctcctgacttaatgttttttaaacccaccaatataaatttaattaaagatatatgttgtaaacccgccaaacgaaaagctctataactttgaattc

SEQ ID NO: 454441 - DNA, 6432 bp, Homo sapiens
aggggggaaggaagagtagctccttcttcttcttcttttttttttcttccactcttaaaaagcttctttctcttcacccaagcctcactgtccctctccggctctagctctctccatataaaccctcaagattatgtcaattggttagagccagccgggaatttcgtgcgggtgctgaaggagctgcgggagccggagaagaatgaaactgcgtggagtcagcctggctgccggcttgttcttactggccctgagtctttgggggcagcctgcagaggctgcggcttgctatgggtgttctccaggatcaaagtgtgactgcagtggcataaaaggggaaaagggagagagagggtttccaggtttggaaggacacccaggattgcctggatttccaggtccagaagggcctccggggcctcggggacaaaagggtgatgatggaattccagggccaccaggaccaaaaggaatcagaggtcctcctggacttcctggatttccagggacaccaggtcttcctggaatgccaggccacgatggggccccaggacctcaaggtattcccggatgcaatggaaccaagggagaacgtggatttccaggcagtcccggttttcctggtttacagggtcctccaggaccccctgggatcccaggtatgaagggtgaaccaggtagtataattatgtcatcactgccaggaccaaagggtaatccaggatatccaggtcctcctggaatacaaggcctacctggtcccactggtataccagggccaattggtcccccaggaccaccaggtttgatgggccctcctggtccaccaggacttccaggacctaaggggaatatgggcttaaatttccagggacccaaaggtgaaaaaggtgagcaaggtcttcagggcccacctgggccacctgggcagatcagtgaacagaaaagaccaattgatgtagagtttcagaaaggagatcagggacttcctggtgaccgagggcctcctggacctccagggatacgtggtcctccaggtcccccaggtggtgagaaaggtgagaagggtgagcaaggagagccaggcaaaagaggtaaaccaggcaaagatggagaaaatggccaaccaggaattcctggtttgcctggtgatcctggttaccctggtgaacccggaagggatggtgaaaagggccaaaaaggtgacactggcccacctggacctcctggacttgtaattcctagacctgggactggtataactataggagaaaaaggaaacattgggttgcctgggttgcctggagaaaaaggagagcgaggatttcctggaatacagggtccacctggccttcctggacctccaggggctgcagttatgggtcctcctggccctcctggatttcctggagaaaggggtcagaaaggtgatgaaggaccacctggaatttccattcctggacctcctggacttgacggacagcctggggctcctgggcttccagggcctcctggccctgctggccctcacattcctcctagtgatgagatatgtgaaccaggccctccaggccccccaggatctccaggtgataaaggactccaaggagaacaaggagtgaaaggtgacaaaggtgacacttgcttcaactgcattggaactggtatttcagggcctccaggtcaacctggtttgccaggtctcccaggtcctccaggatctcttggtttccctggacagaaaggggaaaaaggacaagctggtgcaactggtcccaaaggattaccaggcattccaggagctccaggtgctccaggctttcctggatctaaaggtgaacctggtgatatcctcacttttccaggaatgaagggtgacaaaggagagttgggttcccctggagctccagggcttcctggtttacctggcactcctggacaggatggattgccagggcttcctggcccgaaaggagagcctggtggaattacttttaagggtgaaagaggtccccctgggaacccaggtttaccaggcctcccagggaatatagggcctatgggtccccctggtttcggccctccaggcccagtaggtgaaaaaggcatacaaggtgtggcaggaaatccaggccagccaggaataccaggtcctaaaggggatccaggtcagactataacccagccggggaagcctggcttgcctggtaacccaggcagagatggtgatgtaggtcttccaggtgaccctggacttccagggcaaccaggcttgccagggatacctggtagcaaaggagaaccaggtatccctggaattgggcttcctggaccacctggtcccaaaggctttcctggaattccaggacctccaggagcacctgggacacctggaagaattggtctagaaggccctcctgggccacccggctttccaggaccaaagggtgaaccaggatttgcattacctgggccacctgggccaccaggacttccaggtttcaaaggagcacttggtccaaaaggtgatcgtggtttcccaggacctccgggtcctccaggacgcactggcttagatgggctccctggaccaaaaggtgatgttggaccaaatggacaacctggaccaatgggacctcctgggctgccaggaataggtgttcagggaccaccaggaccaccagggattcctgggccaataggtcaacctggtttacatggaataccaggagagaagggggatccaggacctcctggacttgatgttccaggacccccaggtgaaagaggcagtccagggatccccggagcacctggtcctataggacctccaggatcaccagggcttccaggaaaagcaggtgcctctggatttccaggtaccaaaggtgaaatgggtatgatgggacctccaggcccaccaggacctttgggaattcctggcaggagtggtgtacctggtcttaaaggtgatgatggcttgcagggtcagccaggacttcctggccctacaggagaaaaaggtagtaaaggagagcctggccttccaggccctcctggaccaatggatccaaatcttctgggctcaaaaggagagaagggggaacctggcttaccaggtatacctggagtttcagggccaaaaggttatcagggtttgcctggagacccagggcaacctggactgagtggacaacctggattaccaggaccaccaggtcccaaaggtaaccctggtctccctggacagccaggtcttataggacctcctggacttaaaggaaccatcggtgatatgggttttccagggcctcagggtgtggaagggcctcctggaccttctggagttcctggacaacctggctccccaggattacctggacagaaaggcgacaaaggtgatcctggtatttcaagcattggtcttccaggtcttcctggtccaaagggtgagcctggtctgcctggatacccagggaaccctggtatcaaaggttctgtgggagatcctggtttgcccggattaccaggaacccctggagcaaaaggacaaccaggccttcctggattcccaggaaccccaggccctcctggaccaaaaggtattagtggccctcctgggaaccccggccttccaggagaacctggtcctgtaggtggtggaggtcatcctgggcaaccagggcctccaggcgaaaaaggcaaacccggtcaagatggtattcctggaccagctggacagaagggtgaaccaggtcaaccaggctttggaaacccaggaccccctggacttccaggactttctggccaaaagggtgatggaggattacctgggattccaggaaatcctggccttccaggtccaaagggcgaaccaggctttcacggtttccctggtgtgcagggtcccccaggccctcctggttctccgggtccagctctggaaggacctaaaggcaaccctgggccccaaggtcctcctgggagaccaggttattaaggtctaccaggtccagaaggtcctccaggtctccctggaaatggaggtattaaaggagagaagggaaatccaggccaacctgggctacctggcttgcctggtttgaaaggagatcaaggaccaccaggactccagggtaatcctggccggccgggtctcaatggaatgaaaggagatcctggtctccctggtgttccaggattcccaggcatgaaaggacccagtggagtacctggatcagctggccctgagggggaaccgggacttattggtcctccaggtcctcctggattacctggtccttcaggacagagtatcataattaaaggagatgctggtcctccaggaatccctggccagcctgggctaaagggtctaccaggaccccaaggacctcaaggcttaccaggtccaactggccctccaggagatcctggacgcaatggactccctggctttgatggtgcaggagggcgcaaaggagacccaggtctgccaggacagccaggtacccgtggtttggatggtccccctggtccagatggattgcaaggtcccccaggtccccctggaacctcctctgttgcacatggatttcttattacacgccacagccagacaacggatgcaccacaatgcccacagggaacacttcaggtctatgaaggcttttctctcctgtatgtacaaggaaataaaagagcccacggtcaagacttggggacggctggcagctgccttcgtcgctttagtaccatgcctttcatgttctgcaacatcaataatgtttgcaactttgcttcaagaaatgactattcttactggctctctaccccagagcccatgccaatgagcatgcaacccctaaagggccagagcatccagccattcattagtcgatgtgcagtatgtgaagctccagctgtggtgatcgcagttcacagtcagacgatccagattccccattgtcctcagggatgggattctctgtggattggttattccttcatgatgcatacaagtgcaggggcagaaggctcaggtcaagccctagcctcccctggttcctgcttggaagagtttcgttcagctcccttcatcgaatgtcatgggaggggtacctgtaactactatgccaactcctacagcttttggctggcaactgtagatgtgtcagacatgttcagtaaacctcagtcagaaacgctgaaagcaggagacttgaggacacgaattagccgatgtcaagtgtgcatgaagaggacataacattttgaagaattccttttgtgttttaaaatgtgatatatatatatataaaattcctaggatgcagtgtctcattgtccccaactttactactgctgccgtcaatggtgctactatatatgatcaagataacatgctgactagtaaccatgaagattcagatgtacctcagcaatgcgccagagcaaagtctctattatttttctactaaagaaataaggaagtgaatttactttttgggtccagaatgactttctccaagaattataagatgaaaattatatattttgcccagttactaaaatggtacattaaaaattcaattaagagaagagtcacattgagtaaaataaaagactgcagtttgtgggaagaattatttttcacggtgctactaatcctgctgtatcccgggtttttaatataaaggtgttaagcttattttgctttgtaagtaaagaatgtgtatattgtgaacagccttttagctcaaaatgttgagtcatttacatatgacatagcatgaatcactctttacagaaaatgtaggaaaccctagaatacagacagcaatattttatattcatgtttatcaaagtgagaggacttatattcctacatcaagttactactgagagtaaatttattttgagttttatcccgtaagttctgttttgattttttttaaaaaacaaacccttttagtcactttaatcagaattttaaatgttcatgttacataccaaattataatatctaatggagcaatttgtcttttgctatattctccaagattatctcttaagaccatatgccccctgttttaatgtttcttacatcttgtttttactcatttctgactggacaaagttcttccaaacaattctgagaaacaaaaacacacacgcagaattaacaattcttttccctgtgcttcttatgtaagaatcctcctgtggcctctgcttgtacagaactgggaaacaacacttggttagtctcttttaagttacaaaaagccaattgatgtttcttattctttttaaattttaaatattttgttataaatactcacaggataccttatttccctagctatcatctcctgacttaatgttttttaaacccaccaatataaatttaattaaagatatatgttgtaa

SEQ ID NO: 454442 - DNA, 5018 bp, Homo sapiens
aacaagagcaaaactccatcacaataaattaaataaataaataaataaataaacctcataaccagcagtttaacttgtttctatatatatagtaagcttagagaatagtacaagtagatagccatgttcaatgtgccacagaactgaaagatttaacataaatgaacaatcttattttgtacataacacacagcccaggatatttaggtaggaagtgatattttataatgttatctagactataacctttctgacttacactaaaatgtaagctgcataaagtcagagatttttgtgtatttttgttttctgatgtatcaccagcacttgacacatagtaggagcccaaaaatatttgttggaggaatgagtaagtggaatgatcacacataccatctcataataccactcacttatatagcttttaagaagaactatttatggctatatcctttccccagttgtattcagtaccaacctacagatagttgttgtatctatatgtttctgtattaaacttttccctttttagggtggaattacttttaagggtgaaagaggtccccctgggaacccaggtttaccaggcctcccagggaatatagggcctatgggtccccctggtttcggccctccaggcccagtaggtgaaaaaggcatacaaggtgtggcaggaaatccaggccagccaggaataccaggtcctaaaggggatccaggtcagactataacccagccggggaagcctggcttgcctggtaacccaggcagagatggtgatgtaggtcttccaggtgaccctggacttccagggcaaccaggcttgccagggatacctggtagcaaaggagaaccaggtatccctggaattgggcttcctggaccacctggtcccaaaggctttcctggaattccaggacctccaggagcacctgggacacctggaagaattggtctagaaggccctcctgggccacccggctttccaggaccaaagggtgaaccaggatttgcattacctgggccacctgggccaccaggacttccaggtttcaaaggagcacttggtccaaaaggtgatcgtggtttcccaggacctccgggtcctccaggacgcactggcttagatgggctccctggaccaaaaggtgatgttggaccaaatggacaacctggaccaatgggacctcctgggctgccaggaataggtgttcagggaccaccaggaccaccagggattcctgggccaataggtcaacctggtttacatggaataccaggagagaagggggatccaggacctcctggacttgatgttccaggacccccaggtgaaagaggcagtccagggatccccggagcacctggtcctataggacctccaggatcaccagggcttccaggaaaagcaggtgcctctggatttccaggtaccaaaggtgaaatgggtatgatgggacctccaggcccaccaggacctttgggaattcctggcaggagtggtgtacctggtcttaaaggtgatgatggcttgcagggtcagccaggacttcctggccctacaggagaaaaaggtagtaaaggagagcctggccttccaggccctcctggaccaatggatccaaatcttctgggctcaaaaggagagaagggggaacctggcttaccaggtatacctggagtttcagggccaaaaggttatcagggtttgcctggagacccagggcaacctggactgagtggacaacctggattaccaggaccaccaggtcccaaaggtaaccctggtctccctggacagccaggtcttataggacctcctggacttaaaggaaccatcggtgatatgggttttccagggcctcagggtgtggaagggcctcctggaccttctggagttcctggacaacctggctccccaggattacctggacagaaaggcgacaaaggtgatcctggtatttcaagcattggtcttccaggtcttcctggtccaaagggtgagcctggtctgcctggatacccagggaaccctggtatcaaaggttctgtgggagatcctggtttgcccggattaccaggaacccctggagcaaaaggacaaccaggccttcctggattcccaggaaccccaggccctcctggaccaaaaggtattagtggccctcctgggaaccccggccttccaggagaacctggtcctgtaggtggtggaggtcatcctgggcaaccagggcctccaggcgaaaaaggcaaacccggtcaagatggtattcctggaccagctggacagaagggtgaaccaggtcaaccaggctttggaaacccaggaccccctggacttccaggactttctggccaaaagggtgatggaggattacctgggattccaggaaatcctggccttccaggtccaaagggcgaaccaggctttcacggtttccctggtgtgcagggtcccccaggccctcctggttctccgggtccagctctggaaggacctaaaggcaaccctgggccccaaggtcctcctgggagaccaggttattaaggtctaccaggtccagaaggtcctccaggtctccctggaaatggaggtattaaaggagagaagggaaatccaggccaacctgggctacctggcttgcctggtttgaaaggagatcaaggaccaccaggactccagggtaatcctggccggccgggtctcaatggaatgaaaggagatcctggtctccctggtgttccaggattcccaggcatgaaaggacccagtggagtacctggatcagctggccctgagggggaaccgggacttattggtcctccaggtcctcctggattacctggtccttcaggacagagtatcataattaaaggagatgctggtcctccaggaatccctggccagcctgggctaaagggtctaccaggaccccaaggacctcaaggcttaccaggtccaactggccctccaggagatcctggacgcaatggactccctggctttgatggtgcaggagggcgcaaaggagacccaggtctgccaggacagccaggtacccgtggtttggatggtccccctggtccagatggattgcaaggtcccccaggtccccctggaacctcctctgttgcacatggatttcttattacacgccacagccagacaacggatgcaccacaatgcccacagggaacacttcaggtctatgaaggcttttctctcctgtatgtacaaggaaataaaagagcccacggtcaagacttggggacggctggcagctgccttcgtcgctttagtaccatgcctttcatgttctgcaacatcaataatgtttgcaactttgcttcaagaaatgactattcttactggctctctaccccagagcccatgccaatgagcatgcaacccctaaagggccagagcatccagccattcattagtcgatgtgcagtatgtgaagctccagctgtggtgatcgcagttcacagtcagacgatccagattccccattgtcctcagggatgggattctctgtggattggttattccttcatgatgcatacaagtgcaggggcagaaggctcaggtcaagccctagcctcccctggttcctgcttggaagagtttcgttcagctcccttcatcgaatgtcatgggaggggtacctgtaactactatgccaactcctacagcttttggctggcaactgtagatgtgtcagacatgttcagtaaacctcagtcagaaacgctgaaagcaggagacttgaggacacgaattagccgatgtcaagtgtgcatgaagaggacataacattttgaagaattccttttgtgttttaaaatgtgatatatatatatataaaattcctaggatgcagtgtctcattgtccccaactttactactgctgccgtcaatggtgctactatatatgatcaagataacatgctgactagtaaccatgaagattcagatgtacctcagcaatgcgccagagcaaagtctctattatttttctactaaagaaataaggaagtgaatttactttttgggtccagaatgactttctccaagaattataagatgaaaattatatattttgcccagttactaaaatggtacattaaaaattcaattaagagaagagtcacattgagtaaaataaaagactgcagtttgtgggaagaattatttttcacggtgctactaatcctgctgtatcccgggtttttaatataaaggtgttaagcttattttgctttgtaagtaaagaatgtgtatattgtgaacagccttttagctcaaaatgttgagtcatttacatatgacatagcatgaatcactctttacagaaaatgtaggaaaccctagaatacagacagcaatattttatattcatgtttatcaaagtgagaggacttatattcctacatcaagttactactgagagtaaatttattttgagttttatcccgtaagttctgttttgattttttttaaaaaacaaacccttttagtcactttaatcagaattttaaatgttcatgttacataccaaattataatatctaatggagcaatttgtcttttgctatattctccaagattatctcttaagaccatatgccccctgttttaatgtttcttacatcttgtttttactcatttctgactggacaaagttcttccaaacaattctgagaaacaaaaacacacacgcagaattaacaattcttttccctgtgcttcttatgtaagaatcctcctgtggcctctgcttgtacagaactgggaaacaacacttggttagtctcttttaagttacaaaaagccaattgatgtttcttattctttttaaattttaaatattttgttataaatactcacaggataccttatttccctagctatcatctcctgacttaatgttttttaaacccaccaatataaatttaattaaagatatatgttgtaaacccgccaaacgaaaagctctataactttgaattc

SEQ ID NO: 454443 - DNA, 6378 bp, Homo sapiens
aggggggaaggaagagtagctccttcttcttcttcttttttttttcttccactcttaaaaagcttctttctcttcacccaagcctcactgtccctctccggctctagctctctccatataaaccctcaagattatgtcaattggttagagccagccgggaatttcgtgcgggtgctgaaggagctgcgggagccggagaagaatgaaactgcgtggagtcagcctggctgccggcttgttcttactggccctgagtctttgggggcagcctgcagaggctgcggcttgctatgggtgttctccaggatcaaagtgtgactgcagtggcataaaaggggaaaagggagagagagggtttccaggtttggaaggacacccaggattgcctggatttccaggtccagaagggcctccggggcctcggggacaaaagggtgatgatggaattccagggccaccaggaccaaaaggaatcagaggtcctcctggacttcctggatttccagggacaccaggtcttcctggaatgccaggccacgatggggccccaggacctcaaggtattcccggatgcaatggaaccaagggagaacgtggatttccaggcagtcccggttttcctggtttacagggtcctccaggaccccctgggatcccaggtatgaagggtgaaccaggtagtataattatgtcatcactgccaggaccaaagggtaatccaggatatccaggtcctcctggaatacaaggcctacctggtcccactggtataccagggccaattggtcccccaggaccaccaggtttgatgggccctcctggtccaccaggacttccaggacctaaggggaatatgggcttaaatttccagggacccaaaggtgaaaaaggtgagcaaggtcttcagggcccacctgggccacctgggcagatcagtgaacagaaaagaccaattgatgtagagtttcagaaaggagatcagggacttcctggtgaccgagggcctcctggacctccagggatacgtggtcctccaggtcccccaggtggtgagaaaggtgagaagggtgagcaaggagagccaggcaaaagaggtaaaccaggcaaagatggagaaaatggccaaccaggaattcctggtttgcctggtgatcctggttaccctggtgaacccggaagggatggtgaaaagggccaaaaaggtgacactggcccacctggacctcctggacttgtaattcctagacctgggactggtataactataggagaaaaaggaaacattgggttgcctgggttgcctggagaaaaaggagagcgaggatttcctggaatacagggtccacctggccttcctggacctccaggggctgcagttatgggtcctcctggccctcctggatttcctggagaaaggggtcagaaaggtgatgaaggaccacctggaatttccattcctggacctcctggacttgacggacagcctggggctcctgggcttccagggcctcctggccctgctggccctcacattcctcctagtgatgagatatgtgaaccaggccctccaggccccccaggatctccaggtgataaaggactccaaggagaacaaggagtgaaaggtgacaaaggtgacacttgcttcaactgcattggaactggtatttcagggcctccaggtcaacctggtttgccaggtctcccaggtcctccaggatctcttggtttccctggacagaaaggggaaaaaggacaagctggtgcaactggtcccaaaggattaccaggcattccaggagctccaggtgctccaggctttcctggatctaaaggtgaacctggtgatatcctcacttttccaggaatgaagggtgacaaaggagagttgggttcccctggagctccagggcttcctggtttacctggcactcctggacaggatggattgccagggcttcctggcccgaaaggagagcctggtggaattacttttaagggtgaaagaggtccccctgggaacccaggtttaccaggcctcccagggaatatagggcctatgggtccccctggtttcggccctccaggcccagtaggtgaaaaaggcatacaaggtgtggcaggaaatccaggccagccaggaataccaggtcctaaaggggatccaggtcagactataacccagccggggaagcctggcttgcctggtaacccaggcagagatggtgatgtaggtcttccaggtgaccctggacttccagggcaaccaggcttgccagggatacctggtagcaaaggagaaccaggtatccctggaattgggcttcctggaccacctggtcccaaaggctttcctggaattccaggacctccaggagcacctgggacacctggaagaattggtctagaaggccctcctgggccacccggctttccaggaccaaagggtgaaccaggatttgcattacctgggccacctgggccaccaggacttccaggtttcaaaggagcacttggtccaaaaggtgatcgtggtttcccaggacctccgggtcctccaggacgcactggcttagatgggctccctggaccaaaaggtgatgttggaccaaatggacaacctggaccaatgggacctcctgggctgccaggaataggtgttcagggaccaccaggaccaccagggattcctgggccaataggtcaacctggtttacatggaataccaggagagaagggggatccaggacctcctggacttgatgttccaggacccccaggtgaaagaggcagtccagggatccccggagcacctggtcctataggacctccaggatcaccagggcttccaggaaaagcaggtgcctctggatttccaggtaccaaaggtgaaatgggtatgatgggacctccaggcccaccaggacctttgggaattcctggcaggagtggtgtacctggtcttaaaggtgatgatggcttgcagggtcagccaggacttcctggccctacaggagaaaaaggtagtaaaggagagcctggccttccaggccctcctggaccaatggatccaaatcttctgggctcaaaaggagagaagggggaacctggcttaccaggtatacctggagtttcagggccaaaaggttatcagggtttgcctggagacccagggcaacctggactgagtggacaacctggattaccaggaccaccaggtcccaaaggtaaccctggtctccctggacagccaggtcttataggacctcctggacttaaaggaaccatcggtgatatgggttttccagggcctcagggtgtggaagggcctcctggaccttctggagttcctggacaacctggctccccaggattacctggacagaaaggcgacaaaggtgatcctggtatttcaagcattggtcttccaggtcttcctggtccaaagggtgagcctggtctgcctggatacccagggaaccctggtatcaaaggttctgtgggagatcctggtttgcccggattaccaggaacccctggagcaaaaggacaaccaggccttcctggattcccaggaaccccaggccctcctggaccaaaaggtattagtggccctcctgggaaccccggccttccaggagaacctggtcctgtaggtggtggaggtcatcctgggcaaccagggcctccaggcgaaaaaggcaaacccggtcaagatggtattcctggaccagctggacagaagggtgaaccaggtcaaccaggctttggaaacccaggaccccctggacttccaggactttctggccaaaagggtgatggaggattacctgggattccaggaaatcctggccttccaggtccaaagggcgaaccaggctttcacggtttccctggtgtgcagggtcccccaggccctcctggttctccgggtccagctctggaaggacctaaaggcaaccctgggccccaaggtcctcctgggagaccaggttattaaggtctaccaggtccagaaggtcctccaggtctccctggaaatggaggtattaaaggagagaagggaaatccaggccaacctgggctacctggcttgcctggtttgaaaggagatcaaggaccaccaggactccagggtaatcctggccggccgggtctcaatggaatgaaaggagatcctggtctccctggtgttccaggattcccaggcatgaaaggacccagtggagtacctggatcagctggccctgagggggaaccgggacttattggtcctccaggtcctcctggattacctggtccttcaggacagagtatcataattaaaggagatgctggtcctccaggaatccctggccagcctgggctaaagggtctaccaggaccccaaggacctcaaggcttaccaggtccaactggccctccaggagatcctggacgcaatggactccctggctttgatggtgcaggagggcgcaaaggagacccaggtctgccaggacagccaggtacccgtggtttggatggtccccctggtccagatggattgcaaggtcccccaggtccccctggaacctcctctgttgcacatggatttcttattacacgccacagccagacaacggatgcaccacaatgcccacagggaacacttcaggtctatgaaggcttttctctcctgtatgtacaaggaaataataccatgcctttcatgttctgcaacatcaataatgtttgcaactttgcttcaagaaatgactattcttactggctctctaccccagagcccatgccaatgagcatgcaacccctaaagggccagagcatccagccattcattagtcgatgtgcagtatgtgaagctccagctgtggtgatcgcagttcacagtcagacgatccagattccccattgtcctcagggatgggattctctgtggattggttattccttcatgatgcatacaagtgcaggggcagaaggctcaggtcaagccctagcctcccctggttcctgcttggaagagtttcgttcagctcccttcatcgaatgtcatgggaggggtacctgtaactactatgccaactcctacagcttttggctggcaactgtagatgtgtcagacatgttcagtaaacctcagtcagaaacgctgaaagcaggagacttgaggacacgaattagccgatgtcaagtgtgcatgaagaggacataacattttgaagaattccttttgtgttttaaaatgtgatatatatatatataaaattcctaggatgcagtgtctcattgtccccaactttactactgctgccgtcaatggtgctactatatatgatcaagataacatgctgactagtaaccatgaagattcagatgtacctcagcaatgcgccagagcaaagtctctattatttttctactaaagaaataaggaagtgaatttactttttgggtccagaatgactttctccaagaattataagatgaaaattatatattttgcccagttactaaaatggtacattaaaaattcaattaagagaagagtcacattgagtaaaataaaagactgcagtttgtgggaagaattatttttcacggtgctactaatcctgctgtatcccgggtttttaatataaaggtgttaagcttattttgctttgtaagtaaagaatgtgtatattgtgaacagccttttagctcaaaatgttgagtcatttacatatgacatagcatgaatcactctttacagaaaatgtaggaaaccctagaatacagacagcaatattttatattcatgtttatcaaagtgagaggacttatattcctacatcaagttactactgagagtaaatttattttgagttttatcccgtaagttctgttttgattttttttaaaaaacaaacccttttagtcactttaatcagaattttaaatgttcatgttacataccaaattataatatctaatggagcaatttgtcttttgctatattctccaagattatctcttaagaccatatgccccctgttttaatgtttcttacatcttgtttttactcatttctgactggacaaagttcttccaaacaattctgagaaacaaaaacacacacgcagaattaacaattcttttccctgtgcttcttatgtaagaatcctcctgtggcctctgcttgtacagaactgggaaacaacacttggttagtctcttttaagttacaaaaagccaattgatgtttcttattctttttaaattttaaatattttgttataaatactcacaggataccttatttccctagctatcatctcctgacttaatgttttttaaacccaccaatataaatttaattaaagatatatgttgtaa

SEQ ID NO: 454444 - DNA, 2330 bp, Homo sapiens
gaggaatactaaagttaaaacgtcacaaaggtgctgcttttacagggaagcttattctgttttaaacattgaaaagttgtggtctgatcagttaatttgtatgtagcagtgtatgctctcatatacaattactgacctatgctctaaaacatgaatgctttgttacagacccaagctgtccatttctgtgatgggttttgaataaagtattccctgtcttaaaaaaaaaaaaaaaaaaaaaaaaaaaaaaaaaaaaaaaaaaaaaaaaaaaaaaaaaaaaaaaaaaaaaaaaaaaaaaaaaaaaaaggtccaactggccctccaggagatcctggacgcaatggactccctggctttgatggtgcaggagggcgcaaaggagacccaggtctgccaggacagccaggtacccgtggtttggatggtccccctggtccagatggattgcaaggtcccccaggtccccctggaacctcctctgttgcacatggatttcttattacacgccacagccagacaacggatgcaccacaatgcccacagggaacacttcaggtctatgaaggcttttctctcctgtatgtacaaggaaataaaagagcccacggtcaagacttggggacggctggcagctgccttcgtcgctttagtaccatgcctttcatgttctgcaacatcaataatgtttgcaactttgcttcaagaaatgactattcttactggctctctaccccagagcccatgccaatgagcatgcaacccctaaagggccagagcatccagccattcattagtcgatgtgcagtatgtgaagctccagctgtggtgatcgcagttcacagtcagacgatccagattccccattgtcctcagggatgggattctctgtggattggttattccttcatgatgcatacaagtgcaggggcagaaggctcaggtcaagccctagcctcccctggttcctgcttggaagagtttcgttcagctcccttcatcgaatgtcatgggaggggtacctgtaactactatgccaactcctacagcttttggctggcaactgtagatgtgtcagacatgttcagtaaacctcagtcagaaacgctgaaagcaggagacttgaggacacgaattagccgatgtcaagtgtgcatgaagaggacataacattttgaagaattccttttgtgttttaaaatgtgatatatatatatataaaattcctaggatgcagtgtctcattgtccccaactttactactgctgccgtcaatggtgctactatatatgatcaagataacatgctgactagtaaccatgaagattcagatgtacctcagcaatgcgccagagcaaagtctctattatttttctactaaagaaataaggaagtgaatttactttttgggtccagaatgactttctccaagaattataagatgaaaattatatattttgcccagttactaaaatggtacattaaaaattcaattaagagaagagtcacattgagtaaaataaaagactgcagtttgtgggaagaattatttttcacggtgctactaatcctgctgtatcccgggtttttaatataaaggtgttaagcttattttgctttgtaagtaaagaatgtgtatattgtgaacagccttttagctcaaaatgttgagtcatttacatatgacatagcatgaatcactctttacagaaaatgtaggaaaccctagaatacagacagcaatattttatattcatgtttatcaaagtgagaggacttatattcctacatcaagttactactgagagtaaatttattttgagttttatcccgtaagttctgttttgattttttttaaaaaacaaacccttttagtcactttaatcagaattttaaatgttcatgttacataccaaattataatatctaatggagcaatttgtcttttgctatattctccaagattatctcttaagaccatatgccccctgttttaatgtttcttacatcttgtttttactcatttctgactggacaaagttcttccaaacaattctgagaaacaaaaacacacacgcagaattaacaattcttttccctgtgcttcttatgtaagaatcctcctgtggcctctgcttgtacagaactgggaaacaacacttggttagtctcttttaagttacaaaaagccaattgatgtttcttattctttttaaattttaaatattttgttataaatactcacaggataccttatttccctagctatcatctcctgacttaatgttttttaaacccaccaatataaatttaattaaagatatatgttgtaa

SEQ ID NO: 454445 - DNA, 5340 bp, Homo sapiens
aggggggaaggaagagtagctccttcttcttcttcttttttttttcttccactcttaaaaagcttctttctcttcacccaagcctcactgtccctctccggctctagctctctccatataaaccctcaagattatgtcaattggttagagccagccgggaatttcgtgcgggtgctgaaggagctgcgggagccggagaagaatgaaactgcgtggagtcagcctggctgccggcttgttcttactggccctgagtctttgggggcagcctgcagaggctgcggcttgctatgggtgttctccaggatcaaagtgtgactgcagtggcataaaaggggaaaagggagagagagggtttccaggtttggaaggacacccaggattgcctggatttccaggtccagaagggcctccggggcctcggggacaaaagggtgatgatggaattccagggccaccaggaccaaaaggaatcagaggtcctcctggacttcctggatttccagggacaccaggtcttcctggaatgccaggccacgatggggccccaggacctcaaggtattcccggatgcaatggaaccaagggagaacgtggatttccaggcagtcccggttttcctggtttacagggtcctccaggaccccctgggatcccaggtatgaagggtgaaccaggtagtataattatgtcatcactgccaggaccaaagggtaatccaggatatccaggtcctcctggaatacaaggcctacctggtcccactggtataccagggccaattggtcccccaggaccaccaggtttgatgggccctcctggtccaccaggacttccaggacctaaggggaatatgggcttaaatttccagggacccaaaggtgaaaaaggtgagcaaggtcttcagggcccacctgggccacctgggcagatcagtgaacagaaaagaccaattgatgtagagtttcagaaaggagatcagggacttcctggtgaccgagggcctcctggacctccagggatacgtggtcctccaggtcccccaggtggtgagaaaggtgagaagggtgagcaaggagagccaggcaaaagaggtaaaccaggcaaagatggagaaaatggccaaccaggaattcctggtttgcctggtgatcctggttaccctggtgaacccggaagggatggtgaaaagggccaaaaaggtgacactggcccacctggacctcctggacttgtaattcctagacctgggactggtataactataggagaaaaaggaaacattgggttgcctgggttgcctggagaaaaaggagagcgaggatttcctggaatacagggtccacctggccttcctggacctccaggggctgcagttatgggtcctcctggccctcctggatttcctggagaaaggggtcagaaaggtgatgaaggaccacctggaatttccattcctggacctcctggacttgacggacagcctggggctcctgggcttccagggcctcctggccctgctggccctcacattcctcctagtgatgagatatgtgaaccaggccctccaggccccccaggatctccaggtgataaaggactccaaggagaacaaggagtgaaaggtgacaaaggtgacacttgcttcaactgcattggaactggtatttcagggcctccaggtcaacctggtttgccaggtctcccaggtcctccaggatctcttggtttccctggacagaaaggggaaaaaggacaagctggtgcaactggtcccaaaggattaccaggcattccaggagctccaggtgctccaggctttcctggatctaaaggtgaacctggtgatatcctcacttttccaggaatgaagggtgacaaaggagagttgggttcccctggagctccagggcttcctggtttacctggcactcctggacaggatggattgccagggcttcctggcccgaaaggagagcctggtggaattacttttaagggtgaaagaggtccccctgggaacccaggtttaccaggcctcccagggaatatagggcctatgggtccccctggtttcggccctccaggcccagtaggtgaaaaaggcatacaaggtgtggcaggaaatccaggccagccaggaataccaggtcctaaaggggatccaggtcagactataacccagccggggaagcctggcttgcctggtaacccaggcagagatggtgatgtaggtcttccaggtgaccctggacttccagggcaaccaggcttgccagggatacctggtagcaaaggagaaccaggtatccctggaattgggcttcctggaccacctggtcccaaaggctttcctggaattccaggacctccaggagcacctgggacacctggaagaattggtctagaaggccctcctgggccacccggctttccaggaccaaagggtgaaccaggatttgcattacctgggccacctgggccaccaggacttccaggtttcaaaggagcacttggtccaaaaggtgatcgtggtttcccaggacctccgggtcctccaggacgcactggcttagatgggctccctggaccaaaaggtgatgttggaccaaatggacaacctggaccaatgggacctcctgggctgccaggaataggtgttcagggaccaccaggaccaccagggattcctgggccaataggtcaacctggtttacatggaataccaggagagaagggggatccaggacctcctggacttgatgttccaggacccccaggtgaaagaggcagtccagggatccccggagcacctggtcctataggacctccaggatcaccagggcttccaggaaaagcaggtgcctctggatttccaggtaccaaaggtgaaatgggtatgatgggacctccaggcccaccaggacctttgggaattcctggcaggagtggtgtacctggtcttaaaggtgatgatggcttgcagggtcagccaggacttcctggccctacaggagaaaaaggtagtaaaggagagcctggccttccaggccctcctggaccaatggatccaaatcttctgggctcaaaaggagagaagggggaacctggcttaccaggtatacctggagtttcagggccaaaaggttatcagggtttgcctggagacccagggcaacctggactgagtggacaacctggattaccaggaccaccaggtcccaaaggtaaccctggtctccctggacagccaggtcttataggacctcctggacttaaaggaaccatcggtgatatgggttttccagggcctcagggtgtggaagggcctcctggaccttctggagttcctggacaacctggctccccaggattacctggacagaaaggcgacaaaggtgatcctggtatttcaagcattggtcttccaggtcttcctggtccaaagggtgagcctggtctgcctggatacccagggaaccctggtatcaaaggttctgtgggagatcctggtttgcccggattaccaggaacccctggagcaaaaggacaaccaggccttcctggattcccaggaaccccaggccctcctggaccaaaaggtattagtggccctcctgggaaccccggccttccaggagaacctggtcctgtaggtggtggaggtcatcctgggcaaccagggcctccaggcgaaaaaggcaaacccggtcaagatggtattcctggaccagctggacagaagggtgaaccaggtcaaccaggctttggaaacccaggaccccctggacttccaggactttctggccaaaagggtgatggaggattacctgggattccaggaaatcctggccttccaggtccaaagggcgaaccaggctttcacggtttccctggtgtgcagggtcccccaggccctcctggttctccgggtccagctctggaaggacctaaaggcaaccctgggccccaaggtcctcctgggagaccaggttattaaggtctaccaggtccagaaggtcctccaggtctccctggaaatggaggtattaaaggagagaagggaaatccaggccaacctgggctacctggcttgcctggtttgaaaggagatcaaggaccaccaggactccagggtaatcctggccggccgggtctcaatggaatgaaaggagatcctggtctccctggtgttccaggattcccaggcatgaaaggacccagtggagtacctggatcagctggccctgagggggaaccgggacttattggtcctccaggtcctcctggattacctggtccttcaggacagagtatcataattaaaggagatgctggtcctccaggaatccctggccagcctgggctaaagggtctaccaggaccccaaggacctcaaggcttaccaggtccaactggccctccaggagatcctggacgcaatggactccctggctttgatggtgcaggagggcgcaaaggagacccaggtctgccaggacagccaggtacccgtggtttggatggtccccctggtccagatggattgcaaggtcccccaggtccccctggaacctcctctgttgcacatggatttcttattacacgccacagccagacaacggatgcaccacaatgcccacagggaacacttcaggtctatgaaggcttttctctcctgtatgtacaaggaaataaaagagcccacggtcaagacttggggacggctggcagctgccttcgtcgctttagtaccatgcctttcatgttctgcaacatcaataatgtttgcaactttgcttcaagaaatgactattcttactggctctctaccccagagcccatgccaatgagcatgcaacccctaaagggccagagcatccagccattcattagtcgatgtgcagtatgtgaagctccagctgtggtgatcgcagttcacagtcagacgatccagattccccattgtcctcagggatgggattctctgtggattggttattccttcatgatggtattttacactcttccttgcatttgtcatcatagctgactgtccattccatctacatttcttcccaatatgaggaatccctgtcatttgcataataagaagcttaaacttcaaacagcttctatccaagcactgtgttccccctcacacattttttgtaacatattttcataatctgcctattacttttttttgactacccttggtgtggatactattgtcttacctctgggcctgttccttcactagatttgaatttggccaagctcagcacacatctttggatattcactaagctattatggcacatgggtattgcggcacat

SEQ ID NO: 454446 - DNA, 235 bp, Homo sapiens
gggccacccggctttccaggaccaaaggtctgggacatttttctttattccttctcattttcttatctttcccaccttccttatttctagctctctattttgactcagatatcatcccaagccccaagtctttactataaatatacagataacttattatatttccattaaaaaaatatttaaccccaaatcatctttaatagtccaaggtcacatttggagcaaaaaaaaaaaa

SEQ ID NO: 454447 - DNA, 318 bp, Homo sapiens
gtcataatgttttgtcaatatccataagagtggatcagagcttacttaatcttgtatactgattatttcgtggaaataggtacccgtggtttggatggtccccctggtccagatggattgcaaggtcccccaggtccccctggaacctcctctgttgcacatggatttcttattacacgccacagccagacaacggatgcaccacaatgcccacagggaacacttcaggtctatgaaggcttttctctcctgtatgtacaaggaaataaaagagcccacggtcaagacttgggtgagataatcaatatctaatttcct

SEQ ID NO: 454448 - DNA, 793 bp, Homo sapiens
taaacttcaaacagcttctatccaagcactgtgttccccctcacacattttttgtaacatattttcataatctgcctattacttttttttgactacccttggtgtggatactattgtcttacctctgggcctgttccttcactagatttgaatttggccaagctcagcacacatctttggatattcactaagctattatggcacatgggtattgcggcacatttttccttgtcttttatagcatacaagtgcaggggcagaaggctcaggtcaagccctagcctcccctggttcctgcttggaagagtttcgttcagctcccttcatcgaatgtcatgggaggggtacctgtaactactatgccaactcctacagcttttggctggcaactgtagatgtgtcagacatgttcaggtaaagtgcttatagctttaattcaggtccaaagcttccttcagagatgctagggaagaaagagacaatttatggatggtttatcctcaacaaatgttaggaatttattggattgtgtactttattcttgcttgttcttctcatatacatgactcaggtcagaaaaacagacttgattattaatattaggtgagtttggtttgtgatagcttagtagtaatccttcaataatgaaacagagataaagaaaggttatgtgaccttcctaataagtcagcagctgttcaactagattgagaccaccccaggaattgaagttacagtctgtcttttccctctcagtccagtggtctcctttcccaggatattttaaagattc

SEQ ID NO: 454449 - DNA, 689 bp, Homo sapiens
  misc_feature (474)..(474): n is a, c, g, or t
  misc_feature (564)..(564): n is a, c, g, or t
  misc_feature (613)..(613): n is a, c, g, or t
aggggggaaggaagagtagctccttcttcttcttcttttttttttcttccactcttaaaaagcttctttctcttcacccaagcctcactgtccctctccggctctagctctctccatataaaccctcaagattatgtcaattggttagagccagccgggaatttcgtgcgggtgctgaaggagctgcgggagccggagaagaatgaaactgcgtggagtcagcctggctgccggcttgttcttactggccctgagtctttgggggcagcctgcagaggctgcggcttgctatgggtgctctccaggatcaaagtgtgactgcccccgctaaccggctttttgcccaaatgggccattatcgaagaattcacataaaacaatagcctcatcatccccaccatcatagccaccatcaccctccttaacctctacttctacctacgcctaatctactccacctcaatcacactactncccatatctaacaacgtaaaaataaaatgacagcttgaacatacaaaacccaccccattccttcccacactcaatcgccttaccacgctnactctacctatctcccttttatactaataatcttataaatactaaaacntcttcaccttcctctcaaaaatggccgcgctttacaaggcggcctggcaaaccctggcgttccaacttaatcgctt

SEQ ID NO: 454450 - DNA, 6259 bp, Homo sapiens
aggggggaaggaagagtagctccttcttcttcttcttttttttttcttccactcttaaaaagcttctttctcttcacccaagcctcactgtccctctccggctctagctctctccatataaaccctcaagattatgtcaattggttagagccagccgggaatttcgtgcgggtgctgaaggagctgcgggagccggagaagaatgaaactgcgtggagtcagcctggctgccggcttgttcttactggccctgagtctttgggggcagcctgcagaggctgcggcttgctatgggtgttctccaggatcaaagtgtgactgcagtggcataaaaggggaaaagggagagagagggtttccaggtttggaaggacacccaggattgcctggatttccaggtccagaagggcctccggggcctcggggacaaaagggtgatgatggaattccagggccaccaggaccaaaaggaatcagaggtcctcctggacttcctggatttccagggacaccaggtcttcctggaatgccaggccacgatggggccccaggacctcaaggtattcccggatgcaatggaaccaagggagaacgtggatttccaggcagtcccggttttcctggtttacagggtcctccaggaccccctgggatcccaggtatgaagggtgaaccaggtagtataattatgtcatcactgccaggaccaaagggtaatccaggatatccaggtcctcctggaatacaaggcctacctggtcccactggtataccagggccaattggtcccccaggaccaccaggtttgatgggccctcctggtccaccaggacttccaggacctaaggggaatatgggcttaaatttccagggacccaaaggtgaaaaaggtgagcaaggtcttcagggcccacctgggccacctgggcagatcagtgaacagaaaagaccaattgatgtagagtttcagaaaggagatcagggacttcctggtgaccgagggcctcctggacctccagggatacgtggtcctccaggtcccccaggtggtgagaaaggtgagaagggtgagcaaggagagccaggcaaaagaggtaaaccaggcaaagatggagaaaatggccaaccaggaattcctggtttgcctggtgatcctggttaccctggtgaacccggaagggatggtgaaaagggccaaaaaggtgacactggcccacctggacctcctggacttgtaattcctagacctgggactggtataactataggagaaaaaggaaacattgggttgcctgggttgcctggagaaaaaggagagcgaggatttcctggaatacagggtccacctggccttcctggacctccaggggctgcagttatgggtcctcctggccctcctggatttcctggagaaaggggtcagaaaggtgatgaaggaccacctggaatttccattcctggacctcctggacttgacggacagcctggggctcctgggcttccagggcctcctggccctgctggccctcacattcctcctagtgatgagatatgtgaaccaggccctccaggccccccaggatctccaggtgataaaggactccaaggagaacaaggagtgaaaggtgacaaaggtgacacttgcttcaactgcattggaactggtatttcagggcctccaggtcaacctggtttgccaggtctcccaggtcctccaggatctcttggtttccctggacagaaaggggaaaaaggacaagctggtgcaactggtcccaaaggattaccaggcattccaggagctccaggtgctccaggctttcctggatctaaaggtgaacctggtgatatcctcacttttccaggaatgaagggtgacaaaggagagttgggttcccctggagctccagggcttcctggtttacctggcactcctggacaggatggattgccagggcttcctggcccgaaaggagagcctggtggaattacttttaagggtgaaagaggtccccctgggaacccaggtttaccaggcctcccagggaatatagggcctatgggtccccctggtttcggccctccaggcccagtaggtgaaaaaggcatacaaggtgtggcaggaaatccaggccagccaggaataccaggtcctaaaggggatccaggtcagactataacccagccggggaagcctggcttgcctggtaacccaggcagagatggtgatgtaggtcttccaggtgaccctggacttccagggcaaccaggcttgccagggatacctggtagcaaaggagaaccaggtatccctggaattgggcttcctggaccacctggtcccaaaggctttcctggaattccaggacctccaggagcacctgggacacctggaagaattggtctagaaggccctcctgggccacccggctttccaggaccaaagggtgaaccaggatttgcattacctgggccacctgggccaccaggacttccaggtttcaaaggagcacttggtccaaaaggtgatcgtggtttcccaggacctccgggtcctccaggacgcactggcttagatgggctccctggaccaaaaggtgatgttggaccaaatggacaacctggaccaatgggacctcctgggctgccaggaataggtgttcagggaccaccaggaccaccagggattcctgggccaataggtcaacctggtttacatggaataccaggagagaagggggatccaggacctcctggacttgatgttccaggacccccaggtgaaagaggcagtccagggatccccggagcacctggtcctataggacctccaggatcaccagggcttccaggaaaagcaggtgcctctggatttccaggtaccaaaggtgaaatgggtatgatgggacctccaggcccaccaggacctttgggaattcctggcaggagtggtgtacctggtcttaaaggtgatgatggcttgcagggtcagccaggacttcctggccctacaggagaaaaaggtagtaaaggagagcctggccttccaggccctcctggaccaatggatccaaatcttctgggctcaaaaggagagaagggggaacctggcttaccaggtatacctggagtttcagggccaaaaggttatcagggtttgcctggagacccagggcaacctggactgagtggacaacctggattaccaggaccaccaggtcccaaaggtaaccctggtctccctggacagccaggtcttataggacctcctggacttaaaggaaccatcggtgatatgggttttccagggcctcagggtgtggaagggcctcctggaccttctggagttcctggacaacctggctccccaggattacctggacagaaaggcgacaaaggtgatcctggtatttcaagcattggtcttccaggtcttcctggtccaaagggtgagcctggtctgcctggatacccagggaaccctggtatcaaaggttctgtgggagatcctggtttgcccggattaccaggaacccctggagcaaaaggacaaccaggccttcctggattcccaggaaccccaggccctcctggaccaaaaggtattagtggccctcctgggaaccccggccttccaggagaacctggtcctgtaggtggtggaggtcatcctgggcaaccagggcctccaggcgaaaaaggcaaacccggtcaagatggtattcctggaccagctggacagaagggtgaaccaggtcaaccaggctttggaaacccaggaccccctggacttccaggactttctggccaaaagggtgatggaggattacctgggattccaggaaatcctggccttccaggtccaaagggcgaaccaggctttcacggtttccctggtgtgcagggtcccccaggccctcctggttctccgggtccagctctggaaggacctaaaggcaaccctgggccccaaggtcctcctgggagaccaggttattaaggtctaccaggtccagaaggtcctccaggtctccctggaaatggaggtattaaaggagagaagggaaatccaggccaacctgggctacctggcttgcctggtttgaaaggagatcaaggaccaccaggactccagggtaatcctggccggccgggtctcaatggaatgaaaggagatcctggtctccctggtgttccaggattcccaggcatgaaaggacccagtggagtacctggatcagctggccctgagggggaaccgggacttattggtcctccaggtcctcctggattacctggtccttcaggacagagtatcataattaaaggagatgctggtcctccaggaatccctggccagcctgggctaaagggtctaccaggaccccaaggacctcaaggcttaccaggtccaactggccctccaggagatcctggacgcaatggactccctggctttgatggtgcaggagggcgcaaaggagacccaggtctgccaggacagccaggtacccgtggtttggatggtccccctggtccagatggattgcaaggtcccccaggtccccctggaacctcctctgttgcacatggatttcttattacacgccacagccagacaacggatgcaccacaatgcccacagggaacacttcaggtctatgaaggcttttctctcctgtatgtacaaggaaataaaagagcccacggtcaagacttggggacggctggcagctgccttcgtcgctttagtaccatgcctttcatgttctgcaacatcaataatgtttgcaactttgcttcaagaaatgactattcttactggctctctaccccagagcccatgccaatgagcatgcaacccctaaagggccagagcatccagccattcattagtcgatgtgcagtatgtgaagctccagctgtggtgatcgcagttcacagtcagacgatccagattccccattgtcctcagggatgggattctctgtggattggttattccttcatgatgtaaacctcagtcagaaacgctgaaagcaggagacttgaggacacgaattagccgatgtcaagtgtgcatgaagaggacataacattttgaagaattccttttgtgttttaaaatgtgatatatatatatataaaattcctaggatgcagtgtctcattgtccccaactttactactgctgccgtcaatggtgctactatatatgatcaagataacatgctgactagtaaccatgaagattcagatgtacctcagcaatgcgccagagcaaagtctctattatttttctactaaagaaataaggaagtgaatttactttttgggtccagaatgactttctccaagaattataagatgaaaattatatattttgcccagttactaaaatggtacattaaaaattcaattaagagaagagtcacattgagtaaaataaaagactgcagtttgtgggaagaattatttttcacggtgctactaatcctgctgtatcccgggtttttaatataaaggtgttaagcttattttgctttgtaagtaaagaatgtgtatattgtgaacagccttttagctcaaaatgttgagtcatttacatatgacatagcatgaatcactctttacagaaaatgtaggaaaccctagaatacagacagcaatattttatattcatgtttatcaaagtgagaggacttatattcctacatcaagttactactgagagtaaatttattttgagttttatcccgtaagttctgttttgattttttttaaaaaacaaacccttttagtcactttaatcagaattttaaatgttcatgttacataccaaattataatatctaatggagcaatttgtcttttgctatattctccaagattatctcttaagaccatatgccccctgttttaatgtttcttacatcttgtttttactcatttctgactggacaaagttcttccaaacaattctgagaaacaaaaacacacacgcagaattaacaattcttttccctgtgcttcttatgtaagaatcctcctgtggcctctgcttgtacagaactgggaaacaacacttggttagtctcttttaagttacaaaaagccaattgatgtttcttattctttttaaattttaaatattttgttataaatactcacaggataccttatttccctagctatcatctcctgacttaatgttttttaaacccaccaatataaatttaattaaagatatatgttgtaa

SEQ ID NO: 454451 - DNA, 5727 bp, Homo sapiens
accctgttctttcctctccaattgctgctaggctgctggttttcaccttgattgtgaggagaggtggtgtgaatagagcaagttaaaatgccacaaagctctgagaggtggtgggaatagagcaagttaaaatgccataaatctctgagaggtggtaggaatagagcaagttaaaatgccacaaagctctgagttctcaccaagattcagctttttttttttttttttttctgagaaaacactccttgaattgctgcaagctttggttaagttctgaaagttaattctgactgaccatttttgccagtattctcattgcttctatggagaagacaatctttggagatttcctaacaccatcatttgtgctgatgtcaccctatcctctatgttttaaagggtttgcctggtgatcctggttaccctggtgaacccggaagggatggtgaaaaggccaaaagggtgacacgggcccaccgggacctccgggactggtaattcctagacctgggactggtataactataggagaaaaaggaaacattgggttgcctgggttgcctggagaaaaaggagagcgaggatttcctggaatacagggtccacctggccttcctggacctccaggggctgcagttatgggtcctcctggccctcctggatttcctggagaaaggggtcagaaaggtgatgaaggaccacctggaatttccattcctggacctcctggacttgacggacagcctggggctcctgggcttccagggcctcctggccctgctggccctcacattcctcctagtgatgagatatgtgaaccaggccctccaggccccccaggatctccaggtgataaaggactccaaggagaacaaggagtgaaaggtgacaaaggtgacacttgcttcaactgcattggaactggtatttcagggcctccaggtcaacctggtttgccaggtctcccaggtcctccaggatctcttggtttccctggacagaaaggggaaaaaggacaagctggtgcaactggtcccaaaggattaccaggcattccaggagctccaggtgctccaggctttcctggatctaaaggtgaacctggtgatatcctcacttttccaggaatgaagggtgacaaaggagagttgggttcccctggagctccagggcttcctggtttacctggcactcctggacaggatggattgccagggcttcctggcccgaaaggagagcctggtggaattacttttaagggtgaaagaggtccccctgggaacccaggtttaccaggcctcccagggaatatagggcctatgggtccccctggtttcggccctccaggcccagtaggtgaaaaaggcatacaaggtgtggcaggaaatccaggccagccaggaataccaggtcctaaaggggatccaggtcagactataacccagccggggaagcctggcttgcctggtaacccaggcagagatggtgatgtaggtcttccaggtgaccctggacttccagggcaaccaggcttgccagggatacctggtagcaaaggagaaccaggtatccctggaattgggcttcctggaccacctggtcccaaaggctttcctggaattccaggacctccaggagcacctgggacacctggaagaattggtctagaaggccctcctgggccacccggctttccaggaccaaagggtgaaccaggatttgcattacctgggccacctgggccaccaggacttccaggtttcaaaggagcacttggtccaaaaggtgatcgtggtttcccaggacctccgggtcctccaggacgcactggcttagatgggctccctggaccaaaaggtgatgttggaccaaatggacaacctggaccaatgggacctcctgggctgccaggaataggtgttcagggaccaccaggaccaccagggattcctgggccaataggtcaacctggtttacatggaataccaggagagaagggggatccaggacctcctggacttgatgttccaggacccccaggtgaaagaggcagtccagggatccccggagcacctggtcctataggacctccaggatcaccagggcttccaggaaaagcaggtgcctctggatttccaggtaccaaaggtgaaatgggtatgatgggacctccaggcccaccaggacctttgggaattcctggcaggagtggtgtacctggtcttaaaggtgatgatggcttgcagggtcagccaggacttcctggccctacaggagaaaaaggtagtaaaggagagcctggccttccaggccctcctggaccaatggatccaaatcttctgggctcaaaaggagagaagggggaacctggcttaccaggtatacctggagtttcagggccaaaaggttatcagggtttgcctggagacccagggcaacctggactgagtggacaacctggattaccaggaccaccaggtcccaaaggtaaccctggtctccctggacagccaggtcttataggacctcctggacttaaaggaaccatcggtgatatgggttttccagggcctcagggtgtggaagggcctcctggaccttctggagttcctggacaacctggctccccaggattacctggacagaaaggcgacaaaggtgatcctggtatttcaagcattggtcttccaggtcttcctggtccaaagggtgagcctggtctgcctggatacccagggaaccctggtatcaaaggttctgtgggagatcctggtttgcccggattaccaggaacccctggagcaaaaggacaaccaggccttcctggattcccaggaaccccaggccctcctggaccaaaaggtattagtggccctcctgggaaccccggccttccaggagaacctggtcctgtaggtggtggaggtcatcctgggcaaccagggcctccaggcgaaaaaggcaaacccggtcaagatggtattcctggaccagctggacagaagggtgaaccaggtcaaccaggctttggaaacccaggaccccctggacttccaggactttctggccaaaagggtgatggaggattacctgggattccaggaaatcctggccttccaggtccaaagggcgaaccaggctttcacggtttccctggtgtgcagggtcccccaggccctcctggttctccgggtccagctctggaaggacctaaaggcaaccctgggccccaaggtcctcctgggagaccaggttattaaggtctaccaggtccagaaggtcctccaggtctccctggaaatggaggtattaaaggagagaagggaaatccaggccaacctgggctacctggcttgcctggtttgaaaggagatcaaggaccaccaggactccagggtaatcctggccggccgggtctcaatggaatgaaaggagatcctggtctccctggtgttccaggattcccaggcatgaaaggacccagtggagtacctggatcagctggccctgagggggaaccgggacttattggtcctccaggtcctcctggattacctggtccttcaggacagagtatcataattaaaggagatgctggtcctccaggaatccctggccagcctgggctaaagggtctaccaggaccccaaggacctcaaggcttaccaggtccaactggccctccaggagatcctggacgcaatggactccctggctttgatggtgcaggagggcgcaaaggagacccaggtctgccaggacagccaggtacccgtggtttggatggtccccctggtccagatggattgcaaggtcccccaggtccccctggaacctcctctgttgcacatggatttcttattacacgccacagccagacaacggatgcaccacaatgcccacagggaacacttcaggtctatgaaggcttttctctcctgtatgtacaaggaaataaaagagcccacggtcaagacttggggacggctggcagctgccttcgtcgctttagtaccatgcctttcatgttctgcaacatcaataatgtttgcaactttgcttcaagaaatgactattcttactggctctctaccccagagcccatgccaatgagcatgcaacccctaaagggccagagcatccagccattcattagtcgatgtgcagtatgtgaagctccagctgtggtgatcgcagttcacagtcagacgatccagattccccattgtcctcagggatgggattctctgtggattggttattccttcatgatgcatacaagtgcaggggcagaaggctcaggtcaagccctagcctcccctggttcctgcttggaagagtttcgttcagctcccttcatcgaatgtcatgggaggggtacctgtaactactatgccaactcctacagcttttggctggcaactgtagatgtgtcagacatgttcagtaaacctcagtcagaaacgctgaaagcaggagacttgaggacacgaattagccgatgtcaagtgtgcatgaagaggacataacattttgaagaattccttttgtgttttaaaatgtgatatatatatatataaaattcctaggatgcagtgtctcattgtccccaactttactactgctgccgtcaatggtgctactatatatgatcaagataacatgctgactagtaaccatgaagattcagatgtacctcagcaatgcgccagagcaaagtctctattatttttctactaaagaaataaggaagtgaatttactttttgggtccagaatgactttctccaagaattataagatgaaaattatatattttgcccagttactaaaatggtacattaaaaattcaattaagagaagagtcacattgagtaaaataaaagactgcagtttgtgggaagaattatttttcacggtgctactaatcctgctgtatcccgggtttttaatataaaggtgttaagcttattttgctttgtaagtaaagaatgtgtatattgtgaacagccttttagctcaaaatgttgagtcatttacatatgacatagcatgaatcactctttacagaaaatgtaggaaaccctagaatacagacagcaatattttatattcatgtttatcaaagtgagaggacttatattcctacatcaagttactactgagagtaaatttattttgagttttatcccgtaagttctgttttgattttttttaaaaaacaaacccttttagtcactttaatcagaattttaaatgttcatgttacataccaaattataatatctaatggagcaatttgtcttttgctatattctccaagattatctcttaagaccatatgccccctgttttaatgtttcttacatcttgtttttactcatttctgactggacaaagttcttccaaacaattctgagaaacaaaaacacacacgcagaattaacaattcttttccctgtgcttcttatgtaagaatcctcctgtggcctctgcttgtacagaactgggaaacaacacttggttagtctcttttaagttacaaaaagccaattgatgtttcttattctttttaaattttaaatattttgttataaatactcacaggataccttatttccctagctatcatctcctgacttaatgttttttaaacccaccaatataaatttaattaaagatatatgttgtaaacccgccaaacgaaaagctctataactttgaattc

SEQ ID NO: 454452 - DNA, 2855 bp, Homo sapiens
gagccctgatcaggtgatttccaaaaccaaagccagaagtctgccagatgtttctttcaaatggccaatgggcagggggtgtgttcaagccacagtttatcttcgcagtggtttgacttgattgtacaaagggagatcctgtgacacttttacaacatctttccaagaacacaaggtatgtgacatttcccttacccaaccacggccagttggttgtgttttaactttgcgcacctcagttagccatgggaagttcattttgtctgtcagccaggggtatattttaacaatatgaactgtctcatttaattctcaccacaaccctatgaagtaaatactgttattttctccaaatttgaggtgagaaaactatgaatcaaggaggttaaataatcaactcaattcacacaagataatataaggcaaaattgagattacagtcttggaagtttgactctagaaatagtgctatatgccactatgtaattcttatgccctcaatcaccttcctcccctcgctgcaatttttttgtaacattaatgattttatttattcagggtaatcctggccggccgggtctcaatggaatgaaaggagatcctggtctccctggtgttccaggattcccaggcatgaaaggacccagtggagtacctggatcagctggccctgagggggaaccgggacttattggtcctccaggtcctcctggattacctggtccttcaggacagagtatcataattaaaggagatgctggtcctccaggaatccctggccagcctgggctaaagggtctaccaggaccccaaggacctcaaggcttaccaggtccaactggccctccaggagatcctggacgcaatggactccctggctttgatggtgcaggagggcgcaaaggagacccaggtctgccaggacagccaggtacccgtggtttggatggtccccctggtccagatggattgcaaggtcccccaggtccccctggaacctcctctgttgcacatggatttcttattacacgccacagccagacaacggatgcaccacaatgcccacagggaacacttcaggtctatgaaggcttttctctcctgtatgtacaaggaaataaaagagcccacggtcaagacttggggacggctggcagctgccttcgtcgctttagtaccatgcctttcatgttctgcaacatcaataatgtttgcaactttgcttcaagaaatgactattcttactggctctctaccccagagcccatgccaatgagcatgcaacccctaaagggccagagcatccagccattcattagtcgatgtgcagtatgtgaagctccagctgtggtgatcgcagttcacagtcagacgatccagattccccattgtcctcagggatgggattctctgtggattggttattccttcatgatgcatacaagtgcaggggcagaaggctcaggtcaagccctagcctcccctggttcctgcttggaagagtttcgttcagctcccttcatcgaatgtcatgggaggggtacctgtaactactatgccaactcctacagcttttggctggcaactgtagatgtgtcagacatgttcagtaaacctcagtcagaaacgctgaaagcaggagacttgaggacacgaattagccgatgtcaagtgtgcatgaagaggacataacattttgaagaattccttttgtgttttaaaatgtgatatatatatatataaaattcctaggatgcagtgtctcattgtccccaactttactactgctgccgtcaatggtgctactatatatgatcaagataacatgctgactagtaaccatgaagattcagatgtacctcagcaatgcgccagagcaaagtctctattatttttctactaaagaaataaggaagtgaatttactttttgggtccagaatgactttctccaagaattataagatgaaaattatatattttgcccagttactaaaatggtacattaaaaattcaattaagagaagagtcacattgagtaaaataaaagactgcagtttgtgggaagaattatttttcacggtgctactaatcctgctgtatcccgggtttttaatataaaggtgttaagcttattttgctttgtaagtaaagaatgtgtatattgtgaacagccttttagctcaaaatgttgagtcatttacatatgacatagcatgaatcactctttacagaaaatgtaggaaaccctagaatacagacagcaatattttatattcatgtttatcaaagtgagaggacttatattcctacatcaagttactactgagagtaaatttattttgagttttatcccgtaagttctgttttgattttttttaaaaaacaaacccttttagtcactttaatcagaattttaaatgttcatgttacataccaaattataatatctaatggagcaatttgtcttttgctatattctccaagattatctcttaagaccatatgccccctgttttaatgtttcttacatcttgtttttactcatttctgactggacaaagttcttccaaacaattctgagaaacaaaaacacacacgcagaattaacaattcttttccctgtgcttcttatgtaagaatcctcctgtggcctctgcttgtacagaactgggaaacaacacttggttagtctcttttaagttacaaaaagccaattgatgtttcttattctttttaaattttaaatattttgttataaatactcacaggataccttatttccctagctatcatctcctgacttaatgttttttaaacccaccaatataaatttaattaaagatatatgttgtaa

SEQ ID NO: 454453 - DNA, 4232 bp, Homo sapiens
aggggggaaggaagagtagctccttcttcttcttcttttttttttcttccactcttaaaaagcttctttctcttcacccaagcctcactgtccctctccggctctagctctctccatataaaccctcaagattatgtcaattggttagagccagccgggaatttcgtgcgggtgctgaaggagctgcgggagccggagaagaatgaaactgcgtggagtcagcctggctgccggcttgttcttactggccctgagtctttgggggcagcctgcagaggctgcggcttgctatgggtgttctccaggatcaaagtgtgactgcagtggcataaaaggggaaaagggagagagagggtttccaggtttggaaggacacccaggattgcctggatttccaggtccagaagggcctccggggcctcggggacaaaagggtgatgatggaattccagggccaccaggaccaaaaggaatcagaggtcctcctggacttcctggatttccagggacaccaggtcttcctggaatgccaggccacgatggggccccaggacctcaaggtattcccggatgcaatggaaccaagggagaacgtggatttccaggcagtcccggttttcctggtttacagggtcctccaggaccccctgggatcccaggtatgaagggtgaaccaggtagtataattatgtcatcactgccaggaccaaagggtaatccaggatatccaggtcctcctggaatacaaggcctacctggtcccactggtataccagggccaattggtcccccaggaccaccaggtttgatgggccctcctggtccaccaggacttccaggacctaaggggaatatgggcttaaatttccagggacccaaaggtgaaaaaggtgagcaaggtcttcagggcccacctgggccacctgggcagatcagtgaacagaaaagaccaattgatgtagagtttcagaaaggagatcagggacttcctggtgaccgagggcctcctggacctccagggatacgtggtcctccaggtcccccaggtggtgagaaaggtgagaagggtgagcaaggagagccaggcaaaagaggtaaaccaggcaaagatggagaaaatggccaaccaggaattcctggtttgcctggtgatcctggttaccctggtgaacccggaagggatggtgaaaagggccaaaaaggtgacactggcccacctggacctcctggacttgtaattcctagacctgggactggtataactataggagaaaaaggaaacattgggttgcctgggttgcctggagaaaaaggagagcgaggatttcctggaatacagggtccacctggccttcctggacctccaggggctgcagttatgggtcctcctggccctcctggatttcctggagaaaggggtcagaaaggtgatgaaggaccacctggaatttccattcctggacctcctggacttgacggacagcctggggctcctgggcttccagggcctcctggccctgctggccctcacattcctcctagtgatgagatatgtgaaccaggccctccaggccccccaggatctccaggtgataaaggactccaaggagaacaaggagtgaaaggtgacaaaggtgacacttgcttcaactgcattggaactggtatttcagggcctccaggtcaacctggtttgccaggtctcccaggtcctccaggatctcttggtttccctggacagaaaggggaaaaaggacaagctggtgcaactggtcccaaaggattaccaggcattccaggagctccaggtgctccaggctttcctggatctaaaggtgaacctggtgatatcctcacttttccaggaatgaagggtgacaaaggagagttgggttcccctggagctccagggcttcctggtttacctggcactcctggacaggatggattgccagggcttcctggcccgaaaggagagcctggtggaattacttttaagggtgaaagaggtccccctgggaacccaggtttaccaggcctcccagggaatatagggcctatgggtccccctggtttcggccctccaggcccagtaggtgaaaaaggcatacaaggtgtggcaggaaatccaggccagccaggaataccaggtcctaaaggggatccaggtcagactataacccagccggggaagcctggcttgcctggtaacccaggcagagatggtgatgtaggtcttccaggtgaccctggacttccagggcaaccaggcttgccagggatacctggtagcaaaggagaaccaggtatccctggaattgggcttcctggaccacctggtcccaaaggctttcctggaattccaggacctccaggagcacctgggacacctggaagaattggtctagaaggccctcctgggccacccggctttccaggaccaaagggtgaaccaggatttgcattacctgggccacctgggccaccaggacttccaggtttcaaaggagcacttggtccaaaaggtgatcgtggtttcccaggacctccgggtcctccaggacgcactggcttagatgggctccctggaccaaaaggtgatgttggaccaaatggacaacctggaccaatgggacctcctgggctgccaggaataggtgttcagggaccaccaggaccaccagggattcctgggccaataggtcaacctggtttacatggaataccaggagagaagggggatccaggacctcctggacttgatgttccaggacccccaggtgaaagaggcagtccagggatccccggagcacctggtcctataggacctccaggatcaccagggcttccaggaaaagcaggtgcctctggatttccaggtaccaaaggtgaaatgggtatgatgggacctccaggcccaccaggacctttgggaattcctggcaggagtggtgtacctggtcttaaaggtgatgatggcttgcagggtcagccaggacttcctggccctacaggagaaaaaggtagtaaaggagagcctggccttccaggccctcctggaccaatggatccaaatcttctgggctcaaaaggagagaagggggaacctggcttaccaggtatacctggagtttcagggccaaaaggttatcagggtttgcctggagacccagggcaacctggactgagtggacaacctggattaccaggaccaccaggtcccaaaggtaaccctggtctccctggacagccaggtcttataggacctcctggacttaaaggaaccatcggtgatatgggttttccagggcctcagggtgtggaagggcctcctggaccttctggagttcctggacaacctggctccccaggattacctggacagaaaggcgacaaaggtgatcctggtatttcaagcattggtcttccaggtcttcctggtccaaaggtaatctttggcatatagttttaggcacatacttgagcagatatgaaattttttaatactatgctcattcctaagttttcattaaacaaactatagaatgacatagtatattctggataagagatttattccttttcttttctcttagatgataagaagatatgttttagggtttgtggccagtccaaaataaaaagggaaaactttctggtttctttgtttttcttctatcttaatttctggatatacttcaataatctcaatgcctagatttttctggtcttgttagtccatccctttttagtgatggagttgttggcctttgtcctaatgttattattaactaatttgaaaagacttataaacaaagtgacagttaatgctaatgtagtagtattcttaactgcgtgtctgagatagtcctctgaatacagttttacaattccctctacttctctcttcaatgtgaaaactttggtggtgtttctcaagtaatcaaatttagaatttgtttcagaatcattggactcaacaggaatttatttgacaattgtttagttccatgtcaaaaagtagtaactccttaatcatgtagtcagaccacagacctaaaaagtattagaaaaggaattttggtactcagttttcatggaaatagtgaaagttcccagtgatataagaatttattgaattgtatgtaaggataatttttcttttaatattatataaaaatactttattttgatcatctaattgatcaatgtcttataaagagataatcaag

SEQ ID NO: 454454 - DNA, 1296 bp, Homo sapiens
  misc_feature (73)..(73): n is a, c, g, or t
ggggactacaggtgcacgctaccacacctggctgatttttttgttttagtagagacagggtttcaaccatgtngcccaggtggtctcaaactcctgagctcaggcaatcccagcactttgggaggctgaggcaggtcgatcacgaggtcaggcgtttaagaccagcttgaccaacatggtgaaaccccatctctacaaaaattagctgggcgtggtggcgcgcgcctgtaatcccagctactcaggaggctgaggcagatgaattgcttgaatccaggaggcagaggttgcaatgagccaagattgtgccacggcactccagcctgggcagcagagtgagactctctctcaaaaaaacaaaacttggctgttaatgtctgccctctgaattcagacacactatattagaccagaccaccatgtgtcattgtgtgtgtgtgtgtgtgtgtgtgtgtttgcgtgcgcatgtgtagaggagagagcagggtccctgagataatggtttccaaactgtatcgtagccgtccacaaagatgtaatccaaatctatttttctcacgtgtttaaaaaactgaaaagtgactactcagatatgttggaagtcacatcgaagactatcagaatattaccttgtgttcataggttaacttgtttttgtacacgtcttagttatttcaggcatctctttgcttaaaattgagtttcttgtaaatgtgactgatgagcgaggttagaagtggaagaaattcctgtgcatgttctataatctgacaccctgaaagcaagtttcctttcgtcattcacatgctcttgttctgccgtgactgttcaggtgtatggtagtaagtaaatgtattaacatggtgaacagtagtaatattctatcatagagtattagcccttgcaagttttcagggcgtcttttccgacttcagtttttgtgataaagaatgtgaacagttgttagatgttctcagtgattcaactttaaaacaaatttctcgtgatgattcatttcaaaatcctgagtgagtctgactgaaaaatacgagagaaaagagagtggtttccgtttgcagctacacagctgtgtgcatcgacgttctcctggggtgtgtgccaagcgaaacccaggggtgaattggattcttgaagagaccaaagcctgtaactgtccagcttctaatttcaaaacgggtccattagggcttcgttgtgttaacaagttgacaccatgactagtaaatgtaaacgtgtatgtataaaataaagtttagcaaattaagtgtcctgtta

SEQ ID NO: 454455 - DNA, 1779 bp, Homo sapiens
  misc_feature (1553)..(1553): n is a, c, g, or t
  misc_feature (1742)..(1742): n is a, c, g, or t
  misc_feature (1770)..(1770): n is a, c, g, or t
gagcctaccaaacctttggttcgcagggctggagctaagtctcgctccaggagaaagaagcagaagaagaactccaggcaggaagcagtgccctggaaaaaacccaaaggcatcaattccaacagcacagctaacttggaggatcctgaggtgggtgatgctgaaagcatggcgatctcagagccgatcaagggcagcagaaagccctgtgtgaataaggaggagttggctttgaagaagcccatggcgaaatgtgcctggaagggtcccagagagccacctcaggatgcccgggcagaagccgagagcccaggaggcgcctctgagtcagaccaagatggtggccatgaaagcccaccaaagaagaaggccgtggcctgggtgtctgccaagaaccccgctcccatgaggaagaagaagaaggtgagcttgggccctgtctcctacgtcttggttgactcagaagatggcaggaagaagccggtgatgccaaagaaagggccaggctcaagaagggaggcatcagatcagaaggcccctcggggccagcagcctgccgaggcaacagcctcaacctctaggggtccgaaggccaagccagaaggctctcctcggcgtgccaccaatgaatccagaaaggtttgatctgggggaccacccatactgaggagttgaaagaacaaggaagacgtaccaagtcaaccaagttctctcttgtcactgaataagactttggactctcttagggcccctgttgatagagatctggccctgaggtaaacgataggtgaggtcttgggtgggagggagttggggaagggaggtggatctctatgcccttttctctaccaggcctgccgtttcaccgccttctctactcaccttctcttcggaggcaggagagttggtaagaggattgggaaaattctagaacattcattcccctttatgcatgagcagggtcactgttacactcatccatgttcagcttttctcccccacgccttgctccctcctcggaatggtcagcgacctctgcaggccctggcatttggaagagctgggtggccctgccatattcttcctcccgccttcctcttgtgtaaccagcggggtaagttaagccaggaccttcgctgcaaacctggttttattgctccttcagtctccagcttccatcctccagttatctagccaggaggtcccaagagttagttttagggaaaaagaatgtctgcctagacctcaaagtctttgagttttagagtctgttagtaaaaatggcactttgattcccatttgggatgagccctctcaggaatcctgtggggaaggggggtgattatagggaaggacgcaggcattcctaggtccccagctctaattccatccatctacccaactgtcaccatctttgcaccaaactgtcaccatctttgcagcagaaggtcactactcacattatagtaagaggggaaaaaaatcttttaaaacttggctggccaatgttaagtattttaaaagtcattttaaaatacttaacattggccagnaagttttaagtattttaaaagtcattttaaaatatttgtcattgatgaaacttggttttcaggcacacgtaattgctttccctctcttcttgttgattagggtgttaaacctcttattttaacttcaagtccctaggattaggatggtccctttggtccccggatgttttgcagtaattggcttccctngggttaataaaggtattttttggaatanacctcgggg

SEQ ID NO: 454456 - DNA, 2720 bp, Homo sapiens
gagcctaccaaacctttggttcgcagggctggagctaagtctcgctccaggagaaagaagcagaagaagaactccaggcaggaagcagtgccctggaaaaaacccaaaggcatcaattccaacagcacagctaacttggaggatcctgaggtgggtgatgctgaaagcatggcgatctcagagccgatcaagggcagcagaaagccctgtgtgaataaggaggagttggctttgaagaagcccatggcgaaatgtgcctggaagggtcccagagagccacctcaggatgcccgggcagaagccgagagcccaggaggcgcctctgagtcagaccaagatggtggccatgaaagcccaccaaagaagaaggccgtggcctgggtgtctgccaagaaccccgctcccatgaggaagaagaagaaggtgagcttgggccctgtctcctacgtcttggttgactcagaagatggcaggaagaagccggtgatgccaaagaaagggccaggctcaagaagggaggcatcagatcagaaggcccctcggggccagcagcctgccgaggcaacagcctcaacctctaggggtccgaaggccaagccagaaggctctcctcggcgtgccaccaatgaatccagaaaggtttgatctgggggaccacccatactgaggagttgaaagaacaaggaagacgtaccaagtcaaccaagttctctcttgtcactgaataagactttggactctcttagggcccctgttgatagagatctggccctgaggtaaacgataggtgaggtcttgggtgggagggagttggggaagggaggtggatctctatgcccttttctctaccaggcctgccgtttcaccgccttctctactcaccttctcttcggaggcaggagagttggtaagaggattgggaaaattctagaacattcattcccctttatgcatgagcagggtcactgttacactcatccatgttcagcttttctcccccacgccttgctccctcctcggaatggtcagcgacctctgcaggccctggcatttggaagagctgggtggccctgccatattcttcctcccgccttcctcttgtgtaaccagcggggtaagttaagccaggaccttcgctgcaaacctggttttattgctccttcagtctccagcttccatcctccagttatctagccaggaggtcccaagagttagttttagggaaaaagaatgtctgcctagacctcaaagtctttgagttttagagtctgttagtaaaaatggcactttgattcccatttgggatgagccctctcaggaatcctgtggggaaggggggtgattatagggaaggacgcaggcattcctaggtccccagctctaattccatccatctacccaactgtcaccatctttgcaccaaactgtcaccatctttgcagcagaaggtcactactcacattatagtaagaggggaaaaaaatcttttaaaacttggctgttggccgggcacggtggctcacgcctgtaatcccagcactttgggaggctgaggcaggtcgatcacgaggtcaggcgtttaagaccagcttgaccaacatggtgaaaccccatctctacaaaaattagctgggcgtggtggcgcgcgcctgtaatcccagctactcaggaggctgaggcagatgaattgcttgaatccaggaggcagaggttgcaatgagccaagattgtgccacggcactccagcctgggcagcagagtgagactctctctcaaaaaaacaaaacttggctgttaatgtctgccctctgaattcagacacactatattagaccagaccaccatgtgtcattgtgtgtgtgtgtgtgtgtgtgtgtgtttgcgtgcgcatgtgtagaggagagagcagggtccctgagataatggtttccaaactgtatcgtagccgtccacaaagatgtaatccaaatctatttttctcacgtgtttaaaaaactgaaaagtgactactcagatatgttggaagtcacatcgaagactatcagaatattaccttgtgttcataggttaacttgtttttgtacacgtcttagttatttcaggcatctctttgcttaaaattgagtttcttgtaaatgtgactgatgagcgaggttagaagtggaagaaattcctgtgcatgttctataatctgacaccctgaaagcaagtttcctttcgtcattcacatgctcttgttctgccgtgactgttcaggtgtatggtagtaagtaaatgtattaacatggtgaacagtagtaatattctatcatagagtattagcccttgcaagttttcagggcgtcttttccgacttcagtttttgtgataaagaatgtgaacagttgttagatgttctcagtgattcaactttaaaacaaatttctcgtgatgattcatttcaaaatcctgagtgagtctgactgaaaaatacgagagaaaagagagtggtttccgtttgcagctacacagctgtgtgcatcgacgttctcctggggtgtgtgccaagcgaaacccaggggtgaattggattcttgaagagaccaaagcctgtaactgtccagcttctaatttcaaaacgggtccattagggcttcgttgtgttaacaagttgacaccatgactagtaaatgtaaacgtgtatgtataaaataaagtttagcaaattaagtgtcctgtta

SEQ ID NO: 454457 - DNA, 1484 bp, Homo sapiens
gagcctaccaaacctttggttcgcagggctggagctaagtctcgctccaggagaaagaagcagaagaagaactccaggcaggaagcagtgccctggaaaaaacccaaaggcatcaattccaacagcacagctaacttggaggatcctgaggtgggtgatgctgaaagcatggcgatctcagagccgatcaagggcagcagaaagccctgtgtgaataaggaggagttggctttgaagaagcccatggcgaaatgtgcctggaagggtcccagagagccacctcaggatgcccgggcagaagccgagagcccaggaggcgcctctgagtcagaccaagatggtggccatgaaagcccaccaaagaagaaggccgtggcctgggtgtctgccaagaaccccgctcccatgaggaagaagaagaaggtgagcttgggccctgtctcctacgtcttggttgactcagaagatggcaggaagaagccggtgatgccaaagaaagggccaggctcaagaagggaggcatcagatcagaaggcccctcggggccagcagcctgccgaggcaacagcctcaacctctaggggtccgaaggccaagccagaaggctctcctcggcgtgccaccaatgaatccagaaaggtttgatctgggggaccacccatactgaggagttgaaagaacaaggaagacgtaccaagtcaaccaagttctctcttgtcactgaataagactttggactctcttagggcccctgttgatagagatctggccctgaggtaaacgataggtgaggtcttgggtgggagggagttggggaagggaggtggatctctatgcccttttctctaccaggcctgccgtttcaccgccttctctactcaccttctcttcggaggcaggagagttggtaagaggattgggaaaattctagaacattcattcccctttatgcatgagcagggtcactgttacactcatccatgttcagcttttctcccccacgccttgctccctcctcggaatggtcagcgacctctgcaggccctggcatttggaagagctgggtggccctgccatattcttcctcccgccttcctcttgtgtaaccagcggggtaagttaagccaggaccttcgctgcaaacctggttttattgctccttcagtctccagcttccatcctccagttatctagccaggaggtcccaagagttagttttagggaaaaagaatgtctgcctagacctcaaagtctttgagttttagagtctgttagtaaaaatggcactttgattcccatttgggatgagccctctcaggaatcctgtggggaaggggggtgatctccctttttgtttcctccccgccccccattatctcttgggtcaatagggttaccacttgtatcccgcatcctatttcaaaaggggcaagctccctctctcttttctcaacccttaagtgaccttttgttgtggctcttct

SEQ ID NO: 454458 - DNA, 542 bp, Homo sapiens
aagaggtcctactgaggtgtggcaggatcacaggccagtggaaaaagggcaggtcagatgggcaaggcccaggactttcagattaactgagaggatatcgaggccaagcatggcagggggaaggtcagtgggtgtcaagagacccaggtctgaccccggatgtttgctccatgtgacaaaagcaggcctgtctcaggaccttttcttttcttttttccttctttttttttttgacacggagtttcgctcttgttgtccaggctagagtgcaatggcatgatcccagctcaccgcaacgtctacctcccaggaagtggagtgacaggggacaggtagagagaagggggcccaatggccagggagtgaaggaggtggcgttgctgagagcagtctgcacatgcttctgtctgagtgcaggaaggtgttccagggtcgaaattacacttctcgtacctggagacgctgtttgtgggagcactgggctcatgcctggcacacaataggtctgcaataaaccatggttaaatcctgaaaaaaaaagt

SEQ ID NO: 454459 - DNA, 1859 bp, Homo sapiens
aagaggtcctactgaggtgtggcaggatcacaggccagtggaaaaagggcaggtcagatgggcaaggcccaggactttcagattaactgagaggatatcgaggccaagcatggcagggggaaggtcagtgggtgtcaagagacccaggtctgaccccggatgtttgctccatgtgacaaaagcaggcctgtctcaggaccttttcttttcttttttccttctttttttttttgacacggagtttcgctcttgttgtccaggctagagtgcaatggcatgatcccagctcaccgcaacgtctacctcccaggttcaaatcattctcttgcctcagactcccgagtagctgggattacaggcacatgccaccatgcctggctaattttgtatatttagtagaaacagggtttcaccatgctggccatgctggtctcgaactcctgacctcaggtgttccacctacctcagcctcccaaagtgctggggttacaggtgtgagccatcgcgcctggccaggacctttgtttcttatctacatattggaagatttggtcctgatgtcctttgaggcttctttagctctagttctctgacacttcagcctatatcacagctaacttcctcagtctcatctattccttatgctccagcccctggcaatttgcctcaagatgggggtttgaaaataactttacctgactcaaggagtgtctggagcacctcctagtctaagtctgcaagctccagttcttgcctaaaaccatgccagtggccacccttgggcttcagacagctctggggccttttgaccacaagccagcccctcgccctctctgtggcatagtcttctctgccccaggactgcagggcggcttcctccaaggcttccaaggctcaaaagaaatttggctccatccaagaaggctccagctcccctactggcccctggcttcaggcccacacccctgggccaggcccagagagtgtgtctcaggagaattcaatgggctctagagagacacacagaaagtttggcatttggaaatttcaaggatgtatgtatgctcacgtatggagcaggttgtcctggtccctgggtgcagggaagtgggctgcagggaagtggattggaggggagcttgaggaatataaggagcgggggtggagactcaggctatggacaaggacagccccaaggttgggaagacctggccttagtcgtcctcagcctaggggcagggcagtgaagaaagctctccccgctcctgctgtaatgacccagagtagcctccccaggccggcatcttatgtgtgtcttccaccatcctcatggtggcacttttctaggcctgtctcccagcattgtgcaaggctcggaagagaaccaggaagtgaaactgggtgaaaacagaaagctcaatggatgggctaggttcccagatcattagggcagagtttgcacgtcctctggtcactggaatccacccagcccacgaatcatctccctcttgaaggattttatttctactgggttttggaacaaactcctgctgagaccccacagccagaaactgaaagcagcagctccccaaagcctggaaaatccctaagagaaggcctggggcaggaagtggagtgacaggggacaggtagagagaagggggcccaatggccagggagtgaaggaggtggcgttgctgagagcagtctgcacatgcttctgtctgagtgcaggaaggtgttccagggtcgaaattacacttctcgtacctggagacgctgtttgtgggagcactgggctcatgcctggcacacaataggtctgcaataaaccatggttaaatcctgaaaaaaaaagt

SEQ ID NO: 454460 - DNA, 1249 bp, Homo sapiens
aagaggtcctactgaggtgtggcaggatcacaggccagtggaaaaagggcaggtcagatgggcaaggcccaggactttcagattaactgagaggatatcgaggccaagcatggcagggggaaggtcagtgggtgtcaagagacccaggtctgaccccggatgtttgctccatgtgacaaaagcaggcctgtctcaggaccttttcttttcttttttccttctttttttttttgacacggagtttcgctcttgttgtccaggctagagtgcaatggcatgatcccagctcaccgcaacgtctacctcccaggttcaaatcattctcttgcctcagactcccgagtagctgggattacaggcacatgccaccatgcctggctaattttgtatatttagtagaaacagggtttcaccatgctggccatgctggtctcgaactcctgacctcaggtgttccacctacctcagcctcccaaagtgctggggttacaggtgtgagccatcgcgcctggccaggacctttgtttcttatctacatattggaagatttggtcctgatgtcctttgaggcttctttagctctagttctctgacacttcagcctatatcacagctaacttcctcagtctcatctattccttatgctccagcccctggcaatttgcctcaagatgggggtttgaaaataactttacctgactcaaggagtgtctggagcacctcctagtctaagtctgcaagctccagttcttgcctaaaaccatgccagtggccacccttgggcttcagacagctctggggccttttgaccacaagccagcccctcgccctctctgtggcatagtcttctctgccccaggactgcagggcggcttcctccaaggcttccaaggctcaaaagaaatttggctccatccaagaaggctccagctcccctactggcccctggcttcaggcccacacccctgggccaggcccagagagtgtgtctcaggagaattcaatgggctctagagagacacacagaaagtttggcatttggaaatttcaaggatgtatgtatgctcacgtatggagcaggttgtcctggtccctgggtgcagggaagtgggctgcagggaagtggattggaggggagcttgaggaatataaggagcgggggtggagactcaggctatggacaagcagcagaggcaggacaagcagagaggcaggacaagcagcagaggcaggacaagcaggggacctt

SEQ ID NO: 454461 - DNA, 638 bp, Homo sapiens
aattcggcaccaggggaagaggaactctaacacttctctcctccactctgagcccccttgctgattccctgctttggtccaatcccctgttgccctgtctctgcagtggatggggagtgggactcgtggggggagtggagcccctgtatccgacggaacatgaagtccatcagctgtcaagaaatcccgggccagcagtcacgcgggaggacctgcaggggccgcaagtttgacggacatcgatgtgccgggcaacagcaggatatccggcactgctacagcatccagcactgccccttgaaaggatcatggtcagagtggagtacctgggggctgtgcatgcccccctgtggacctaatcctacccgtgcccgccagcgcctctgcacacccttgctccccaagtacccgcccaccgtttccatggtcgaaggtcagggcgagaagaacgtgaccttctgggggagaccgctgccacggtgtgaggagctacaagggcagaagctggtggtggaggagaaacgaccatgtctacacgtgcctgcttgcaaagaccctgaggaagaggaactctaacacttctctcctccactctgagccccctgaccttccaaacctcaataaactagcctcttcga

SEQ ID NO: 454462 - DNA, 1714 bp, Homo sapiens
gagcaccgcacactcacttcaccctggttcaacacccccacgaggttgaccccgtcattatgttagagattatgcattttccacatagggaaactgaggctcaggggtgttaagtgactcacccaaggtcacacggctaggaagttgctgcacgctcctatgctccatttcctctgggagcctatcaacccagataaagcgggacctcctctctggtagaggtgcagggggcagtactcaacatgatcacagagggagcgcaggcccctcgattgttgctgccgccgctgctcctgctgctcaccctgccagccacaggctcagaccccgtgctctgcttcacccagtatgaagaatcctccggcaagtgcaagggcctcctggggggtggtgtcagcgtggaagactgctgtctcaacactgcctttgcctaccagaaacgtagtggtgggctctgtcagccttgcaggtccccacgatggtccctgtggtccacatgggccccctgttcggtgacgtgctctgagggctcccagctgcggtaccggcgctgtgtgggctggaatgggcagtgctctggaaaggtggcacctgggaccctggagtggcagctccaggcctgtgaggaccagcagtgctgtcctgagatgggcggctggtctggctgggggccctgggagccttgctctgtcacctgctccaaagggacccggacccgcaggcgagcctgtaatcaccctgctcccaagtgtgggggccactgcccaggacaggcacaggaatcagaggcctgtgacacccagcaggtctgccccacacacggggcctgggccacctggggcccctggaccccctgctcagcctcctgccacggtggaccccacgaacctaaggagacacgaagccgcaagtgttctgcacctgagccctcccagaaacctcctgggaagccctgcccggggctagcctacgagcagcggaggtgcaccggcctgccaccctgcccagtggctgggggctgggggccttggggccctgtgagcccctgccctgtgacctgtggcctgggccagaccatggaacaacggacgtgcaatcaccctgtgccccagcatgggggccccttctgtgctggcgatgccacccggacccacatctgcaacacagctgtgccctgccctgtggatggggagtgggactcgtggggggagtggagcccctgtatccgacggaacatgaagtccatcagctgtcaagaaatcccgggccagcagtcacgcgggaggacctgcaggggccgcaagtttgacggacatcgatgtgccgggcaacagcaggatatccggcactgctacagcatccagcactgccccttgaaaggatcatggtcagagtggagtacctgggggctgtgcatgcccccctgtggacctaatcctacccgtgcccgccagcgcctctgcacacccttgctccccaagtacccgcccaccgtttccatggtcgaaggtcagggcgagaagaacgtgaccttctgggggagaccgctgccacggtgtgaggagctacaagggcagaagctggtggtggaggagaaacgaccatgtctacacgtgcctgcttgcaaagaccctgaggaagaggaactctaacacttctctcctccactctgagccccctgaccttccaaacctcaataaactagcctcttcga

SEQ ID NO: 454463 - DNA, 300 bp, Homo sapiens
caataagaattgaatgcattcttgccttccctgagattctcccttccgttcctccccacccctaatgcctcaggcccaccgtttccatggtcgaaggtcagggcgagaagaacgtgaccttctgggggagaccgctgccacggtgtgaggagctacaagggcagaagctggtggtggaggagaaacgaccatgtctacacgtgcctgcttgcaaagaccctgaggaagaggaactctaacacttctctcctccactctgagccccctgaccttccaaacctcaataaactagcctcttcg

SEQ ID NO: 454464 - DNA, 1585 bp, Homo sapiens
ctcccagttcctcctgcctctaggttcctctttccctgctgattccaggagcctatcaacccagataaagcgggacctcctctctggtagaggtgcagggggcagtactcaacatgatcacagagggagcgcaggcccctcgattgttgctgccgccgctgctcctgctgctcaccctgccagccacaggctcagaccccgtgctctgcttcacccagtatgaagaatcctccggcaagtgcaagggcctcctggggggtggtgtcagcgtggaagactgctgtctcaacactgcctttgcctaccagaaacgtagtggtgggctctgtcagccttgcaggtccccacgatggtccctgtggtccacatgggccccctgttcggtgacgtgctctgagggctcccagctgcggtaccggcgctgtgtgggctggaatgggcagtgctctggaaaggtggcacctgggaccctggagtggcagctccaggcctgtgaggaccagcagtgctgtcctgagatgggcggctggtctggctgggggccctgggagccttgctctgtcacctgctccaaagggacccggacccgcaggcgagcctgtaatcaccctgctcccaagtgtgggggccactgcccaggacaggcacaggaatcagaggcctgtgacacccagcaggtctgccccacacacggggcctgggccacctggggcccctggaccccctgctcagcctcctgccacggtggaccccacgaacctaaggagacacgaagccgcaagtgttctgcacctgagccctcccagaaacctcctgggaagccctgcccggggctagcctacgagcagcggaggtgcaccggcctgccaccctgcccagtggctgggggctgggggccttggggccctgtgagcccctgccctgtgacctgtggcctgggccagaccatggaacaacggacgtgcaatcaccctgtgccccagcatgggggccccttctgtgctggcgatgccacccggacccacatctgcaacacagctgtgccctgccctgtggatggggagtgggactcgtggggggagtggagcccctgtatccgacggaacatgaagtccatcagctgtcaagaaatcccgggccagcagtcacgcgggaggacctgcaggggccgcaagtttgacggacatcgatgtgccgggcaacagcaggatatccggcactgctacagcatccagcactgccccttgaaaggatcatggtcagagtggagtacctgggggctgtgcatgcccccctgtggacctaatcctacccgtgcccgccagcgcctctgcacacccttgctccccaagtacccgcccaccgtttccatggtcgaaggtcagggcgagaagaacgtgaccttctgggggagaccgctgccacggtgtgaggagctacaagggcagaagctggtggtggaggagaaacgaccatgtctacacgtgcctgcttgcaaagaccctgaggaagaggaactctaacacttctctcctccactctgagccccctgaccttccaaacctcaataaactagcctcttcga

SEQ ID NO: 454465 - DNA, 1548 bp, Homo sapiens
ctcccagttcctcctgcctctaggttcctctttccctgctgattccaggagcctatcaacccagataaagcgggacctcctctctggtagaggtgcagggggcagtactcaacatgatcacagagggagcgcaggcccctcgattgttgctgccgccgctgctcctgctgctcaccctgccagccacaggctcagaccccgtgctctgcttcacccagtatgaagaatcctccggcaagtgcaagggcctcctggggggtggtgtcagcgtggaagactgctgtctcaacactgcctttgcctaccagaaacgtagtggtgggctctgtcagccttgcaggtccccacgatggtccctgtggtccacatgggccccctgttcggtgacgtgctctgagggctcccagctgcggtaccggcgctgtgtgggctggaatgggcagtgctctggaaaggtggcacctgggaccctggagtggcagctccaggcctgtgaggaccagcagtgctgtcctgagatgggcggctggtctggctgggggccctgggagccttgctctgtcacctgctccaaagggacccggacccgcaggcgagcctgtaatcaccctgctcccaagtgtgggggccactgcccaggacaggcacaggaatcagaggcctgtgacacccagcaggtctgccccacacacggggcctgggccacctggggcccctggaccccctgctcagcctcctgccacggtggaccccacgaacctaaggagacacgaagccgcaagtgttctgcacctgagccctcccagaaacctcctgggaagccctgcccggggctagcctacgagcagcggaggtgcaccggcctgccaccctgcccagctgccctgtgacctgtggcctgggccagaccatggaacaacggacgtgcaatcaccctgtgccccagcatgggggccccttctgtgctggcgatgccacccggacccacatctgcaacacagctgtgccctgccctgtggatggggagtgggactcgtggggggagtggagcccctgtatccgacggaacatgaagtccatcagctgtcaagaaatcccgggccagcagtcacgcgggaggacctgcaggggccgcaagtttgacggacatcgatgtgccgggcaacagcaggatatccggcactgctacagcatccagcactgccccttgaaaggatcatggtcagagtggagtacctgggggctgtgcatgcccccctgtggacctaatcctacccgtgcccgccagcgcctctgcacacccttgctccccaagtacccgcccaccgtttccatggtcgaaggtcagggcgagaagaacgtgaccttctgggggagaccgctgccacggtgtgaggagctacaagggcagaagctggtggtggaggagaaacgaccatgtctacacgtgcctgcttgcaaagaccctgaggaagaggaactctaacacttctctcctccactctgagccccctgaccttccaaacctcaataaactagcctcttcga

SEQ ID NO: 454466 - DNA, 3216 bp, Homo sapiens
gtaatcaatataaaattattaatgagatattttgcattcttttttttgtatggcttcaaaatctggtgtgcatttctcacttatagctcatttcaatttgtattagccacatttcaaatgctcagcagccacatgtgacgagggaggacactgttggacagcacaggtctagacctcagtagctctcccttcagattaatgccatgtgaatcgaatgggtggtatgaagaatggatgctgagtccttggagaatccacttgcacttgggtggtgactgataagaagccctagctgtgccatttcctgatacatgactgtttttgaagttatggactcaggatctagaagactgcaaatccccaaatacgtctaacacccaagctcacgccaggaccgtgcttccgggcctgtgtgagaacctaagctatggaacctgtcaacttctagggctgcagattcgttgggccctcacatgtggcccgtggaaaggaggcatcactcgaggaagaggagggcttctagaggggcaaggccacccaactaggggcttcttgagggcaggtgctccaaatggccgcttcctgagggcagcgggtcctcttgtggcctcaggcagggccctgaaaccggcctcacgtgtttgcagcgcgaactcctgtgcttccaccaagcgctctcggggatgcgggggtggtgtcagcgccccggccccagcccgcaccccgaagtggctccaaggctgcaggtgtgaggggcgtgcccagggctcggcccgcgccgccccatgtgacccggtccgacatggtgtcgcctcctcccggggcggcggcggtggcggctcgggctgggctccgcgtcgggccggccccgcggccgctcatgggcagccagggccgctcggggccccccgggaacggcgggcccggcgagggcgagggcggagaggcgaggaagctgcaggaagggagggtggcgagggggaagcgaaggaaggggaaggggaagggaaaagcgagagcggggcaaggcggaagaggaagcggggcggaagggaagcccgggccgcagacggcgaaggaggcagccgggccgggggctgacgcgggagcgagggcatgcccaagggaggaagcagagggaggcagaagcgtggaggaaggggcgagaggcatcgtcaagggagtcgaggggagcgcaggggccgggaaggaggcacaaggaagagagtatgggaagaaggaggaatggagggtcagggctaggcggcgggagggcgccaggccgggaagagcacagggacgagggggtcaggcttgggccgacatcgcggggacaggggtggccatggcggcggcggccggggaggaggaggaggaggaggaggcggctcgggagtcggctgcccgcccggccgcggggcctgcgctctggcgcctgccggaggagctgctgctgctcatctgctcctacctggacatgcgggccctcggccgcctggcccaggtgtgccgctggctgcggcgcttcaccagctgcgatctgctctggcgccggatagcccgggcctcgctcaactccggcttcacgcggctcggcaccgacctgatgaccagtgtcccagtgaaggaacgagtgaaggtgtctcagaactggagactggggcgctgccgagaggggattctgctgaagtggagatgcagtcagatgccctggatgcagctagaggatgattctctgtacatatcccaggctaatttcatcctggcctaccagttccgtccagatggtgccagcttgaatcgtcggcctctgggagtctttgctgggcatgatgaggacgtttgccactttgtgctggccaactcgcatattgttagtgcaggaggggatgggaagattggcattcataagattcacagcaccttcactgtcaagtactcggctcatgaacaggaggtgaactgtgtggattgcaaagggggcatcattgtgagtggctccagggacaggacggccaaggtgtggcctttggcctcaggccggctggggcagtgcttacacaccatccagactgaagaccgagtctggtccattgctatcagcccattactcagctcttttgtgacagggacggcttgttgcgggcacttctcacccctgagaatctgggacctcaacagtgggcagctgatgacacacttgggcagtgactttcccccaggggctggggtgctggatgtcatgtatgagtcccctttcacactgctgtcctgtggctatgacacctatgttcgctactgggacctccgcaccagcgtccggaaatgtgtcatggagtgggaggagccccacgacagcaccctgtactgcctgcagacagatggcaaccacctgctggccacaggttcctcctactacggtgttgtacggctgtgggaccggcgtcaaagggcctgcctgcacgccttcccgctgacgtcgactcccctcagcagccctgtgtactgcctgcgtctcaccaccaagcatctctatgctgccctgtcttacaacctccacgtcctggattttcaaaacccatgaccgtcagggccacccctgcctctgggccagggaaaccagctactcagggacttctcttgcctggagggtgcagtgatagctcctcctcactgccccactgtgctcctgggcctgtgaccccagtgctcaggcaccttgcactagaggcttctgactcctgggactttggagcttaccagagatgcagtccctcccaggaacctgttggagaggcaggacctgctgctttagagtgcggctgaacccgggccttgcgtccctgtttggccagagcaaggatctggcctggagaggcccatcctataccccttattagagccatgacagcctacagagtgaggtgaggtgctcccaccttcccagatggttcctttctgccccttcctggaaggaaaggtgaggctgccaatagcctcctggcaccagccagacctcacccttgaccaacctctcggggctgggggttcattcctggggcactgtggcctggttttgctttgaaaccaagaaagagcaaagggaacccagcagttctgagtgagttctgagccagccctacctcaggctggctgttgagacatgctacaattttcatttttgtaaaaataaagcttgattgttcacaaaaaaaa

SEQ ID NO: 454467 - DNA, 2357 bp, Homo sapiens
gtaatcaatataaaattattaatgagatattttgcattcttttttttgtatggcttcaaaatctggtgtgcatttctcacttatagctcatttcaatttgtattagccacatttcaaatgctcagcagccacatgtgacgagggaggacactgttggacagcacaggtctagacctcagtagctctcccttcagattaatgccatgtgaatcgaatgggtggtatgaagaatggatgctgagtccttggagaatccacttgcacttgggtggtgactgataagaagccctagctgtgccatttcctgatacatgactgtttttgaagttatggactcaggatctagaagactgcaaatccccaaatacgtctaacacccaagctcacgccaggaccgtgcttccgggcctgtgtgagaacctaagctatggaacctgtcaacttctagggctgcagattcgttgggccctcacatgtggcccgtggaaaggaggcatcactcgaggaagaggagggcttctagaggggcaaggccacccaactaggggcttcttgagggcaggtgctccaaatggccgcttcctgagggcagcgggtcctcttgtggcctcaggcagggccctgaaaccggcctcacgtgtttgcagcgcgaactcctgtgcttccaccaagcgctctcggggatgcgggggtggtgtcagcgccccggccccagcccgcaccccgaagtggctccaaggctgcaggatgaccagtgtcccagtgaaggaacgagtgaaggtgtctcagaactggagactggggcgctgccgagaggggattctgctgaagtggagatgcagtcagatgccctggatgcagctagaggatgattctctgtacatatcccaggctaatttcatcctggcctaccagttccgtccagatggtgccagcttgaatcgtcggcctctgggagtctttgctgggcatgatgaggacgtttgccactttgtgctggccaactcgcatattgttagtgcaggaggggatgggaagattggcattcataagattcacagcaccttcactgtcaagtactcggctcatgaacaggaggtgaactgtgtggattgcaaagggggcatcattgtgagtggctccagggacaggacggccaaggtgtggcctttggcctcaggccggctggggcagtgcttacacaccatccagactgaagaccgagtctggtccattgctatcagcccattactcagctcttttgtgacagggacggcttgttgcgggcacttctcacccctgagaatctgggacctcaacagtgggcagctgatgacacacttgggcagtgactttcccccaggggctggggtgctggatgtcatgtatgagtcccctttcacactgctgtcctgtggctatgacacctatgttcgctactgggacctccgcaccagcgtccggaaatgtgtcatggagtgggaggagccccacgacagcaccctgtactgcctgcagacagatggcaaccacctgctggccacaggttcctcctactacggtgttgtacggctgtgggaccggcgtcaaagggcctgcctgcacgccttcccgctgacgtcgactcccctcagcagccctgtgtactgcctgcgtctcaccaccaagcatctctatgctgccctgtcttacaacctccacgtcctggattttcaaaacccatgaccgtcagggccacccctgcctctgggccagggaaaccagctactcagggacttctcttgcctggagggtgcagtgatagctcctcctcactgccccactgtgctcctgggcctgtgaccccagtgctcaggcaccttgcactagaggcttctgactcctgggactttggagcttaccagagatgcagtccctcccaggaacctgttggagaggcaggacctgctgctttagagtgcggctgaacccgggccttgcgtccctgtttggccagagcaaggatctggcctggagaggcccatcctataccccttattagagccatgacagcctacagagtgaggtgaggtgctcccaccttcccagatggttcctttctgccccttcctggaaggaaaggtgaggctgccaatagcctcctggcaccagccagacctcacccttgaccaacctctcggggctgggggttcattcctggggcactgtggcctggttttgctttgaaaccaagaaagagcaaagggaacccagcagttctgagtgagttctgagccagccctacctcaggctggctgttgagacatgctacaattttcatttttgtaaaaataaagcttgattgttcacaaaaaaaa

SEQ ID NO: 454468 - DNA, 1660 bp, Homo sapiens
aactgtgctgtgtcgaaccgtatgtgtgccggtggctcggcaccgacctgatgaccagtgtcccagtgaaggaacgagtgaaggtgtctcagaactggagactggggcgctgccgagaggggattctgctgaagtggagatgcagtcagatgccctggatgcagctagaggatgattctctgtacatatcccaggctaatttcatcctggcctaccagttccgtccagatggtgccagcttgaatcgtcggcctctgggagtctttgctgggcatgatgaggacgtttgccactttgtgctggccaactcgcatattgttagtgcaggaggggatgggaagattggcattcataagattcacagcaccttcactgtcaagtactcggctcatgaacaggaggtgaactgtgtggattgcaaagggggcatcattgtgagtggctccagggacaggacggccaaggtgtggcctttggcctcaggccggctggggcagtgcttacacaccatccagactgaagaccgagtctggtccattgctatcagcccattactcagctcttttgtgacagggacggcttgttgcgggcacttctcacccctgagaatctgggacctcaacagtgggcagctgatgacacacttgggcagtgactttcccccaggggctggggtgctggatgtcatgtatgagtcccctttcacactgctgtcctgtggctatgacacctatgttcgctactgggacctccgcaccagcgtccggaaatgtgtcatggagtgggaggagccccacgacagcaccctgtactgcctgcagacagatggcaaccacctgctggccacaggttcctcctactacggtgttgtacggctgtgggaccggcgtcaaagggcctgcctgcacgccttcccgctgacgtcgactcccctcagcagccctgtgtactgcctgcgtctcaccaccaagcatctctatgctgccctgtcttacaacctccacgtcctggattttcaaaacccatgaccgtcagggccacccctgcctctgggccagggaaaccagctactcagggacttctcttgcctggagggtgcagtgatagctcctcctcactgccccactgtgctcctgggcctgtgaccccagtgctcaggcaccttgcactagaggcttctgactcctgggactttggagcttaccagagatgcagtccctcccaggaacctgttggagaggcaggacctgctgctttagagtgcggctgaacccgggccttgcgtccctgtttggccagagcaaggatctggcctggagaggcccatcctataccccttattagagccatgacagcctacagagtgaggtgaggtgctcccaccttcccagatggttcctttctgccccttcctggaaggaaaggtgaggctgccaatagcctcctggcaccagccagacctcacccttgaccaacctctcggggctgggggttcattcctggggcactgtggcctggttttgctttgaaaccaagaaagagcaaagggaacccagcagttctgagtgagttctgagccagccctacctcaggctggctgttgagacatgctacaattttcatttttgtaaaaataaagcttgattgttcacaaaaaaaa

SEQ ID NO: 454469 - DNA, 1695 bp, Homo sapiens
ggcctctgacctctagaggctctgcttacacaccacccagactgaagaccgagtctggtccattgctatcagcccattactcaggatgaccagtgtcccagtgaaggaacgagtgaaggtgtctcagaactggagactggggcgctgccgagaggggattctgctgaagtggagatgcagtcagatgccctggatgcagctagaggatgattctctgtacatatcccaggctaatttcatcctggcctaccagttccgtccagatggtgccagcttgaatcgtcggcctctgggagtctttgctgggcatgatgaggacgtttgccactttgtgctggccaactcgcatattgttagtgcaggaggggatgggaagattggcattcataagattcacagcaccttcactgtcaagtactcggctcatgaacaggaggtgaactgtgtggattgcaaagggggcatcattgtgagtggctccagggacaggacggccaaggtgtggcctttggcctcaggccggctggggcagtgcttacacaccatccagactgaagaccgagtctggtccattgctatcagcccattactcagctcttttgtgacagggacggcttgttgcgggcacttctcacccctgagaatctgggacctcaacagtgggcagctgatgacacacttgggcagtgactttcccccaggggctggggtgctggatgtcatgtatgagtcccctttcacactgctgtcctgtggctatgacacctatgttcgctactgggacctccgcaccagcgtccggaaatgtgtcatggagtgggaggagccccacgacagcaccctgtactgcctgcagacagatggcaaccacctgctggccacaggttcctcctactacggtgttgtacggctgtgggaccggcgtcaaagggcctgcctgcacgccttcccgctgacgtcgactcccctcagcagccctgtgtactgcctgcgtctcaccaccaagcatctctatgctgccctgtcttacaacctccacgtcctggattttcaaaacccatgaccgtcagggccacccctgcctctgggccagggaaaccagctactcagggacttctcttgcctggagggtgcagtgatagctcctcctcactgccccactgtgctcctgggcctgtgaccccagtgctcaggcaccttgcactagaggcttctgactcctgggactttggagcttaccagagatgcagtccctcccaggaacctgttggagaggcaggacctgctgctttagagtgcggctgaacccgggccttgcgtccctgtttggccagagcaaggatctggcctggagaggcccatcctataccccttattagagccatgacagcctacagagtgaggtgaggtgctcccaccttcccagatggttcctttctgccccttcctggaaggaaaggtgaggctgccaatagcctcctggcaccagccagacctcacccttgaccaacctctcggggctgggggttcattcctggggcactgtggcctggttttgctttgaaaccaagaaagagcaaagggaacccagcagttctgagtgagttctgagccagccctacctcaggctggctgttgagacatgctacaattttcatttttgtaaaaataaagcttgattgttcacaaaaaaaa

SEQ ID NO: 454470 - DNA, 1576 bp, Homo sapiens
gctgactctagatgatccctggatagcggatgaggggggatctgctgaagtggagatgcagtcagatgccctggatgcagctagaggatgattctctgtacatatcccaggctaatttcatcctggcctaccagttccgtccagatggtgccagcttgaatcgtcggcctctgggagtctttgctgggcatgatgaggacgtttgccactttgtgctggccaactcgcatattgttagtgcaggaggggatgggaagattggcattcataagattcacagcaccttcactgtcaagtactcggctcatgaacaggaggtgaactgtgtggattgcaaagggggcatcattgtgagtggctccagggacaggacggccaaggtgtggcctttggcctcaggccggctggggcagtgcttacacaccatccagactgaagaccgagtctggtccattgctatcagcccattactcagctcttttgtgacagggacggcttgttgcgggcacttctcacccctgagaatctgggacctcaacagtgggcagctgatgacacacttgggcagtgactttcccccaggggctggggtgctggatgtcatgtatgagtcccctttcacactgctgtcctgtggctatgacacctatgttcgctactgggacctccgcaccagcgtccggaaatgtgtcatggagtgggaggagccccacgacagcaccctgtactgcctgcagacagatggcaaccacctgctggccacaggttcctcctactacggtgttgtacggctgtgggaccggcgtcaaagggcctgcctgcacgccttcccgctgacgtcgactcccctcagcagccctgtgtactgcctgcgtctcaccaccaagcatctctatgctgccctgtcttacaacctccacgtcctggattttcaaaacccatgaccgtcagggccacccctgcctctgggccagggaaaccagctactcagggacttctcttgcctggagggtgcagtgatagctcctcctcactgccccactgtgctcctgggcctgtgaccccagtgctcaggcaccttgcactagaggcttctgactcctgggactttggagcttaccagagatgcagtccctcccaggaacctgttggagaggcaggacctgctgctttagagtgcggctgaacccgggccttgcgtccctgtttggccagagcaaggatctggcctggagaggcccatcctataccccttattagagccatgacagcctacagagtgaggtgaggtgctcccaccttcccagatggttcctttctgccccttcctggaaggaaaggtgaggctgccaatagcctcctggcaccagccagacctcacccttgaccaacctctcggggctgggggttcattcctggggcactgtggcctggttttgctttgaaaccaagaaagagcaaagggaacccagcagttctgagtgagttctgagccagccctacctcaggctggctgttgagacatgctacaattttcatttttgtaaaaataaagcttgattgttcacaaaaaaaa

SEQ ID NO: 454471 - DNA, 2128 bp, Homo sapiens
gtaatcaatataaaattattaatgagatattttgcattcttttttttgtatggcttcaaaatctggtgtgcatttctcacttatagctcatttcaatttgtattagccacatttcaaatgctcagcagccacatgtgacgagggaggacactgttggacagcacaggtctagacctcagtagctctcccttcagattaatgccatgtgaatcgaatgggtggtatgaagaatggatgctgagtccttggagaatccacttgcacttgggtggtgactgataagaagccctagctgtgccatttcctgatacatgactgtttttgaagttatggactcaggatctagaagactgcaaatccccaaatacgtctaacacccaagctcacgccaggaccgtgcttccgggcctgtgtgagaacctaagctatggaacctgtcaacttctagggctgcagattcgttgggccctcacatgtggcccgtggaaaggaggcatcactcgaggaagaggagggcttctagaggggcaaggccacccaactaggggcttcttgagggcaggtgctccaaatggccgcttcctgagggcagcgggtcctcttgtggcctcaggcagggccctgaaaccggcctcacgtgtttgcagcgcgaactcctgtgcttccaccaagcgctctcggggatgcgggggtggtgtcagcgccccggccccagcccgcaccccgaagtggctccaaggctgcaggtgtgaggggcgtgcccagggctcggcccgcgccgccccatgtgacccggtccgacatggtgtcgcctcctcccggggcggcggcggtggcggctcgggctgggctccgcgtcgggccggccccgcggccgctcatgggcagccagggccgctcggggccccccgggaacggcgggcccggcgagggcgagggcggagaggcgaggaagctgcaggaagggagggtggcgagggggaagcgaaggaaggggaaggggaagggaaaagcgagagcggggcaaggcggaagaggaagcggggcggaagggaagcccgggccgcagacggcgaaggaggcagccgggccgggggctgacgcgggagcgagggcatgcccaagggaggaagcagagggaggcagaagcgtggaggaaggggcgagaggcatcgtcaagggagtcgaggggagcgcaggggccgggaaggaggcacaaggaagagagtatgggaagaaggaggaatggagggtcagggctaggcggcgggagggcgccaggccgggaagagcacagggacgagggggtcaggcttgggccgacatcgcggggacaggggtggccatggcggcggcggccggggaggaggaggaggaggaggaggcggctcgggagtcggctgcccgcccggccgcggggcctgcgctctggcgcctgccggaggagctgctgctgctcatctgctcctacctggacatgcgggccctcggccgcctggcccaggtgtgccgctggctgcggcgcttcaccagctgcgatctgctctggcgccggatagcccgggcctcgctcaactccggcttcacgcggctcggcaccgacctgatgaccagtgtcccagtgaaggaacgagtgaaggtgtctcagaactggagactggggcgctgccgagaggggattctgctgaagtggagatgcagtcagatgccctggatgcagctagaggatgattctctgtacatatcccaggctaatttcatcctggcctaccagttccgtccagatggtgccagcttgaatcgtcggcctctgggagtctttgctgggcatgatgaggacgtttgccactttgtgctggccaactcgcatattgttagtgcaggaggggatgggaagattggcattcataagattcaggggattttgcttctagctagcttgatatgaattagtaataggatgtgactgctgtttaccaacaacattcagcaaagattgattgattgattacctaaccatgtaatggacgtttaaaaagtctattcatagaaatatccataactgaatttcccacagtaagttctgcagagactcacttgatgttctggtttgggccatggcaggctc

SEQ ID NO: 454472 - DNA, 1566 bp, Homo sapiens
aaatcatagctaggtcggaggctgtgtgttaactcttatctcgggtacgatgcctgaggtactgctatagcatagagtctctatctatatcccaagccaatttcacttgtacactatgatatatgtgccgatctccgccatattgaatcgtatgtactctcgaaaatctcaggtgaacctgcttaaagagcaatcggcactttgtgctggccaactcgcatattgtagtgcaggaggggatgggaagattggcattcataagattcacagcaccttcactgtcaagtactcggctcatgaacaggaggtgaactgtgtggattgcaaagggggcatcattgtgagtggctccagggacaggacggccaaggtgtggcctttggcctcaggccggctggggcagtgcttacacaccatccagactgaagaccgagtctggtccattgctatcagcccattactcagctcttttgtgacagggacggcttgttgcgggcacttctcacccctgagaatctgggacctcaacagtgggcagctgatgacacacttgggcagtgactttcccccaggggctggggtgctggatgtcatgtatgagtcccctttcacactgctgtcctgtggctatgacacctatgttcgctactgggacctccgcaccagcgtccggaaatgtgtcatggagtgggaggagccccacgacagcaccctgtactgcctgcagacagatggcaaccacctgctggccacaggttcctcctactacggtgttgtacggctgtgggaccggcgtcaaagggcctgcctgcacgccttcccgctgacgtcgactcccctcagcagccctgtgtactgcctgcgtctcaccaccaagcatctctatgctgccctgtcttacaacctccacgtcctggattttcaaaacccatgaccgtcagggccacccctgcctctgggccagggaaaccagctactcagggacttctcttgcctggagggtgcagtgatagctcctcctcactgccccactgtgctcctgggcctgtgaccccagtgctcaggcaccttgcactagaggcttctgactcctgggactttggagcttaccagagatgcagtccctcccaggaacctgttggagaggcaggacctgctgctttagagtgcggctgaacccgggccttgcgtccctgtttggccagagcaaggatctggcctggagaggcccatcctataccccttattagagccatgacagcctacagagtgaggtgaggtgctcccaccttcccagatggttcctttctgccccttcctggaaggaaaggtgaggctgccaatagcctcctggcaccagccagacctcacccttgaccaacctctcggggctgggggttcattcctggggcactgtggcctggttttgctttgaaaccaagaaagagcaaagggaacccagcagttctgagtgagttctgagccagccctacctcaggctggctgttgagacatgctacaattttcatttttgtaaaaataaagcttgattgttcacaaaaaaaa

SEQ ID NO: 454473 - DNA, 3129 bp, Homo sapiens
gtaatcaatataaaattattaatgagatattttgcattcttttttttgtatggcttcaaaatctggtgtgcatttctcacttatagctcatttcaatttgtattagccacatttcaaatgctcagcagccacatgtgacgagggaggacactgttggacagcacaggtctagacctcagtagctctcccttcagattaatgccatgtgaatcgaatgggtggtatgaagaatggatgctgagtccttggagaatccacttgcacttgggtggtgactgataagaagccctagctgtgccatttcctgatacatgactgtttttgaagttatggactcaggatctagaagactgcaaatccccaaatacgtctaacacccaagctcacgccaggaccgtgcttccgggcctgtgtgagaacctaagctatggaacctgtcaacttctagggctgcagattcgttgggccctcacatgtggcccgtggaaaggaggcatcactcgaggaagaggagggcttctagaggggcaaggccacccaactaggggcttcttgagggcaggtgctccaaatggccgcttcctgagggcagcgggtcctcttgtggcctcaggcagggccctgaaaccggcctcacgtgtttgcagcgcgaactcctgtgcttccaccaagcgctctcggggatgcgggggtggtgtcagcgccccggccccagcccgcaccccgaagtggctccaaggctgcaggtgtgaggggcgtgcccagggctcggcccgcgccgccccatgtgacccggtccgacatggtgtcgcctcctcccggggcggcggcggtggcggctcgggctgggctccgcgtcgggccggccccgcggccgctcatgggcagccagggccgctcggggccccccgggaacggcgggcccggcgagggcgagggcggagaggcgaggaagctgcaggaagggagggtggcgagggggaagcgaaggaaggggaaggggaagggaaaagcgagagcggggcaaggcggaagaggaagcggggcggaagggaagcccgggccgcagacggcgaaggaggcagccgggccgggggctgacgcgggagcgagggcatgcccaagggaggaagcagagggaggcagaagcgtggaggaaggggcgagaggcatcgtcaagggagtcgaggggagcgcaggggccgggaaggaggcacaaggaagagagtatgggaagaaggaggaatggagggtcagggctaggcggcgggagggcgccaggccgggaagagcacagggacgagggggtcaggcttgggccgacatcgcggggcctgcgctctggcgcctgccggaggagctgctgctgctcatctgctcctacctggacatgcgggccctcggccgcctggcccaggtgtgccgctggctgcggcgcttcaccagctgcgatctgctctggcgccggatagcccgggcctcgctcaactccggcttcacgcggctcggcaccgacctgatgaccagtgtcccagtgaaggaacgagtgaaggtgtctcagaactggagactggggcgctgccgagaggggattctgctgaagtggagatgcagtcagatgccctggatgcagctagaggatgattctctgtacatatcccaggctaatttcatcctggcctaccagttccgtccagatggtgccagcttgaatcgtcggcctctgggagtctttgctgggcatgatgaggacgtttgccactttgtgctggccaactcgcatattgttagtgcaggaggggatgggaagattggcattcataagattcacagcaccttcactgtcaagtactcggctcatgaacaggaggtgaactgtgtggattgcaaagggggcatcattgtgagtggctccagggacaggacggccaaggtgtggcctttggcctcaggccggctggggcagtgcttacacaccatccagactgaagaccgagtctggtccattgctatcagcccattactcagctcttttgtgacagggacggcttgttgcgggcacttctcacccctgagaatctgggacctcaacagtgggcagctgatgacacacttgggcagtgactttcccccaggggctggggtgctggatgtcatgtatgagtcccctttcacactgctgtcctgtggctatgacacctatgttcgctactgggacctccgcaccagcgtccggaaatgtgtcatggagtgggaggagccccacgacagcaccctgtactgcctgcagacagatggcaaccacctgctggccacaggttcctcctactacggtgttgtacggctgtgggaccggcgtcaaagggcctgcctgcacgccttcccgctgacgtcgactcccctcagcagccctgtgtactgcctgcgtctcaccaccaagcatctctatgctgccctgtcttacaacctccacgtcctggattttcaaaacccatgaccgtcagggccacccctgcctctgggccagggaaaccagctactcagggacttctcttgcctggagggtgcagtgatagctcctcctcactgccccactgtgctcctgggcctgtgaccccagtgctcaggcaccttgcactagaggcttctgactcctgggactttggagcttaccagagatgcagtccctcccaggaacctgttggagaggcaggacctgctgctttagagtgcggctgaacccgggccttgcgtccctgtttggccagagcaaggatctggcctggagaggcccatcctataccccttattagagccatgacagcctacagagtgaggtgaggtgctcccaccttcccagatggttcctttctgccccttcctggaaggaaaggtgaggctgccaatagcctcctggcaccagccagacctcacccttgaccaacctctcggggctgggggttcattcctggggcactgtggcctggttttgctttgaaaccaagaaagagcaaagggaacccagcagttctgagtgagttctgagccagccctacctcaggctggctgttgagacatgctacaattttcatttttgtaaaaataaagcttgattgttcacaaaaaaaa

SEQ ID NO: 454474 - DNA, 1889 bp, Homo sapiens
tttcccaatctggacatccagtggttccaggattgtcatgcattctccattagattgctttggcatcactgtgaacatttttgatagtttaaaggacaggcttttctccttggctttcttagtcaagtatggagagagaacagttactccttcctggtctcctaatctctttacttgtattctggatgctcctgaatcctgactcagtaagcccatgaaattttctgtggttggcaataagttgtagtgattggattatctgttctgtctggacataggatgaccagtgtcccagtgaaggaacgagtgaaggtgtctcagaactggagactggggcgctgccgagaggggattctgctgaagtggagatgcagtcagatgccctggatgcagctagaggatgattctctgtacatatcccaggctaatttcatcctggcctaccagttccgtccagatggtgccagcttgaatcgtcggcctctgggagtctttgctgggcatgatgaggacgtttgccactttgtgctggccaactcgcatattgttagtgcaggaggggatgggaagattggcattcataagattcacagcaccttcactgtcaagtactcggctcatgaacaggaggtgaactgtgtggattgcaaagggggcatcattgtgagtggctccagggacaggacggccaaggtgtggcctttggcctcaggccggctggggcagtgcttacacaccatccagactgaagaccgagtctggtccattgctatcagcccattactcagctcttttgtgacagggacggcttgttgcgggcacttctcacccctgagaatctgggacctcaacagtgggcagctgatgacacacttgggcagtgactttcccccaggggctggggtgctggatgtcatgtatgagtcccctttcacactgctgtcctgtggctatgacacctatgttcgctactgggacctccgcaccagcgtccggaaatgtgtcatggagtgggaggagccccacgacagcaccctgtactgcctgcagacagatggcaaccacctgctggccacaggttcctcctactacggtgttgtacggctgtgggaccggcgtcaaagggcctgcctgcacgccttcccgctgacgtcgactcccctcagcagccctgtgtactgcctgcgtctcaccaccaagcatctctatgctgccctgtcttacaacctccacgtcctggattttcaaaacccatgaccgtcagggccacccctgcctctgggccagggaaaccagctactcagggacttctcttgcctggagggtgcagtgatagctcctcctcactgccccactgtgctcctgggcctgtgaccccagtgctcaggcaccttgcactagaggcttctgactcctgggactttggagcttaccagagatgcagtccctcccaggaacctgttggagaggcaggacctgctgctttagagtgcggctgaacccgggccttgcgtccctgtttggccagagcaaggatctggcctggagaggcccatcctataccccttattagagccatgacagcctacagagtgaggtgaggtgctcccaccttcccagatggttcctttctgccccttcctggaaggaaaggtgaggctgccaatagcctcctggcaccagccagacctcacccttgaccaacctctcggggctgggggttcattcctggggcactgtggcctggttttgctttgaaaccaagaaagagcaaagggaacccagcagttctgagtgagttctgagccagccctacctcaggctggctgttgagacatgctacaattttcatttttgtaaaaataaagcttgattgttcacaaaaaaaa

SEQ ID NO: 454475 - DNA, 2296 bp, Homo sapiens
  misc_feature (2192)..(2192): n is a, c, g, or t
  misc_feature (2202)..(2203): n is a, c, g, or t
  misc_feature (2218)..(2218): n is a, c, g, or t
gtaatcaatataaaattattaatgagatattttgcattcttttttttgtatggcttcaaaatctggtgtgcatttctcacttatagctcatttcaatttgtattagccacatttcaaatgctcagcagccacatgtgacgagggaggacactgttggacagcacaggtctagacctcagtagctctcccttcagattaatgccatgtgaatcgaatgggtggtatgaagaatggatgctgagtccttggagaatccacttgcacttgggtggtgactgataagaagccctagctgtgccatttcctgatacatgactgtttttgaagttatggactcaggatctagaagactgcaaatccccaaatacgtctaacacccaagctcacgccaggaccgtgcttccgggcctgtgtgagaacctaagctatggaacctgtcaacttctagggctgcagattcgttgggccctcacatgtggcccgtggaaaggaggcatcactcgaggaagaggagggcttctagaggggcaaggccacccaactaggggcttcttgagggcaggtgctccaaatggccgcttcctgagggcagcgggtcctcttgtggcctcaggcagggccctgaaaccggcctcacgtgtttgcagcgcgaactcctgtgcttccaccaagcgctctcggggatgcgggggtggtgtcagcgccccggccccagcccgcaccccgaagtggctccaaggctgcaggtgtgaggggcgtgcccagggctcggcccgcgccgccccatgtgacccggtccgacatggtgtcgcctcctcccggggcggcggcggtggcggctcgggctgggctccgcgtcgggccggccccgcggccgctcatgggcagccagggccgctcggggccccccgggaacggcgggcccggcgagggcgagggcggagaggcgaggaagctgcaggaagggagggtggcgagggggaagcgaaggaaggggaaggggaagggaaaagcgagagcggggcaaggcggaagaggaagcggggcggaagggaagcccgggccgcagacggcgaaggaggcagccgggccgggggctgacgcgggagcgagggcatgcccaagggaggaagcagagggaggcagaagcgtggaggaaggggcgagaggcatcgtcaagggagtcgaggggagcgcaggggccgggaaggaggcacaaggaagagagtatgggaagaaggaggaatggagggtcagggctaggcggcgggagggcgccaggccgggaagagcacagggacgagggggtcaggcttgggccgacatcgcggggacaggggtggccatggcggcggcggccggggaggaggaggaggaggaggaggcggctcgggagtcggctgcccgcccggccgcggggcctgcgctctggcgcctgccggaggagctgctgctgctcatctgctcctacctggacatgcgggccctcggccgcctggcccaggtgtgccgctggctgcggcgcttcaccagctgcgatctgctctggcgccggatagcccgggcctcgctcaactccggcttcacgcggctcggcaccgacctgatgaccagtgtcccagtgaaggaacgagtgaaggtgtctcagaactggagactggggcgctgccgagaggggattctgctgaagtggagatgcagtcagatgccctggatgcagctagaggatgattctctgtacatatcccaggctaatttcatcctggcctaccagttccgtccagatggtgccagcttgaatcgtcggcctctgggagtctttgctgggcatgatgaggacgtttgccactttgtgctggccaactcgcatattgttagtgcaggaggggatgggaagattggcattcataagattcacagcaccttcactgtcaagtactcggctcatgaacaggaggtgaactgtgtggattgcaaagggggcatcattgtgagtggctccagggacaggacggccaaggtgtggcctttggcctcaggccggctggggcagtgcttacacaccatccagactgaagaccgagtctggtccattgctatcagcccattactcagctcttttgtgacagggacggcttgttgcgggcacttctcacccctgagaatctgggacctcaacagtgggcgctttnacactggcgnnattcccagggcggtntgagtcgtatagccctacacatgcggcgggagaccctatttccgtgcccgcgcgccgagtctcgttgaagccatatac

SEQ ID NO: 454476 - DNA, 2204 bp, Homo sapiens
  misc_feature (2100)..(2100): n is a, c, g, or t
  misc_feature (2110)..(2111): n is a, c, g, or t
  misc_feature (2126)..(2126): n is a, c, g, or t
gtaatcaatataaaattattaatgagatattttgcattcttttttttgtatggcttcaaaatctggtgtgcatttctcacttatagctcatttcaatttgtattagccacatttcaaatgctcagcagccacatgtgacgagggaggacactgttggacagcacaggtctagacctcagtagctctcccttcagattaatgccatgtgaatcgaatgggtggtatgaagaatggatgctgagtccttggagaatccacttgcacttgggtggtgactgataagaagccctagctgtgccatttcctgatacatgactgtttttgaagttatggactcaggatctagaagactgcaaatccccaaatacgtctaacacccaagctcacgccaggaccgtgcttccgggcctgtgtgagaacctaagctatggaacctgtcaacttctagggctgcagattcgttgggccctcacatgtggcccgtggaaaggaggcatcactcgaggaagaggagggcttctagaggggcaaggccacccaactaggggcttcttgagggcaggtgctccaaatggccgcttcctgagggcagcgggtcctcttgtggcctcaggcagggccctgaaaccggcctcacgtgtttgcagcgcgaactcctgtgcttccaccaagcgctctcggggatgcgggggtggtgtcagcgccccggccccagcccgcaccccgaagtggctccaaggctgcaggtgtgaggggcgtgcccagggctcggcccgcgccgccccatgtgacccggtccgacatggtgtcgcctcctcccggggcggcggcggtggcggctcgggctgggctccgcgtcgggccggccccgcggccgctcatgggcagccagggccgctcggggccccccgggaacggcgggcccggcgagggcgagggcggagaggcgaggaagctgcaggaagggagggtggcgagggggaagcgaaggaaggggaaggggaagggaaaagcgagagcggggcaaggcggaagaggaagcggggcggaagggaagcccgggccgcagacggcgaaggaggcagccgggccgggggctgacgcgggagcgagggcatgcccaagggaggaagcagagggaggcagaagcgtggaggaaggggcgagaggcatcgtcaagggagtcgaggggagcgcaggggccgggaaggaggcacaaggaagagagtatgggaagaaggaggaatggagggtcagggctaggcggcgggagggcgccaggccgggaagagcacagggacgagggggtcaggcttgggccgacatcgcggggacaggggtggccatggcggcggcggccggggaggaggaggaggaggaggaggcggctcgggagtcggctgcccgcccggccgcggggcctgcgctctggcgcctgccggaggagctgctgctgctcatctgctcctacctggacatgcgggccctcggccgcctggcccaggtgtgccgctggctgcggcgcttcaccagctgcgatctgctctggcgccggatagcccgggcctcgctcaactccggcttcacgcggctcggcaccgacctgatgaccagtgtcccagtgaaggaacgagtgaaggtgtctcagaactggagactggggcgctgccgagaggggattctgctgaagtggagatgcagtcagatgccctggatgcagctagaggatgattctctgtacatatcccaggctaatttcatcctggcctaccagttccgtccagatggtgccagcttgaatcgtcggcctctgggagtctttgctgggcatgatgaggacgtttgccactttgtgctggccaactcgcatattgttagtgcaggaggggatgggaagattggcattcataagattcacagcaccttcactgtcaagtactcggctcatgaacaggaggtgaactgtgtggattgcaaagggggcatcattgtgagtggctccagggacaggacggccaaggtgctcttttgtgacagggacggcttgttgcgggcacttctcacccctgagaatctgggacctcaacagtgggcgctttnacactggcgnnattcccagggcggtntgagtcgtatagccctacacatgcggcgggagaccctatttccgtgcccgcgcgccgagtctcgttgaagccatatac

SEQ ID NO: 454477 - DNA, 710 bp, Homo sapiens
cacgaggcttaccatcaatatgattttatgggtttttttctttattcatctgttcagtacacatttgagagaaggcttcagagaggagttgataattgatgatgtcttacaggataagtcaaattctactgggttgacaaggtagagtttactttagaagagattgcagatgtggaaggacttggtacatccttcggggagaatgtactactcatcacctcccacctgtgaaagcccctcttcagacaaagaagaaaacaacaaatcattgttttctttgtggaaagaaaacaggactggctagtagctacgaatgcaggcaggttggcgagctggagaagctcagatgctttctctgtgataacccagcttggggattatgcaaaataaaatatttaaattgcctgtttataacatcattaagatgatgttcaatagctatcttcagttgaacttctaattggctgaagtaaagaacaagtagatagctcatgggtttccaaaagacaaaaacagatccttccttgtcctttaagttaggaggtttaaaccaatctgagagtgtacctttttcgtcttatgatgaacctgcttggattttgtttgagtggcaccttggaagaacccctccctgaatattctattaaaaatttaattaaaaaattaaaagttaatataaaatagatgaataatatatttccaaaaaagta

SEQ ID NO: 454478 - DNA, 1268 bp, Homo sapiens
cacgaggcttaccatcaatatgattttatgggtttttttctttattcatctgttcagtacacatttgagagaaggcttcagagaggagttgataattgatgatgtcttacaggataagtcaaattctactgggttgacaaggtagagtttactttagaagagattgcagatgtggaaggacttggtacatccttcggggtaggtatgacatggtaaattacagtgtctctggatagttagaaaggcattatattggacataataataccttaaatgccagtccaaggaatttagatttttcctgtttatagtggggaatcaatatgtttattgatggttcctagtacacagtagttgctaatagttttctctattggtagaaggatgtatggaggctgctctcatagagtactgcacttatatttttgtgctacctcattactgtcactaatgtattctctgtctctacacattcgcaagagttctttttttttagacagagtctcgccctgttacctgattaggctgaagtgcagtggcacgatctcggctcactgcaacctcttcctcgcgggttgaagtgattcttctgcttcagcctcctgagtagctgggactacaggcgcgtgctaccatgcccagctaatttatgtatttttagtagagacggagttttaccatgttggcctgactggtcttgaactgacctcagttgattcgcccaccttggcctcccaaagtgctaggattacagatgtgagccaccgcgcccagcctcacaagagttcttaaatgaaaaaaagtatggagaatatcaagttaagcatcccctaagaaaagaaaaaaaatgaaaatgtgactacagtgaattaaattatcatcagagattcttccaccattgtttaaggaagaatatcctaagcctgaattttaaagatggtttcgagtagattaacattcattggacatcttgtaatatatgcctttctttggtgtcttgtgcaagtgcaagtaaatatctttttaaaaatactttaaataatggaattactccctcacctttgtgagatgttcttggtatctctaagtgcacttgagaaagaaaacgtttattaactgagttggtacccaggcaccattaggagtctctcaattgtttcaaattttgtttctagttttggcaagatctggaagtgtattttatactggtaataaagaagatttaattttgctgggcttgtgtacaaattacctaatctctgttgtga

SEQ ID NO: 454479 - DNA, 393 bp, Homo sapiens
taaaaaaattctgattcatggaaatctcatcagcctgttgtctgggttgcacaattatcagccttggctgataaaatgaaatcagacattctcatggaaatggattttgcctctttgggaatgatatggcagtggtggttctatgtataattcagatacagatgaggatgaagaaactgagccttcttcttctgggcaacagataattgaaaattcaataactatgaataagatgaagctgctgaaggctaagatgaagaacatgaatctcagcaaaaaggtgaagctgttggcatttgaccaggcttatctctagcttacccctgcagagcactcagcaatgaggtctgttggtcattgtgaaaaaattataaagtattattcattaaaaaa

SEQ ID NO: 454480 - DNA, 620 bp, Homo sapiens
aaggcattctgttccattcttgccttgtggaagcagcagaatgaacctaggtacaaaactcaaaacatgaacaacaatatatattaccaatcttcaaacctggtttgcctagaactggaatacagttgcctgcgacatattttagaagaactagaaaagtcaaagtaatggataacagaaaagagcctccattcttcaatgatgataacatgggaccattttactacagacttcatttctgtgataccatggagctcttcattgaaacattaactggaacatgttttgagctgagagtttcaccttttgaaactgttatttctgtgaaagcaaaaattcgaagattggaaggtattcccatctgtcgacaacacttaatttggaataacatggaacttgaaaatgattattgcttgaatgattacaacatttcagaagggtgtaccttgaagctagttttggctatgcgtggcggacctataaatactagaagagatcttcaaatcccaagatgatgatcgttttgcaaaattccaacattgcctgtttacctggtttgtgatgtgtctgggtttcatggatattatcatggccccggttgcatcctttctcagaatata

SEQ ID NO: 454481 - DNA, 5056 bp, Homo sapiens
cgggcgggaggcggccgcgagccgggccggccgcgcgcaagtccggcgccagccgctagagcccccagtgcgcggcccggccgcggggcgcctcgacccgacacaataaactccgagggcgggcgggccgaggggccggtggggccgagcggccgccccgcgcgcatcgccatgtgagcggctgccgcggcttcgcggggacccaactttcccgggcggcggcgcccaacttcccgccgcccgctccggccccgtaggcccgcggcgccaggggaagacgcgagtaagtgcgggcggcggtgccctcccggccctcaccccgcacgcggcgacctcggccgcctagctctcccttcgctcaggcgcgaccgcggcgttctctgagctaaagaagtaaacaggtcatggcacgtttaacaaaaagacgacaggcggatacaaaagctatccagcatctttgggcagccattgagattatacggaaccagaagcagattgccaacattgaccgtattacaaaatgtgaaacaactacattattcttgaacctatggtgatttttacatcattacacagatatgtcattttcattagttgtatcattgttataaactggtatatgtctcgagtccacggtatgcaccctaaagagaccacccgtcagctgagcttagctgtgaaagatggtcttattgtcgaaactctaacagtgggctgcaaaggttcaaaagctggtattgaacaagaaggatattggttgccaggagatgagattgactgggaaacagaaaatcatgactggtattgttttgaatgccatttgcctggagaggtgttgatatgtgacctgtgttttcgtgtgtatcattccaagtgtttgtctgatgagttcaggcttagagacagcagtagtccctggcagtgcccagtttgcaggagcattaagaagaagaatacaaacaaacaggagatgggcacatacctcagattcattgtctcccgcatgaaggagagggctatagatcttaataaaaaggggaaggacaataaacacccgatgtacaggaggctggtgcactcagctgtggacgttcccaccattcaagagaaagtgaatgaagggaaataccgaagttatgaagagttcaaagctgatgcccaattgcttctccacaataccgtgattttctatggagcagacagtgagcaagctgacattgcgaggatgctatataaagacacatgtcatgagctggatgaactgcagctttgcaagaattgcttttacttgtcaaatgctcgtcctgacaactggttctgttatccttgtatacctaatcatgagctggtttgggctaaaatgaaaggttttgggttttggccagccaaagtcatgcagaaagaagacaatcaagtcgacgttcgcttctttggccaccaccaccagagggcctggattccttctgaaaacattcaagatatcacagtcaacattcatcggctgcacgtgaagcgcagtatgggttggaaaaaggcctgtgatgagctggagctgcatcagcgtttcctacgagaagggagattttggaaatctaagaatgaggaccgaggtgaggaagaggcagaatccagtatctcctccaccagtaatgagcagctaaaggtcactcaagaaccaagagcaaagaaaggacgacgtaatcaaagtgtggagcccaaaaaggaagaaccagagcctgaaacagaagcagtaagttctagccaggaaatacccacgatgcctcagcccatcgaaaaagtctccgtgtcaactcagacaaagaagttaagtgcctcttcaccaagaatgctgcatcggagcacccagaccacaaacgacggcgtgtgtcagagcatgtgccatgacaaatacaccaagatcttcaatgacttcaaagaccggatgaagtcggaccacaagcgggagacagagcgtgttgtccgagaagctctggagaagctgcgttctgaaatggaagaagaaaagagacaagctgtaaataaagctgtagccaacatgcagggtgagatggacagaaaatgtaagcaagtaaaggaaaagtgtaaggaggaatttgtagaagaaatcaagaagctggcaacacagcacaagcaactgatttctcagaccaagaagaagcagtggtgctacaactgtgaggaggaggccatgtaccactgctgctggaacacatcctactgctccatcaagtgccagcaggagcactggcacgcggagcacaagcgcacctgccgccggaaaagatgaagctggcccttcccggagtcaccccgatgattactcttttcagacacagcggtttttgtttccaagaagccaaaattgtttagaatttgcttcccattttgcaccagcctttaaacacttttcgtgaagaaattttgcacagtagtttaaatcttttgttaatgctcctccgaagtttttcagggggtaaaagtaacatcagtggagggtattattttaaataaattttaattgagaatttgttgcattttcagcaaattttaaaacatttttaggttttacagagattttaacctttaaacaacagatctttaaaaaacaggtgaatacaagtgagtttaacaaagaaacatttagaatagatctgaatgtaagaactacagaactgtttcagaaataaaacatactaccttgatgtgacatttttttcttaaccttgttgagctggttttgttcagcttaatttactgttcaaaggcattatctgttggtcacaccagtgggtatatgattgaatttagggaacagggttgacacagcagggctagtcctgcatattttttcttaaatatttcccaattgtgtttttcattatttcttttcaatatataacttttataacaaattattagctttgatcttgtagtttaaaattgcagggaactggggtaatcttttactgagctggatcttagagaaaatgaatatttaaattttaaagtttgcacatttcatctttgtcctaacatgagtgcttgtaacaaaataaacaacaaaaacaaagccaaaaactacctttatccatatgtgaaattatagatgaggcatacgaatttgtttaatgcttcccttcccttcccacatatcatctcactgcctattatctggtgtcacctcatgtatcgtaagttaatactaaaagaagagaaagcacttaagtttcacagaagccgttatgtttgtagtaatgggtcattgcctactaatgaactccatcactgtacacagaatgaagaataatgcatgttaattttcttgtattaaagatgccgtgatttgtaaaaagtctgtattttgcggaatgtctggattaagaagcattaccaataggaatggatcgatagttgaataatgattttttatacatagatatataaaatacagccaggaaaacttaaattacttttcttttaaaatatctcacaatttatgtggtatttttaaagactgatcttagaccaagtcaaattcccatttatcatttagttattttttgaggttagagaataatttgtacatatttatttagacctttgatatttattaaagcaattactcacaatggaagtgaaagaatcaggagaaaagccttttaaaaagtattctccaggtttgtcagggtcactctaaagataaaaatgtaactaagtcttctgtgaaatatcatccatctaatcttgatgctgttgcagatggtggtgacacaagttaattgacaaactactgccaaatggtgcacaatattttgtaaaaagtacccagtagccccatttcatacaatgtacctaaattatgcagtaacttggcatcatcgttccctccttgttgctgtgtaattagtcagtgttgccacagtgtgtggcgctgatggagatgtcagaaccgagaacacttaaccttctttgattgtttttcaagttttaagacttcgatccacccctatgagagcaagtaattgtggaaatatttttggtgtaaaatcattccagagtatgtaatatttaactgatagctgcatgaaagtgagattcgtgttactttggcttttctgtctctgttgacacggttgcacatttccaagttactacagcgtgaaaactgtgtgtttaaaaaaaaacaaaattaaaaaaagagattgtggcctggttttgtaaaagttttaggtaaaattacaattgattgttttaggaatcattattaaaaattttctgcaaatcataaagctatatcgaggtgttgagcttagccactatgcacattgtaattattcattgtggctgtccagttctatgatgcattctggcattttgtaagctgctctgactagcaatatatagattcatttaatgtgttaacattggttaataaatgtatttaaaaaaaactaaaaaaaaaaaaacaaacaacaaaaacacacaaccaacaacaacaaaaaaaacacaaaccaacaaaaaaaacacacacacacaacaaacaacacaaaaaaaagaagcgggggcggcgcgcccgcccaaaaaaaaccccccggcggggggagccccacacctccccccccccacctttttaacaaaggacgcgccccccacaggggcgcccaaaaacaccgaagcgacggcgcgcgcaaacccacccgtgggccgagagaccaaacgccctgtcggcatctcttgggagagcacaccctccctccgcggggcgaaaacagaggcggaaccccagccaacacagaaaattacgcggcgcggcaacaaacactgccgcgctatggggtcaccccggcaattctgcgctgaacaaactggcggataattataaaattagggggcagtgataacaaccccagacgatgcggcagtcactgcgaccacacgctctagcatacctcctaagacaggccgctgagaccgcgtgtgccgagcgcacgcgacccaaccaagagatcgcggaagccctcgcaggacatccagc

SEQ ID NO: 454482 - DNA, 4766 bp, Homo sapiens
ccggggctgagctgcggcggcgcctgacaatgccccctcgcgccccggcctcggcgcccgctcccggctccagcgcgcctgcacgtacgtagccttcacgtgtgtgtggatacggagtgcatgtgtggagacagaggaatatgctccaacaaatttcggatagaggcgccgaagacaggacgtggggaagctaaagaagtaaacaggtcatggcacgtttaacaaaaagacgacaggcggatacaaaagctatccagcatctttgggcagccattgagattatacggaaccagaagcagattgccaacattgaccgtattacaaagtatatgtctcgagtccacggtatgcaccctaaagagaccacccgtcagctgagcttagctgtgaaagatggtcttattgtcgaaactctaacagtgggctgcaaaggttcaaaagctggtattgaacaagaaggatattggttgccaggagatgagattgactgggaaacagaaaatcatgactggtattgttttgaatgccatttgcctggagaggtgttgatatgtgacctgtgttttcgtgtgtatcattccaagtgtttgtctgatgagttcaggcttagagacagcagtagtccctggcagtgcccagtttgcaggagcattaagaagaagaatacaaacaaacaggagatgggcacatacctcagattcattgtctcccgcatgaaggagagggctatagatcttaataaaaaggggaaggacaataaacacccgatgtacaggaggctggtgcactcagctgtggacgttcccaccattcaagagaaagtgaatgaagggaaataccgaagttatgaagagttcaaagctgatgcccaattgcttctccacaataccgtgattttctatggagcagacagtgagcaagctgacattgcgaggatgctatataaagacacatgtcatgagctggatgaactgcagctttgcaagaattgcttttacttgtcaaatgctcgtcctgacaactggttctgttatccttgtatacctaatcatgagctggtttgggctaaaatgaaaggttttgggttttggccagccaaagtcatgcagaaagaagacaatcaagtcgacgttcgcttctttggccaccaccaccagagggcctggattccttctgaaaacattcaagatatcacagtcaacattcatcggctgcacgtgaagcgcagtatgggttggaaaaaggcctgtgatgagctggagctgcatcagcgtttcctacgagaagggagattttggaaatctaagaatgaggaccgaggtgaggaagaggcagaatccagtatctcctccaccagtaatgagcagctaaaggtcactcaagaaccaagagcaaagaaaggacgacgtaatcaaagtgtggagcccaaaaaggaagaaccagagcctgaaacagaagcagtaagttctagccaggaaatacccacgatgcctcagcccatcgaaaaagtctccgtgtcaactcagacaaagaagttaagtgcctcttcaccaagaatgctgcatcggagcacccagaccacaaacgacggcgtgtgtcagagcatgtgccatgacaaatacaccaagatcttcaatgacttcaaagaccggatgaagtcggaccacaagcgggagacagagcgtgttgtccgagaagctctggagaagctgcgttctgaaatggaagaagaaaagagacaagctgtaaataaagctgtagccaacatgcagggtgagatggacagaaaatgtaagcaagtaaaggaaaagtgtaaggaggaatttgtagaagaaatcaagaagctggcaacacagcacaagcaactgatttctcagaccaagaagaagcagtggtgctacaactgtgaggaggaggccatgtaccactgctgctggaacacatcctactgctccatcaagtgccagcaggagcactggcacgcggagcacaagcgcacctgccgccggaaaagatgaagctggcccttcccggagtcaccccgatgattactcttttcagacacagcggtttttgtttccaagaagccaaaattgtttagaatttgcttcccattttgcaccagcctttaaacacttttcgtgaagaaattttgcacagtagtttaaatcttttgttaatgctcctccgaagtttttcagggggtaaaagtaacatcagtggagggtattattttaaataaattttaattgagaatttgttgcattttcagcaaattttaaaacatttttaggttttacagagattttaacctttaaacaacagatctttaaaaaacaggtgaatacaagtgagtttaacaaagaaacatttagaatagatctgaatgtaagaactacagaactgtttcagaaataaaacatactaccttgatgtgacatttttttcttaaccttgttgagctggttttgttcagcttaatttactgttcaaaggcattatctgttggtcacaccagtgggtatatgattgaatttagggaacagggttgacacagcagggctagtcctgcatattttttcttaaatatttcccaattgtgtttttcattatttcttttcaatatataacttttataacaaattattagctttgatcttgtagtttaaaattgcagggaactggggtaatcttttactgagctggatcttagagaaaatgaatatttaaattttaaagtttgcacatttcatctttgtcctaacatgagtgcttgtaacaaaataaacaacaaaaacaaagccaaaaactacctttatccatatgtgaaattatagatgaggcatacgaatttgtttaatgcttcccttcccttcccacatatcatctcactgcctattatctggtgtcacctcatgtatcgtaagttaatactaaaagaagagaaagcacttaagtttcacagaagccgttatgtttgtagtaatgggtcattgcctactaatgaactccatcactgtacacagaatgaagaataatgcatgttaattttcttgtattaaagatgccgtgatttgtaaaaagtctgtattttgcggaatgtctggattaagaagcattaccaataggaatggatcgatagttgaataatgattttttatacatagatatataaaatacagccaggaaaacttaaattacttttcttttaaaatatctcacaatttatgtggtatttttaaagactgatcttagaccaagtcaaattcccatttatcatttagttattttttgaggttagagaataatttgtacatatttatttagacctttgatatttattaaagcaattactcacaatggaagtgaaagaatcaggagaaaagccttttaaaaagtattctccaggtttgtcagggtcactctaaagataaaaatgtaactaagtcttctgtgaaatatcatccatctaatcttgatgctgttgcagatggtggtgacacaagttaattgacaaactactgccaaatggtgcacaatattttgtaaaaagtacccagtagccccatttcatacaatgtacctaaattatgcagtaacttggcatcatcgttccctccttgttgctgtgtaattagtcagtgttgccacagtgtgtggcgctgatggagatgtcagaaccgagaacacttaaccttctttgattgtttttcaagttttaagacttcgatccacccctatgagagcaagtaattgtggaaatatttttggtgtaaaatcattccagagtatgtaatatttaactgatagctgcatgaaagtgagattcgtgttactttggcttttctgtctctgttgacacggttgcacatttccaagttactacagcgtgaaaactgtgtgtttaaaaaaaaacaaaattaaaaaaagagattgtggcctggttttgtaaaagttttaggtaaaattacaattgattgttttaggaatcattattaaaaattttctgcaaatcataaagctatatcgaggtgttgagcttagccactatgcacattgtaattattcattgtggctgtccagttctatgatgcattctggcattttgtaagctgctctgactagcaatatatagattcatttaatgtgttaacattggttaataaatgtatttaaaaaaaactaaaaaaaaaaaaacaaacaacaaaaacacacaaccaacaacaacaaaaaaaacacaaaccaacaaaaaaaacacacacacacaacaaacaacacaaaaaaaagaagcgggggcggcgcgcccgcccaaaaaaaaccccccggcggggggagccccacacctccccccccccacctttttaacaaaggacgcgccccccacaggggcgcccaaaaacaccgaagcgacggcgcgcgcaaacccacccgtgggccgagagaccaaacgccctgtcggcatctcttgggagagcacaccctccctccgcggggcgaaaacagaggcggaaccccagccaacacagaaaattacgcggcgcggcaacaaacactgccgcgctatggggtcaccccggcaattctgcgctgaacaaactggcggataattataaaattagggggcagtgataacaaccccagacgatgcggcagtcactgcgaccacacgctctagcatacctcctaagacaggccgctgagaccgcgtgtgccgagcgcacgcgacccaaccaagagatcgcggaagccctcgcaggacatccagc

SEQ ID NO: 454483 - DNA, 4441 bp, Homo sapiens
aaaattatttataaaccaattcctagccccaattcagaactataaatatatcttagtagttatggtaaactgtcacagaggctaacagttctgttttcaatctcgatcctcctgtgttgtaaagaatgacaggtgtgtgcttagggtctcaccgcccacactggcccaagcattcgtgcactaccaagcttagcagcagctttctacattattgtcaaatgagatgttcaagccattaaagttcactctgataaattaatgtagtgtctttgtggctgcgggatatctgacctgccatgcttcattatactatattattaaaaccgcaggtggcgttgttggcttcttttacacacattctctgtcaatactgtgggatggcagtagtcatcctgatgtcatcctagaaaagactgcttgtcctgtgaacttagtccagacaagtatttttactggtaactcttttcgtcattctgttttttgccctctgcagaaagtgaatgaagggaaataccgaagttatgaagagttcaaagctgatgcccaattgcttctccacaataccgtgattttctatggagcagacagtgagcaagctgacattgcgaggatgctatataaagacacatgtcatgagctggatgaactgcagctttgcaagaattgcttttacttgtcaaatgctcgtcctgacaactggttctgttatccttgtatacctaatcatgagctggtttgggctaaaatgaaaggttttgggttttggccagccaaagtcatgcagaaagaagacaatcaagtcgacgttcgcttctttggccaccaccaccagagggcctggattccttctgaaaacattcaagatatcacagtcaacattcatcggctgcacgtgaagcgcagtatgggttggaaaaaggcctgtgatgagctggagctgcatcagcgtttcctacgagaagggagattttggaaatctaagaatgaggaccgaggtgaggaagaggcagaatccagtatctcctccaccagtaatgagcagctaaaggtcactcaagaaccaagagcaaagaaaggacgacgtaatcaaagtgtggagcccaaaaaggaagaaccagagcctgaaacagaagcagtaagttctagccaggaaatacccacgatgcctcagcccatcgaaaaagtctccgtgtcaactcagacaaagaagttaagtgcctcttcaccaagaatgctgcatcggagcacccagaccacaaacgacggcgtgtgtcagagcatgtgccatgacaaatacaccaagatcttcaatgacttcaaagaccggatgaagtcggaccacaagcgggagacagagcgtgttgtccgagaagctctggagaagctgcgttctgaaatggaagaagaaaagagacaagctgtaaataaagctgtagccaacatgcagggtgagatggacagaaaatgtaagcaagtaaaggaaaagtgtaaggaggaatttgtagaagaaatcaagaagctggcaacacagcacaagcaactgatttctcagaccaagaagaagcagtggtgctacaactgtgaggaggaggccatgtaccactgctgctggaacacatcctactgctccatcaagtgccagcaggagcactggcacgcggagcacaagcgcacctgccgccggaaaagatgaagctggcccttcccggagtcaccccgatgattactcttttcagacacagcggtttttgtttccaagaagccaaaattgtttagaatttgcttcccattttgcaccagcctttaaacacttttcgtgaagaaattttgcacagtagtttaaatcttttgttaatgctcctccgaagtttttcagggggtaaaagtaacatcagtggagggtattattttaaataaattttaattgagaatttgttgcattttcagcaaattttaaaacatttttaggttttacagagattttaacctttaaacaacagatctttaaaaaacaggtgaatacaagtgagtttaacaaagaaacatttagaatagatctgaatgtaagaactacagaactgtttcagaaataaaacatactaccttgatgtgacatttttttcttaaccttgttgagctggttttgttcagcttaatttactgttcaaaggcattatctgttggtcacaccagtgggtatatgattgaatttagggaacagggttgacacagcagggctagtcctgcatattttttcttaaatatttcccaattgtgtttttcattatttcttttcaatatataacttttataacaaattattagctttgatcttgtagtttaaaattgcagggaactggggtaatcttttactgagctggatcttagagaaaatgaatatttaaattttaaagtttgcacatttcatctttgtcctaacatgagtgcttgtaacaaaataaacaacaaaaacaaagccaaaaactacctttatccatatgtgaaattatagatgaggcatacgaatttgtttaatgcttcccttcccttcccacatatcatctcactgcctattatctggtgtcacctcatgtatcgtaagttaatactaaaagaagagaaagcacttaagtttcacagaagccgttatgtttgtagtaatgggtcattgcctactaatgaactccatcactgtacacagaatgaagaataatgcatgttaattttcttgtattaaagatgccgtgatttgtaaaaagtctgtattttgcggaatgtctggattaagaagcattaccaataggaatggatcgatagttgaataatgattttttatacatagatatataaaatacagccaggaaaacttaaattacttttcttttaaaatatctcacaatttatgtggtatttttaaagactgatcttagaccaagtcaaattcccatttatcatttagttattttttgaggttagagaataatttgtacatatttatttagacctttgatatttattaaagcaattactcacaatggaagtgaaagaatcaggagaaaagccttttaaaaagtattctccaggtttgtcagggtcactctaaagataaaaatgtaactaagtcttctgtgaaatatcatccatctaatcttgatgctgttgcagatggtggtgacacaagttaattgacaaactactgccaaatggtgcacaatattttgtaaaaagtacccagtagccccatttcatacaatgtacctaaattatgcagtaacttggcatcatcgttccctccttgttgctgtgtaattagtcagtgttgccacagtgtgtggcgctgatggagatgtcagaaccgagaacacttaaccttctttgattgtttttcaagttttaagacttcgatccacccctatgagagcaagtaattgtggaaatatttttggtgtaaaatcattccagagtatgtaatatttaactgatagctgcatgaaagtgagattcgtgttactttggcttttctgtctctgttgacacggttgcacatttccaagttactacagcgtgaaaactgtgtgtttaaaaaaaaacaaaattaaaaaaagagattgtggcctggttttgtaaaagttttaggtaaaattacaattgattgttttaggaatcattattaaaaattttctgcaaatcataaagctatatcgaggtgttgagcttagccactatgcacattgtaattattcattgtggctgtccagttctatgatgcattctggcattttgtaagctgctctgactagcaatatatagattcatttaatgtgttaacattggttaataaatgtatttaaaaaaaactaaaaaaaaaaaaacaaacaacaaaaacacacaaccaacaacaacaaaaaaaacacaaaccaacaaaaaaaacacacacacacaacaaacaacacaaaaaaaagaagcgggggcggcgcgcccgcccaaaaaaaaccccccggcggggggagccccacacctccccccccccacctttttaacaaaggacgcgccccccacaggggcgcccaaaaacaccgaagcgacggcgcgcgcaaacccacccgtgggccgagagaccaaacgccctgtcggcatctcttgggagagcacaccctccctccgcggggcgaaaacagaggcggaaccccagccaacacagaaaattacgcggcgcggcaacaaacactgccgcgctatggggtcaccccggcaattctgcgctgaacaaactggcggataattataaaattagggggcagtgataacaaccccagacgatgcggcagtcactgcgaccacacgctctagcatacctcctaagacaggccgctgagaccgcgtgtgccgagcgcacgcgacccaaccaagagatcgcggaagccctcgcaggacatccagc

SEQ ID NO: 454484 - DNA, 3725 bp, Homo sapiens
attggtaggtggtgtcacaaaggggcggggcgcggcggcagcggagcgttgtcggccagtgccttccgtgaagttgctcgccgggtcgttgggccctgtcgacctgtaggcgggcgagcgagccagcggacaagactgcgggtgaggctgagctagcgagcggccggcagggggggcgcccgggctgcgagccgctgagcccagccgcgctgccgccgccggccgtcgtggggccggaatggcgcaaggccggagtggcgcgggcgctcggcgctgggctgccgggtagagtcctgtccccgcccctcgccttgcggcctgacgccggccgctgctgcccggggaccggagcggcgggccgcctttgcccaggacacacgctctggcgtttgttcctttgggcgtgacgccagcttcaacgggtacgcggctttcccgacgggtgctgatctccgagtcgctgttgtcacgcggactgctgtcctccagattcaggccggtgggtctggggagcccggattggtcttggaggagcaacggctgcgcaggtgactcggtggcctcaagtgtgtacaaaactcaaaacatgaacaacaatatatattaccaatcttcaaacctggtttgcctagaactggaatacagttgcctgcgacatattttagaagaactagaaaagtcaaagtaatggataacagaaaagagcctccattcttcaatgatgataacatgggaccattttactacagacttcatttctgtgataccatggagctcttcattgaaacattaactggaacatgttttgagctgagagtttcaccttttgaaactgttatttctgtgaaagcaaaaattcgaagattggaaggtattcccatctgtcgacaacacttaatttggaataacatggaacttgaaaatgattattgcttgaatgattacaacatttcagaagggtgtaccttgaagctagttttggctatgcgtggcggacctataaatactagaagagttcctacagacgatccacttaggaagatggcagagtacttggattccagtcgagttgaggtctgggagaagacctcctgcagcaaacaagttacatttttggtataccaagaaggagatcaattgaatttctttcctgcagtagataggggagatggcactttaacaccgttatctgactcttcaaagaaaatagattttcatttgcatgtcctacggagaaaaggagaacatcgtatgagtggtggttctatgtataattcagatacagatgaggatgaagaaactgagccttcttcttctgggcaacagataattgaaaattcaataactatgaataagatgaagctgctgaaggctaagatgaagaacatgaatctcagcaaaaagcctaagaaagctgtcaagataaaacctcacccacctgtagctcctcgaccttctagtggttccactgcaccatctcgccaccgattgttaagggtcctccccaacattggtcaatcttgttcacctgcttttgggaatgcatatccgcccgaaatctccaggaatggaatttcaagtttggcaactcaactctctgctgagagatacatatcttctatcactggtgaatttcttaaggaagataatagctgggagaataacacactgtctcacttcagtagcaacgtcaaactacctcctcagataccccatttggagttgggaaatgaccaggagcttgctgactctgttctccatcttggatcatccctgcctaggcaaacaaaacattttttaggaaacttgccatctagtaatgggaacattgtcttaccttcagaagaatgtgtaaccgaacaatcacttctacctaaagtgggctcactggcttcatttgcagaaggaaatgctgatgaacagagcagcggcttagaaggtgcgtgcaaagtgaatctggagttgctactcactaatgctgacaaagggttgaaagctccagagcagcatctcaagcatgttgcaggagtgctgaatggggaatcagtagagacttcagttcttaactaccgggaattaagtcctcacaagaatagactcttgtcacctcttcgctgttctgcaccaatgtcgctacataattctctggtgaaaccagagagacagtccaaatgttttgagtttgggaagctacagccttcttcttctcagtcactggatgttcaaaacataactgattcttctttctctaggactacttgctttcaaggtgttaaagttgattcacttgggaaaagatctgatgttatttccaaagttgaggctcgggatatcacagaaatgactaacaaggcttccaaagagcctgttggttgtgtaaataatatcagttttcttgcctcactggccgggagcacaagcagaaatagattacagagcacacgtggggcaggcaggcttcagaactctggaactgggctgtctacaaacctccagcattttcaggaagaaaactttaggaaaagttctccccagttagaacatacaggagtttttttgtctacccatggtgttggaatgaatggaaataatgcagcagcagggaaaagcgtaggagaatgtactactcatcacctcccacctgtgaaagcccctcttcagacaaagaagaaaacaacaaatcattgttttctttgtggaaagaaaacaggactggctagtagctacgaatgcagatgtggaaacaacttctgtgcatctcatcgttatgcagaaactcatggctgtacctatgattacaagagtgcagggaggagatacttgcacgaggcaaatcctgtggttaatgcaccaaagcttccaaaaatctaactcttcctctacatcttactgttctgcccgggattcgtattataatgacagaagaaatgttgtttagactattatttttgttcgactctaaaagatttgccaaataacaaaagcatacaatgcatactgttggagaacaagaatgctactgtattttacatctttatttcttggtgaaacaaaagttttaaaagtagttttaacaactttacactggaatgatttagctttgttattgcatgtcttgtgttaagtgttttgtatatgatattgcagttttactaggcaaatcttcaaaagatgcactttaggaaacgaaatatttcctaaataaccaggcttccacattgtacagaatgagcagtcatgtaatgaatggctctactcagattgaccatatgggttttttctttttctttcttttattcttctccttctttttttttcagaggtgggatgggtggagattttttaaaaatcccacgtgtgaaagtttactggctttattagcaagttcctttttacttcaagctactttttataaaaaagaacatttttccagtgtggtttttaacagataatacatttcttccacattcagattagtattcggacatgaatccattctataaaacacatcgtgttcatgatagtgtatattttactactttttgaatgttaattttaaaatagaagatgtcccacttgccattaaatatagaagccaactttttaccttttgaaatatggctacatttaaaacaaaatctcacagctcggtttttcttatttgttgagtgctattaccaggagaaattcaaataaatattcaatttcattatgaaaaaaaaaat

SEQ ID NO: 454485 - DNA, 3056 bp, Homo sapiens
  misc_feature (3026)..(3026): n is a, c, g, or t
  misc_feature (3034)..(3034): n is a, c, g, or t
cgggcgggaggcggccgcgagccgggccggccgcgcgcaagtccggcgccagccgctagagcccccagtgcgcggcccggccgcggggcgcctcgacccgacacaataaactccgagggcgggcgggccgaggggccggtggggccgagcggccgccccgcgcgcatcgccatgtgagcggctgccgcggcttcgcggggacccaactttcccgggcggcggcgcccaacttcccgccgcccgctccggccccgtaggcccgcggcgccaggggaagacgcgagtaagtgcgggcggcggtgccctcccggccctcaccccgcacgcggcgacctcggccgcctagctctcccttcgctcaggcgcgaccgcggcgttctctgagctaaagaagtaaacaggtcatggcacgtttaacaaaaagacgacaggcggatacaaaagctatccagcatctttgggcagccattgagattatacggaaccagaagcagattgccaacattgaccgtattacaaagtatatgtctcgagtccacggtatgcaccctaaagagaccacccgtcagctgagcttagctgtgaaagatggtcttattgtcgaaactctaacagtgggctgcaaaggttcaaaagctggtattgaacaagaaggatattggttgccaggagatgagattgactgggaaacagaaaatcatgactggtattgttttgaatgccatttgcctggagaggtgttgatatgtgacctgtgttttcgtgtgtatcattccaagtgtttgtctgatgagttcaggcttagagacagcagtagtccctggcagtgcccagtttgcaggagcattaagaagaagaatacaaacaaacaggagatgggcacatacctcagattcattgtctcccgcatgaaggagagggctatagatcttaataaaaaggggaaggacaataaacacccgatgtacaggaggctggtgcactcagctgtggacgttcccaccattcaagagaaagtgaatgaagggaaataccgaagttatgaagagttcaaagctgatgcccaattgcttctccacaataccgtgattttctatggagcagacagtgagcaagctgacattgcgaggatgctatataaagacacatgtcatgagctggatgaactgcagctttgcaagaattgcttttacttgtcaaatgctcgtcctgacaactggttctgttatccttgtatacctaatcatgagctggtttgggctaaaatgaaaggttttgggttttggccagccaaagtcatgcagaaagaagacaatcaagtcgacgttcgcttctttggccaccaccaccagagggcctggattccttctgaaaacattcaagatatcacagtcaacattcatcggctgcacgtgaagcgcagtatgggttggaaaaaggcctgtgatgagctggagctgcatcagcgtttcctacgagaagggagattttggaaatctaagaatgaggaccgaggtgaggaagaggcagaatccagtatctcctccaccagtaatgagcagctaaaggtcactcaagaaccaagagcaaagaaaggacgacgtaatcaaagtgtggagcccaaaaaggaagaaccagagcctgaaacagaagcagtaagttctagccaggaaatacccacgatgcctcagcccatcgaaaaagtctccgtgtcaactcagacaaagaagttaagtgcctcttcaccaagaatgctgcatcggagcacccagaccacaaacgacggcgtgtgtcagagcatgtgccatgacaaatacaccaagatcttcaatgacttcaaagaccggatgaagtcggaccacaagcgggagacagagcgtgttgtccgagaagctctggagaagctgcgttctgaaatggaagaagaaaagagacaagctgtaaataaagctgtagccaacatgcagggtgagatggacagaaaatgtaagcaagtaaaggaaaagtgtaaggaggaatttgtagaagaaatcaagaagctggcaacacagcacaagcaactgatttctcagaccaagaagaagcagtggtgctacaactgtgaggaggaggccatgtaccactgctgctggaacacatcctactgctccatcaagtgccagcaggagcactggcacgcggagcacaagcgcacctgccgccggaaaagatgaagctggcccttcccggagtcaccccgatgattactcttttcagacacagcggtttttgtttccaagaagccaaaattgtttagaatttgcttcccattttgcaccagcctttaaacacttttcgtgaagaaattttgcacagtagtttaaatcttttgttaatgctcctccgaagtttttcagggggtaaaagtaacatcagtggagggtattattttaaataaattttaattgagaatttgttgcattttcagcaaattttaaaacatttttaggttttacagagattttaacctttaaacaacagatctttaaaaaacaggtgaatacaagtgagtttaacaaagaaacatttagaatagatctgaatgtaagaactacagaactgtttcagaaataaaacatactaccttgatgtgacatttttttcttaaccttgttgagctggttttgttcagcttaatttactgttcaaaggcattatctgttggtcacaccagtgggtatatgattgaatttagggaacagggttgacacagcagggctagtcctgcatattttttcttaaatatttcccaattgtgtttttcattatttcttttcaatatataacttttataacaaattattagctttgatcttgtagtttaaaattgcagggaactggggtaatcttttactgagctggatcttagagaaaatgaatatttaaattttaaagtttgcacatttcatctttgtcctaacatgagtgcttgtaacaaaataaacaacaaaaacaaagggcccaaaacctacccccttatccccttnggtgggantttagggtgagggggctacggg

SEQ ID NO: 454486 - DNA, 3703 bp, Homo sapiens
attggtaggtggtgtcacaaaggggcggggcgcggcggcagcggagcgttgtcggccagtgccttccgtgaagttgctcgccgggtcgttgggccctgtcgacctgtaggcgggcgagcgagccagcggacaagactgcgggtgaggctgagctagcgagcggccggcagggggggcgcccgggctgcgagccgctgagcccagccgcgctgccgccgccggccgtcgtggggccggaatggcgcaaggccggagtggcgcgggcgctcggcgctgggctgccgggtagagtcctgtccccgcccctcgccttgcggcctgacgccggccgctgctgcccggggaccggagcggcgggccgcctttgcccaggacacacgctctggcgtttgttcctttgggcgtgacgccagcttcaacgggtacgcggctttcccgacgggtgctgatctccgagtcgctgttgtcacgcggactgctgtcctccagattcaggccggtgggtctggggagcccggattggtcttggaggagcaacggctgcgcaggtacaaaactcaaaacatgaacaacaatatatattaccaatcttcaaacctggtttgcctagaactggaatacagttgcctgcgacatattttagaagaactagaaaagtcaaagtaatggataacagaaaagagcctccattcttcaatgatgataacatgggaccattttactacagacttcatttctgtgataccatggagctcttcattgaaacattaactggaacatgttttgagctgagagtttcaccttttgaaactgttatttctgtgaaagcaaaaattcgaagattggaaggtattcccatctgtcgacaacacttaatttggaataacatggaacttgaaaatgattattgcttgaatgattacaacatttcagaagggtgtaccttgaagctagttttggctatgcgtggcggacctataaatactagaagagttcctacagacgatccacttaggaagatggcagagtacttggattccagtcgagttgaggtctgggagaagacctcctgcagcaaacaagttacatttttggtataccaagaaggagatcaattgaatttctttcctgcagtagataggggagatggcactttaacaccgttatctgactcttcaaagaaaatagattttcatttgcatgtcctacggagaaaaggagaacatcgtatgagtggtggttctatgtataattcagatacagatgaggatgaagaaactgagccttcttcttctgggcaacagataattgaaaattcaataactatgaataagatgaagctgctgaaggctaagatgaagaacatgaatctcagcaaaaagcctaagaaagctgtcaagataaaacctcacccacctgtagctcctcgaccttctagtggttccactgcaccatctcgccaccgattgttaagggtcctccccaacattggtcaatcttgttcacctgcttttgggaatgcatatccgcccgaaatctccaggaatggaatttcaagtttggcaactcaactctctgctgagagatacatatcttctatcactggtgaatttcttaaggaagataatagctgggagaataacacactgtctcacttcagtagcaacgtcaaactacctcctcagataccccatttggagttgggaaatgaccaggagcttgctgactctgttctccatcttggatcatccctgcctaggcaaacaaaacattttttaggaaacttgccatctagtaatgggaacattgtcttaccttcagaagaatgtgtaaccgaacaatcacttctacctaaagtgggctcactggcttcatttgcagaaggaaatgctgatgaacagagcagcggcttagaaggtgcgtgcaaagtgaatctggagttgctactcactaatgctgacaaagggttgaaagctccagagcagcatctcaagcatgttgcaggagtgctgaatggggaatcagtagagacttcagttcttaactaccgggaattaagtcctcacaagaatagactcttgtcacctcttcgctgttctgcaccaatgtcgctacataattctctggtgaaaccagagagacagtccaaatgttttgagtttgggaagctacagccttcttcttctcagtcactggatgttcaaaacataactgattcttctttctctaggactacttgctttcaaggtgttaaagttgattcacttgggaaaagatctgatgttatttccaaagttgaggctcgggatatcacagaaatgactaacaaggcttccaaagagcctgttggttgtgtaaataatatcagttttcttgcctcactggccgggagcacaagcagaaatagattacagagcacacgtggggcaggcaggcttcagaactctggaactgggctgtctacaaacctccagcattttcaggaagaaaactttaggaaaagttctccccagttagaacatacaggagtttttttgtctacccatggtgttggaatgaatggaaataatgcagcagcagggaaaagcgtaggagaatgtactactcatcacctcccacctgtgaaagcccctcttcagacaaagaagaaaacaacaaatcattgttttctttgtggaaagaaaacaggactggctagtagctacgaatgcagatgtggaaacaacttctgtgcatctcatcgttatgcagaaactcatggctgtacctatgattacaagagtgcagggaggagatacttgcacgaggcaaatcctgtggttaatgcaccaaagcttccaaaaatctaactcttcctctacatcttactgttctgcccgggattcgtattataatgacagaagaaatgttgtttagactattatttttgttcgactctaaaagatttgccaaataacaaaagcatacaatgcatactgttggagaacaagaatgctactgtattttacatctttatttcttggtgaaacaaaagttttaaaagtagttttaacaactttacactggaatgatttagctttgttattgcatgtcttgtgttaagtgttttgtatatgatattgcagttttactaggcaaatcttcaaaagatgcactttaggaaacgaaatatttcctaaataaccaggcttccacattgtacagaatgagcagtcatgtaatgaatggctctactcagattgaccatatgggttttttctttttctttcttttattcttctccttctttttttttcagaggtgggatgggtggagattttttaaaaatcccacgtgtgaaagtttactggctttattagcaagttcctttttacttcaagctactttttataaaaaagaacatttttccagtgtggtttttaacagataatacatttcttccacattcagattagtattcggacatgaatccattctataaaacacatcgtgttcatgatagtgtatattttactactttttgaatgttaattttaaaatagaagatgtcccacttgccattaaatatagaagccaactttttaccttttgaaatatggctacatttaaaacaaaatctcacagctcggtttttcttatttgttgagtgctattaccaggagaaattcaaataaatattcaatttcattatgaaaaaaaaaat

SEQ ID NO: 454487 - DNA, 3581 bp, Homo sapiens
attggtaggtggtgtcacaaaggggcggggcgcggcggcagcggagcgttgtcggccagtgccttccgtgaagttgctcgccgggtcgttgggccctgtcgacctgtaggcgggcgagcgagccagcggacaagactgcgggtgaggctgagctagcgagcggccggcagggggggcgcccgggctgcgagccgctgagcccagccgcgctgccgccgccggccgtcgtggggccggaatggcgcaaggccggagtggcgcgggcgctcggcgctgggctgccgggtagagtcctgtccccgcccctcgccttgcggcctgacgccggccgctgctgcccggggaccggagcggcgggccgcctttgcccaggacacacgctctggcgtttgttcctttgggcgtgacgccagcttcaacgggtacgcggctttcccgacgggtgctgatctccgagtcgctgttgtcacgcggactgctgtcctccagattcaggccggtgggtctggggagcccggattggtcttggaggagcaacggctgcgcaggtgactcggtggcctcaagtgtgtacaaaactcaaaacatgaacaacaatatatattaccaatcttcaaacctggtttgcctagaactggaatacagttgcctgcgacatattttagaagaactagaaaagtcaaagtaatggataacagaaaagagcctccattcttcaatgatgataacatgggaccattttactacagacttcatttctgtgataccatggagctcttcattgaaacattaactggaacatgttttgagctgagagtttcaccttttgaaactgttatttctgtgaaagcaaaaattcgaagattggaagttcctacagacgatccacttaggaagatggcagagtacttggattccagtcgagttgaggtctgggagaagacctcctgcagcaaacaagttacatttttggtataccaagaaggagatcaattgaatttctttcctgcagtagataggggagatggcactttaacaccgttatctgactcttcaaagaaaatagattttcatttgcatgtcctacggagaaaaggagaacatcgtatgagtggtggttctatgtataattcagatacagatgaggatgaagaaactgagccttcttcttctgggcaacagataattgaaaattcaataactatgaataagatgaagctgctgaaggctaagatgaagaacatgaatctcagcaaaaagcctaagaaagctgtcaagataaaacctcacccacctgtagctcctcgaccttctagtggttccactgcaccatctcgccaccgattgttaagggtcctccccaacattggtcaatcttgttcacctgcttttgggaatgcatatccgcccgaaatctccaggaatggaatttcaagtttggcaactcaactctctgctgagagatacatatcttctatcactggtgaatttcttaaggaagataatagctgggagaataacacactgtctcacttcagtagcaacgtcaaactacctcctcagataccccatttggagttgggaaatgaccaggagcttgctgactctgttctccatcttggatcatccctgcctaggcaaacaaaacattttttaggaaacttgccatctagtaatgggaacattgtcttaccttcagaagaatgtgtaaccgaacaatcacttctacctaaagtgggctcactggcttcatttgcagaaggaaatgctgatgaacagagcagcggcttagaaggtgcgtgcaaagtgaatctggagttgctactcactaatgctgacaaagggttgaaagctccagagcagcatctcaagcatgttgcaggagtgctgaatggggaatcagtagagacttcagttcttaactaccgggaattaagtcctcacaagaatagactcttgtcacctcttcgctgttctgcaccaatgtcgctacataattctctggtgaaaccagagagacagtccaaatgttttgagtttgggaagctacagccttcttcttctcagtcactggatgttcaaaacataactgattcttctttctctaggactacttgctttcaaggtgttaaagttgattcacttgggaaaagatctgatgttatttccaaagttgaggctcgggatatcacagaaatgactaacaaggcttccaaagagcctgttggttgtgtaaataatatcagttttcttgcctcactggccgggagcacaagcagaaatagattacagagcacacgtggggcaggcaggcttcagaactctggaactgggctgtctacaaacctccagcattttcaggaagaaaactttaggaaaagttctccccagttagaacatacaggagtttttttgtctacccatggtgttggaatgaatggaaataatgcagcagcagggaaaagcgtaggagaatgtactactcatcacctcccacctgtgaaagcccctcttcagacaaagaagaaaacaacaaatcattgttttctttgtggaaagaaaacaggactggctagtagctacgaatgcagatgtggaaacaacttctgtgcatctcatcgttatgcagaaactcatggctgtacctatgattacaagagtgcagggaggagatacttgcacgaggcaaatcctgtggttaatgcaccaaagcttccaaaaatctaactcttcctctacatcttactgttctgcccgggattcgtattataatgacagaagaaatgttgtttagactattatttttgttcgactctaaaagatttgccaaataacaaaagcatacaatgcatactgttggagaacaagaatgctactgtattttacatctttatttcttggtgaaacaaaagttttaaaagtagttttaacaactttacactggaatgatttagctttgttattgcatgtcttgtgttaagtgttttgtatatgatattgcagttttactaggcaaatcttcaaaagatgcactttaggaaacgaaatatttcctaaataaccaggcttccacattgtacagaatgagcagtcatgtaatgaatggctctactcagattgaccatatgggttttttctttttctttcttttattcttctccttctttttttttcagaggtgggatgggtggagattttttaaaaatcccacgtgtgaaagtttactggctttattagcaagttcctttttacttcaagctactttttataaaaaagaacatttttccagtgtggtttttaacagataatacatttcttccacattcagattagtattcggacatgaatccattctataaaacacatcgtgttcatgatagtgtatattttactactttttgaatgttaattttaaaatagaagatgtcccacttgccattaaatatagaagccaactttttaccttttgaaatatggctacatttaaaacaaaatctcacagctcggtttttcttatttgttgagtgctattaccaggagaaattcaaataaatattcaatttcattatgaaaaaaaaaat

SEQ ID NO: 454488 - DNA, 3104 bp, Homo sapiens
attggtaggtggtgtcacaaaggggcggggcgcggcggcagcggagcgttgtcggccagtgccttccgtgaagttgctcgccgggtcgttgggccctgtcgacctgtaggcgggcgagcgagccagcggacaagactgcgggtgaggctgagctagcgagcggccggcagggggggcgcccgggctgcgagccgctgagcccagccgcgctgccgccgccggccgtcgtggggccggaatggcgcaaggccggagtggcgcgggcgctcggcgctgggctgccgggtagagtcctgtccccgcccctcgccttgcggcctgacgccggccgctgctgcccggggaccggagcggcgggccgcctttgcccaggacacacgctctggcgtttgttcctttgggcgtgacgccagcttcaacgggtacgcggctttcccgacgggtgctgatctccgagtcgctgttgtcacgcggactgctgtcctccagattcaggccggtgggtctggggagcccggattggtcttggaggagcaacggctgcgcaggtacaaaactcaaaacatgaacaacaatatatattaccaatcttcaaacctggtttgcctagaactggaatacagttgcctgcgacatattttagaagaactagaaaagtcaaagtaatggataacagaaaagagcctccattcttcaatgatgataacatgggaccattttactacagacttcatttctgtgataccatggagctcttcattgaaacattaactggaacatgttttgagctgagagtttcaccttttgaaactgttatttctgtgaaagcaaaaattcgaagattggaaggtattcccatctgtcgacaacacttaatttggaataacatggaacttgaaaatgattattgcttgaatgattacaacatttcagaagggtgtaccttgaagctagttttggctatgcgtggcggacctataaatactagaagagttcctacagacgatccacttaggaagatggcagagtacttggattccagtcgagttgaggtctgggagaagacctcctgcagcaaacaagttacatttttggtataccaagaaggagatcaattgaatttctttcctgcagtagataggggagatggcactttaacaccgttatctgactcttcaaagaaaatagattttcatttgcatgtcctacggagaaaaggagaacatcgtatgagtggtggttctatgtataattcagatacagatgaggatgaagaaactgagccttcttcttctgggcaacagataattgaaaattcaataactatgaataagatgaagctgctgaaggctaagatgaagaacatgaatctcagcaaaaagcctaagaaagctgtcaagataaaacctcacccacctgtagctcctcgaccttctagtggttccactgcaccatctcgccaccgattgttaagggtcctccccaacattggtcaatcttgttcacctgcttttgggaatgcatatccgcccgaaatctccaggaatggaatttcaagtttggcaactcaactctctgctgagagatacatatcttctatcactggtgaatttcttaaggaagataatagctgggagaataacacactgtctcacttcagtagcaacgtcaaactacctcctcagataccccatttggagttgggaaatgaccaggagcttgctgactctgttctccatcttggatcatccctgcctaggcaaacaaaacattttttaggaaacttgccatctagtaatgggaacattgtcttaccttcagaagaatgtgtaaccgaacaatcacttctacctaaagtgggctcactggcttcatttgcagaaggaaatgctgatgaacagagcagcggcttagaaggtgcgtgcaaagtgaatctggagttgctactcactaatgctgacaaagggttgaaagctccagagcagcatctcaagcatgttgcaggagtgctgaatggggaatcagtagagacttcagttcttaactaccgggaattaagtcctcacaagaatagactcttgtcacctcttcgctgttctgcaccaatgtcgctacataattctctggtgaaaccagagagacagtccaaatgttttgagtttgggaagctacagccttcttcttctcagtcactggatgttcaaaacataactgattcttctttctctaggactacttgctttcaaggtgttaaagttgattcacttgggaaaagatctgatgttatttccaaagttgaggctcgggatatcacagaaatgactaacaaggcttccaaagagcctgttggttgtgtaaataatatcagttttcttgcctcactggccgggagcacaagcagaaatagattacagagcacacgtggggcaggcaggcttcagaactctggaactgggctgtctacaaacctccagcattttcaggaagaaaactttaggaaaagttctccccagttagaacatacaggagtttttttgtctacccatggtgttggaatgaatggaaataatgcagcagcagggaaaagcgtaggagaatgtactactcatcacctcccacctgtgaaagcccctcttcagacaaagaagaaaacaacaaatcattgttttctttgtggaaagaaaacaggactggctagtagctacgaatgcaggcaggttggcgagctggagaagctcagatgctttctctgtgataacccagcttggggattatgcaaaataaaatatttaaattgcctgtttataacatcattaagatgatgttcaatagctatcttcagttgaacttctaattggctgaagtaaagaacaagtagatagctcatgggtttccaaaagacaaaaacagatccttccttgtcctttaagttaggaggtttaaaccaatctgagagtgtacctttttcgtcttatgatgaacctgcttggattttgtttgagtggcaccttggaagaacccctccctgaatattctattaaaaatttaattaaaaaattaaaagttaatataaaatagatgaataatatatttccaaaaaagta

SEQ ID NO: 454489 - DNA, 1894 bp, Homo sapiens
attggtaggtggtgtcacaaaggggcggggcgcggcggcagcggagcgttgtcggccagtgccttccgtgaagttgctcgccgggtcgttgggccctgtcgacctgtaggcgggcgagcgagccagcggacaagactgcgggtgaggctgagctagcgagcggccggcagggggggcgcccgggctgcgagccgctgagcccagccgcgctgccgccgccggccgtcgtggggccggaatggcgcaaggccggagtggcgcgggcgctcggcgctgggctgccgggtagagtcctgtccccgcccctcgccttgcggcctgacgccggccgctgctgcccggggaccggagcggcgggccgcctttgcccaggacacacgctctggcgtttgttcctttgggcgtgacgccagcttcaacgggtacgcggctttcccgacgggtgctgatctccgagtcgctgttgtcacgcggactgctgtcctccagattcaggccggtgggtctggggagcccggattggtcttggaggagcaacggctgcgcaggtacaaaactcaaaacatgaacaacaatatatattaccaatcttcaaacctggtttgcctagaactggaatacagttgcctgcgacatattttagaagaactagaaaagtcaaagtaatggataacagaaaagagcctccattcttcaatgatgataacatgggaccattttactacagacttcatttctgtgataccatggagctcttcattgaaacattaactggaacatgttttgagctgagagtttcaccttttgaaactgttatttctgtgaaagcaaaaattcgaagattggaaggtattcccatctgtcgacaacacttaatttggaataacatggaacttgaaaatgattattgcttgaatgattacaacatttcagaagggtgtaccttgaagctagttttggctatgcgtggcggacctataaatactagaagagttcctacagacgatccacttaggaagatggcagagtacttggattccagtcgagttgaggtctgggagaagacctcctgcagcaaacaagttacatttttggtataccaagaaggagatcaattgaatttctttcctgcagtagataggggagatggcactttaacaccgttatctgactcttcaaagaaaatagattttcatttgcatgtcctacggagaaaaggagaacatcgtatgagtggtggttctatgtataattcagatacagatgaggatgaagaaactgagccttcttcttctgggcaacagataattgaaaattcaataactatgaataagatgaagctgctgaaggctaagatgaagaacatgaatctcagcaaaaaggagaatgtactactcatcacctcccacctgtgaaagcccctcttcagacaaagaagaaaacaacaaatcattgttttctttgtggaaagaaaacaggactggctagtagctacgaatgcaggcaggttggcgagctggagaagctcagatgctttctctgtgataacccagcttggggattatgcaaaataaaatatttaaattgcctgtttataacatcattaagatgatgttcaatagctatcttcagttgaacttctaattggctgaagtaaagaacaagtagatagctcatgggtttccaaaagacaaaaacagatccttccttgtcctttaagttaggaggtttaaaccaatctgagagtgtacctttttcgtcttatgatgaacctgcttggattttgtttgagtggcaccttggaagaacccctccctgaatattctattaaaaatttaattaaaaaattaaaagttaatataaaatagatgaataatatatttccaaaaaagta

SEQ ID NO: 454490 - DNA, 2693 bp, Homo sapiens
attggtaggtggtgtcacaaaggggcggggcgcggcggcagcggagcgttgtcggccagtgccttccgtgaagttgctcgccgggtcgttgggccctgtcgacctgtaggcgggcgagcgagccagcggacaagactgcgggtgaggctgagctagcgagcggccggcagggggggcgcccgggctgcgagccgctgagcccagccgcgctgccgccgccggccgtcgtggggccggaatggcgcaaggccggagtggcgcgggcgctcggcgctgggctgccgggtagagtcctgtccccgcccctcgccttgcggcctgacgccggccgctgctgcccggggaccggagcggcgggccgcctttgcccaggacacacgctctggcgtttgttcctttgggcgtgacgccagcttcaacgggtacgcggctttcccgacgggtgctgatctccgagtcgctgttgtcacgcggactgctgtcctccagattcaggccggtgggtctggggagcccggattggtcttggaggagcaacggctgcgcaggtacaaaactcaaaacatgaacaacaatatatattaccaatcttcaaacctggtttgcctagaactggaatacagttgcctgcgacatattttagaagaactagaaaagtcaaagtaatggataacagaaaagagcctccattcttcaatgatgataacatgggaccattttactacagacttcatttctgtgataccatggagctcttcattgaaacattaactggaacatgttttgagctgagagtttcaccttttgaaactgttatttctgtgaaagcaaaaattcgaagattggaaggtattcccatctgtcgacaacacttaatttggaataacatggaacttgaaaatgattattgcttgaatgattacaacatttcagaagggtgtaccttgaagctagttttggctatgcgtggcggacctataaatactagaagagttcctacagacgatccacttaggaagatggcagagtacttggattccagtcgagttgaggtctgggagaagacctcctgcagcaaacaagttacatttttggtataccaagaaggagatcaattgaatttctttcctgcagtagataggggagatggcactttaacaccgttatctgactcttcaaagaaaatagattttcatttgcatgtcctacggagaaaaggagaacatcgtatgagtggtggttctatgtataattcagatacagatgaggatgaagaaactgagccttcttcttctgggcaacagataattgaaaattcaataactatgaataagatgaagctgctgaaggctaagatgaagaacatgaatctcagcaaaaagcctaagaaagctgtcaagataaaacctcacccacctgtagctcctcgaccttctagtggttccactgcaccatctcgccaccgattgttaagggtcctccccaacattggtcaatcttgttcacctgcttttgggaatgcatatccgcccgaaatctccaggaatggaatttcaagtttggcaactcaactctctgctgagagatacatatcttctatcactggtgaatttcttaaggaagataatagctgggagaataacacactgtctcacttcagtagcaacgtcaaactacctcctcagataccccatttggagttgggaaatgaccaggagcttgctgactctgttctccatcttggatcatccctgcctaggcaaacaaaacattttttaggaaacttgccatctagtaatgggaacattgtcttaccttcagaagaatgtgtaaccgaacaatcacttctacctaaagtgggctcactggcttcatttgcagaaggaaatgctgatgaacagagcagcggcttagaaggtgcgtgcaaagtgaatctggagttgctactcactaatgctgacaaagggttgaaagctccagagcagcatctcaagcatgttgcaggagtgctgaatggggaatcagtagagacttcagttcttaactaccgggaattaagtcctcacaagaatagactcttgtcacctcttcgctgttctgcaccaatgtcgctacataattctctggtgaaaccagagagacagtccaaatgttttgagtttgggaagctacagccttcttcttctcagtcactggatgttcaaaacataactgattcttctttctctaggactacttgctttcaaggtgttaaagttgattcacttgggaaaagatctgatgttatttccaaagttgaggctcgggatatcacagaaatgactaacaaggcttccaaagagcctgttggttgtgtaaataatatcagttttcttgcctcactggccgggagcacaagcagaaatagattacagagcacacgtggggcaggcaggcttcagaactctggaactgggctgtctacaaacctccagcattttcaggaagaaaactttaggaaaagttctccccagttagaacatacaggagtttttttggtcagtattttcctttcaacatgctctagtagttatccttgtagtgattcaacttatttaaagtttggtttttgtttacataaataaggaaggctaagattagattattttcataaatttatctgaaaatgtttatttagtttgtataaaatcttg

SEQ ID NO: 454491 - DNA, 2986 bp, Homo sapiens
cggcacgaggggaggcggcaccggaggggagggcagcgggcggcggcggcggcggtggaggagccggagcataatgctaaagaagtaaacaggtcatggcacgtttaacaaaaagacgacaggcggatacaaaagctatccagcatctttgggcagccattgagattatacggaaccagaagcagattgccaacattgaccgtattacaaattcctacagacgatccacttaggaagatggcagagtacttggattccagtcgagttgaggtctgggagaagacctcctgcagcaaacaagttacatttttggtataccaagaaggagatcaattgaatttctttcctgcagtagataggggagatggcactttaacaccgttatctgactcttcaaagaaaatagattttcatttgcatgtcctacggagaaaaggagaacatcgtatgagtggtggttctatgtataattcagatacagatgaggatgaagaaactgagccttcttcttctgggcaacagataattgaaaattcaataactatgaataagatgaagctgctgaaggctaagatgaagaacatgaatctcagcaaaaaggtgaagctgttggcatttgaccaggcttatctctagcttacccctgcagagcactcagcaatgagcctaagaaagctgtcaagataaaacctcacccacctgtagctcctcgaccttctagtggttccactgcaccatctcgccaccgattgttaagggtcctccccaacattggtcaatcttgttcacctgcttttgggaatgcatatccgcccgaaatctccaggaatggaatttcaagtttggcaactcaactctctgctgagagatacatatcttctatcactggtgaatttcttaaggaagataatagctgggagaataacacactgtctcacttcagtagcaacgtcaaactacctcctcagataccccatttggagttgggaaatgaccaggagcttgctgactctgttctccatcttggatcatccctgcctaggcaaacaaaacattttttaggaaacttgccatctagtaatgggaacattgtcttaccttcagaagaatgtgtaaccgaacaatcacttctacctaaagtgggctcactggcttcatttgcagaaggaaatgctgatgaacagagcagcggcttagaaggtgcgtgcaaagtgaatctggagttgctactcactaatgctgacaaagggttgaaagctccagagcagcatctcaagcatgttgcaggagtgctgaatggggaatcagtagagacttcagttcttaactaccgggaattaagtcctcacaagaatagactcttgtcacctcttcgctgttctgcaccaatgtcgctacataattctctggtgaaaccagagagacagtccaaatgttttgagtttgggaagctacagccttcttcttctcagtcactggatgttcaaaacataactgattcttctttctctaggactacttgctttcaaggtgttaaagttgattcacttgggaaaagatctgatgttatttccaaagttgaggctcgggatatcacagaaatgactaacaaggcttccaaagagcctgttggttgtgtaaataatatcagttttcttgcctcactggccgggagcacaagcagaaatagattacagagcacacgtggggcaggcaggcttcagaactctggaactgggctgtctacaaacctccagcattttcaggaagaaaactttaggaaaagttctccccagttagaacatacaggagtttttttgtctacccatggtgttggaatgaatggaaataatgcagcagcagggaaaagcgtaggagaatgtactactcatcacctcccacctgtgaaagcccctcttcagacaaagaagaaaacaacaaatcattgttttctttgtggaaagaaaacaggactggctagtagctacgaatgcagatgtggaaacaacttctgtgcatctcatcgttatgcagaaactcatggctgtacctatgattacaagagtgcagggaggagatacttgcacgaggcaaatcctgtggttaatgcaccaaagcttccaaaaatctaactcttcctctacatcttactgttctgcccgggattcgtattataatgacagaagaaatgttgtttagactattatttttgttcgactctaaaagatttgccaaataacaaaagcatacaatgcatactgttggagaacaagaatgctactgtattttacatctttatttcttggtgaaacaaaagttttaaaagtagttttaacaactttacactggaatgatttagctttgttattgcatgtcttgtgttaagtgttttgtatatgatattgcagttttactaggcaaatcttcaaaagatgcactttaggaaacgaaatatttcctaaataaccaggcttccacattgtacagaatgagcagtcatgtaatgaatggctctactcagattgaccatatgggttttttctttttctttcttttattcttctccttctttttttttcagaggtgggatgggtggagattttttaaaaatcccacgtgtgaaagtttactggctttattagcaagttcctttttacttcaagctactttttataaaaaagaacatttttccagtgtggtttttaacagataatacatttcttccacattcagattagtattcggacatgaatccattctataaaacacatcgtgttcatgatagtgtatattttactactttttgaatgttaattttaaaatagaagatgtcccacttgccattaaatatagaagccaactttttaccttttgaaatatggctacatttaaaacaaaatctcacagctcggtttttcttatttgttgagtgctattaccaggagaaattcaaataaatattcaatttcattatgaaaaaaaaaat

SEQ ID NO: 454492 - DNA, 1424 bp, Homo sapiens
cgggcgggaggcggccgcgagccgggccggccgcgcgcaagtccggcgccagccgctagagcccccagtgcgcggcccggccgcggggcgcctcgacccgacacaataaactccgagggcgggcgggccgaggggccggtggggccgagcggccgccccgcgcgcatcgccatgtgagcggctgccgcggcttcgcggggacccaactttcccgggcggcggcgcccaacttcccgccgcccgctccggccccgtaggcccgcggcgccaggggaagacgcgagtaagtgcgggcggcggtgccctcccggccctcaccccgcacgcggcgacctcggccgcctagctctcccttcgctcaggcgcgaccgcggcgttctctgagctaaagaagtaaacaggtcatggcacgtttaacaaaaagacgacaggcggatacaaaagctatccagcatctttgggcagccattgagattatacggaaccagaagcagattgccaacattgaccgtattacaaagtatatgtctcgagtccacggtatgcaccctaaagagaccacccgtcagctgagcttagctgtgaaagatggtcttattgtcgaaactctaacagtgggctgcaaaggttcaaaagctggtattgaacaagaaggatattggttgccaggagatgagattgactgggaaacagaaaatcatgactggtattgttttgaatgccatttgcctggagaggtgttgatatgtgacctgtgttttcgtgtgtatcattccaagtgtttgtctgatgagttcaggcttagagacagcagtagtccctggcagtgcccagtttgcaggagcattaagaagaagaatacaaacaaacaggagatgggcacatacctcagattcattgtctcccgcatgaaggagagggctatagatcttaataaaaaggggaaggacaataaacacccgatgtacaggaggctggtgcactcagctgtggacgttcccaccattcaagaggtaaagtcggtttcttttatttccacttcaagtacattttcttaactaacaagttaaagaataatgtagcagttaagcagattttggttgctcttctttccttgaaagtgtacttttttccacttcctaaaacaaaagacaggcataactaccaaatgaagcattattaatttgtaaatttcatgtgcttactctaatgcaaattaggtgtcatctttaaaaggcctggttttaaagatgagcagcttgtagcttcttgatccttgttgatttaagaaaatgccttacagcctgggcaatttagcatttcagatgtaaagaatgttttccaggtttagcagtggtacctgagagttcctctcagaaaaaaaaagtaaagcatagaactgatctgccgtcttgggaaacaat

SEQ ID NO: 454493 - DNA, 663 bp, Homo sapiens
gtaagttgcccacctcgcagtatccaggtggcaaatgaaacaggaaatattttcaaagtattttgtattttcaaagtatttcaaagacagtcactcttggtggatacttgtgaaattcagctgctgtcagtcaaatcatatccatcaagttgaaaccagtcttctgacttccctgtcattatctgttaccctggaatagcgtacatgctccaagtctccatcttaattaagcagccgctgaccaaagcttggctaagtaggaagggcacattgctattaatacatttcctgggagctctgatatttttcctaagtatgattaaaaacaacacatttatccagtatatcagttgtgccaacatttaaaaacttgaaggagactgtggttgagctcagccgttttaagtgatataagccctgcatgttttaaaactgtaaatctgggcacatttcaaacacatattcagtgagaagtggtttaggatttgaggaaatgtgttaatgaatctagtccaatgaagtaattataagttgacaataatttttatattctataaatttctgtgtttagtttattttaaaaacaaaacttatagtattgataagtaaaattataaatgaagcttatgtttataattattgtagctgttaattgcatgttct

SEQ ID NO: 454494 - DNA, 355 bp, Homo sapiens
tagtgagaatctcctcaggatgactaaaaatctgtacttctctcccgtgccaaatttaaaaaaattctgattcatggaaatctcatcagcctgttgtctgggttgcacaattatcagccttggctgataaaatgaaatcagacattctcatggaaatggattttgcctctttgggaatgatatggcaggtgtcaaaacatcttcatttatgatatactgaattcagagaagctcagctatactagattttcagtaatcctagatcataatatttattcccatttcattttttcttttaagaagtacattctttgaaatatattttcctgacattaacattgacaaaatggatgta

SEQ ID NO: 454495 - DNA, 690 bp, Homo sapiens
ggccctgtcgacctgtaggcgggcgagcgagccagcggacaagactgcgggtgaggctgagctagcgagcggccggcagggggggcgcccgggctgcgagccgctgagcccagccgcgctgccgccgccggccgtcgtggggccggaatggcgcaaggccggagtggcgcgggcgctcggcgctgggctgccgggtagagtcctgtccccgcccctcgccttgcggcctgacgccggccgctgctgcccggggaccggagcggcgggccgcctttgcccaggacacacgctctggcgtttgttcctttgggcgtgacgccagcttcaacgggtacgcggctttcccgacgggtgctgatctccgagtcgctgttgtcacgcggactgctgtcctccagattcaggccggtgggtctggggagcccggattggtcttggaggagcaacggctgcgcaggtgactcggtggcctcaagtgttaggtacctggatggcgcgaggagatgctggctctgaaatacttcccaattccgcttgcagatgaactccggactagagtttaggctacagacaagttaggcggttgatgtgattctgtagctcgtatttcgaactttagggatgttttgatgtatcagtaaatgtagatctgtgtcacagttttaatggcagcttcacattccggatatc

SEQ ID NO: 454496 - DNA, 369 bp, Homo sapiens
tattgaaaactttaaaatttaggcttaaaagattaagaaacaaaattcaacactatttatatacgtgaatgttaatttacatggatacattttatatagtttaatgtgtatgtatattttatgtaggctaaagtagtttcttttctttttcagctggatgaactgcagctttgcaagaattgcttttacttgtcaaatgctcgtcctgacaactggttctgttatccttgtgtatgtgaaatttttacctcaagtgtgtaacatacagctctaaggaagtttatttccagtttggttaaagattataattttcttcctaaatttttaaaatatcatagtatatatgggtttaatgagtataaacaactg

SEQ ID NO: 454497 - DNA, 457 bp, Homo sapiens
tgtggatggccttgctccagtcccgacctcttctgaggaataaggttcatgttggcactctgatgcaaatataaaatcagtcaatcccagaaaaaaaatctcgtatgtgtttaggagttatgaaagaaatattttagaaataatggattatatgtgactagtttaatattaatggtacacttgcatttaatactttaaaagtaatataacaaggtaaaacatttaatttccagatacctaatcatgagctggtttgggctaaaatgaaaggttttgggttttggccagccaaagtcatgcagaaagaagacaatcaagtcgacgttcgcttctttggccaccaccaccagaggtaatttgtgatcccatgttcagcggtcacagctgtgcttatgaagtccttaagaaagtttgatgatttctccatcagagatgcatgaagtttattttaaattgg

SEQ ID NO: 454498 - DNA, 4961 bp, Homo sapiens
cgggcgggaggcggccgcgagccgggccggccgcgcgcaagtccggcgccagccgctagagcccccagtgcgcggcccggccgcggggcgcctcgacccgacacaataaactccgagggcgggcgggccgaggggccggtggggccgagcggccgccccgcgcgcatcgccatgtgagcggctgccgcggcttcgcggggacccaactttcccgggcggcggcgcccaacttcccgccgcccgctccggccccgtaggcccgcggcgccaggggaagacgcgagtaagtgcgggcggcggtgccctcccggccctcaccccgcacgcggcgacctcggccgcctagctctcccttcgctcaggcgcgaccgcggcgttctctgagctaaagaagtaaacaggtcatggcacgtttaacaaaaagacgacaggcggatacaaaagctatccagcatctttgggcagccattgagattatacggaaccagaagcagattgccaacattgaccgtattacaaagtatatgtctcgagtccacggtatgcaccctaaagagaccacccgtcagctgagcttagctgtgaaagatggtcttattgtcgaaactctaacagtgggctgcaaaggttcaaaagctggtattgaacaagaaggatattggttgccaggagatgagattgactgggaaacagaaaatcatgactggtattgttttgaatgccatttgcctggagaggtgttgatatgtgacctgtgttttcgtgtgtatcattccaagtgtttgtctgatgagttcaggcttagagacagcagtagtccctggcagtgcccagtttgcaggagcattaagaagaagaatacaaacaaacaggagatgggcacatacctcagattcattgtctcccgcatgaaggagagggctatagatcttaataaaaaggggaaggacaataaacacccgatgtacaggaggctggtgcactcagctgtggacgttcccaccattcaagagaaagtgaatgaagggaaataccgaagttatgaagagttcaaagctgatgcccaattgcttctccacaataccgtgattttctatggagcagacagtgagcaagctgacattgcgaggatgctatataaagacacatgtcatgagctggatgaactgcagctttgcaagaattgcttttacttgtcaaatgctcgtcctgacaactggttctgttatccttgtatacctaatcatgagctggtttgggctaaaatgaaaggttttgggttttggccagccaaagtcatgcagaaagaagacaatcaagtcgacgttcgcttctttggccaccaccaccagagggcctggattccttctgaaaacattcaagatatcacagtcaacattcatcggctgcacgtgaagcgcagtatgggttggaaaaaggcctgtgatgagctggagctgcatcagcgtttcctacgagaagggagattttggaaatctaagaatgaggaccgaggtgaggaagaggcagaatccagtatctcctccaccagtaatgagcagctaaaggtcactcaagaaccaagagcaaagaaaggacgacgtaatcaaagtgtggagcccaaaaaggaagaaccagagcctgaaacagaagcagtaagttctagccaggaaatacccacgatgcctcagcccatcgaaaaagtctccgtgtcaactcagacaaagaagttaagtgcctcttcaccaagaatgctgcatcggagcacccagaccacaaacgacggcgtgtgtcagagcatgtgccatgacaaatacaccaagatcttcaatgacttcaaagaccggatgaagtcggaccacaagcgggagacagagcgtgttgtccgagaagctctggagaagctgcgttctgaaatggaagaagaaaagagacaagctgtaaataaagctgtagccaacatgcagggtgagatggacagaaaatgtaagcaagtaaaggaaaagtgtaaggaggaatttgtagaagaaatcaagaagctggcaacacagcacaagcaactgatttctcagaccaagaagaagcagtggtgctacaactgtgaggaggaggccatgtaccactgctgctggaacacatcctactgctccatcaagtgccagcaggagcactggcacgcggagcacaagcgcacctgccgccggaaaagatgaagctggcccttcccggagtcaccccgatgattactcttttcagacacagcggtttttgtttccaagaagccaaaattgtttagaatttgcttcccattttgcaccagcctttaaacacttttcgtgaagaaattttgcacagtagtttaaatcttttgttaatgctcctccgaagtttttcagggggtaaaagtaacatcagtggagggtattattttaaataaattttaattgagaatttgttgcattttcagcaaattttaaaacatttttaggttttacagagattttaacctttaaacaacagatctttaaaaaacaggtgaatacaagtgagtttaacaaagaaacatttagaatagatctgaatgtaagaactacagaactgtttcagaaataaaacatactaccttgatgtgacatttttttcttaaccttgttgagctggttttgttcagcttaatttactgttcaaaggcattatctgttggtcacaccagtgggtatatgattgaatttagggaacagggttgacacagcagggctagtcctgcatattttttcttaaatatttcccaattgtgtttttcattatttcttttcaatatataacttttataacaaattattagctttgatcttgtagtttaaaattgcagggaactggggtaatcttttactgagctggatcttagagaaaatgaatatttaaattttaaagtttgcacatttcatctttgtcctaacatgagtgcttgtaacaaaataaacaacaaaaacaaagccaaaaactacctttatccatatgtgaaattatagatgaggcatacgaatttgtttaatgcttcccttcccttcccacatatcatctcactgcctattatctggtgtcacctcatgtatcgtaagttaatactaaaagaagagaaagcacttaagtttcacagaagccgttatgtttgtagtaatgggtcattgcctactaatgaactccatcactgtacacagaatgaagaataatgcatgttaattttcttgtattaaagatgccgtgatttgtaaaaagtctgtattttgcggaatgtctggattaagaagcattaccaataggaatggatcgatagttgaataatgattttttatacatagatatataaaatacagccaggaaaacttaaattacttttcttttaaaatatctcacaatttatgtggtatttttaaagactgatcttagaccaagtcaaattcccatttatcatttagttattttttgaggttagagaataatttgtacatatttatttagacctttgatatttattaaagcaattactcacaatggaagtgaaagaatcaggagaaaagccttttaaaaagtattctccaggtttgtcagggtcactctaaagataaaaatgtaactaagtcttctgtgaaatatcatccatctaatcttgatgctgttgcagatggtggtgacacaagttaattgacaaactactgccaaatggtgcacaatattttgtaaaaagtacccagtagccccatttcatacaatgtacctaaattatgcagtaacttggcatcatcgttccctccttgttgctgtgtaattagtcagtgttgccacagtgtgtggcgctgatggagatgtcagaaccgagaacacttaaccttctttgattgtttttcaagttttaagacttcgatccacccctatgagagcaagtaattgtggaaatatttttggtgtaaaatcattccagagtatgtaatatttaactgatagctgcatgaaagtgagattcgtgttactttggcttttctgtctctgttgacacggttgcacatttccaagttactacagcgtgaaaactgtgtgtttaaaaaaaaacaaaattaaaaaaagagattgtggcctggttttgtaaaagttttaggtaaaattacaattgattgttttaggaatcattattaaaaattttctgcaaatcataaagctatatcgaggtgttgagcttagccactatgcacattgtaattattcattgtggctgtccagttctatgatgcattctggcattttgtaagctgctctgactagcaatatatagattcatttaatgtgttaacattggttaataaatgtatttaaaaaaaactaaaaaaaaaaaaacaaacaacaaaaacacacaaccaacaacaacaaaaaaaacacaaaccaacaaaaaaaacacacacacacaacaaacaacacaaaaaaaagaagcgggggcggcgcgcccgcccaaaaaaaaccccccggcggggggagccccacacctccccccccccacctttttaacaaaggacgcgccccccacaggggcgcccaaaaacaccgaagcgacggcgcgcgcaaacccacccgtgggccgagagaccaaacgccctgtcggcatctcttgggagagcacaccctccctccgcggggcgaaaacagaggcggaaccccagccaacacagaaaattacgcggcgcggcaacaaacactgccgcgctatggggtcaccccggcaattctgcgctgaacaaactggcggataattataaaattagggggcagtgataacaaccccagacgatgcggcagtcactgcgaccacacgctctagcatacctcctaagacaggccgctgagaccgcgtgtgccgagcgcacgcgacccaaccaagagatcgcggaagccctcgcaggacatccagc

SEQ ID NO: 454499 - DNA, 4490 bp, Homo sapiens
cggcacgaggggaggcggcaccggaggggagggcagcgggcggcggcggcggcggtggaggagccggagcataatgctaaagaagtaaacaggtcatggcacgtttaacaaaaagacgacaggcggatacaaaagctatccagcatctttgggcagccattgagattatacggaaccagaagcagattgccaacattgaccgtattacaaagtatatgtctcgagtccacggtatgcaccctaaagagaccacccgtcagctgagcttagctgtgaaagatggtcttattgtcgaaactctaacagtgggctgcaaaggttcaaaagctggtattgaacaagaaggatattggttgccaggagatgagattagcattaagaagaagaatacaaacaaacaggagatgggcacatacctcagattcattgtctcccgcatgaaggagagggctatagatcttaataaaaaggggaaggacaataaacacccgatgtacaggaggctggtgcactcagctgtggacgttcccaccattcaagagaaagtgaatgaagggaaataccgaagttatgaagagttcaaagctgatgcccaattgcttctccacaataccgtgattttctatggagcagacagtgagcaagctgacattgcgaggatgctatataaagacacatgtcatgagctggatgaactgcagctttgcaagaattgcttttacttgtcaaatgctcgtcctgacaactggttctgttatccttgtatacctaatcatgagctggtttgggctaaaatgaaaggttttgggttttggccagccaaagtcatgcagaaagaagacaatcaagtcgacgttcgcttctttggccaccaccaccagagggcctggattccttctgaaaacattcaagatatcacagtcaacattcatcggctgcacgtgaagcgcagtatgggttggaaaaaggcctgtgatgagctggagctgcatcagcgtttcctacgagaagggagattttggaaatctaagaatgaggaccgaggtgaggaagaggcagaatccagtatctcctccaccagtaatgagcagctaaaggtcactcaagaaccaagagcaaagaaaggacgacgtaatcaaagtgtggagcccaaaaaggaagaaccagagcctgaaacagaagcagtaagttctagccaggaaatacccacgatgcctcagcccatcgaaaaagtctccgtgtcaactcagacaaagaagttaagtgcctcttcaccaagaatgctgcatcggagcacccagaccacaaacgacggcgtgtgtcagagcatgtgccatgacaaatacaccaagatcttcaatgacttcaaagaccggatgaagtcggaccacaagcgggagacagagcgtgttgtccgagaagctctggagaagctgcgttctgaaatggaagaagaaaagagacaagctgtaaataaagctgtagccaacatgcagggtgagatggacagaaaatgtaagcaagtaaaggaaaagtgtaaggaggaatttgtagaagaaatcaagaagctggcaacacagcacaagcaactgatttctcagaccaagaagaagcagtggtgctacaactgtgaggaggaggccatgtaccactgctgctggaacacatcctactgctccatcaagtgccagcaggagcactggcacgcggagcacaagcgcacctgccgccggaaaagatgaagctggcccttcccggagtcaccccgatgattactcttttcagacacagcggtttttgtttccaagaagccaaaattgtttagaatttgcttcccattttgcaccagcctttaaacacttttcgtgaagaaattttgcacagtagtttaaatcttttgttaatgctcctccgaagtttttcagggggtaaaagtaacatcagtggagggtattattttaaataaattttaattgagaatttgttgcattttcagcaaattttaaaacatttttaggttttacagagattttaacctttaaacaacagatctttaaaaaacaggtgaatacaagtgagtttaacaaagaaacatttagaatagatctgaatgtaagaactacagaactgtttcagaaataaaacatactaccttgatgtgacatttttttcttaaccttgttgagctggttttgttcagcttaatttactgttcaaaggcattatctgttggtcacaccagtgggtatatgattgaatttagggaacagggttgacacagcagggctagtcctgcatattttttcttaaatatttcccaattgtgtttttcattatttcttttcaatatataacttttataacaaattattagctttgatcttgtagtttaaaattgcagggaactggggtaatcttttactgagctggatcttagagaaaatgaatatttaaattttaaagtttgcacatttcatctttgtcctaacatgagtgcttgtaacaaaataaacaacaaaaacaaagccaaaaactacctttatccatatgtgaaattatagatgaggcatacgaatttgtttaatgcttcccttcccttcccacatatcatctcactgcctattatctggtgtcacctcatgtatcgtaagttaatactaaaagaagagaaagcacttaagtttcacagaagccgttatgtttgtagtaatgggtcattgcctactaatgaactccatcactgtacacagaatgaagaataatgcatgttaattttcttgtattaaagatgccgtgatttgtaaaaagtctgtattttgcggaatgtctggattaagaagcattaccaataggaatggatcgatagttgaataatgattttttatacatagatatataaaatacagccaggaaaacttaaattacttttcttttaaaatatctcacaatttatgtggtatttttaaagactgatcttagaccaagtcaaattcccatttatcatttagttattttttgaggttagagaataatttgtacatatttatttagacctttgatatttattaaagcaattactcacaatggaagtgaaagaatcaggagaaaagccttttaaaaagtattctccaggtttgtcagggtcactctaaagataaaaatgtaactaagtcttctgtgaaatatcatccatctaatcttgatgctgttgcagatggtggtgacacaagttaattgacaaactactgccaaatggtgcacaatattttgtaaaaagtacccagtagccccatttcatacaatgtacctaaattatgcagtaacttggcatcatcgttccctccttgttgctgtgtaattagtcagtgttgccacagtgtgtggcgctgatggagatgtcagaaccgagaacacttaaccttctttgattgtttttcaagttttaagacttcgatccacccctatgagagcaagtaattgtggaaatatttttggtgtaaaatcattccagagtatgtaatatttaactgatagctgcatgaaagtgagattcgtgttactttggcttttctgtctctgttgacacggttgcacatttccaagttactacagcgtgaaaactgtgtgtttaaaaaaaaacaaaattaaaaaaagagattgtggcctggttttgtaaaagttttaggtaaaattacaattgattgttttaggaatcattattaaaaattttctgcaaatcataaagctatatcgaggtgttgagcttagccactatgcacattgtaattattcattgtggctgtccagttctatgatgcattctggcattttgtaagctgctctgactagcaatatatagattcatttaatgtgttaacattggttaataaatgtatttaaaaaaaactaaaaaaaaaaaaacaaacaacaaaaacacacaaccaacaacaacaaaaaaaacacaaaccaacaaaaaaaacacacacacacaacaaacaacacaaaaaaaagaagcgggggcggcgcgcccgcccaaaaaaaaccccccggcggggggagccccacacctccccccccccacctttttaacaaaggacgcgccccccacaggggcgcccaaaaacaccgaagcgacggcgcgcgcaaacccacccgtgggccgagagaccaaacgccctgtcggcatctcttgggagagcacaccctccctccgcggggcgaaaacagaggcggaaccccagccaacacagaaaattacgcggcgcggcaacaaacactgccgcgctatggggtcaccccggcaattctgcgctgaacaaactggcggataattataaaattagggggcagtgataacaaccccagacgatgcggcagtcactgcgaccacacgctctagcatacctcctaagacaggccgctgagaccgcgtgtgccgagcgcacgcgacccaaccaagagatcgcggaagccctcgcaggacatccagc

SEQ ID NO: 454500 - DNA, 3391 bp, Homo sapiens
cgggcgggaggcggccgcgagccgggccggccgcgcgcaagtccggcgccagccgctagagcccccagtgcgcggcccggccgcggggcgcctcgacccgacacaataaactccgagggcgggcgggccgaggggccggtggggccgagcggccgccccgcgcgcatcgccatgtgagcggctgccgcggcttcgcggggacccaactttcccgggcggcggcgcccaacttcccgccgcccgctccggccccgtaggcccgcggcgccaggggaagacgcgagtaagtgcgggcggcggtgccctcccggccctcaccccgcacgcggcgacctcggccgcctagctctcccttcgctcaggcgcgaccgcggcgttctctgagctaaagaagtaaacaggtcatggcacgtttaacaaaaagacgacaggcggatacaaaagctatccagcatctttgggcagccattgagattatacggaaccagaagcagattgccaacattgaccgtattacaaaatgtgaaacaactacattattcttgaacctatggtgatttttacatcattacacagatatgtcattttcattagttgtatcattgttataaactggtatatgtctcgagtccacggtatgcaccctaaagagaccacccgtcagctgagcttagctgtgaaagatggtcttattgtcgaaactctaacagtgggctgcaaaggttcaaaagctggtattgaacaagaaggatattggttgccaggagatgagattgactgggaaacagaaaatcatgactggtattgttttgaatgccatttgcctggagaggtgttgatatgtgacctgtgttttcgtgtgtatcattccaagtgtttgtctgatgagttcaggcttagagacagcagtagtccctggcagtgcccagtttgcaggagcattaagaagaagaatacaaacaaacaggagatgggcacatacctcagattcattgtctcccgcatgaaggagagggctatagatcttaataaaaaggggaaggacaataaacacccgatgtacaggaggctggtgcactcagctgtggacgttcccaccattcaagagaaagtgaatgaagggaaataccgaagttatgaagagttcaaagctgatgcccaattgcttctccacaataccgtgattttctatggagcagacagtgagcaagctgacattgcgaggatgctatataaagacacatgtcatgagctggatgaactgcagctttgcaagaattgcttttacttgtcaaatgctcgtcctgacaactggttctgttatccttgtatacctaatcatgagctggtttgggctaaaatgaaaggttttgggttttggccagccaaagtcatgcagaaagaagacaatcaagtcgacgttcgcttctttggccaccaccaccagagggcctggattccttctgaaaacattcaagatatcacagtcaacattcatcggctgcacgtgaagcgcagtatgggttggaaaaaggcctgtgatgagctggagctgcatcagcgtttcctacgagaagggagattttggaaatctaagaatgaggaccgaggtgaggaagaggcagaatccagtatctcctccaccagtaatgagcagctaaaggtcactcaagaaccaagagcaaagaaaggacgacgtaatcaaagtgtggagcccaaaaaggaagaaccagagcctgaaacagaagcagtaagttctagccaggaaatacccacgatgcctcagcccatcgaaaaagtctccgtgtcaactcagacaaagaagttaagtgcctcttcaccaagaatgctgcatcggagcacccagaccacaaacgacggcgtgtgtcagagcatgtgccatgacaaatacaccaagatcttcaatgacttcaaagaccggatgaagtcggaccacaagcgggagacagagcgtgttgtccgagaagctctggagaagctgcgttctgaaatggaagaagaaaagagacaagctgtaaataaagctgtagccaacatgcagggtgagatggacagaaaatgtaagcaagtaaaggaaaagtgtaaggaggaatttgtagaagaaatcaagaagctggcaacacagcacaagcaactgatttctcagaccaagaagaagcagtggtgctacaactgtgaggaggaggccatgtaccactgctgctggaacacatcctactgctccatcaagtgccagcaggagcactggcacgcggagcacaagcgcacctgccgccggaaaagatgaagctggcccttcccggagtcaccccgatgattactcttttcagacacagcggtttttgtttccaagaagccaaaattgtttagaatttgcttcccattttgcaccagcctttaaacacttttcgtgaagaaattttgcacagtagtttaaatcttttgttaatgctcctccgaagtttttcagggggtaaaagtaacatcagtggagggtattattttaaataaattttaattgagaatttgttgcattttcagcaaattttaaaacatttttaggttttacagagattttaacctttaaacaacagatctttaaaaaacaggtgaatacaagtgagtttaacaaagaaacatttagaatagatctgaatgtaagaactacagaactgtttcagaaataaaacatactaccttgatgtgacatttttttcttaaccttgttgagctggttttgttcagcttaatttactgttcaaaggcattatctgttggtcacaccagtgggtatatgattgaatttagggaacagggttgacacagcagggctagtcctgcatattttttcttaaatatttcccaattgtgtttttcattatttcttttcaatatataacttttataacaaattattagctttgatcttgtagtttaaaattgcagggaactggggtaatcttttactgagctggatcttagagaaaatgaatatttaaattttaaagtttgcacatttcatctttgtcctaacatgagtgcttgtaacaaaataaacaacaaaaacaaagccaaaaactacctttatccatatgtgaaattatagatgaggcatacgaatttgtttaatgcttcccttcccttcccacatatcatctcactgcctattatctggtgtcacctcatgtatcgtaagttaatactaaaagaagagaaagcacttaagtttcacagaagccgttatgtttgtagtaatgggtcattgcctactaatgaactccatcactgtacacagaatgaagaataatgcatgttaattttcttgtattaaagatgccgtgatttgtaaaaagtctgtattttgcggaat

SEQ ID NO: 454501 - DNA, 2266 bp, Homo sapiens
cgggcgggaggcggccgcgagccgggccggccgcgcgcaagtccggcgccagccgctagagcccccagtgcgcggcccggccgcggggcgcctcgacccgacacaataaactccgagggcgggcgggccgaggggccggtggggccgagcggccgccccgcgcgcatcgccatgtgagcggctgccgcggcttcgcggggacccaactttcccgggcggcggcgcccaacttcccgccgcccgctccggccccgtaggcccgcggcgccaggggaagacgcgagtaagtgcgggcggcggtgccctcccggccctcaccccgcacgcggcgacctcggccgcctagctctcccttcgctcaggcgcgaccgcggcgttctctgagctaaagaagtaaacaggtcatggcacgtttaacaaaaagacgacaggcggatacaaaagctatccagcatctttgggcagccattgagattatacggaaccagaagcagattgccaacattgaccgtattacaaagtatatgtctcgagtccacggtatgcaccctaaagagaccacccgtcagctgagcttagctgtgaaagatggtcttattgtcgaaactctaacagtgggctgcaaaggttcaaaagctggtattgaacaagaaggatattggttgccaggagatgagattgactgggaaacagaaaatcatgactggtattgttttgaatgccatttgcctggagaggtgttgatatgtgacctgtgttttcgtgtgtatcattccaagtgtttgtctgatgagttcaggcttagagacagcagtagtccctggcagtgcccagtttgcaggagcattaagaagaagaatacaaacaaacaggagatgggcacatacctcagattcattgtctcccgcatgaaggagagggctatagatcttaataaaaaggggaaggacaataaacacccgatgtacaggaggctggtgcactcagctgtggacgttcccaccattcaagagaaagtgaatgaagggaaataccgaagttatgaagagttcaaagctgatgcccaattgcttctccacaataccgtgattttctatggagcagacagtgagcaagctgacattgcgaggatgctatataaagacacatgtcatgagctggatgaactgcagctttgcaagaattgcttttacttgtcaaatgctcgtcctgacaactggttctgttatccttgtatacctaatcatgagctggtttgggctaaaatgaaaggttttgggttttggccagccaaagtcatgcagaaagaagacaatcaagtcgacgttcgcttctttggccaccaccaccagagggcctggattccttctgaaaacattcaagatatcacagtcaacattcatcggctgcacgtgaagcgcagtatgggttggaaaaaggcctgtgatgagctggagctgcatcagcgtttcctacgagaagggagattttggaaatctaagaatgaggaccgaggtgaggaagaggcagaatccagtatctcctccaccagtaatgagcagctaaaggtcactcaagaaccaagagcaaagaaaggacgacgtaatcaaagtgtggagcccaaaaaggaagaaccagagcctgaaacagaagcagtaagttctagccaggaaatacccacgatgcctcagcccatcgaaaaagtctccgtgtcaactcagacaaagaagttaagtgcctcttcaccaagaatgctgcatcggagcacccagaccacaaacgacggcgtgtgtcagagcatgtgccatgacaaatacaccaagatcttcaatgacttcaaagaccggatgaagtcggaccacaagcgggagacagagcgtgttgtccgagaagctctggagaagctgcgttctgaaatggaagaagaaaagagacaagctgtaaataaagctgtagccaacatgcagggtgagatggacagaaaatgtaagcaagtaaaggaaaagtgtaaggaggaatttgtagaagaaatcaagaagctggcaacacagcacaagcaactgatttctcagaccaagaagaagcagtgggtaaataccagtcttttttagacccttatttctgaaaatgtaccacaggtatgatgcccgttaattcagaaggtagctgtggcacatgcagaagatgtttctgaaataagatcaaatgtgaaatggtcagctttagttttaaaaattttattaaaagtcctatgatctctcaaccc

SEQ ID NO: 454502 - DNA, 3049 bp, Homo sapiens
attggtaggtggtgtcacaaaggggcggggcgcggcggcagcggagcgttgtcggccagtgccttccgtgaagttgctcgccgggtcgttgggccctgtcgacctgtaggcgggcgagcgagccagcggacaagactgcgggtgaggctgagctagcgagcggccggcagggggggcgcccgggctgcgagccgctgagcccagccgcgctgccgccgccggccgtcgtggggccggaatggcgcaaggccggagtggcgcgggcgctcggcgctgggctgccgggtagagtcctgtccccgcccctcgccttgcggcctgacgccggccgctgctgcccggggaccggagcggcgggccgcctttgcccaggacacacgctctggcgtttgttcctttgggcgtgacgccagcttcaacgggtacgcggctttcccgacgggtgctgatctccgagtcgctgttgtcacgcggactgctgtcctccagattcaggccggtgggtctggggagcccggattggtcttggaggagcaacggctgcgcaggtacaaaactcaaaacatgaacaacaatatatattaccaatcttcaaacctggtttgcctagaactggaatacagttgcctgcgacatattttagaagaactagaaaagtcaaagtaatggataacagaaaagagcctccattcttcaatgatgataacatgggaccattttactacagacttcatttctgtgataccatggagctcttcattgaaacattaactggaacatgttttgagctgagagtttcaccttttgaaactgttatttctgtgaaagcaaaaattcgaagattggaaggtattcccatctgtcgacaacacttaatttggaataacatggaacttgaaaatgattattgcttgaatgattacaacatttcagaagggtgtaccttgaagctagttttggctatgcgtggcggacctataaatactagaagagttcctacagacgatccacttaggaagatggcagagtacttggattccagtcgagttgaggtctgggagaagacctcctgcagcaaacaagttacatttttggtataccaagaaggagatcaattgaatttctttcctgcagtagataggggagatggcactttaacaccgttatctgactcttcaaagaaaatagattttcatttgcatgtcctacggagaaaaggagaacatcgtatgagtggtggttctatgtataattcagatacagatgaggatgaagaaactgagccttcttcttctgggcaacagataattgaaaattcaataactatgaataagatgaagctgctgaaggctaagatgaagaacatgaatctcagcaaaaagcctaagaaagctgtcaagataaaacctcacccacctgtagctcctcgaccttctagtggttccactgcaccatctcgccaccgattgttaagggtcctccccaacattggtcaatcttgttcacctgcttttgggaatgcatatccgcccgaaatctccaggaatggaatttcaagtttggcaactcaactctctgctgagagatacatatcttctatcactggtgaatttcttaaggaagataatagctgggagaataacacactgtctcacttcagtagcaacgtcaaactacctcctcagataccccatttggagttgggaaatgaccaggagcttgctgactctgttctccatcttggatcatccctgcctaggcaaacaaaacattttttaggaaacttgccatctagtaatgggaacattgtcttaccttcagaagaatgtgtaaccgaacaatcacttctacctaaagtgggctcactggcttcatttgcagaaggaaatgctgatgaacagagcagcggcttagaaggtgcgtgcaaagtgaatctggagttgctactcactaatgctgacaaagggttgaaagctccagagcagcatctcaagcatgttgcaggagtgctgaatggggaatcagtagagacttcagttcttaactaccgggaattaagtcctcacaagaatagactcttgtcacctcttcgctgttctgcaccaatgtcgctacataattctctggtgaaaccagagagacagtccaaatgttttgagtttgggaagctacagccttcttcttctcagtcactggatgttcaaaacataactgattcttctttctctaggactacttgctttcaaggtgttaaagttgattcacttgggaaaagatctgatgttatttccaaagttgaggctcgggatatcacagaaatgactaacaaggcttccaaagagcctgttggttgtgtaaataatatcagttttcttgcctcactggccgggagcacaagcagaaatagattacagagcacacgtggggcaggcaggcttcagaactctggaactgggctgtctacaaacctccagcattttcaggaagaaaactttaggaaaagttctccccagttagaacatacaggagtttttttggagaatgtactactcatcacctcccacctgtgaaagcccctcttcagacaaagaagaaaacaacaaatcattgttttctttgtggaaagaaaacaggactggctagtagctacgaatgcaggcaggttggcgagctggagaagctcagatgctttctctgtgataacccagcttggggattatgcaaaataaaatatttaaattgcctgtttataacatcattaagatgatgttcaatagctatcttcagttgaacttctaattggctgaagtaaagaacaagtagatagctcatgggtttccaaaagacaaaaacagatccttccttgtcctttaagttaggaggtttaaaccaatctgagagtgtacctttttcgtcttatgatgaacctgcttggattttgtttgagtggcaccttggaagaacccctccctgaatattctattaaaaatttaattaaaaaattaaaagttaatataaaatagatgaataatatatttccaaaaaagta

SEQ ID NO: 454503 - DNA, 3827 bp, Homo sapiens
attggtaggtggtgtcacaaaggggcggggcgcggcggcagcggagcgttgtcggccagtgccttccgtgaagttgctcgccgggtcgttgggccctgtcgacctgtaggcgggcgagcgagccagcggacaagactgcgggtgaggctgagctagcgagcggccggcagggggggcgcccgggctgcgagccgctgagcccagccgcgctgccgccgccggccgtcgtggggccggaatggcgcaaggccggagtggcgcgggcgctcggcgctgggctgccgggtagagtcctgtccccgcccctcgccttgcggcctgacgccggccgctgctgcccggggaccggagcggcgggccgcctttgcccaggacacacgctctggcgtttgttcctttgggcgtgacgccagcttcaacgggtacgcggctttcccgacgggtgctgatctccgagtcgctgttgtcacgcggactgctgtcctccagattcaggccggtgggtctggggagcccggattggtcttggaggagcaacggctgcgcaggtgactcggtggcctcaagtgtgtacaaaactcaaaacatgaacaacaatatatattaccaatcttcaaacctggtttgcctagaactggaatacagttgcctgcgacatattttagaagaactagaaaagtcaaagtaatggataacagaaaagagcctccattcttcaatgatgataacatgggaccattttactacagacttcatttctgtgataccatggagctcttcattgaaacattaactggaacatgttttgagctgagagtttcaccttttgaaactgttatttctgtgaaagcaaaaattcgaagattggaagacccaggagatcctactgaagtgagtggctggccgagtccagtgaccacatcagcacattcagtaatgactcttgaagcttttgtctgccctaaatgatttggtattcccatctgtcgacaacacttaatttggaataacatggaacttgaaaatgattattgcttgaatgattacaacatttcagaagggtgtaccttgaagctagttttggctatgcgtggcggacctataaatactagaagagttcctacagacgatccacttaggaagatggcagagtacttggattccagtcgagttgaggtctgggagaagacctcctgcagcaaacaagttacatttttggtataccaagaaggagatcaattgaatttctttcctgcagtagataggggagatggcactttaacaccgttatctgactcttcaaagaaaatagattttcatttgcatgtcctacggagaaaaggagaacatcgtatgagtggtggttctatgtataattcagatacagatgaggatgaagaaactgagccttcttcttctgggcaacagataattgaaaattcaataactatgaataagatgaagctgctgaaggctaagatgaagaacatgaatctcagcaaaaagcctaagaaagctgtcaagataaaacctcacccacctgtagctcctcgaccttctagtggttccactgcaccatctcgccaccgattgttaagggtcctccccaacattggtcaatcttgttcacctgcttttgggaatgcatatccgcccgaaatctccaggaatggaatttcaagtttggcaactcaactctctgctgagagatacatatcttctatcactggtgaatttcttaaggaagataatagctgggagaataacacactgtctcacttcagtagcaacgtcaaactacctcctcagataccccatttggagttgggaaatgaccaggagcttgctgactctgttctccatcttggatcatccctgcctaggcaaacaaaacattttttaggaaacttgccatctagtaatgggaacattgtcttaccttcagaagaatgtgtaaccgaacaatcacttctacctaaagtgggctcactggcttcatttgcagaaggaaatgctgatgaacagagcagcggcttagaaggtgcgtgcaaagtgaatctggagttgctactcactaatgctgacaaagggttgaaagctccagagcagcatctcaagcatgttgcaggagtgctgaatggggaatcagtagagacttcagttcttaactaccgggaattaagtcctcacaagaatagactcttgtcacctcttcgctgttctgcaccaatgtcgctacataattctctggtgaaaccagagagacagtccaaatgttttgagtttgggaagctacagccttcttcttctcagtcactggatgttcaaaacataactgattcttctttctctaggactacttgctttcaaggtgttaaagttgattcacttgggaaaagatctgatgttatttccaaagttgaggctcgggatatcacagaaatgactaacaaggcttccaaagagcctgttggttgtgtaaataatatcagttttcttgcctcactggccgggagcacaagcagaaatagattacagagcacacgtggggcaggcaggcttcagaactctggaactgggctgtctacaaacctccagcattttcaggaagaaaactttaggaaaagttctccccagttagaacatacaggagtttttttgtctacccatggtgttggaatgaatggaaataatgcagcagcagggaaaagcgtaggagaatgtactactcatcacctcccacctgtgaaagcccctcttcagacaaagaagaaaacaacaaatcattgttttctttgtggaaagaaaacaggactggctagtagctacgaatgcagatgtggaaacaacttctgtgcatctcatcgttatgcagaaactcatggctgtacctatgattacaagagtgcagggaggagatacttgcacgaggcaaatcctgtggttaatgcaccaaagcttccaaaaatctaactcttcctctacatcttactgttctgcccgggattcgtattataatgacagaagaaatgttgtttagactattatttttgttcgactctaaaagatttgccaaataacaaaagcatacaatgcatactgttggagaacaagaatgctactgtattttacatctttatttcttggtgaaacaaaagttttaaaagtagttttaacaactttacactggaatgatttagctttgttattgcatgtcttgtgttaagtgttttgtatatgatattgcagttttactaggcaaatcttcaaaagatgcactttaggaaacgaaatatttcctaaataaccaggcttccacattgtacagaatgagcagtcatgtaatgaatggctctactcagattgaccatatgggttttttctttttctttcttttattcttctccttctttttttttcagaggtgggatgggtggagattttttaaaaatcccacgtgtgaaagtttactggctttattagcaagttcctttttacttcaagctactttttataaaaaagaacatttttccagtgtggtttttaacagataatacatttcttccacattcagattagtattcggacatgaatccattctataaaacacatcgtgttcatgatagtgtatattttactactttttgaatgttaattttaaaatagaagatgtcccacttgccattaaatatagaagccaactttttaccttttgaaatatggctacatttaaaacaaaatctcacagctcggtttttcttatttgttgagtgctattaccaggagaaattcaaataaatattcaatttcattatgaaaaaaaaaat

SEQ ID NO: 454504 - DNA, 3296 bp, Homo sapiens
attggtaggtggtgtcacaaaggggcggggcgcggcggcagcggagcgttgtcggccagtgccttccgtgaagttgctcgccgggtcgttgggccctgtcgacctgtaggcgggcgagcgagccagcggacaagactgcgggtacaaaactcaaaacatgaacaacaatatatattaccaatcttcaaacctggtttgcctagaactggaatacagttgcctgcgacatattttagaagaactagaaaagtcaaagtaatggataacagaaaagagcctccattcttcaatgatgataacatgggaccattttactacagacttcatttctgtgataccatggagctcttcattgaaacattaactggaacatgttttgagctgagagtttcaccttttgaaactgttatttctgtgaaagcaaaaattcgaagattggaaggtattcccatctgtcgacaacacttaatttggaataacatggaacttgaaaatgattattgcttgaatgattacaacatttcagaagggtgtaccttgaagctagttttggctatgcgtggcggacctataaatactagaagagttcctacagacgatccacttaggaagatggcagagtacttggattccagtcgagttgaggtctgggagaagacctcctgcagcaaacaagttacatttttggtataccaagaaggagatcaattgaatttctttcctgcagtagataggggagatggcactttaacaccgttatctgactcttcaaagaaaatagattttcatttgcatgtcctacggagaaaaggagaacatcgtatgagtggtggttctatgtataattcagatacagatgaggatgaagaaactgagccttcttcttctgggcaacagataattgaaaattcaataactatgaataagatgaagctgctgaaggctaagatgaagaacatgaatctcagcaaaaagcctaagaaagctgtcaagataaaacctcacccacctgtagctcctcgaccttctagtggttccactgcaccatctcgccaccgattgttaagggtcctccccaacattggtcaatcttgttcacctgcttttgggaatgcatatccgcccgaaatctccaggaatggaatttcaagtttggcaactcaactctctgctgagagatacatatcttctatcactggtgaatttcttaaggaagataatagctgggagaataacacactgtctcacttcagtagcaacgtcaaactacctcctcagataccccatttggagttgggaaatgaccaggagcttgctgactctgttctccatcttggatcatccctgcctaggcaaacaaaacattttttaggaaacttgccatctagtaatgggaacattgtcttaccttcagaagaatgtgtaaccgaacaatcacttctacctaaagtgggctcactggcttcatttgcagaaggaaatgctgatgaacagagcagcggcttagaaggtgcgtgcaaagtgaatctggagttgctactcactaatgctgacaaagggttgaaagctccagagcagcatctcaagcatgttgcaggagtgctgaatggggaatcagtagagacttcagttcttaactaccgggaattaagtcctcacaagaatagactcttgtcacctcttcgctgttctgcaccaatgtcgctacataattctctggtgaaaccagagagacagtccaaatgttttgagtttgggaagctacagccttcttcttctcagtcactggatgttcaaaacataactgattcttctttctctaggactacttgctttcaaggtgttaaagttgattcacttgggaaaagatctgatgttatttccaaagttgaggctcgggatatcacagaaatgactaacaaggcttccaaagagcctgttggttgtgtaaataatatcagttttcttgcctcactggccgggagcacaagcagaaatagattacagagcacacgtggggcaggcaggcttcagaactctggaactgggctgtctacaaacctccagcattttcaggaagaaaactttaggaaaagttctccccagttagaacatacaggagtttttttgtctacccatggtgttggaatgaatggaaataatgcagcagcagggaaaagcgtaggagaatgtactactcatcacctcccacctgtgaaagcccctcttcagacaaagaagaaaacaacaaatcattgttttctttgtggaaagaaaacaggactggctagtagctacgaatgcagatgtggaaacaacttctgtgcatctcatcgttatgcagaaactcatggctgtacctatgattacaagagtgcagggaggagatacttgcacgaggcaaatcctgtggttaatgcaccaaagcttccaaaaatctaactcttcctctacatcttactgttctgcccgggattcgtattataatgacagaagaaatgttgtttagactattatttttgttcgactctaaaagatttgccaaataacaaaagcatacaatgcatactgttggagaacaagaatgctactgtattttacatctttatttcttggtgaaacaaaagttttaaaagtagttttaacaactttacactggaatgatttagctttgttattgcatgtcttgtgttaagtgttttgtatatgatattgcagttttactaggcaaatcttcaaaagatgcactttaggaaacgaaatatttcctaaataaccaggcttccacattgtacagaatgagcagtcatgtaatgaatggctctactcagattgaccatatgggttttttctttttctttcttttattcttctccttctttttttttcagaggtgggatgggtggagattttttaaaaatcccacgtgtgaaagtttactggctttattagcaagttcctttttacttcaagctactttttataaaaaagaacatttttccagtgtggtttttaacagataatacatttcttccacattcagattagtattcggacatgaatccattctataaaacacatcgtgttcatgatagtgtatattttactactttttgaatgttaattttaaaatagaagatgtcccacttgccattaaatatagaagccaactttttaccttttgaaatatggctacatttaaaacaaaatctcacagctcggtttttcttatttgttgagtgctattaccaggagaaattcaaataaatattcaatttcattatgaaaaaaaaaat

SEQ ID NO: 454505 - DNA, 3577 bp, Homo sapiens
attggtaggtggtgtcacaaaggggcggggcgcggcggcagcggagcgttgtcggccagtgccttccgtgaagttgctcgccgggtcgttgggccctgtcgacctgtaggcgggcgagcgagccagcggacaagactgcgggtgaggctgagctagcgagcggccggcagggggggcgcccgggctgcgagccgctgagcccagccgcgctgccgccgccggccgtcgtggggccggaatggcgcaaggccggagtggcgcgggcgctcggcgctgggctgccgggtagagtcctgtccccgcccctcgccttgcggcctgacgccggccgctgctgcccggggaccggagcggcgggccgcctttgcccaggacacacgctctggcgtttgttcctttgggcgtgacgccagcttcaacgggtacaaaactcaaaacatgaacaacaatatatattaccaatcttcaaacctggtttgcctagaactggaatacagttgcctgcgacatattttagaagaactagaaaagtcaaagtaatggataacagaaaagagcctccattcttcaatgatgataacatgggaccattttactacagacttcatttctgtgataccatggagctcttcattgaaacattaactggaacatgttttgagctgagagtttcaccttttgaaactgttatttctgtgaaagcaaaaattcgaagattggaaggtattcccatctgtcgacaacacttaatttggaataacatggaacttgaaaatgattattgcttgaatgattacaacatttcagaagggtgtaccttgaagctagttttggctatgcgtggcggacctataaatactagaagagttcctacagacgatccacttaggaagatggcagagtacttggattccagtcgagttgaggtctgggagaagacctcctgcagcaaacaagttacatttttggtataccaagaaggagatcaattgaatttctttcctgcagtagataggggagatggcactttaacaccgttatctgactcttcaaagaaaatagattttcatttgcatgtcctacggagaaaaggagaacatcgtatgagtggtggttctatgtataattcagatacagatgaggatgaagaaactgagccttcttcttctgggcaacagataattgaaaattcaataactatgaataagatgaagctgctgaaggctaagatgaagaacatgaatctcagcaaaaagcctaagaaagctgtcaagataaaacctcacccacctgtagctcctcgaccttctagtggttccactgcaccatctcgccaccgattgttaagggtcctccccaacattggtcaatcttgttcacctgcttttgggaatgcatatccgcccgaaatctccaggaatggaatttcaagtttggcaactcaactctctgctgagagatacatatcttctatcactggtgaatttcttaaggaagataatagctgggagaataacacactgtctcacttcagtagcaacgtcaaactacctcctcagataccccatttggagttgggaaatgaccaggagcttgctgactctgttctccatcttggatcatccctgcctaggcaaacaaaacattttttaggaaacttgccatctagtaatgggaacattgtcttaccttcagaagaatgtgtaaccgaacaatcacttctacctaaagtgggctcactggcttcatttgcagaaggaaatgctgatgaacagagcagcggcttagaaggtgcgtgcaaagtgaatctggagttgctactcactaatgctgacaaagggttgaaagctccagagcagcatctcaagcatgttgcaggagtgctgaatggggaatcagtagagacttcagttcttaactaccgggaattaagtcctcacaagaatagactcttgtcacctcttcgctgttctgcaccaatgtcgctacataattctctggtgaaaccagagagacagtccaaatgttttgagtttgggaagctacagccttcttcttctcagtcactggatgttcaaaacataactgattcttctttctctaggactacttgctttcaaggtgttaaagttgattcacttgggaaaagatctgatgttatttccaaagttgaggctcgggatatcacagaaatgactaacaaggcttccaaagagcctgttggttgtgtaaataatatcagttttcttgcctcactggccgggagcacaagcagaaatagattacagagcacacgtggggcaggcaggcttcagaactctggaactgggctgtctacaaacctccagcattttcaggaagaaaactttaggaaaagttctccccagttagaacatacaggagtttttttgtctacccatggtgttggaatgaatggaaataatgcagcagcagggaaaagcgtaggagaatgtactactcatcacctcccacctgtgaaagcccctcttcagacaaagaagaaaacaacaaatcattgttttctttgtggaaagaaaacaggactggctagtagctacgaatgcagatgtggaaacaacttctgtgcatctcatcgttatgcagaaactcatggctgtacctatgattacaagagtgcagggaggagatacttgcacgaggcaaatcctgtggttaatgcaccaaagcttccaaaaatctaactcttcctctacatcttactgttctgcccgggattcgtattataatgacagaagaaatgttgtttagactattatttttgttcgactctaaaagatttgccaaataacaaaagcatacaatgcatactgttggagaacaagaatgctactgtattttacatctttatttcttggtgaaacaaaagttttaaaagtagttttaacaactttacactggaatgatttagctttgttattgcatgtcttgtgttaagtgttttgtatatgatattgcagttttactaggcaaatcttcaaaagatgcactttaggaaacgaaatatttcctaaataaccaggcttccacattgtacagaatgagcagtcatgtaatgaatggctctactcagattgaccatatgggttttttctttttctttcttttattcttctccttctttttttttcagaggtgggatgggtggagattttttaaaaatcccacgtgtgaaagtttactggctttattagcaagttcctttttacttcaagctactttttataaaaaagaacatttttccagtgtggtttttaacagataatacatttcttccacattcagattagtattcggacatgaatccattctataaaacacatcgtgttcatgatagtgtatattttactactttttgaatgttaattttaaaatagaagatgtcccacttgccattaaatatagaagccaactttttaccttttgaaatatggctacatttaaaacaaaatctcacagctcggtttttcttatttgttgagtgctattaccaggagaaattcaaataaatattcaatttcattatgaaaaaaaaaat

SEQ ID NO: 454506 - DNA, 1495 bp, Homo sapiens
attggtaggtggtgtcacaaaggggcggggcgcggcggcagcggagcgttgtcggccagtgccttccgtgaagttgctcgccgggtcgttgggccctgtcgacctgtaggcgggcgagcgagccagcggacaagactgcgggtgaggctgagctagcgagcggccggcagggggggcgcccgggctgcgagccgctgagcccagccgcgctgccgccgccggccgtcgtggggccggaatggcgcaaggccggagtggcgcgggcgctcggcgctgggctgccgggtagagtcctgtccccgcccctcgccttgcggcctgacgccggccgctgctgcccggggaccggagcggcgggccgcctttgcccaggacacacgctctggcgtttgttcctttgggcgtgacgccagcttcaacgggtacgcggctttcccgacgggtgctgatctccgagtcgctgttgtcacgcggactgctgtcctccagattcaggccggtgggtctggggagcccggattggtcttggaggagcaacggctgcgcaggtacaaaactcaaaacatgaacaacaatatatattaccaatcttcaaacctggtttgcctagaactggaatacagttgcctgcgacatattttagaagaactagaaaagtcaaagtaatggataacagaaaagagcctccattcttcaatgatgataacatgggaccattttactacagacttcatttctgtgataccatggagctcttcattgaaacattaactggaacatgttttgagctgagagtttcaccttttgaaactgttatttctgtgaaagcaaaaattcgaagattggaaggtattcccatctgtcgacaacacttaatttggaataacatggaacttgaaaatgattattgcttgaatgattacaacatttcagaagggtgtaccttgaagctagttttggctatgcgtggcggacctataaatactagaagagttcctacagacgatccacttaggaagatggcagagtacttggattccagtcgagttgaggtctgggagaagacctcctgcagcaaacaagttacatttttggtataccaagaaggagatcaattgaatttctttcctgcagtagataggggagatggcactttaacaccgttatctgactcttcaaagaaaatagattttcatttgcatgtcctacggagaaaaggagaacatcgtatgagtggtggttctatgtataattcagatacagatgaggatgaagaaactgagccttcttcttctgggcaacagataattgaaaattcaataactatgaataagatgaagctgctgaaggctaagatgaagaacatgaatctcagcaaaaaggtgaagctgttggcatttgaccaggcttatctctagcttacccctgcagagcactcagcaatgaggtctgttggtcattgtgaaaaaattataaagtattattcattaaaaaa

SEQ ID NO: 454507 - DNA, 5726 bp, Homo sapiens
ccggctgcctctgctgcagttcagagcaacttcaggagcttcccagccgagagcttcaggacgcctttcctgtcccactggcccagttgccacaacaaacaacagagaagacggtgaccatgggggatgtgaagctggttgcctcgtcacacatttccaaaacctccctcagtgtggatccctcaagagttgactccatgcccctgacagaggcccctgctttcattttgccccctcggaacctctgcatcaaagaaggagccaccgccaagttcgaagggcgggtccggggttacccagagccccaggtgacatggcacagaaacgggcaacccatcaccagcgggggccgcttcctgctggattgcggcatccgggggactttcagccttgtgattcatgctgtccatgaggaggacaggggaaagtatacctgtgaagccaccaatggcagtggtgctcgccaggtgacagtggagttgacagtagaaggaagttttgcgaagcagcttggtcagcctgttgtttccaaaaccttaggggatagattttcagcttcagcagtggagacccgtcctagcatctggggggagtgcccaccaaagtttgctaccaagctgggccgagttgtggtcaaagaaggacagatgggacgattctcctgcaagatcactggccggccccaaccgcaggtcacctggctcaagggaaatgttccactgcagccgagtgcccgtgtgtctgtgtctgagaagaacggcatgcaggttctggaaatccatggagtcaaccaagatgacgtgggagtgtacacgtgcctggtggtgaacgggtcggggaaggcctcgatgtcagctgaactttccatccaaggtttggacagtgccaataggtcatttgtgagagaaacaaaagccaccaattcagatgtcaggaaagaggtgaccaatgtaatctcaaaggagtcgaagctggacagtctggaggctgcagccaaaagcaagaactgctccagcccccagagaggtggctccccaccctgggctgcaaacagccagcctcagcccccaagggagtccaagctggagtcatgcaaggactcgcccagaacggccccgcagaccccggtccttcagaagacttccagctccatcaccctgcaggccgcaagagttcagccggaaccaagagcaccaggcctgggggtcctatcaccttctggagaagagaggaagaggccagctcctccccgtccagccaccttccccaccaggcagcctggcctggggagccaagatgttgtgagcaaggctgctaacaggagaatccccatggagggccagagggattcagcattccccaaatttgagagcaagccccaaagccaggaggtcaaggaaaatcaaactgtcaagttcagatgtgaagggcttgccgtgatggaggtggccccctccttctccagtgtcctgaaggactgcgctgttattgagggccaggattttgtgctgcagtgctccgtacgggggaccccagtgccccggatcacttggctgctgaatgggcagcccatccagtacgctcgctccacctgcgaggccggcgtggctgagctccacatccaggatgccctgccggaggaccatggcacctacacctgcctagctgagaatgccttggggcaggtgtcctgcagcgcctgggtcaccgtccatgaaaagaagagtagcaggaagagtgagtaccttctgcctgtggctcccagcaagcccactgcacccatcttcctgcagggcctctctgatctcaaagtcatggatggaagccaggtcactatgactgtccaagtgtcagggaatccaccccctgaagtcatctggctgcacaatgggaatgagatccaagagtcagaggacttccactttgaacagagaggaactcagcacagcctttggatccaggaagtgttcccggaggacacgggcacgtacacctgcgaggcctggaacagcgctggagaggtccgcacccaggccgtgctcacggtacaagagcctcacgatggcacccagccctggttcatcagtaagcctcgctcagtgacagcctccctgggccagagtgtcctcatctcctgcgccatagctggtgacccctttcctaccgtgcactggctcagagatggcaaagccctctgcaaagacactggccacttcgaggtgcttcagaatgaggacgtgttcaccctggttctaaagaaggtgcagccctggcatgccggccagtatgagatcctgctcaagaaccgggttggcgaatgcagttgccaggtgtcactgatgctacagaacagctctgccagagcccttccacgggggagggagcctgccagctgcgaggacctctgtggtggaggagttggtgctgatggtggtggtagtgaccgctatgggtccctgaggcctggctggccagcaagagggcagggttggctagaggaggaagacggcgaggacgtgcgaggggtgctgaagaggcgcgtggagacgaggcagcacactgaggaggcgatccgccagcaggaggtggagcagctggacttccgagacctcctggggaagaaggtgagtacaaagaccctatcggaagacgacctgaaggagatcccagccgagcagatggatttccgtgccaacctgcagcggcaagtgaagccaaagactgtgtctgaggaagagaggaaggtgcacagcccccagcaggtcgattttcgctctgtcctggccaagaaggggacttccaagacccccgtgcctgagaaggtgccaccgccaaaacctgccaccccggattttcgctcagtgctgggtggcaagaagaaattaccagcagagaatggcagcagcagtgccgagaccctgaatgccaaggcagtggagagttccaagcccctgagcaatgcacagccttcagggcccttgaaacccgtgggcaacgccaagcctgctgagaccctgaagccaatgggcaacgccaagcctgccgagaccctgaagcccatgggcaatgccaagcctgatgagaacctgaaatccgctagcaaagaagaactcaagaaagacgttaagaatgatgtgaactgcaagagaggccatgcagggaccacagataatgaaaagagatcagagagccaggggacagccccagccttcaagcagaagctgcaagatgttcatgtggcagagggcaagaagctgctgctccagtgccaggtgtcttctgaccccccagccaccatcatctggacgctgaatggaaagaccctcaagaccaccaagttcatcatcctctcccaggaaggctcactctgctccgtctccatcgagaaggcactgcctgaggacagaggcttatacaagtgtgtagccaagaatgacgctggccaggcggagtgctcctgccaagtcaccgtggatgatgctccagccagtgagaacaccaaggccccagagatgaaatcccggaggcccaagagctctcttcctcccgtgctaggaactgagagtgatgcgactgtgaaaaagaaacctgcccccaagacacctccgaaggcagcaatgccccctcagatcatccagttccctgaggaccagaaggtacgcgcaggagagtcagtggagctgtttggcaaagtgacaggcactcagcccatcacctgtacctggatgaagttccgaaagcagatccaggaaagcgagcacatgaaggtggagaacagcgagaatggcagcaagctcaccatcctggccgcgcgccaggagcactgcggctgctacacactgctggtggagaacaagctgggcagcaggcaggcccaggtcaacctcactgtcgtggataagccagaccccccagctggcacaccttgtgcctctgacattcggagctcctcactgaccctgtcctggtatggctcctcatatgatgggggcagtgctgtacagtcctacagcatcgagatctgggactcagccaacaagacgtggaaggaactagccacatgccgcagcacctctttcaacgtccaggacctgctgcctgaccacgaatataagttccgtgtacgtgcaatcaacgtgtatggaaccagtgagccaagccaggagtctgaactcacaacggtaggagagaaacctgaagagccgaaggatgaagtggaggtgtcagatgatgatgagaaggagcccgaggttgattaccggacagtgacaatcaatactgaacaaaaagtatctgacttctacgacattgaggagagattaggatctgggaaatttggacaggtctttcgacttgtagaaaagaaaactcgaaaagtctgggcagggaagttcttcaaggcatattcagcaaaagagaaagagaatatccggcaggagattagcatcatgaactgcctccaccaccctaagctggtccagtgtgtggatgcctttgaagaaaaggccaacatcgtcatggtcctggagatcgtgtcaggaggggagctgtttgagcgcatcattgacgaggactttgagctgacggagcgtgagtgcatcaagtacatgcggcagatctcggagggagtggagtacatccacaagcagggcatcgtgcacctggacctcaagccggagaacatcatgtgtgtcaacaagacgggcaccaggatcaagctcatcgactttggtctggccaggaggctggagaatgcggggtctctgaaggtcctctttggcaccccagaatttgtggctcctgaagtgatcaactatgagcccatcggctacgccacagacatgtggagcatcggggtcatctgctacatcctagtcagtggcctttcccccttcatgggagacaacgataacgaaaccttggccaacgttacctcagccacctgggacttcgacgacgaggcattcgatgagatctccgacgatgccaaggatttcatcagcaatctgctgaagaaagatatgaaaaaccgcctggactgcacgcagtgccttcagcatccatggctaatgaaagataccaagaacatggaggccaagaaactctccaaggaccggatgaagaagtacatggcaagaaggaaatggcagaaaacgggcaatgctgtgagagccattggaagactgtcctctatggcaatgatctcagggctcagtggcaggaaatcctcaacagggtcaccaaccagcccgctcaatgcagaaaaactagaatctgaagaagatgtgtcccaagctttccttgaggctgttgctgaggaaaagcctcatgtaaaaccctatttctctaagaccattcgcgatttagaagttgtggagggaagtgctgctagatttgactgcaagattgaaggatacccagaccccgaggttgtctggttcaaagatgaccagtcaatcagggagtcccgccacttccagatagactacgatgaggacgggaactgctctttaattattagtgatgtttgcggggatgacgatgccaagtacacctgcaaggctgtcaacagtcttggagaagccacctgcacagcagagctcattgtggaaacgatggaggaaggtgaaggggaaggggaagaggaagaagagtgaaacaaagccagagaaaagcagtttctaagtcatattaaaaggactatttctctcaaaatccaaaaaaaa

SEQ ID NO: 454508 - DNA, 5573 bp, Homo sapiens
ccggctgcctctgctgcagttcagagcaacttcaggagcttcccagccgagagcttcaggacgcctttcctgtcccactggcccagttgccacaacaaacaacagagaagacggtgaccatgggggatgtgaagctggttgcctcgtcacacatttccaaaacctccctcagtgtggatccctcaagagttgactccatgcccctgacagaggcccctgctttcattttgccccctcggaacctctgcatcaaagaaggagccaccgccaagttcgaagggcgggtccggggttacccagagccccaggtgacatggcacagaaacgggcaacccatcaccagcgggggccgcttcctgctggattgcggcatccgggggactttcagccttgtgattcatgctgtccatgaggaggacaggggaaagtatacctgtgaagccaccaatggcagtggtgctcgccaggtgacagtggagttgacagtagaaggaagttttgcgaagcagcttggtcagcctgttgtttccaaaaccttaggggatagattttcagcttcagcagtggagacccgtcctagcatctggggggagtgcccaccaaagtttgctaccaagctgggccgagttgtggtcaaagaaggacagatgggacgattctcctgcaagatcactggccggccccaaccgcaggtcacctggctcaagggaaatgttccactgcagccgagtgcccgtgtgtctgtgtctgagaagaacggcatgcaggttctggaaatccatggagtcaaccaagatgacgtgggagtgtacacgtgcctggtggtgaacgggtcggggaaggcctcgatgtcagctgaactttccatccaaggtttggacagtgccaataggtcatttgtgagagaaacaaaagccaccaattcagatgtcaggaaagaggtgaccaatgtaatctcaaaggagtcgaagctggacagtctggaggctgcagccaaaagcaagaactgctccagcccccagagaggtggctccccaccctgggctgcaaacagccagcctcagcccccaagggagtccaagctggagtcatgcaaggactcgcccagaacggccccgcagaccccggtccttcagaagacttccagctccatcaccctgcaggccgcaagagttcagccggaaccaagagcaccaggcctgggggtcctatcaccttctggagaagagaggaagaggccagctcctccccgtccagccaccttccccaccaggcagcctggcctggggagccaagatgttgtgagcaaggctgctaacaggagaatccccatggagggccagagggattcagcattccccaaatttgagagcaagccccaaagccaggaggtcaaggaaaatcaaactgtcaagttcagatgtgaagggcttgccgtgatggaggtggccccctccttctccagtgtcctgaaggactgcgctgttattgagggccaggattttgtgctgcagtgctccgtacgggggaccccagtgccccggatcacttggctgctgaatgggcagcccatccagtacgctcgctccacctgcgaggccggcgtggctgagctccacatccaggatgccctgccggaggaccatggcacctacacctgcctagctgagaatgccttggggcaggtgtcctgcagcgcctgggtcaccgtccatgaaaagaagagtagcaggaagagtgagtaccttctgcctgtggctcccagcaagcccactgcacccatcttcctgcagggcctctctgatctcaaagtcatggatggaagccaggtcactatgactgtccaagtgtcagggaatccaccccctgaagtcatctggctgcacaatgggaatgagatccaagagtcagaggacttccactttgaacagagaggaactcagcacagcctttggatccaggaagtgttcccggaggacacgggcacgtacacctgcgaggcctggaacagcgctggagaggtccgcacccaggccgtgctcacggtacaagagcctcacgatggcacccagccctggttcatcagtaagcctcgctcagtgacagcctccctgggccagagtgtcctcatctcctgcgccatagctggtgacccctttcctaccgtgcactggctcagagatggcaaagccctctgcaaagacactggccacttcgaggtgcttcagaatgaggacgtgttcaccctggttctaaagaaggtgcagccctggcatgccggccagtatgagatcctgctcaagaaccgggttggcgaatgcagttgccaggtgtcactgatgctacagaacagctctgccagagcccttccacgggggagggagcctgccagctgcgaggacctctgtggtggaggagttggtgctgatggtggtggtagtgaccgctatgggtccctgaggcctggctggccagcaagagggcagggttggctagaggaggaagacggcgaggacgtgcgaggggtgctgaagaggcgcgtggagacgaggcagcacactgaggaggcgatccgccagcaggaggtggagcagctggacttccgagacctcctggggaagaaggtgagtacaaagaccctatcggaagacgacctgaaggagatcccagccgagcagatggatttccgtgccaacctgcagcggcaagtgaagccaaagactgtgtctgaggaagagaggaaggtgcacagcccccagcaggtcgattttcgctctgtcctggccaagaaggggacttccaagacccccgtgcctgagaaggtgccaccgccaaaacctgccaccccggattttcgctcagtgctgggtggcaagaagaaattaccagcagagaatggcagcagcagtgccgagaccctgaatgccaaggcagtggagagttccaagcccctgagcaatgcacagccttcagggcccttgaaacccgtgggcaacgccaagcctgctgagaccctgaagccaatgggcaacgccaagcctgccgagaccctgaagcccatgggcaatgccaagcctgatgagaacctgaaatccgctagcaaagaagaactcaagaaagacgttaagaatgatgtgaactgcaagagaggccatgcagggaccacagataatgaaaagagatcagagagccaggggacagccccagccttcaagcagaagctgcaagatgttcatgtggcagagggcaagaagctgctgctccagtgccaggtgtcttctgaccccccagccaccatcatctggacgctgaatggaaagaccctcaagaccaccaagttcatcatcctctcccaggaaggctcactctgctccgtctccatcgagaaggcactgcctgaggacagaggcttatacaagtgtgtagccaagaatgacgctggccaggcggagtgctcctgccaagtcaccgtggatgatgctccagccagtgagaacaccaaggccccagagatgaaatcccggaggcccaagagctctcttcctcccgtgctaggaactgagagtgatgcgactgtgaaaaagaaacctgcccccaagacacctccgaaggcagcaatgccccctcagatcatccagttccctgaggaccagaaggtacgcgcaggagagtcagtggagctgtttggcaaagtgacaggcactcagcccatcacctgtacctggatgaagttccgaaagcagatccaggaaagcgagcacatgaaggtggagaacagcgagaatggcagcaagctcaccatcctggccgcgcgccaggagcactgcggctgctacacactgctggtggagaacaagctgggcagcaggcaggcccaggtcaacctcactgtcgtggataagccagaccccccagctggcacaccttgtgcctctgacattcggagctcctcactgaccctgtcctggtatggctcctcatatgatgggggcagtgctgtacagtcctacagcatcgagatctgggactcagccaacaagacgtggaaggaactagccacatgccgcagcacctctttcaacgtccaggacctgctgcctgaccacgaatataagttccgtgtacgtgcaatcaacgtgtatggaaccagtgagccaagccaggagtctgaactcacaacggtaggagagaaacctgaagagccgaaggatgaagtggaggtgtcagatgatgatgagaaggagcccgaggttgattaccggacagtgacaatcaatactgaacaaaaagtatctgacttctacgacattgaggagagattaggatctgggaaatttggacaggtctttcgacttgtagaaaagaaaactcgaaaagtctgggcagggaagttcttcaaggcatattcagcaaaagagaaagagaatatccggcaggagattagcatcatgaactgcctccaccaccctaagctggtccagtgtgtggatgcctttgaagaaaaggccaacatcgtcatggtcctggagatcgtgtcaggaggggagctgtttgagcgcatcattgacgaggactttgagctgacggagcgtgagtgcatcaagtacatgcggcagatctcggagggagtggagtacatccacaagcagggcatcgtgcacctggacctcaagccggagaacatcatgtgtgtcaacaagacgggcaccaggatcaagctcatcgactttggtctggccaggaggctggagaatgcggggtctctgaaggtcctctttggcaccccagaatttgtggctcctgaagtgatcaactatgagcccatcggctacgccacagacatgtggagcatcggggtcatctgctacatcctaaaccgcctggactgcacgcagtgccttcagcatccatggctaatgaaagataccaagaacatggaggccaagaaactctccaaggaccggatgaagaagtacatggcaagaaggaaatggcagaaaacgggcaatgctgtgagagccattggaagactgtcctctatggcaatgatctcagggctcagtggcaggaaatcctcaacagggtcaccaaccagcccgctcaatgcagaaaaactagaatctgaagaagatgtgtcccaagctttccttgaggctgttgctgaggaaaagcctcatgtaaaaccctatttctctaagaccattcgcgatttagaagttgtggagggaagtgctgctagatttgactgcaagattgaaggatacccagaccccgaggttgtctggttcaaagatgaccagtcaatcagggagtcccgccacttccagatagactacgatgaggacgggaactgctctttaattattagtgatgtttgcggggatgacgatgccaagtacacctgcaaggctgtcaacagtcttggagaagccacctgcacagcagagctcattgtggaaacgatggaggaaggtgaaggggaaggggaagaggaagaagagtgaaacaaagccagagaaaagcagtttctaagtcatattaaaaggactatttctctcaaaatccaaaaaaaa

SEQ ID NO: 454509 - DNA, 342 bp, Homo sapiens
cacactgacagtgctgagcagagcaaggttgggttcgctcctctggcagaacctcggctctcaggaggtccttgttccagggaacagctgcttctctggggctgggctctactccctgcagcccctcgcactacccagctggaaccagggacaacgcctgagtccaaccctcgtgtctattttccagaaaacgggcaatgctgtgagagccattggaagactgtcctctatggcaatgatctcagggctcagtggcaggaaatcctcaacagggtcaccaaccagcccgctcaatgcagaaaaactagaatctgaaggaagatgtgtcccagccagctggtg

SEQ ID NO: 454510 - DNA, 404 bp, Homo sapiens
gctcggtacccactgtggatgatgctccagccagtgagaacaccaaggccccagagatgaaatcccggaggcccaagagctctcttcctcccgtgctaggaactgagagtgatgcgactgtgaaaaagaaacctgcccccaagacacctccgaaggcaggtaattggccacggcactatctggggtcaaagaagtcatctaccatgggggttttgcctttaccttgctagactgacacctgggtatgtgatcccaggagacaccccactgcaaccccacccccaccctcagttccagctctgcatttttcaggctgagtttgctcatggagagcctctgcacagcctggctcctggtccccttccacagctttgtctttccatctgcctcccatgttgacagca

SEQ ID NO: 454511 - DNA, 6589 bp, Homo sapiens
  misc_feature (832)..(832): n is a, c, g, or t
  misc_feature (893)..(893): n is a, c, g, or t
  misc_feature (951)..(951): n is a, c, g, or t
  misc_feature (1001)..(1001): n is a, c, g, or t
tatgcttttctgtacactgctaagttacagcatttgggtttggaattttcagtagatgtttgtttgtccctggattggtttttttttccttctgtttagtgaacagaaacagattccatgccctcagggtatggtagcaccagccactattaagaagcccaaaggacagaacctgaagctttgacaatgtaccctagggctggggggagttcaaaggccaaagacgttcagcaccagggaagctggaaggagccagcagggtgggaccacggtgatgaggaagtgcctggggagggaaattttggtgtatacagcattctactaacagtctttccacccttccccctttttccaggtttggacagtgccaataggtatgtctaggctttgtgacttttacgttttccctcttgaaatgccctgcaaggatgttaccgagaaatgccctgaatttctgaatcatcttatggggcagaagaattggccatttggaggatgttgttttattttgggtgttttgtcttgttctcctattgtaatatgacacacgggttctatctctggttgctgtcagtattgagactggaaaactcagtgttgccacctttcacagtatctacacagtctcttctctggttagcatcctgaggaagaacactgctctgagaaggccgccttcctcattccagggcggaatctgttcactcatccagcccagacccagcaggagcctctttcctgtgtgtgaggctcggcgctagatgctggatgtgcaggggtgggcgtagaggagggcttaaaccacacgaacgcacattaccaactgggatgngtctgtgaggaaggacaacaggaaggcactgattagaatagaggggcagggaagccatttngggaacttggtatttgagctcagacctgtgcaaaggaatgttagctggtgaagaaaanctcagggagtgtgctccaaacagcagggatagcatgtacaagctgtgaancaagagatgggcccatggggacccagaaggacgccagtgtggccgcagcctggtgaatggcaggccaatgtctgtacgatcaggagctggcattcctgtgggccctcttgtggggctcagtttcattcttaaagtagtggaaaagctgttggaaaatccttgggcttgaaatgacataatttgattaatgtttttaaaagatcgactatggtcgctgtatagaaaatagattagagagggcagagtggacacgggacaccggtggcagaggttgaactacggaggcactagtagagaagggaactgtagggaaagcagggctctgggcagggttgtgggacaggcaagtgtcgggaatggctgcttgtgctgtggcttgggaaactgggcaaactgcagagaaagatgctcttacttgcccttaacttgtgggcttttgtgatccctggaatccgtgcttgtgatgagtaatatttgtgagtaaccagatgatcattctattctcccctctcctcacccaccctacccccaccctcaccaccaataggtcatttgtgagagaaacaaaagccaccaattcagatgtcaggaaagaggtgaccaatgtaatctcaaaggagtcgaagctggacagtctggaggctgcagccaaaagcaagaactgctccagcccccagagaggtggctccccaccctgggctgcaaacagccagcctcagcccccaagggagtccaagctggagtcatgcaaggactcgcccagaacggccccgcagaccccggtccttcagaagacttccagctccatcaccctgcaggccgcaagagttcagccggaaccaagagcaccaggcctgggggtcctatcaccttctggagaagagaggaagaggccagctcctccccgtccagccaccttccccaccaggcagcctggcctggggagccaagatgttgtgagcaaggctgctaacaggagaatccccatggagggccagagggattcagcattccccaaatttgagagcaagccccaaagccaggaggtcaaggaaaatcaaactgtcaagttcagatgtgaagtttccgggattccaaagcctgaagtggcctggttcctggaaggcacccccgtgaggagacaggaaggcagcattgaggtttatgaagatgctggctcccattacctctgcctgctgaaagcccggaccagggacagtgggacatacagctgcactgcttccaacgcccaaggccaggtgtcctgtagctggaccctccaagtggaaaggcttgccgtgatggaggtggccccctccttctccagtgtcctgaaggactgcgctgttattgagggccaggattttgtgctgcagtgctccgtacgggggaccccagtgccccggatcacttggctgctgaatgggcagcccatccagtacgctcgctccacctgcgaggccggcgtggctgagctccacatccaggatgccctgccggaggaccatggcacctacacctgcctagctgagaatgccttggggcaggtgtcctgcagcgcctgggtcaccgtccatgaaaagaagagtagcaggaagagtgagtaccttctgcctgtggctcccagcaagcccactgcacccatcttcctgcagggcctctctgatctcaaagtcatggatggaagccaggtcactatgactgtccaagtgtcagggaatccaccccctgaagtcatctggctgcacaatgggaatgagatccaagagtcagaggacttccactttgaacagagaggaactcagcacagcctttggatccaggaagtgttcccggaggacacgggcacgtacacctgcgaggcctggaacagcgctggagaggtccgcacccaggccgtgctcacggtacaagagcctcacgatggcacccagccctggttcatcagtaagcctcgctcagtgacagcctccctgggccagagtgtcctcatctcctgcgccatagctggtgacccctttcctaccgtgcactggctcagagatggcaaagccctctgcaaagacactggccacttcgaggtgcttcagaatgaggacgtgttcaccctggttctaaagaaggtgcagccctggcatgccggccagtatgagatcctgctcaagaaccgggttggcgaatgcagttgccaggtgtcactgatgctacagaacagctctgccagagcccttccacgggggagggagcctgccagctgcgaggacctctgtggtggaggagttggtgctgatggtggtggtagtgaccgctatgggtccctgaggcctggctggccagcaagagggcagggttggctagaggaggaagacggcgaggacgtgcgaggggtgctgaagaggcgcgtggagacgaggcagcacactgaggaggcgatccgccagcaggaggtggagcagctggacttccgagacctcctggggaagaaggtgagtacaaagaccctatcggaagacgacctgaaggagatcccagccgagcagatggatttccgtgccaacctgcagcggcaagtgaagccaaagactgtgtctgaggaagagaggaaggtgcacagcccccagcaggtcgattttcgctctgtcctggccaagaaggggacttccaagacccccgtgcctgagaaggtgccaccgccaaaacctgccaccccggattttcgctcagtgctgggtggcaagaagaaattaccagcagagaatggcagcagcagtgccgagaccctgaatgccaaggcagtggagagttccaagcccctgagcaatgcacagccttcagggcccttgaaacccgtgggcaacgccaagcctgctgagaccctgaagccaatgggcaacgccaagcctgccgagaccctgaagcccatgggcaatgccaagcctgatgagaacctgaaatccgctagcaaagaagaactcaagaaagacgttaagaatgatgtgaactgcaagagaggccatgcagggaccacagataatgaaaagagatcagagagccaggggacagccccagccttcaagcagaagctgcaagatgttcatgtggcagagggcaagaagctgctgctccagtgccaggtgtcttctgaccccccagccaccatcatctggacgctgaatggaaagaccctcaagaccaccaagttcatcatcctctcccaggaaggctcactctgctccgtctccatcgagaaggcactgcctgaggacagaggcttatacaagtgtgtagccaagaatgacgctggccaggcggagtgctcctgccaagtcaccgtggatgatgctccagccagtgagaacaccaaggccccagagatgaaatcccggaggcccaagagctctcttcctcccgtgctaggaactgagagtgatgcgactgtgaaaaagaaacctgcccccaagacacctccgaaggcagcaatgccccctcagatcatccagttccctgaggaccagaaggtacgcgcaggagagtcagtggagctgtttggcaaagtgacaggcactcagcccatcacctgtacctggatgaagttccgaaagcagatccaggaaagcgagcacatgaaggtggagaacagcgagaatggcagcaagctcaccatcctggccgcgcgccaggagcactgcggctgctacacactgctggtggagaacaagctgggcagcaggcaggcccaggtcaacctcactgtcgtggataagccagaccccccagctggcacaccttgtgcctctgacattcggagctcctcactgaccctgtcctggtatggctcctcatatgatgggggcagtgctgtacagtcctacagcatcgagatctgggactcagccaacaagacgtggaaggaactagccacatgccgcagcacctctttcaacgtccaggacctgctgcctgaccacgaatataagttccgtgtacgtgcaatcaacgtgtatggaaccagtgagccaagccaggagtctgaactcacaacggtaggagagaaacctgaagagccgaaggatgaagtggaggtgtcagatgatgatgagaaggagcccgaggttgattaccggacagtgacaatcaatactgaacaaaaagtatctgacttctacgacattgaggagagattaggatctgggaaatttggacaggtctttcgacttgtagaaaagaaaactcgaaaagtctgggcagggaagttcttcaaggcatattcagcaaaagagaaagagaatatccggcaggagattagcatcatgaactgcctccaccaccctaagctggtccagtgtgtggatgcctttgaagaaaaggccaacatcgtcatggtcctggagatcgtgtcaggaggggagctgtttgagcgcatcattgacgaggactttgagctgacggagcgtgagtgcatcaagtacatgcggcagatctcggagggagtggagtacatccacaagcagggcatcgtgcacctggacctcaagccggagaacatcatgtgtgtcaacaagacgggcaccaggatcaagctcatcgactttggtctggccaggaggctggagaatgcggggtctctgaaggtcctctttggcaccccagaatttgtggctcctgaagtgatcaactatgagcccatcggctacgccacagacatgtggagcatcggggtcatctgctacatcctagtcagtggcctttcccccttcatgggagacaacgataacgaaaccttggccaacgttacctcagccacctgggacttcgacgacgaggcattcgatgagatctccgacgatgccaaggatttcatcagcaatctgctgaagaaagatatgaaaaaccgcctggactgcacgcagtgccttcagcatccatggctaatgaaagataccaagaacatggaggccaagaaactctccaaggaccggatgaagaagtacatggcaagaaggaaatggcagaaaacgggcaatgctgtgagagccattggaagactgtcctctatggcaatgatctcagggctcagtggcaggaaatcctcaacagggtcaccaaccagcccgctcaatgcagaaaaactagaatctgaagaagatgtgtcccaagctttccttgaggctgttgctgaggaaaagcctcatgtaaaaccctatttctctaagaccattcgcgatttagaagttgtggagggaagtgctgctagatttgactgcaagattgaaggatacccagaccccgaggttgtctggttcaaagatgaccagtcaatcagggagtcccgccacttccagatagactacgatgaggacgggaactgctctttaattattagtgatgtttgcggggatgacgatgccaagtacacctgcaaggctgtcaacagtcttggagaagccacctgcacagcagagctcattgtggaaacgatggaggaaggtgaaggggaaggggaagaggaagaagagtgaaacaaagccagagaaaagcagtttctaagtcatattaaaaggactatttctctcaaaatccaaaaaaaa

SEQ ID NO: 454512 - DNA, 6385 bp, Homo sapiens
  misc_feature (832)..(832): n is a, c, g, or t
  misc_feature (893)..(893): n is a, c, g, or t
  misc_feature (951)..(951): n is a, c, g, or t
  misc_feature (1001)..(1001): n is a, c, g, or t
tatgcttttctgtacactgctaagttacagcatttgggtttggaattttcagtagatgtttgtttgtccctggattggtttttttttccttctgtttagtgaacagaaacagattccatgccctcagggtatggtagcaccagccactattaagaagcccaaaggacagaacctgaagctttgacaatgtaccctagggctggggggagttcaaaggccaaagacgttcagcaccagggaagctggaaggagccagcagggtgggaccacggtgatgaggaagtgcctggggagggaaattttggtgtatacagcattctactaacagtctttccacccttccccctttttccaggtttggacagtgccaataggtatgtctaggctttgtgacttttacgttttccctcttgaaatgccctgcaaggatgttaccgagaaatgccctgaatttctgaatcatcttatggggcagaagaattggccatttggaggatgttgttttattttgggtgttttgtcttgttctcctattgtaatatgacacacgggttctatctctggttgctgtcagtattgagactggaaaactcagtgttgccacctttcacagtatctacacagtctcttctctggttagcatcctgaggaagaacactgctctgagaaggccgccttcctcattccagggcggaatctgttcactcatccagcccagacccagcaggagcctctttcctgtgtgtgaggctcggcgctagatgctggatgtgcaggggtgggcgtagaggagggcttaaaccacacgaacgcacattaccaactgggatgngtctgtgaggaaggacaacaggaaggcactgattagaatagaggggcagggaagccatttngggaacttggtatttgagctcagacctgtgcaaaggaatgttagctggtgaagaaaanctcagggagtgtgctccaaacagcagggatagcatgtacaagctgtgaancaagagatgggcccatggggacccagaaggacgccagtgtggccgcagcctggtgaatggcaggccaatgtctgtacgatcaggagctggcattcctgtgggccctcttgtggggctcagtttcattcttaaagtagtggaaaagctgttggaaaatccttgggcttgaaatgacataatttgattaatgtttttaaaagatcgactatggtcgctgtatagaaaatagattagagagggcagagtggacacgggacaccggtggcagaggttgaactacggaggcactagtagagaagggaactgtagggaaagcagggctctgggcagggttgtgggacaggcaagtgtcgggaatggctgcttgtgctgtggcttgggaaactgggcaaactgcagagaaagatgctcttacttgcccttaacttgtgggcttttgtgatccctggaatccgtgcttgtgatgagtaatatttgtgagtaaccagatgatcattctattctcccctctcctcacccaccctacccccaccctcaccaccaataggtcatttgtgagagaaacaaaagccaccaattcagatgtcaggaaagaggtgaccaatgtaatctcaaaggagtcgaagctggacagtctggaggctgcagccaaaagcaagaactgctccagcccccagagaggtggctccccaccctgggctgcaaacagccagcctcagcccccaagggagtccaagctggagtcatgcaaggactcgcccagaacggccccgcagaccccggtccttcagaagacttccagctccatcaccctgcaggccgcaagagttcagccggaaccaagagcaccaggcctgggggtcctatcaccttctggagaagagaggaagaggccagctcctccccgtccagccaccttccccaccaggcagcctggcctggggagccaagatgttgtgagcaaggctgctaacaggagaatccccatggagggccagagggattcagcattccccaaatttgagagcaagccccaaagccaggaggtcaaggaaaatcaaactgtcaagttcagatgtgaagtttccgggattccaaagcctgaagtggcctggttcctggaaggcacccccgtgaggagacaggaaggcagcattgaggtttatgaagatgctggctcccattacctctgcctgctgaaagcccggaccagggacagtgggacatacagctgcactgcttccaacgcccaaggccaggtgtcctgtagctggaccctccaagtggaaaggcttgccgtgatggaggtggccccctccttctccagtgtcctgaaggactgcgctgttattgagggccaggattttgtgctgcagtgctccgtacgggggaccccagtgccccggatcacttggctgctgaatgggcagcccatccagtacgctcgctccacctgcgaggccggcgtggctgagctccacatccaggatgccctgccggaggaccatggcacctacacctgcctagctgagaatgccttggggcaggtgtcctgcagcgcctgggtcaccgtccatgaaaagaagagtagcaggaagagtgagtaccttctgcctgtggctcccagcaagcccactgcacccatcttcctgcagggcctctctgatctcaaagtcatggatggaagccaggtcactatgactgtccaagtgtcagggaatccaccccctgaagtcatctggctgcacaatgggaatgagatccaagagtcagaggacttccactttgaacagagaggaactcagcacagcctttggatccaggaagtgttcccggaggacacgggcacgtacacctgcgaggcctggaacagcgctggagaggtccgcacccaggccgtgctcacggtacaagagcctcacgatggcacccagccctggttcatcagtaagcctcgctcagtgacagcctccctgggccagagtgtcctcatctcctgcgccatagctggtgacccctttcctaccgtgcactggctcagagatggcaaagccctctgcaaagacactggccacttcgaggtgcttcagaatgaggacgtgttcaccctggttctaaagaaggtgcagccctggcatgccggccagtatgagatcctgctcaagaaccgggttggcgaatgcagttgccaggtgtcactgatgctacagaacagctctgccagagcccttccacgggggagggagcctgccagctgcgaggacctctgtggtggaggagttggtgctgatggtggtggtagtgaccgctatgggtccctgaggcctggctggccagcaagagggcagggttggctagaggaggaagacggcgaggacgtgcgaggggtgctgaagaggcgcgtggagacgaggcagcacactgaggaggcgatccgccagcaggaggtggagcagctggacttccgagacctcctggggaagaaggtgagtacaaagaccctatcggaagacgacctgaaggagatcccagccgagcagatggatttccgtgccaacctgcagcggcaagtgaagccaaagactgtgtctgaggaagagaggaaggtgcacagcccccagcaggtcgattttcgctctgtcctggccaagaaggggacttccaagacccccgtgcctgagaaggtgccaccgccaaaacctgccaccccggattttcgctcagtgctgggtggcaagaagaaattaccagcagagaatggcagcagcagtgccgagaccctgaatgccaaggcagtggagagttccaagcccctgagcaatgcacagccttcagggcccttgaaacccgtgggcaacgccaagcctgctgagaccctgaagccaatgggcaacgccaagcctgccgagaccctgaagcccatgggcaatgccaagcctgatgagaacctgaaatccgctagcaaagaagaactcaagaaagacgttaagaatgatgtgaactgcaagagaggccatgcagggaccacagataatgaaaagagatcagagagccaggggacagccccagccttcaagcagaagctgcaagatgttcatgtggcagagggcaagaagctgctgctccagtgccaggtgtcttctgaccccccagccaccatcatctggacgctgaatggaaagaccctcaagaccaccaagttcatcatcctctcccaggaaggctcactctgctccgtctccatcgagaaggcactgcctgaggacagaggcttatacaagtgtgtagccaagaatgacgctggccaggcggagtgctcctgccaagtcaccgtggatgatgctccagccagtgagaacaccaaggccccagagatgaaatcccggaggcccaagagctctcttcctcccgtgctaggaactgagagtgatgcgactgtgaaaaagaaacctgcccccaagacacctccgaaggcagcaatgccccctcagatcatccagttccctgaggaccagaaggtacgcgcaggagagtcagtggagctgtttggcaaagtgacaggcactcagcccatcacctgtacctggatgaagttccgaaagcagatccaggaaagcgagcacatgaaggtggagaacagcgagaatggcagcaagctcaccatcctggccgcgcgccaggagcactgcggctgctacacactgctggtggagaacaagctgggcagcaggcaggcccaggtcaacctcactgtcgtggataagccagaccccccagctggcacaccttgtgcctctgacattcggagctcctcactgaccctgtcctggtatggctcctcatatgatgggggcagtgctgtacagtcctacagcatcgagatctgggactcagccaacaagacgtggaaggaactagccacatgccgcagcacctctttcaacgtccaggacctgctgcctgaccacgaatataagttccgtgtacgtgcaatcaacgtgtatggaaccagtgagccaagccaggagtctgaactcacaacggtaggagagaaacctgaagagccgaaggatgaagtggaggtgtcagatgatgatgagaaggagcccgaggttgattaccggacagtgacaatcaatactgaacaaaaagtatctgacttctacgacattgaggagagattaggatccgtgtcaggaggggagctgtttgagcgcatcattgacgaggactttgagctgacggagcgtgagtgcatcaagtacatgcggcagatctcggagggagtggagtacatccacaagcagggcatcgtgcacctggacctcaagccggagaacatcatgtgtgtcaacaagacgggcaccaggatcaagctcatcgactttggtctggccaggaggctggagaatgcggggtctctgaaggtcctctttggcaccccagaatttgtggctcctgaagtgatcaactatgagcccatcggctacgccacagacatgtggagcatcggggtcatctgctacatcctagtcagtggcctttcccccttcatgggagacaacgataacgaaaccttggccaacgttacctcagccacctgggacttcgacgacgaggcattcgatgagatctccgacgatgccaaggatttcatcagcaatctgctgaagaaagatatgaaaaaccgcctggactgcacgcagtgccttcagcatccatggctaatgaaagataccaagaacatggaggccaagaaactctccaaggaccggatgaagaagtacatggcaagaaggaaatggcagaaaacgggcaatgctgtgagagccattggaagactgtcctctatggcaatgatctcagggctcagtggcaggaaatcctcaacagggtcaccaaccagcccgctcaatgcagaaaaactagaatctgaagaagatgtgtcccaagctttccttgaggctgttgctgaggaaaagcctcatgtaaaaccctatttctctaagaccattcgcgatttagaagttgtggagggaagtgctgctagatttgactgcaagattgaaggatacccagaccccgaggttgtctggttcaaagatgaccagtcaatcagggagtcccgccacttccagatagactacgatgaggacgggaactgctctttaattattagtgatgtttgcggggatgacgatgccaagtacacctgcaaggctgtcaacagtcttggagaagccacctgcacagcagagctcattgtggaaacgatggaggaaggtgaaggggaaggggaagaggaagaagagtgaaacaaagccagagaaaagcagtttctaagtcatattaaaaggactatttctctcaaaatccaaaaaaaa

SEQ ID NO: 454513 - DNA, 1917 bp, Homo sapiens
tgacttgcatgtagactggaaaactagcaaaaaaaagcgagggggccttttttggagcaaataattatacatggggctttccgtacagataagccagaccccccagctggcacaccttgtgcctctgacattcggagctcctcactgaccctgtcctggtatggctcctcatatgatgggggcagtgctgtacagtcctacagcatcgagatctgggactcagccaacaagacgtggaaggaactagccacatgccgcagcacctctttcaacgtccaggacctgctgcctgaccacgaatataagttccgtgtacgtgcaatcaacgtgtatggaaccagtgagccaagccaggagtctgaactcacaacggtaggagagaaacctgaagagccgaaggatgaagtggaggtgtcagatgatgatgagaaggagcccgaggttgattaccggacagtgacaatcaatactgaacaaaaagtatctgacttctacgacattgaggagagattaggatctgggaaatttggacaggtctttcgacttgtagaaaagaaaactcgaaaagtctgggcagggaagttcttcaaggcatattcagcaaaagagaaagagaatatccggcaggagattagcatcatgaactgcctccaccaccctaagctggtccagtgtgtggatgcctttgaagaaaaggccaacatcgtcatggtcctggagatcgtgtcaggaggggagctgtttgagcgcatcattgacgaggactttgagctgacggagcgtgagtgcatcaagtacatgcggcagatctcggagggagtggagtacatccacaagcagggcatcgtgcacctggacctcaagccggagaacatcatgtgtgtcaacaagacgggcaccaggatcaagctcatcgactttggtctggccaggaggctggagaatgcggggtctctgaaggtcctctttggcaccccagaatttgtggctcctgaagtgatcaactatgagcccatcggctacgccacagacatgtggagcatcggggtcatctgctacatcctagtcagtggcctttcccccttcatgggagacaacgataacgaaaccttggccaacgttacctcagccacctgggacttcgacgacgaggcattcgatgagatctccgacgatgccaaggatttcatcagcaatctgctgaagaaagatatgaaaaaccgcctggactgcacgcagtgccttcagcatccatggctaatgaaagataccaagaacatggaggccaagaaactctccaaggaccggatgaagaagtacatggcaagaaggaaatggcagaaaacgggcaatgctgtgagagccattggaagactgtcctctatggcaatgatctcagggctcagtggcaggaaatcctcaacagggtcaccaaccagcccgctcaatgcagaaaaactagaatctgaagaagatgtgtcccaagctttccttgaggctgttgctgaggaaaagcctcatgtaaaaccctatttctctaagaccattcgcgatttagaagttgtggagggaagtgctgctagatttgactgcaagattgaaggatacccagaccccgaggttgtctggttcaaagatgaccagtcaatcagggagtcccgccacttccagatagactacgatgaggacgggaactgctctttaattattagtgatgtttgcggggatgacgatgccaagtacacctgcaaggctgtcaacagtcttggagaagccacctgcacagcagagctcattgtggaaacgatggaggaaggtgaaggggaaggggaagaggaagaagagtgaaacaaagccagagaaaagcagtttctaagtcatattaaaaggactatttctctcaaaatccaaaaaaaa

SEQ ID NO: 454514 - DNA, 1823 bp, Homo sapiens
ctttttccctacactggttgcagggggagggagcctgccagctgcgaggacctctgtggtggaggagttggtgctgatggtggtggtagtgaccgctatggtcctacagcatcgagatctgggactcagccaacaagacgtggaaggaactagccacatgccgcagcacctctttcaacgtccaggacctgctgcctgaccacgaatataagttccgtgtacgtgcaatcaacgtgtatggaaccagtgagccaagccaggagtctgaactcacaacggtaggagagaaacctgaagagccgaaggatgaagtggaggtgtcagatgatgatgagaaggagcccgaggttgattaccggacagtgacaatcaatactgaacaaaaagtatctgacttctacgacattgaggagagattaggatctgggaaatttggacaggtctttcgacttgtagaaaagaaaactcgaaaagtctgggcagggaagttcttcaaggcatattcagcaaaagagaaagagaatatccggcaggagattagcatcatgaactgcctccaccaccctaagctggtccagtgtgtggatgcctttgaagaaaaggccaacatcgtcatggtcctggagatcgtgtcaggaggggagctgtttgagcgcatcattgacgaggactttgagctgacggagcgtgagtgcatcaagtacatgcggcagatctcggagggagtggagtacatccacaagcagggcatcgtgcacctggacctcaagccggagaacatcatgtgtgtcaacaagacgggcaccaggatcaagctcatcgactttggtctggccaggaggctggagaatgcggggtctctgaaggtcctctttggcaccccagaatttgtggctcctgaagtgatcaactatgagcccatcggctacgccacagacatgtggagcatcggggtcatctgctacatcctagtcagtggcctttcccccttcatgggagacaacgataacgaaaccttggccaacgttacctcagccacctgggacttcgacgacgaggcattcgatgagatctccgacgatgccaaggatttcatcagcaatctgctgaagaaagatatgaaaaaccgcctggactgcacgcagtgccttcagcatccatggctaatgaaagataccaagaacatggaggccaagaaactctccaaggaccggatgaagaagtacatggcaagaaggaaatggcagaaaacgggcaatgctgtgagagccattggaagactgtcctctatggcaatgatctcagggctcagtggcaggaaatcctcaacagggtcaccaaccagcccgctcaatgcagaaaaactagaatctgaagaagatgtgtcccaagctttccttgaggctgttgctgaggaaaagcctcatgtaaaaccctatttctctaagaccattcgcgatttagaagttgtggagggaagtgctgctagatttgactgcaagattgaaggatacccagaccccgaggttgtctggttcaaagatgaccagtcaatcagggagtcccgccacttccagatagactacgatgaggacgggaactgctctttaattattagtgatgtttgcggggatgacgatgccaagtacacctgcaaggctgtcaacagtcttggagaagccacctgcacagcagagctcattgtggaaacgatggaggaaggtgaaggggaaggggaagaggaagaagagtgaaacaaagccagagaaaagcagtttctaagtcatattaaaaggactatttctctcaaaatccaaaaaaaa

SEQ ID NO: 454515 - DNA, 1571 bp, Homo sapiens
atgagcctgccccgcttatccgtcacaacggtaggagagaaactgaagagccgaaggatgaagtggaggtgtcagatgatgagaaggagcccgaggttgattaccggacagtgacaatcaatactgaacaaaaagtatctgacttctacgacattgaggagagattaggatctgggaaatttggacaggtctttcgacttgtagaaaagaaaactcgaaaagtctgggcagggaagttcttcaaggcatattcagcaaaagagaaagagaatatccggcaggagattagcatcatgaactgcctccaccaccctaagctggtccagtgtgtggatgcctttgaagaaaaggccaacatcgtcatggtcctggagatcgtgtcaggaggggagctgtttgagcgcatcattgacgaggactttgagctgacggagcgtgagtgcatcaagtacatgcggcagatctcggagggagtggagtacatccacaagcagggcatcgtgcacctggacctcaagccggagaacatcatgtgtgtcaacaagacgggcaccaggatcaagctcatcgactttggtctggccaggaggctggagaatgcggggtctctgaaggtcctctttggcaccccagaatttgtggctcctgaagtgatcaactatgagcccatcggctacgccacagacatgtggagcatcggggtcatctgctacatcctagtcagtggcctttcccccttcatgggagacaacgataacgaaaccttggccaacgttacctcagccacctgggacttcgacgacgaggcattcgatgagatctccgacgatgccaaggatttcatcagcaatctgctgaagaaagatatgaaaaaccgcctggactgcacgcagtgccttcagcatccatggctaatgaaagataccaagaacatggaggccaagaaactctccaaggaccggatgaagaagtacatggcaagaaggaaatggcagaaaacgggcaatgctgtgagagccattggaagactgtcctctatggcaatgatctcagggctcagtggcaggaaatcctcaacagggtcaccaaccagcccgctcaatgcagaaaaactagaatctgaagaagatgtgtcccaagctttccttgaggctgttgctgaggaaaagcctcatgtaaaaccctatttctctaagaccattcgcgatttagaagttgtggagggaagtgctgctagatttgactgcaagattgaaggatacccagaccccgaggttgtctggttcaaagatgaccagtcaatcagggagtcccgccacttccagatagactacgatgaggacgggaactgctctttaattattagtgatgtttgcggggatgacgatgccaagtacacctgcaaggctgtcaacagtcttggagaagccacctgcacagcagagctcattgtggaaacgatggaggaaggtgaaggggaaggggaagaggaagaagagtgaaacaaagccagagaaaagcagtttctaagtcatattaaaaggactatttctctcaaaatccaaaaaaaa

SEQ ID NO: 454516 - DNA, 4371 bp, Homo sapiens
  misc_feature (832)..(832): n is a, c, g, or t
  misc_feature (893)..(893): n is a, c, g, or t
  misc_feature (951)..(951): n is a, c, g, or t
  misc_feature (1001)..(1001): n is a, c, g, or t
tatgcttttctgtacactgctaagttacagcatttgggtttggaattttcagtagatgtttgtttgtccctggattggtttttttttccttctgtttagtgaacagaaacagattccatgccctcagggtatggtagcaccagccactattaagaagcccaaaggacagaacctgaagctttgacaatgtaccctagggctggggggagttcaaaggccaaagacgttcagcaccagggaagctggaaggagccagcagggtgggaccacggtgatgaggaagtgcctggggagggaaattttggtgtatacagcattctactaacagtctttccacccttccccctttttccaggtttggacagtgccaataggtatgtctaggctttgtgacttttacgttttccctcttgaaatgccctgcaaggatgttaccgagaaatgccctgaatttctgaatcatcttatggggcagaagaattggccatttggaggatgttgttttattttgggtgttttgtcttgttctcctattgtaatatgacacacgggttctatctctggttgctgtcagtattgagactggaaaactcagtgttgccacctttcacagtatctacacagtctcttctctggttagcatcctgaggaagaacactgctctgagaaggccgccttcctcattccagggcggaatctgttcactcatccagcccagacccagcaggagcctctttcctgtgtgtgaggctcggcgctagatgctggatgtgcaggggtgggcgtagaggagggcttaaaccacacgaacgcacattaccaactgggatgngtctgtgaggaaggacaacaggaaggcactgattagaatagaggggcagggaagccatttngggaacttggtatttgagctcagacctgtgcaaaggaatgttagctggtgaagaaaanctcagggagtgtgctccaaacagcagggatagcatgtacaagctgtgaancaagagatgggcccatggggacccagaaggacgccagtgtggccgcagcctggtgaatggcaggccaatgtctgtacgatcaggagctggcattcctgtgggccctcttgtggggctcagtttcattcttaaagtagtggaaaagctgttggaaaatccttgggcttgaaatgacataatttgattaatgtttttaaaagatcgactatggtcgctgtatagaaaatagattagagagggcagagtggacacgggacaccggtggcagaggttgaactacggaggcactagtagagaagggaactgtagggaaagcagggctctgggcagggttgtgggacaggcaagtgtcgggaatggctgcttgtgctgtggcttgggaaactgggcaaactgcagagaaagatgctcttacttgcccttaacttgtgggcttttgtgatccctggaatccgtgcttgtgatgagtaatatttgtgagtaaccagatgatcattctattctcccctctcctcacccaccctacccccaccctcaccaccaataggtcatttgtgagagaaacaaaagccaccaattcagatgtcaggaaagaggtgaccaatgtaatctcaaaggagtcgaagctggacagtctggaggctgcagccaaaagcaagaactgctccagcccccagagaggtggctccccaccctgggctgcaaacagccagcctcagcccccaagggagtccaagctggagtcatgcaaggactcgcccagaacggccccgcagaccccggtccttcagaagacttccagctccatcaccctgcaggccgcaagagttcagccggaaccaagagcaccaggcctgggggtcctatcaccttctggagaagagaggaagaggccagctcctccccgtccagccaccttccccaccaggcagcctggcctggggagccaagatgttgtgagcaaggctgctaacaggagaatccccatggagggccagagggattcagcattccccaaatttgagagcaagccccaaagccaggaggtcaaggaaaatcaaactgtcaagttcagatgtgaagtttccgggattccaaagcctgaagtggcctggttcctggaaggcacccccgtgaggagacaggaaggcagcattgaggtttatgaagatgctggctcccattacctctgcctgctgaaagcccggaccagggacagtgggacatacagctgcactgcttccaacgcccaaggccaggtgtcctgtagctggaccctccaagtggaaaggcttgccgtgatggaggtggccccctccttctccagtgtcctgaaggactgcgctgttattgagggccaggattttgtgctgcagtgctccgtacgggggaccccagtgccccggatcacttggctgctgaatgggcagcccatccagtacgctcgctccacctgcgaggccggcgtggctgagctccacatccaggatgccctgccggaggaccatggcacctacacctgcctagctgagaatgccttggggcaggtgtcctgcagcgcctgggtcaccgtccatgaaaagaagagtagcaggaagagtgagtaccttctgcctgtggctcccagcaagcccactgcacccatcttcctgcagggcctctctgatctcaaagtcatggatggaagccaggtcactatgactgtccaagtgtcagggaatccaccccctgaagtcatctggctgcacaatgggaatgagatccaagagtcagaggacttccactttgaacagagaggaactcagcacagcctttggatccaggaagtgttcccggaggacacgggcacgtacacctgcgaggcctggaacagcgctggagaggtccgcacccaggccgtgctcacggtacaagagcctcacgatggcacccagccctggttcatcagtaagcctcgctcagtgacagcctccctgggccagagtgtcctcatctcctgcgccatagctggtgacccctttcctaccgtgcactggctcagagatggcaaagccctctgcaaagacactggccacttcgaggtgcttcagaatgaggacgtgttcaccctggttctaaagaaggtgcagccctggcatgccggccagtatgagatcctgctcaagaaccgggttggcgaatgcagttgccaggtgtcactgatgctacagaacagctctgccagagcccttccacgggggagggagcctgccagctgcgaggacctctgtggtggaggagttggtgctgatggtggtggtagtgaccgctatgggtccctgaggcctggctggccagcaagagggcagggttggctagaggaggaagacggcgaggacgtgcgaggggtgctgaagaggcgcgtggagacgaggcagcacactgaggaggcgatccgccagcaggaggtggagcagctggacttccgagacctcctggggaagaaggtgagtacaaagaccctatcggaagacgacctgaaggagatcccagccgagcagatggatttccgtgccaacctgcagcggcaagtgaagccaaagactgtgtctgaggaagagaggaaggtgcacagcccccagcaggtcgattttcgctctgtcctggccaagaaggggacttccaagacccccgtgcctgagaaggtgccaccgccaaaacctgccaccccggattttcgctcagtgctgggtggcaagaagaaattaccagcagagaatggcagcagcagtgccgagaccctgaatgccaaggcagtggagagttccaagcccctgagcaatgcacagccttcagggcccttgaaacccgtgggcaacgccaagcctgctgagaccctgaagccaatgggcaacgccaagcctgccgagaccctgaagcccatgggcaatgccaagcctgatgagaacctgaaatccgctagcaaagaagaactcaagaaagacgttaagaatgatgtgaactgcaagagaggccatgcagggaccacagataatgaaaagagatcagagagccaggggacagccccagccttcaagcagaagctgcaagatgttcatgtggcagagggcaagaagctgctgctccagtgccaggtgtcttctgaccccccagccaccatcatctggacgctgaatggaaagaccctcaagaccaccaagttcatcatcctctcccaggaaggctcactctgctccgtctccatcgagaaggcactgcctgaggacagaggcttatacaagtgtgtagccaagaatgacgctggccaggcggagtgctcctgccaagtcaccgtggatgattcgcgaatgggtctagctcggttcgtata

SEQ ID NO: 454517 - DNA, 4414 bp, Homo sapiens
  misc_feature (832)..(832): n is a, c, g, or t
  misc_feature (893)..(893): n is a, c, g, or t
  misc_feature (951)..(951): n is a, c, g, or t
  misc_feature (1001)..(1001): n is a, c, g, or t
tatgcttttctgtacactgctaagttacagcatttgggtttggaattttcagtagatgtttgtttgtccctggattggtttttttttccttctgtttagtgaacagaaacagattccatgccctcagggtatggtagcaccagccactattaagaagcccaaaggacagaacctgaagctttgacaatgtaccctagggctggggggagttcaaaggccaaagacgttcagcaccagggaagctggaaggagccagcagggtgggaccacggtgatgaggaagtgcctggggagggaaattttggtgtatacagcattctactaacagtctttccacccttccccctttttccaggtttggacagtgccaataggtatgtctaggctttgtgacttttacgttttccctcttgaaatgccctgcaaggatgttaccgagaaatgccctgaatttctgaatcatcttatggggcagaagaattggccatttggaggatgttgttttattttgggtgttttgtcttgttctcctattgtaatatgacacacgggttctatctctggttgctgtcagtattgagactggaaaactcagtgttgccacctttcacagtatctacacagtctcttctctggttagcatcctgaggaagaacactgctctgagaaggccgccttcctcattccagggcggaatctgttcactcatccagcccagacccagcaggagcctctttcctgtgtgtgaggctcggcgctagatgctggatgtgcaggggtgggcgtagaggagggcttaaaccacacgaacgcacattaccaactgggatgngtctgtgaggaaggacaacaggaaggcactgattagaatagaggggcagggaagccatttngggaacttggtatttgagctcagacctgtgcaaaggaatgttagctggtgaagaaaanctcagggagtgtgctccaaacagcagggatagcatgtacaagctgtgaancaagagatgggcccatggggacccagaaggacgccagtgtggccgcagcctggtgaatggcaggccaatgtctgtacgatcaggagctggcattcctgtgggccctcttgtggggctcagtttcattcttaaagtagtggaaaagctgttggaaaatccttgggcttgaaatgacataatttgattaatgtttttaaaagatcgactatggtcgctgtatagaaaatagattagagagggcagagtggacacgggacaccggtggcagaggttgaactacggaggcactagtagagaagggaactgtagggaaagcagggctctgggcagggttgtgggacaggcaagtgtcgggaatggctgcttgtgctgtggcttgggaaactgggcaaactgcagagaaagatgctcttacttgcccttaacttgtgggcttttgtgatccctggaatccgtgcttgtgatgagtaatatttgtgagtaaccagatgatcattctattctcccctctcctcacccaccctacccccaccctcaccaccaataggtcatttgtgagagaaacaaaagccaccaattcagatgtcaggaaagaggtgaccaatgtaatctcaaaggagtcgaagctggacagtctggaggctgcagccaaaagcaagaactgctccagcccccagagaggtggctccccaccctgggctgcaaacagccagcctcagcccccaagggagtccaagctggagtcatgcaaggactcgcccagaacggccccgcagaccccggtccttcagaagacttccagctccatcaccctgcaggccgcaagagttcagccggaaccaagagcaccaggcctgggggtcctatcaccttctggagaagagaggaagaggccagctcctccccgtccagccaccttccccaccaggcagcctggcctggggagccaagatgttgtgagcaaggctgctaacaggagaatccccatggagggccagagggattcagcattccccaaatttgagagcaagccccaaagccaggaggtcaaggaaaatcaaactgtcaagttcagatgtgaagtttccgggattccaaagcctgaagtggcctggttcctggaaggcacccccgtgaggagacaggaaggcagcattgaggtttatgaagatgctggctcccattacctctgcctgctgaaagcccggaccagggacagtgggacatacagctgcactgcttccaacgcccaaggccaggtgtcctgtagctggaccctccaagtggaaaggcttgccgtgatggaggtggccccctccttctccagtgtcctgaaggactgcgctgttattgagggccaggattttgtgctgcagtgctccgtacgggggaccccagtgccccggatcacttggctgctgaatgggcagcccatccagtacgctcgctccacctgcgaggccggcgtggctgagctccacatccaggatgccctgccggaggaccatggcacctacacctgcctagctgagaatgccttggggcaggtgtcctgcagcgcctgggtcaccgtccatgaaaagaagagtagcaggaagagtgagtaccttctgcctgtggctcccagcaagcccactgcacccatcttcctgcagggcctctctgatctcaaagtcatggatggaagccaggtcactatgactgtccaagtgtcagggaatccaccccctgaagtcatctggctgcacaatgggaatgagatccaagagtcagaggacttccactttgaacagagaggaactcagcacagcctttggatccaggaagtgttcccggaggacacgggcacgtacacctgcgaggcctggaacagcgctggagaggtccgcacccaggccgtgctcacggtacaagagcctcacgatggcacccagccctggttcatcagtaagcctcgctcagtgacagcctccctgggccagagtgtcctcatctcctgcgccatagctggtgacccctttcctaccgtgcactggctcagagatggcaaagccctctgcaaagacactggccacttcgaggtgcttcagaatgaggacgtgttcaccctggttctaaagaaggtgcagccctggcatgccggccagtatgagatcctgctcaagaaccgggttggcgaatgcagttgccaggtgtcactgatgctacagaacagctctgccagagcccttccacgggggagggagcctgccagctgcgaggacctctgtggtggaggagttggtgctgatggtggtggtagtgaccgctatgggtccctgaggcctggctggccagcaagagggcagggttggctagaggaggaagacggcgaggacgtgcgaggggtgctgaagaggcgcgtggagacgaggcagcacactgaggaggcgatccgccagcaggaggtggagcagctggacttccgagacctcctggggaagaaggtgagtacaaagaccctatcggaagacgacctgaaggagatcccagccgagcagatggatttccgtgccaacctgcagcggcaagtgaagccaaagactgtgtctgaggaagagaggaaggtgcacagcccccagcaggtcgattttcgctctgtcctggccaagaaggggacttccaagacccccgtgcctgagaaggtgccaccgccaaaacctgccaccccggattttcgctcagtgctgggtggcaagaagaaattaccagcagagaatggcagcagcagtgccgagaccctgaatgccaaggcagtggagagttccaagcccctgagcaatgcacagccttcagggcccttgaaacccgtgggcaacgccaagcctgctgagaccctgaagccaatgggcaacgccaagcctgccgagaccctgaagcccatgggcaatgccaagcctgatgagaacctgaaatccgctagcaaagaagaactcaagaaagacgttaagaatgatgtgaactgcaagagaggccatgcagggaccacagataatgaaaagagatcagagagccaggggacagccccagccttcaagcagaagctgcaagatgttcatgtggcagagggcaagaagctgctgctccagtgccaggtgtcttctgaccccccagccaccatcatctggacgctgaatggaaagaccctcaagaccaccaagttcatcatcctctcccaggaaggctcactctgctccgtctccatcgagaaggcactgcctgaggacagaggcttatacaagtgtgtagccaagaatgacgctggccaggcggagtgctcctgccaagtcaccgtggatgggtaggtcgtgcccacccatcgccgccacccatacacaggggtcccatttctcagcccctcccttccttaccat

SEQ ID NO: 454518 - DNA, 236 bp, Homo sapiens
tggacaatggcgtcgaatgtgatcagaatgcctgagacccttctgcctcgctcactttctccctgtcctccctcagcaatgccccctcagatcatccagttccctgaggaccagaaggtacgcgcaggagagtcagtggagctgtttggcaaagtgacaggcactcagcccatcacctgtacctggatgaagttccgaaagcaggtcagtgacggtatggggtgggcactgggggt

SEQ ID NO: 454519 - DNA, 5933 bp, Homo sapiens
ccggctgcctctgctgcagttcagagcaacttcaggagcttcccagccgagagcttcaggacgcctttcctgtcccactggcccagttgccacaacaaacaacagagaagacggtgaccatgggggatgtgaagctggttgcctcgtcacacatttccaaaacctccctcagtgtggatccctcaagagttgactccatgcccctgacagaggcccctgctttcattttgccccctcggaacctctgcatcaaagaaggagccaccgccaagttcgaagggcgggtccggggttacccagagccccaggtgacatggcacagaaacgggcaacccatcaccagcgggggccgcttcctgctggattgcggcatccgggggactttcagccttgtgattcatgctgtccatgaggaggacaggggaaagtatacctgtgaagccaccaatggcagtggtgctcgccaggtgacagtggagttgacagtagaaggaagttttgcgaagcagcttggtcagcctgttgtttccaaaaccttaggggatagattttcagcttcagcagtggagacccgtcctagcatctggggggagtgcccaccaaagtttgctaccaagctgggccgagttgtggtcaaagaaggacagatgggacgattctcctgcaagatcactggccggccccaaccgcaggtcacctggctcaagggaaatgttccactgcagccgagtgcccgtgtgtctgtgtctgagaagaacggcatgcaggttctggaaatccatggagtcaaccaagatgacgtgggagtgtacacgtgcctggtggtgaacgggtcggggaaggcctcgatgtcagctgaactttccatccaaggtttggacagtgccaataggtcatttgtgagagaaacaaaagccaccaattcagatgtcaggaaagaggtgaccaatgtaatctcaaaggagtcgaagctggacagtctggaggctgcagccaaaagcaagaactgctccagcccccagagaggtggctccccaccctgggctgcaaacagccagcctcagcccccaagggagtccaagctggagtcatgcaaggactcgcccagaacggccccgcagaccccggtccttcagaagacttccagctccatcaccctgcaggccgcaagagttcagccggaaccaagagcaccaggcctgggggtcctatcaccttctggagaagagaggaagaggccagctcctccccgtccagccaccttccccaccaggcagcctggcctggggagccaagatgttgtgagcaaggctgctaacaggagaatccccatggagggccagagggattcagcattccccaaatttgagagcaagccccaaagccaggaggtcaaggaaaatcaaactgtcaagttcagatgtgaagtttccgggattccaaagcctgaagtggcctggttcctggaaggcacccccgtgaggagacaggaaggcagcattgaggtttatgaagatgctggctcccattacctctgcctgctgaaagcccggaccagggacagtgggacatacagctgcactgcttccaacgcccaaggccaggtgtcctgtagctggaccctccaagtggaaaggcttgccgtgatggaggtggccccctccttctccagtgtcctgaaggactgcgctgttattgagggccaggattttgtgctgcagtgctccgtacgggggaccccagtgccccggatcacttggctgctgaatgggcagcccatccagtacgctcgctccacctgcgaggccggcgtggctgagctccacatccaggatgccctgccggaggaccatggcacctacacctgcctagctgagaatgccttggggcaggtgtcctgcagcgcctgggtcaccgtccatgaaaagaagagtagcaggaagagtgagtaccttctgcctgtggctcccagcaagcccactgcacccatcttcctgcagggcctctctgatctcaaagtcatggatggaagccaggtcactatgactgtccaagtgtcagggaatccaccccctgaagtcatctggctgcacaatgggaatgagatccaagagtcagaggacttccactttgaacagagaggaactcagcacagcctttggatccaggaagtgttcccggaggacacgggcacgtacacctgcgaggcctggaacagcgctggagaggtccgcacccaggccgtgctcacggtacaagagcctcacgatggcacccagccctggttcatcagtaagcctcgctcagtgacagcctccctgggccagagtgtcctcatctcctgcgccatagctggtgacccctttcctaccgtgcactggctcagagatggcaaagccctctgcaaagacactggccacttcgaggtgcttcagaatgaggacgtgttcaccctggttctaaagaaggtgcagccctggcatgccggccagtatgagatcctgctcaagaaccgggttggcgaatgcagttgccaggtgtcactgatgctacagaacagctctgccagagcccttccacgggggagggagcctgccagctgcgaggacctctgtggtggaggagttggtgctgatggtggtggtagtgaccgctatgggtccctgaggcctggctggccagcaagagggcagggttggctagaggaggaagacggcgaggacgtgcgaggggtgctgaagaggcgcgtggagacgaggcagcacactgaggaggcgatccgccagcaggaggtggagcagctggacttccgagacctcctggggaagaaggtgagtacaaagaccctatcggaagacgacctgaaggagatcccagccgagcagatggatttccgtgccaacctgcagcggcaagtgaagccaaagactgtgtctgaggaagagaggaaggtgcacagcccccagcaggtcgattttcgctctgtcctggccaagaaggggacttccaagacccccgtgcctgagaaggtgccaccgccaaaacctgccaccccggattttcgctcagtgctgggtggcaagaagaaattaccagcagagaatggcagcagcagtgccgagaccctgaatgccaaggcagtggagagttccaagcccctgagcaatgcacagccttcagggcccttgaaacccgtgggcaacgccaagcctgctgagaccctgaagccaatgggcaacgccaagcctgccgagaccctgaagcccatgggcaatgccaagcctgatgagaacctgaaatccgctagcaaagaagaactcaagaaagacgttaagaatgatgtgaactgcaagagaggccatgcagggaccacagataatgaaaagagatcagagagccaggggacagccccagccttcaagcagaagctgcaagatgttcatgtggcagagggcaagaagctgctgctccagtgccaggtgtcttctgaccccccagccaccatcatctggacgctgaatggaaagaccctcaagaccaccaagttcatcatcctctcccaggaaggctcactctgctccgtctccatcgagaaggcactgcctgaggacagaggcttatacaagtgtgtagccaagaatgacgctggccaggcggagtgctcctgccaagtcaccgtggatgatgctccagccagtgagaacaccaaggccccagagatgaaatcccggaggcccaagagctctcttcctcccgtgctaggaactgagagtgatgcgactgtgaaaaagaaacctgcccccaagacacctccgaaggcagcaatgccccctcagatcatccagttccctgaggaccagaaggtacgcgcaggagagtcagtggagctgtttggcaaagtgacaggcactcagcccatcacctgtacctggatgaagttccgaaagcagatccaggaaagcgagcacatgaaggtggagaacagcgagaatggcagcaagctcaccatcctggccgcgcgccaggagcactgcggctgctacacactgctggtggagaacaagctgggcagcaggcaggcccaggtcaacctcactgtcgtggataagccagaccccccagctggcacaccttgtgcctctgacattcggagctcctcactgaccctgtcctggtatggctcctcatatgatgggggcagtgctgtacagtcctacagcatcgagatctgggactcagccaacaagacgtggaaggaactagccacatgccgcagcacctctttcaacgtccaggacctgctgcctgaccacgaatataagttccgtgtacgtgcaatcaacgtgtatggaaccagtgagccaagccaggagtctgaactcacaacggtaggagagaaacctgaagagccgaaggatgaagtggaggtgtcagatgatgatgagaaggagcccgaggttgattaccggacagtgacaatcaatactgaacaaaaagtatctgacttctacgacattgaggagagattaggatctgggaaatttggacaggtctttcgacttgtagaaaagaaaactcgaaaagtctgggcagggaagttcttcaaggcatattcagcaaaagagaaagagaatatccggcaggagattagcatcatgaactgcctccaccaccctaagctggtccagtgtgtggatgcctttgaagaaaaggccaacatcgtcatggtcctggagatcgtgtcaggaggggagctgtttgagcgcatcattgacgaggactttgagctgacggagcgtgagtgcatcaagtacatgcggcagatctcggagggagtggagtacatccacaagcagggcatcgtgcacctggacctcaagccggagaacatcatgtgtgtcaacaagacgggcaccaggatcaagctcatcgactttggtctggccaggaggctggagaatgcggggtctctgaaggtcctctttggcaccccagaatttgtggctcctgaagtgatcaactatgagcccatcggctacgccacagacatgtggagcatcggggtcatctgctacatcctagtcagtggcctttcccccttcatgggagacaacgataacgaaaccttggccaacgttacctcagccacctgggacttcgacgacgaggcattcgatgagatctccgacgatgccaaggatttcatcagcaatctgctgaagaaagatatgaaaaaccgcctggactgcacgcagtgccttcagcatccatggctaatgaaagataccaagaacatggaggccaagaaactctccaaggaccggatgaagaagtacatggcaagaaggaaatggcagaaaacgggcaatgctgtgagagccattggaagactgtcctctatggcaatgatctcagggctcagtggcaggaaatcctcaacagggtcaccaaccagcccgctcaatgcagaaaaactagaatctgaagaagatgtgtcccaagctttccttgaggctgttgctgaggaaaagcctcatgtaaaaccctatttctctaagaccattcgcgatttagaagttgtggagggaagtgctgctagatttgactgcaagattgaaggatacccagaccccgaggttgtctggttcaaagatgaccagtcaatcagggagtcccgccacttccagatagactacgatgaggacgggaactgctctttaattattagtgatgtttgcggggatgacgatgccaagtacacctgcaaggctgtcaacagtcttggagaagccacctgcacagcagagctcattgtggaaacgatggaggaaggtgaaggggaaggggaagaggaagaagagtgaaacaaagccagagaaaagcagtttctaagtcatattaaaaggactatttctctcaaaatccaaaaaaaa

SEQ ID NO: 454520 - DNA, 5780 bp, Homo sapiens
ccggctgcctctgctgcagttcagagcaacttcaggagcttcccagccgagagcttcaggacgcctttcctgtcccactggcccagttgccacaacaaacaacagagaagacggtgaccatgggggatgtgaagctggttgcctcgtcacacatttccaaaacctccctcagtgtggatccctcaagagttgactccatgcccctgacagaggcccctgctttcattttgccccctcggaacctctgcatcaaagaaggagccaccgccaagttcgaagggcgggtccggggttacccagagccccaggtgacatggcacagaaacgggcaacccatcaccagcgggggccgcttcctgctggattgcggcatccgggggactttcagccttgtgattcatgctgtccatgaggaggacaggggaaagtatacctgtgaagccaccaatggcagtggtgctcgccaggtgacagtggagttgacagtagaaggaagttttgcgaagcagcttggtcagcctgttgtttccaaaaccttaggggatagattttcagcttcagcagtggagacccgtcctagcatctggggggagtgcccaccaaagtttgctaccaagctgggccgagttgtggtcaaagaaggacagatgggacgattctcctgcaagatcactggccggccccaaccgcaggtcacctggctcaagggaaatgttccactgcagccgagtgcccgtgtgtctgtgtctgagaagaacggcatgcaggttctggaaatccatggagtcaaccaagatgacgtgggagtgtacacgtgcctggtggtgaacgggtcggggaaggcctcgatgtcagctgaactttccatccaaggtttggacagtgccaataggtcatttgtgagagaaacaaaagccaccaattcagatgtcaggaaagaggtgaccaatgtaatctcaaaggagtcgaagctggacagtctggaggctgcagccaaaagcaagaactgctccagcccccagagaggtggctccccaccctgggctgcaaacagccagcctcagcccccaagggagtccaagctggagtcatgcaaggactcgcccagaacggccccgcagaccccggtccttcagaagacttccagctccatcaccctgcaggccgcaagagttcagccggaaccaagagcaccaggcctgggggtcctatcaccttctggagaagagaggaagaggccagctcctccccgtccagccaccttccccaccaggcagcctggcctggggagccaagatgttgtgagcaaggctgctaacaggagaatccccatggagggccagagggattcagcattccccaaatttgagagcaagccccaaagccaggaggtcaaggaaaatcaaactgtcaagttcagatgtgaagtttccgggattccaaagcctgaagtggcctggttcctggaaggcacccccgtgaggagacaggaaggcagcattgaggtttatgaagatgctggctcccattacctctgcctgctgaaagcccggaccagggacagtgggacatacagctgcactgcttccaacgcccaaggccaggtgtcctgtagctggaccctccaagtggaaaggcttgccgtgatggaggtggccccctccttctccagtgtcctgaaggactgcgctgttattgagggccaggattttgtgctgcagtgctccgtacgggggaccccagtgccccggatcacttggctgctgaatgggcagcccatccagtacgctcgctccacctgcgaggccggcgtggctgagctccacatccaggatgccctgccggaggaccatggcacctacacctgcctagctgagaatgccttggggcaggtgtcctgcagcgcctgggtcaccgtccatgaaaagaagagtagcaggaagagtgagtaccttctgcctgtggctcccagcaagcccactgcacccatcttcctgcagggcctctctgatctcaaagtcatggatggaagccaggtcactatgactgtccaagtgtcagggaatccaccccctgaagtcatctggctgcacaatgggaatgagatccaagagtcagaggacttccactttgaacagagaggaactcagcacagcctttggatccaggaagtgttcccggaggacacgggcacgtacacctgcgaggcctggaacagcgctggagaggtccgcacccaggccgtgctcacggtacaagagcctcacgatggcacccagccctggttcatcagtaagcctcgctcagtgacagcctccctgggccagagtgtcctcatctcctgcgccatagctggtgacccctttcctaccgtgcactggctcagagatggcaaagccctctgcaaagacactggccacttcgaggtgcttcagaatgaggacgtgttcaccctggttctaaagaaggtgcagccctggcatgccggccagtatgagatcctgctcaagaaccgggttggcgaatgcagttgccaggtgtcactgatgctacagaacagctctgccagagcccttccacgggggagggagcctgccagctgcgaggacctctgtggtggaggagttggtgctgatggtggtggtagtgaccgctatgggtccctgaggcctggctggccagcaagagggcagggttggctagaggaggaagacggcgaggacgtgcgaggggtgctgaagaggcgcgtggagacgaggcagcacactgaggaggcgatccgccagcaggaggtggagcagctggacttccgagacctcctggggaagaaggtgagtacaaagaccctatcggaagacgacctgaaggagatcccagccgagcagatggatttccgtgccaacctgcagcggcaagtgaagccaaagactgtgtctgaggaagagaggaaggtgcacagcccccagcaggtcgattttcgctctgtcctggccaagaaggggacttccaagacccccgtgcctgagaaggtgccaccgccaaaacctgccaccccggattttcgctcagtgctgggtggcaagaagaaattaccagcagagaatggcagcagcagtgccgagaccctgaatgccaaggcagtggagagttccaagcccctgagcaatgcacagccttcagggcccttgaaacccgtgggcaacgccaagcctgctgagaccctgaagccaatgggcaacgccaagcctgccgagaccctgaagcccatgggcaatgccaagcctgatgagaacctgaaatccgctagcaaagaagaactcaagaaagacgttaagaatgatgtgaactgcaagagaggccatgcagggaccacagataatgaaaagagatcagagagccaggggacagccccagccttcaagcagaagctgcaagatgttcatgtggcagagggcaagaagctgctgctccagtgccaggtgtcttctgaccccccagccaccatcatctggacgctgaatggaaagaccctcaagaccaccaagttcatcatcctctcccaggaaggctcactctgctccgtctccatcgagaaggcactgcctgaggacagaggcttatacaagtgtgtagccaagaatgacgctggccaggcggagtgctcctgccaagtcaccgtggatgatgctccagccagtgagaacaccaaggccccagagatgaaatcccggaggcccaagagctctcttcctcccgtgctaggaactgagagtgatgcgactgtgaaaaagaaacctgcccccaagacacctccgaaggcagcaatgccccctcagatcatccagttccctgaggaccagaaggtacgcgcaggagagtcagtggagctgtttggcaaagtgacaggcactcagcccatcacctgtacctggatgaagttccgaaagcagatccaggaaagcgagcacatgaaggtggagaacagcgagaatggcagcaagctcaccatcctggccgcgcgccaggagcactgcggctgctacacactgctggtggagaacaagctgggcagcaggcaggcccaggtcaacctcactgtcgtggataagccagaccccccagctggcacaccttgtgcctctgacattcggagctcctcactgaccctgtcctggtatggctcctcatatgatgggggcagtgctgtacagtcctacagcatcgagatctgggactcagccaacaagacgtggaaggaactagccacatgccgcagcacctctttcaacgtccaggacctgctgcctgaccacgaatataagttccgtgtacgtgcaatcaacgtgtatggaaccagtgagccaagccaggagtctgaactcacaacggtaggagagaaacctgaagagccgaaggatgaagtggaggtgtcagatgatgatgagaaggagcccgaggttgattaccggacagtgacaatcaatactgaacaaaaagtatctgacttctacgacattgaggagagattaggatctgggaaatttggacaggtctttcgacttgtagaaaagaaaactcgaaaagtctgggcagggaagttcttcaaggcatattcagcaaaagagaaagagaatatccggcaggagattagcatcatgaactgcctccaccaccctaagctggtccagtgtgtggatgcctttgaagaaaaggccaacatcgtcatggtcctggagatcgtgtcaggaggggagctgtttgagcgcatcattgacgaggactttgagctgacggagcgtgagtgcatcaagtacatgcggcagatctcggagggagtggagtacatccacaagcagggcatcgtgcacctggacctcaagccggagaacatcatgtgtgtcaacaagacgggcaccaggatcaagctcatcgactttggtctggccaggaggctggagaatgcggggtctctgaaggtcctctttggcaccccagaatttgtggctcctgaagtgatcaactatgagcccatcggctacgccacagacatgtggagcatcggggtcatctgctacatcctaaaccgcctggactgcacgcagtgccttcagcatccatggctaatgaaagataccaagaacatggaggccaagaaactctccaaggaccggatgaagaagtacatggcaagaaggaaatggcagaaaacgggcaatgctgtgagagccattggaagactgtcctctatggcaatgatctcagggctcagtggcaggaaatcctcaacagggtcaccaaccagcccgctcaatgcagaaaaactagaatctgaagaagatgtgtcccaagctttccttgaggctgttgctgaggaaaagcctcatgtaaaaccctatttctctaagaccattcgcgatttagaagttgtggagggaagtgctgctagatttgactgcaagattgaaggatacccagaccccgaggttgtctggttcaaagatgaccagtcaatcagggagtcccgccacttccagatagactacgatgaggacgggaactgctctttaattattagtgatgtttgcggggatgacgatgccaagtacacctgcaaggctgtcaacagtcttggagaagccacctgcacagcagagctcattgtggaaacgatggaggaaggtgaaggggaaggggaagaggaagaagagtgaaacaaagccagagaaaagcagtttctaagtcatattaaaaggactatttctctcaaaatccaaaaaaaa

SEQ ID NO: 454521 - DNA, 3108 bp, Homo sapiens
  misc_feature (832)..(832): n is a, c, g, or t
  misc_feature (893)..(893): n is a, c, g, or t
  misc_feature (951)..(951): n is a, c, g, or t
  misc_feature (1001)..(1001): n is a, c, g, or t
tatgcttttctgtacactgctaagttacagcatttgggtttggaattttcagtagatgtttgtttgtccctggattggtttttttttccttctgtttagtgaacagaaacagattccatgccctcagggtatggtagcaccagccactattaagaagcccaaaggacagaacctgaagctttgacaatgtaccctagggctggggggagttcaaaggccaaagacgttcagcaccagggaagctggaaggagccagcagggtgggaccacggtgatgaggaagtgcctggggagggaaattttggtgtatacagcattctactaacagtctttccacccttccccctttttccaggtttggacagtgccaataggtatgtctaggctttgtgacttttacgttttccctcttgaaatgccctgcaaggatgttaccgagaaatgccctgaatttctgaatcatcttatggggcagaagaattggccatttggaggatgttgttttattttgggtgttttgtcttgttctcctattgtaatatgacacacgggttctatctctggttgctgtcagtattgagactggaaaactcagtgttgccacctttcacagtatctacacagtctcttctctggttagcatcctgaggaagaacactgctctgagaaggccgccttcctcattccagggcggaatctgttcactcatccagcccagacccagcaggagcctctttcctgtgtgtgaggctcggcgctagatgctggatgtgcaggggtgggcgtagaggagggcttaaaccacacgaacgcacattaccaactgggatgngtctgtgaggaaggacaacaggaaggcactgattagaatagaggggcagggaagccatttngggaacttggtatttgagctcagacctgtgcaaaggaatgttagctggtgaagaaaanctcagggagtgtgctccaaacagcagggatagcatgtacaagctgtgaancaagagatgggcccatggggacccagaaggacgccagtgtggccgcagcctggtgaatggcaggccaatgtctgtacgatcaggagctggcattcctgtgggccctcttgtggggctcagtttcattcttaaagtagtggaaaagctgttggaaaatccttgggcttgaaatgacataatttgattaatgtttttaaaagatcgactatggtcgctgtatagaaaatagattagagagggcagagtggacacgggacaccggtggcagaggttgaactacggaggcactagtagagaagggaactgtagggaaagcagggctctgggcagggttgtgggacaggcaagtgtcgggaatggctgcttgtgctgtggcttgggaaactgggcaaactgcagagaaagatgctcttacttgcccttaacttgtgggcttttgtgatccctggaatccgtgcttgtgatgagtaatatttgtgagtaaccagatgatcattctattctcccctctcctcacccaccctacccccaccctcaccaccaataggtcatttgtgagagaaacaaaagccaccaattcagatgtcaggaaagaggtgaccaatgtaatctcaaaggagtcgaagctggacagtctggaggctgcagccaaaagcaagaactgctccagcccccagagaggtggctccccaccctgggctgcaaacagccagcctcagcccccaagggagtccaagctggagtcatgcaaggactcgcccagaacggccccgcagaccccggtccttcagaagacttccagctccatcaccctgcaggccgcaagagttcagccggaaccaagagcaccaggcctgggggtcctatcaccttctggagaagagaggaagaggccagctcctccccgtccagccaccttccccaccaggcagcctggcctggggagccaagatgttgtgagcaaggctgctaacaggagaatccccatggagggccagagggattcagcattccccaaatttgagagcaagccccaaagccaggaggtcaaggaaaatcaaactgtcaagttcagatgtgaagggcttgccgtgatggaggtggccccctccttctccagtgtcctgaaggactgcgctgttattgagggccaggattttgtgctgcagtgctccgtacgggggaccccagtgccccggatcacttggctgctgaatgggcagcccatccagtacgctcgctccacctgcgaggccggcgtggctgagctccacatccaggatgccctgccggaggaccatggcacctacacctgcctagctgagaatgccttggggcaggtgtcctgcagcgcctgggtcaccgtccatgaaaagaagagtagcaggaagagtgagtaccttctgcctgtggctcccagcaagcccactgcacccatcttcctgcagggcctctctgatctcaaagtcatggatggaagccaggtcactatgactgtccaagtgtcaggtctgtctctgcagctctctcttggggattaacatgaaaatggtcttggttgcaatgggtattgctctccgaggacccgctcagatccttgatccaccagaaaatcagatgggaccatcaggtgatggacccaaagaaatggagactcttgtcctctcttttctgccttctctgggtaggattttctggattcatgattaaatggtccagaggaagaagatggccatagagctagagcagtgaaagattaatttgaaaatatagtgtggccagtgtagctggaaggttttgaagactggtacaaaaccagattatgggccgggcacggtggctcacgcctgtaatcccagcactttgtgaggccgaggcagcagatcacaaggtcaggagatcgagaccatcctggctaacacggtgaaaccctgtctctactaaaaaatacaaaaaattagctgggtgtggtggccggtgcctgtagtcccagctactcgggaggctgaggcaggagaatggcgtgaacctgggaggtggagcttgcagtgagccgagatcgcaccactgcactccagcctgggcgacagagcaaagactctgtctc

SEQ ID NO: 454522 - DNA, 379 bp, Homo sapiens
gagtgaaggcaggcccaggggagagtccatggagaagaaaggccatccccacttctctctggggcaaccagaagacccaactccgaagggaggcagccccagagggcccctctgcaggctcactctgctccgtctccatcgagaaggcactgcctgaggacagaggcttatacaagtgtgtagccaagaatgacgctggccaggcggagtgctcctgccaagtcaccgtggatgatgctccagcctagtgagaacaccaaggccccagagaactggatgatctgagggggcattgctgccttcggaggtgtcttgggggcaggtttctttttcacagtcgcatcactctcagttcctaactaaggaagagagctcttgg

SEQ ID NO: 454523 - DNA, 2828 bp, Homo sapiens
gctcggtacactagtcacggttggctagtggctttcagggttctcaccaacccctgagcaatgcacagccttcagggcccttgaaacccgtgggcaacgccaagcctgctgagaccctgaagccaatgggcaacgccaagcctgccgagaccctgaagcccatgggcaatgccaagcctgatgagaacctgaaatccgctagcaaagaagaactcaagaaagacgttaagaatgatgtgaactgcaagagaggccatgcagggaccacagataatgaaaagagatcagagagccaggggacagccccagccttcaagcagaagctgcaagatgttcatgtggcagagggcaagaagctgctgctccagtgccaggtgtcttctgaccccccagccaccatcatctggacgctgaatggaaagaccctcaagaccaccaagttcatcatcctctcccaggaaggctcactctgctccgtctccatcgagaaggcactgcctgaggacagaggcttatacaagtgtgtagccaagaatgacgctggccaggcggagtgctcctgccaagtcaccgtggatgatgctccagccagtgagaacaccaaggccccagagatgaaatcccggaggcccaagagctctcttcctcccgtgctaggaactgagagtgatgcgactgtgaaaaagaaacctgcccccaagacacctccgaaggcagcaatgccccctcagatcatccagttccctgaggaccagaaggtacgcgcaggagagtcagtggagctgtttggcaaagtgacaggcactcagcccatcacctgtacctggatgaagttccgaaagcagatccaggaaagcgagcacatgaaggtggagaacagcgagaatggcagcaagctcaccatcctggccgcgcgccaggagcactgcggctgctacacactgctggtggagaacaagctgggcagcaggcaggcccaggtcaacctcactgtcgtggataagccagaccccccagctggcacaccttgtgcctctgacattcggagctcctcactgaccctgtcctggtatggctcctcatatgatgggggcagtgctgtacagtcctacagcatcgagatctgggactcagccaacaagacgtggaaggaactagccacatgccgcagcacctctttcaacgtccaggacctgctgcctgaccacgaatataagttccgtgtacgtgcaatcaacgtgtatggaaccagtgagccaagccaggagtctgaactcacaacggtaggagagaaacctgaagagccgaaggatgaagtggaggtgtcagatgatgatgagaaggagcccgaggttgattaccggacagtgacaatcaatactgaacaaaaagtatctgacttctacgacattgaggagagattaggatctgggaaatttggacaggtctttcgacttgtagaaaagaaaactcgaaaagtctgggcagggaagttcttcaaggcatattcagcaaaagagaaagagaatatccggcaggagattagcatcatgaactgcctccaccaccctaagctggtccagtgtgtggatgcctttgaagaaaaggccaacatcgtcatggtcctggagatcgtgtcaggaggggagctgtttgagcgcatcattgacgaggactttgagctgacggagcgtgagtgcatcaagtacatgcggcagatctcggagggagtggagtacatccacaagcagggcatcgtgcacctggacctcaagccggagaacatcatgtgtgtcaacaagacgggcaccaggatcaagctcatcgactttggtctggccaggaggctggagaatgcggggtctctgaaggtcctctttggcaccccagaatttgtggctcctgaagtgatcaactatgagcccatcggctacgccacagacatgtggagcatcggggtcatctgctacatcctagtcagtggcctttcccccttcatgggagacaacgataacgaaaccttggccaacgttacctcagccacctgggacttcgacgacgaggcattcgatgagatctccgacgatgccaaggatttcatcagcaatctgctgaagaaagatatgaaaaaccgcctggactgcacgcagtgccttcagcatccatggctaatgaaagataccaagaacatggaggccaagaaactctccaaggaccggatgaagaagtacatggcaagaaggaaatggcagaaaacgggcaatgctgtgagagccattggaagactgtcctctatggcaatgatctcagggctcagtggcaggaaatcctcaacagggtcaccaaccagcccgctcaatgcagaaaaactagaatctgaagaagatgtgtcccaagctttccttgaggctgttgctgaggaaaagcctcatgtaaaaccctatttctctaagaccattcgcgatttagaagttgtggagggaagtgctgctagatttgactgcaagattgaaggatacccagaccccgaggttgtctggttcaaagatgaccagtcaatcagggagtcccgccacttccagatagactacgatgaggacgggaactgctctttaattattagtgatgtttgcggggatgacgatgccaagtacacctgcaaggctgtcaacagtcttggagaagccacctgcacagcagagctcattgtggaaacgatggaggaaggtgaaggggaaggggaagaggaagaagagtgaaacaaagccagagaaaagcagtttctaagtcatattaaaaggactatttctctcaaaatccaaaaaaaa

SEQ ID NO: 454524 - DNA, 2284 bp, Homo sapiens
agagcgaggtccgtgtgggagacttcctagaggagatgctccagccagtgagaacaccaaggccccagagatgaaatcccggaggcccaagagctctcttcctcccgtgctaggaactgagagtgatgcgactgtgaaaaagaaacctgcccccaagacacctccgaaggcagcaatgccccctcagatcatccagttccctgaggaccagaaggtacgcgcaggagagtcagtggagctgtttggcaaagtgacaggcactcagcccatcacctgtacctggatgaagttccgaaagcagatccaggaaagcgagcacatgaaggtggagaacagcgagaatggcagcaagctcaccatcctggccgcgcgccaggagcactgcggctgctacacactgctggtggagaacaagctgggcagcaggcaggcccaggtcaacctcactgtcgtggataagccagaccccccagctggcacaccttgtgcctctgacattcggagctcctcactgaccctgtcctggtatggctcctcatatgatgggggcagtgctgtacagtcctacagcatcgagatctgggactcagccaacaagacgtggaaggaactagccacatgccgcagcacctctttcaacgtccaggacctgctgcctgaccacgaatataagttccgtgtacgtgcaatcaacgtgtatggaaccagtgagccaagccaggagtctgaactcacaacggtaggagagaaacctgaagagccgaaggatgaagtggaggtgtcagatgatgatgagaaggagcccgaggttgattaccggacagtgacaatcaatactgaacaaaaagtatctgacttctacgacattgaggagagattaggatctgggaaatttggacaggtctttcgacttgtagaaaagaaaactcgaaaagtctgggcagggaagttcttcaaggcatattcagcaaaagagaaagagaatatccggcaggagattagcatcatgaactgcctccaccaccctaagctggtccagtgtgtggatgcctttgaagaaaaggccaacatcgtcatggtcctggagatcgtgtcaggaggggagctgtttgagcgcatcattgacgaggactttgagctgacggagcgtgagtgcatcaagtacatgcggcagatctcggagggagtggagtacatccacaagcagggcatcgtgcacctggacctcaagccggagaacatcatgtgtgtcaacaagacgggcaccaggatcaagctcatcgactttggtctggccaggaggctggagaatgcggggtctctgaaggtcctctttggcaccccagaatttgtggctcctgaagtgatcaactatgagcccatcggctacgccacagacatgtggagcatcggggtcatctgctacatcctagtcagtggcctttcccccttcatgggagacaacgataacgaaaccttggccaacgttacctcagccacctgggacttcgacgacgaggcattcgatgagatctccgacgatgccaaggatttcatcagcaatctgctgaagaaagatatgaaaaaccgcctggactgcacgcagtgccttcagcatccatggctaatgaaagataccaagaacatggaggccaagaaactctccaaggaccggatgaagaagtacatggcaagaaggaaatggcagaaaacgggcaatgctgtgagagccattggaagactgtcctctatggcaatgatctcagggctcagtggcaggaaatcctcaacagggtcaccaaccagcccgctcaatgcagaaaaactagaatctgaagaagatgtgtcccaagctttccttgaggctgttgctgaggaaaagcctcatgtaaaaccctatttctctaagaccattcgcgatttagaagttgtggagggaagtgctgctagatttgactgcaagattgaaggatacccagaccccgaggttgtctggttcaaagatgaccagtcaatcagggagtcccgccacttccagatagactacgatgaggacgggaactgctctttaattattagtgatgtttgcggggatgacgatgccaagtacacctgcaaggctgtcaacagtcttggagaagccacctgcacagcagagctcattgtggaaacgatggaggaaggtgaaggggaaggggaagaggaagaagagtgaaacaaagccagagaaaagcagtttctaagtcatattaaaaggactatttctctcaaaatccaaaaaaaa

SEQ ID NO: 454525 - DNA, 6589 bp, Homo sapiens
  misc_feature (832)..(832): n is a, c, g, or t
  misc_feature (893)..(893): n is a, c, g, or t
  misc_feature (951)..(951): n is a, c, g, or t
  misc_feature (1001)..(1001): n is a, c, g, or t
tatgcttttctgtacactgctaagttacagcatttgggtttggaattttcagtagatgtttgtttgtccctggattggtttttttttccttctgtttagtgaacagaaacagattccatgccctcagggtatggtagcaccagccactattaagaagcccaaaggacagaacctgaagctttgacaatgtaccctagggctggggggagttcaaaggccaaagacgttcagcaccagggaagctggaaggagccagcagggtgggaccacggtgatgaggaagtgcctggggagggaaattttggtgtatacagcattctactaacagtctttccacccttccccctttttccaggtttggacagtgccaataggtatgtctaggctttgtgacttttacgttttccctcttgaaatgccctgcaaggatgttaccgagaaatgccctgaatttctgaatcatcttatggggcagaagaattggccatttggaggatgttgttttattttgggtgttttgtcttgttctcctattgtaatatgacacacgggttctatctctggttgctgtcagtattgagactggaaaactcagtgttgccacctttcacagtatctacacagtctcttctctggttagcatcctgaggaagaacactgctctgagaaggccgccttcctcattccagggcggaatctgttcactcatccagcccagacccagcaggagcctctttcctgtgtgtgaggctcggcgctagatgctggatgtgcaggggtgggcgtagaggagggcttaaaccacacgaacgcacattaccaactgggatgngtctgtgaggaaggacaacaggaaggcactgattagaatagaggggcagggaagccatttngggaacttggtatttgagctcagacctgtgcaaaggaatgttagctggtgaagaaaanctcagggagtgtgctccaaacagcagggatagcatgtacaagctgtgaancaagagatgggcccatggggacccagaaggacgccagtgtggccgcagcctggtgaatggcaggccaatgtctgtacgatcaggagctggcattcctgtgggccctcttgtggggctcagtttcattcttaaagtagtggaaaagctgttggaaaatccttgggcttgaaatgacataatttgattaatgtttttaaaagatcgactatggtcgctgtatagaaaatagattagagagggcagagtggacacgggacaccggtggcagaggttgaactacggaggcactagtagagaagggaactgtagggaaagcagggctctgggcagggttgtgggacaggcaagtgtcgggaatggctgcttgtgctgtggcttgggaaactgggcaaactgcagagaaagatgctcttacttgcccttaacttgtgggcttttgtgatccctggaatccgtgcttgtgatgagtaatatttgtgagtaaccagatgatcattctattctcccctctcctcacccaccctacccccaccctcaccaccaataggtcatttgtgagagaaacaaaagccaccaattcagatgtcaggaaagaggtgaccaatgtaatctcaaaggagtcgaagctggacagtctggaggctgcagccaaaagcaagaactgctccagcccccagagaggtggctccccaccctgggctgcaaacagccagcctcagcccccaagggagtccaagctggagtcatgcaaggactcgcccagaacggccccgcagaccccggtccttcagaagacttccagctccatcaccctgcaggccgcaagagttcagccggaaccaagagcaccaggcctgggggtcctatcaccttctggagaagagaggaagaggccagctcctccccgtccagccaccttccccaccaggcagcctggcctggggagccaagatgttgtgagcaaggctgctaacaggagaatccccatggagggccagagggattcagcattccccaaatttgagagcaagccccaaagccaggaggtcaaggaaaatcaaactgtcaagttcagatgtgaagtttccgggattccaaagcctgaagtggcctggttcctggaaggcacccccgtgaggagacaggaaggcagcattgaggtttatgaagatgctggctcccattacctctgcctgctgaaagcccggaccagggacagtgggacatacagctgcactgcttccaacgcccaaggccaggtgtcctgtagctggaccctccaagtggaaaggcttgccgtgatggaggtggccccctccttctccagtgtcctgaaggactgcgctgttattgagggccaggattttgtgctgcagtgctccgtacgggggaccccagtgccccggatcacttggctgctgaatgggcagcccatccagtacgctcgctccacctgcgaggccggcgtggctgagctccacatccaggatgccctgccggaggaccatggcacctacacctgcctagctgagaatgccttggggcaggtgtcctgcagcgcctgggtcaccgtccatgaaaagaagagtagcaggaagagtgagtaccttctgcctgtggctcccagcaagcccactgcacccatcttcctgcagggcctctctgatctcaaagtcatggatggaagccaggtcactatgactgtccaagtgtcagggaatccaccccctgaagtcatctggctgcacaatgggaatgagatccaagagtcagaggacttccactttgaacagagaggaactcagcacagcctttggatccaggaagtgttcccggaggacacgggcacgtacacctgcgaggcctggaacagcgctggagaggtccgcacccaggccgtgctcacggtacaagagcctcacgatggcacccagccctggttcatcagtaagcctcgctcagtgacagcctccctgggccagagtgtcctcatctcctgcgccatagctggtgacccctttcctaccgtgcactggctcagagatggcaaagccctctgcaaagacactggccacttcgaggtgcttcagaatgaggacgtgttcaccctggttctaaagaaggtgcagccctggcatgccggccagtatgagatcctgctcaagaaccgggttggcgaatgcagttgccaggtgtcactgatgctacagaacagctctgccagagcccttccacgggggagggagcctgccagctgcgaggacctctgtggtggaggagttggtgctgatggtggtggtagtgaccgctatgggtccctgaggcctggctggccagcaagagggcagggttggctagaggaggaagacggcgaggacgtgcgaggggtgctgaagaggcgcgtggagacgaggcagcacactgaggaggcgatccgccagcaggaggtggagcagctggacttccgagacctcctggggaagaaggtgagtacaaagaccctatcggaagacgacctgaaggagatcccagccgagcagatggatttccgtgccaacctgcagcggcaagtgaagccaaagactgtgtctgaggaagagaggaaggtgcacagcccccagcaggtcgattttcgctctgtcctggccaagaaggggacttccaagacccccgtgcctgagaaggtgccaccgccaaaacctgccaccccggattttcgctcagtgctgggtggcaagaagaaattaccagcagagaatggcagcagcagtgccgagaccctgaatgccaaggcagtggagagttccaagcccctgagcaatgcacagccttcagggcccttgaaacccgtgggcaacgccaagcctgctgagaccctgaagccaatgggcaacgccaagcctgccgagaccctgaagcccatgggcaatgccaagcctgatgagaacctgaaatccgctagcaaagaagaactcaagaaagacgttaagaatgatgtgaactgcaagagaggccatgcagggaccacagataatgaaaagagatcagagagccaggggacagccccagccttcaagcagaagctgcaagatgttcatgtggcagagggcaagaagctgctgctccagtgccaggtgtcttctgaccccccagccaccatcatctggacgctgaatggaaagaccctcaagaccaccaagttcatcatcctctcccaggaaggctcactctgctccgtctccatcgagaaggcactgcctgaggacagaggcttatacaagtgtgtagccaagaatgacgctggccaggcggagtgctcctgccaagtcaccgtggatgatgctccagccagtgagaacaccaaggccccagagatgaaatcccggaggcccaagagctctcttcctcccgtgctaggaactgagagtgatgcgactgtgaaaaagaaacctgcccccaagacacctccgaaggcagcaatgccccctcagatcatccagttccctgaggaccagaaggtacgcgcaggagagtcagtggagctgtttggcaaagtgacaggcactcagcccatcacctgtacctggatgaagttccgaaagcagatccaggaaagcgagcacatgaaggtggagaacagcgagaatggcagcaagctcaccatcctggccgcgcgccaggagcactgcggctgctacacactgctggtggagaacaagctgggcagcaggcaggcccaggtcaacctcactgtcgtggataagccagaccccccagctggcacaccttgtgcctctgacattcggagctcctcactgaccctgtcctggtatggctcctcatatgatgggggcagtgctgtacagtcctacagcatcgagatctgggactcagccaacaagacgtggaaggaactagccacatgccgcagcacctctttcaacgtccaggacctgctgcctgaccacgaatataagttccgtgtacgtgcaatcaacgtgtatggaaccagtgagccaagccaggagtctgaactcacaacggtaggagagaaacctgaagagccgaaggatgaagtggaggtgtcagacgatgatgagaaggagcccgaggttgattaccggacagtgacaatcaatactgaacaaaaagtatctgacttctacgacattgaggagagattaggatctgggaaatttggacaggtctttcgacttgtagaaaagaaaactcgaaaagtctgggcagggaagttcttcaaggcatattcagcaaaagagaaagagaatatccggcaggagattagcatcatgaactgcctccaccaccctaagctggtccagtgtgtggatgcctttgaagaaaaggccaacatcgtcatggtcctggagatcgtgtcaggaggggagctgtttgagcgcatcattgacgaggactttgagctgacggagcgtgagtgcatcaagtacatgcggcagatctcggagggagtggagtacatccacaagcagggcatcgtgcacctggacctcaagccggagaacatcatgtgtgtcaacaagacgggcaccaggatcaagctcatcgactttggtctggccaggaggctggagaatgcggggtctctgaaggtcctctttggcaccccagaatttgtggctcctgaagtgatcaactatgagcccatcggctacgccacagacatgtggagcatcggggtcatctgctacatcctagtcagtggcctttcccccttcatgggagacaacgataacgaaaccttggccaacgttacctcagccacctgggacttcgacgacgaggcattcgatgagatctccgacgatgccaaggatttcatcagcaatctgctgaagaaagatatgaaaaaccgcctggactgcacgcagtgccttcagcatccatggctaatgaaagataccaagaacatggaggccaagaaactctccaaggaccggatgaagaagtacatggcaagaaggaaatggcagaaaacgggcaatgctgtgagagccattggaagactgtcctctatggcaatgatctcagggctcagtggcaggaaatcctcaacagggtcaccaaccagcccgctcaatgcagaaaaactagaatctgaagaagatgtgtcccaagctttccttgaggctgttgctgaggaaaagcctcatgtaaaaccctatttctctaagaccattcgcgatttagaagttgtggagggaagtgctgctagatttgactgcaagattgaaggatacccagaccccgaggttgtctggttcaaagatgaccagtcaatcagggagtcccgccacttccagatagactacgatgaggacgggaactgctctttaattattagtgatgtttgcggggatgacgatgccaagtacacctgcaaggctgtcaacagtcttggagaagccacctgcacagcagagctcattgtggaaacgatggaggaaggtgaaggggaaggggaagaggaagaagagtgaaacaaagccagagaaaagcagtttctaagtcatattaaaaggactatttctctcaaaatccaaaaaaaa

SEQ ID NO: 454526 - DNA, 1028 bp, Homo sapiens
gcacgagctcgtgccgctcgtgccgcgactttggtctggccaggaggctggagaatgcggggtctctgaaggtcctctttggcaccccagaatttgtggctcctgaagtgatcaactatgagcccatcggctacgccacagacatgtggagcatcggggtcatctgctacatcctagtcagtggcctttcccccttcatgggagacaacgataacgaaaccttggccaacgttacctcagccacctgggacttcgacgacgaggcattcgatgagatctccgacgatgccaaggatttcatcagcaatctgctgaagaaagatatgaaaaaccgcctggactgcacgcagtgccttcagcatccatggctaatgaaagataccaagaacatggaggccaagaaactctccaaggaccggatgaagaagtacatggcaagaaggaaatggcagaaaacgggcaatgctgtgagagccattggaagactgtcctctatggcaatgatctcagggctcagtggcaggaaatcctcaacagggtcaccaaccagcccgctcaatgcagaaaaactagaatctgaagaagatgtgtcccaagctttccttgaggctgttgctgaggaaaagcctcatgtaaaaccctatttctctaagaccattcgcgatttagaagttgtggagggaagtgctgctagatttgactgcaagattgaaggatacccagaccccgaggttgtctggttcaaagatgaccagtcaatcagggagtcccgccacttccagatagactacgatgaggacgggaactgctctttaattattagtgatgtttgcggggatgacgatgccaagtacacctgcaaggctgtcaacagtcttggagaagccacctgcacagcagagctcattgtggaaacgatggaggaaggtgaaggggaaggggaagaggaagaagagtgaaacaaagccagagaaaagcagtttctaagtcatattaaaaggactatttctctcaaaatccaaaaaaaa

SEQ ID NO: 454527 - DNA, 4098 bp, Homo sapiens
  misc_feature (832)..(832): n is a, c, g, or t
  misc_feature (893)..(893): n is a, c, g, or t
  misc_feature (951)..(951): n is a, c, g, or t
  misc_feature (1001)..(1001): n is a, c, g, or t
  misc_feature (3974)..(3974): n is a, c, g, or t
tatgcttttctgtacactgctaagttacagcatttgggtttggaattttcagtagatgtttgtttgtccctggattggtttttttttccttctgtttagtgaacagaaacagattccatgccctcagggtatggtagcaccagccactattaagaagcccaaaggacagaacctgaagctttgacaatgtaccctagggctggggggagttcaaaggccaaagacgttcagcaccagggaagctggaaggagccagcagggtgggaccacggtgatgaggaagtgcctggggagggaaattttggtgtatacagcattctactaacagtctttccacccttccccctttttccaggtttggacagtgccaataggtatgtctaggctttgtgacttttacgttttccctcttgaaatgccctgcaaggatgttaccgagaaatgccctgaatttctgaatcatcttatggggcagaagaattggccatttggaggatgttgttttattttgggtgttttgtcttgttctcctattgtaatatgacacacgggttctatctctggttgctgtcagtattgagactggaaaactcagtgttgccacctttcacagtatctacacagtctcttctctggttagcatcctgaggaagaacactgctctgagaaggccgccttcctcattccagggcggaatctgttcactcatccagcccagacccagcaggagcctctttcctgtgtgtgaggctcggcgctagatgctggatgtgcaggggtgggcgtagaggagggcttaaaccacacgaacgcacattaccaactgggatgngtctgtgaggaaggacaacaggaaggcactgattagaatagaggggcagggaagccatttngggaacttggtatttgagctcagacctgtgcaaaggaatgttagctggtgaagaaaanctcagggagtgtgctccaaacagcagggatagcatgtacaagctgtgaancaagagatgggcccatggggacccagaaggacgccagtgtggccgcagcctggtgaatggcaggccaatgtctgtacgatcaggagctggcattcctgtgggccctcttgtggggctcagtttcattcttaaagtagtggaaaagctgttggaaaatccttgggcttgaaatgacataatttgattaatgtttttaaaagatcgactatggtcgctgtatagaaaatagattagagagggcagagtggacacgggacaccggtggcagaggttgaactacggaggcactagtagagaagggaactgtagggaaagcagggctctgggcagggttgtgggacaggcaagtgtcgggaatggctgcttgtgctgtggcttgggaaactgggcaaactgcagagaaagatgctcttacttgcccttaacttgtgggcttttgtgatccctggaatccgtgcttgtgatgagtaatatttgtgagtaaccagatgatcattctattctcccctctcctcacccaccctacccccaccctcaccaccaataggtcatttgtgagagaaacaaaagccaccaattcagatgtcaggaaagaggtgaccaatgtaatctcaaaggagtcgaagctggacagtctggaggctgcagccaaaagcaagaactgctccagcccccagagaggtggctccccaccctgggctgcaaacagccagcctcagcccccaagggagtccaagctggagtcatgcaaggactcgcccagaacggccccgcagaccccggtccttcagaagacttccagctccatcaccctgcaggccgcaagagttcagccggaaccaagagcaccaggcctgggggtcctatcaccttctggagaagagaggaagaggccagctcctccccgtccagccaccttccccaccaggcagcctggcctggggagccaagatgttgtgagcaaggctgctaacaggagaatccccatggagggccagagggattcagcattccccaaatttgagagcaagccccaaagccaggaggtcaaggaaaatcaaactgtcaagttcagatgtgaagtttccgggattccaaagcctgaagtggcctggttcctggaaggcacccccgtgaggagacaggaaggcagcattgaggtttatgaagatgctggctcccattacctctgcctgctgaaagcccggaccagggacagtgggacatacagctgcactgcttccaacgcccaaggccaggtgtcctgtagctggaccctccaagtggaaaggcttgccgtgatggaggtggccccctccttctccagtgtcctgaaggactgcgctgttattgagggccaggattttgtgctgcagtgctccgtacgggggaccccagtgccccggatcacttggctgctgaatgggcagcccatccagtacgctcgctccacctgcgaggccggcgtggctgagctccacatccaggatgccctgccggaggaccatggcacctacacctgcctagctgagaatgccttggggcaggtgtcctgcagcgcctgggtcaccgtccatgaaaagaagagtagcaggaagagtgagtaccttctgcctgtggctcccagcaagcccactgcacccatcttcctgcagggcctctctgatctcaaagtcatggatggaagccaggtcactatgactgtccaagtgtcagggaatccaccccctgaagtcatctggctgcacaatgggaatgagatccaagagtcagaggacttccactttgaacagagaggaactcagcacagcctttggatccaggaagtgttcccggaggacacgggcacgtacacctgcgaggcctggaacagcgctggagaggtccgcacccaggccgtgctcacggtacaagagcctcacgatggcacccagccctggttcatcagtaagcctcgctcagtgacagcctccctgggccagagtgtcctcatctcctgcgccatagctggtgacccctttcctaccgtgcactggctcagagatggcaaagccctctgcaaagacactggccacttcgaggtgcttcagaatgaggacgtgttcaccctggttctaaagaaggtgcagccctggcatgccggccagtatgagatcctgctcaagaaccgggttggcgaatgcagttgccaggtgtcactgatgctacagaacagctctgccagagcccttccacgggggagggagcctgccagctgcgaggacctctgtggtggaggagttggtgctgatggtggtggtagtgaccgctatgggtccctgaggcctggctggccagcaagagggcagggttggctagaggaggaagacggcgaggacgtgcgaggggtgctgaagaggcgcgtggagacgaggcagcacactgaggaggcgatccgccagcaggaggtggagcagctggacttccgagacctcctggggaagaaggtgagtacaaagaccctatcggaagacgacctgaaggagatcccagccgagcagatggatttccgtgccaacctgcagcggcaagtgaagccaaagactgtgtctgaggaagagaggaaggtgcacagcccccagcaggtcgattttcgctctgtcctggccaagaaggggacttccaagacccccgtgcctgagaaggtgccaccgccaaaacctgccaccccggattttcgctcagtgctgggtggcaagaagaaattaccagcagagaatggcagcagcagtgccgagaccctgaatgccaaggcagtggagagttccaagcccctgagcaatgcacagccttcagggcccttgaaacccgtgggcaacgccaagcctgctgagaccctgaagccaatgggcaacgccaagcctgccgagaccctgaagcccatgggcaatgccaagcctgatgagaacctgaaatccgctagcaaagaagaancagctcatgaggctacggaaacaggccgagaagaacgtggagaagaaaattgacaaatacacagaggtcctcaagacccacggactcctggtctgagcccaataaagactgttaattcctcaaa

SEQ ID NO: 454528 - DNA, 308 bp, Homo sapiens
aggccacatatagtctccatcacattcttctttttttattttataacctttaaagaaatgtaaaagccattgttagcctgcagaccccacagaaatagggccaggcagtttcccgaccctggctctggttcatcagttttgattgctgtataatgttagctagaccatgctttattaatccattcttccatcagtgatgcttggtccatttttaagcttttgctgttgggcagagtgtattctcagtatcttctggtatacatgagccaaagtatctttgggaagttctccaggaggtgtggaattgc

SEQ ID NO: 454529 - DNA, 656 bp, Homo sapiens
ttttttttaatccccgcaccaagcgcttaacctcattggggtggaggagaaggcggcggctctctggtccgcagcggcaacagtaacgaaaaacagggctaatggactgctgaattatgaagtatttcagacccagtagtagaacatcactctgccactcactcctttatctcctactagttatttaaattggacttttaatatcctaccagctgctcttcagacacacatggtgcattgttgccattccccagattgcatctttgaaacacaggctcttaggtaaccttcagcgaacaaagagggcaacctcccagatacgtctgctggggagggagtcatcgtgactgccctctaggcttttgctgggatctgggatttgaattcccactatggagcctcgcatggagtcctgcctggcgcaggtgttgcagaaggatgtggggaaacgattgcaggttggccaagaactgatagactatttctcagacaaacagaagtctgctgaccttgagcatgaccagaccatgttagataaacttgtggatggacttgctacctcttgggtgaactctagcaattacaaggtaagctgtgctttagaaggcacttttggaggtggctgggctgcactggtagatcaaaattggccctta

SEQ ID NO: 454530 - DNA, 626 bp, Homo sapiens
acctaatggaaaactgcttttctgtttttatttccctaatctataagcacaggaaaagtgtgtgtgtgcatgtgtctttttacacttaactctttgttgtagattttgtttggtgtgactcacagtcatttcacctttctatttcttcctcaatcactcccatccctcattggacctgtcagaagaagcctgtgaggaggagatatgagccgtatgggatgtattctgacgatgatgccaacagtgatgcctcaagtgtttgctctgagcgctcatatggctccaggaatggtggcattccccattatctgcggcagactgaggatgtagcagaagttctcaaccactgtgctagttcaaactggtcagaaaggaaagaagggcttctgggcctgcagaacttactgaagagccaaagaacactgaggtgaggaccacagcaagaatatgagctaagtttgaatctcctgttggactcttcaggggtttaagaggtctgcttgcaggaacaggcactaaaggtaccaagatgactaagacacagtccttgccatccatttgctttgccatccatttgctttgaaatatctggcaaatatcctttttttctttactttttttttttt

SEQ ID NO: 454531 - DNA, 8626 bp, Homo sapiens
ttttttttaatccccgcaccaagcgcttaacctcattggggtggaggagaaggcggcggctctctggtccgcagcggcaacagtaacgaaaaacagggctaatggactgctgaattatgaagtatttcagacccagtagtagaacatcactctgccactcactcctttatctcctactagttatttaaattggacttttaatatcctaccagctgctcttcagacacacatggtgcattgttgccattccccagattgcatctttgaaacacaggctcttaggtaaccttcagcgaacaaagagggcaacctcccagatacgtctgctggggagggagtcatcgtgactgccctctaggcttttgctgggatctgggatttgaattcccactatggagcctcgcatggagtcctgcctggcgcaggtgttgcagaaggatgtggggaaacgattgcaggttggccaagaactgatagactatttctcagacaaacagaagtctgctgaccttgagcatgaccagaccatgttagataaacttgtggatggacttgctacctcttgggtgaactctagcaattacaaggtggttctgctgggcatggacatcctgtccgccctggtgacccggctgcaggatcggttcaaggcgcagatcggcacagtgctgccaagtctaatagacagactaggagatgctaaagactctgtgagggagcaggaccaaactctgctgctaaagatcatggatcaagctgctaatccccagtacgtatgggacagaatgcttggaggcttcaaacacaagaatttccgtactcgagaaggcatctgtctctgccttatagcaacactcaatgcctctggagcacagactttaacactaagcaagattgtgccacatatatgcaacttacttggagatccaaacagccaggttcgagatgcagcaataaacagcttagtggaaatttacagacatgtaggagaacgtgtgagggcagatctcagtaaaaaaggattgccacagtcccggttgaatgtaatttttacaaaatttgatgaagtccagaaatctggaaacatgatacaatctgcaaatgataaaaatttcgacgatgaagattctgtggatggtaacagaccttcctctgctagttctacatcatccaaggctccaccaagttctcggagaaacgttggaatgggaaccacccgccggcttggttcatccacccttggatccaagtcttcagctgcaaaagaaggagctggtgctgttgatgaagaggattttattaaagcatttgatgatgtacctgtagtacagatttattccagccgagaccttgaggaatccataaacaaaattagggaaatattatctgatgacaagcatgattgggagcagagagtaaatgctctaaaaaagattagatctttacttttggctggtgctgctgagtatgataacttctttcaacatttgcgtcttttggatggagcctttaaactctctgctaaggacctgcggtctcaggtagtgcgggaggcttgtatcacgttggggcatctgtcatcagttctggggaataagtttgaccatggagctgaagccattatgccaactatctttaatttaattccaaacagtgccaaaattatggccacatctggtgttgtagctgttaggttaattattcggcacacacacatccctaggttaatacctgtcataacaagcaactgtacctctaagtctgtcgcagttagaaggcgctgttttgaatttttagatttgcttttacaagaatggcagacacattcactagaacgacacatatcagtattagctgaaacaataaagaagggaatacatgatgctgattccgaagcaagaatagaagccagaaaatgttactggggtttccacagtcacttcagcagagaagcagagcacttgtaccacaccttggagtcctcctaccagaaagccctgcagtcccacctgaagaactcagacagcatagtgtctctgcctcagtcagaccgctcatcttccagctctcaagagagtctaaatcgtccgctgtctgccaaaagaagtcctactggaagtaccacatctagagcttctacagttagtaccaaatctgtgtcaacgactgggtccctccagcgatctcgaagtgatattgatgtgaacgcagcagccagtgccaaatccaaagtctcctcatcttcgggcacgacgcctttcagctctgcagcagctttgcctccagggtcatacgcatccttaggtcggatccgcacaagacggcaaagctctgggagtgccaccaacgtcgcctctacacctgataaccggggccgcagtcgcgctaaagtggtttcacagtcccagcgatccagatctgctaatcctgctggtgctggcagccggtcaagttccccaggaaaattgttgggaagtggttatggtggacttactgggggctcctcacgaggcccacctgtgacaccgtcttcagaaaagcgaagcaagattcccaggagccagggatgtagccgggaaacaagtccaaaccgaataggattagcacggagcagccgtatccctcgacccagcatgagtcaggggtgcagccgcgataccagccgtgagagcagccgagatacaagccctgctcggggctttcctccacttgatcggtttgggcttggccagccaggaagaatacctggttctgtgaatgccatgagagttctgagcacaagtacagatcttgaagctgctgttgctgatgctttgaagaagcctgtgaggaggagatatgagccgtatgggatgtattctgacgatgatgccaacagtgatgcctcaagtgtttgctctgagcgctcatatggctccaggaatggtggcattccccattatctgcggcagactgaggatgtagcagaagttctcaaccactgtgctagttcaaactggtcagaaaggaaagaagggcttctgggcctgcagaacttactgaagagccaaagaacactgagtcgagttgaactgaaaaggttgtgtgagatcttcactcggatgtttgctgaccctcatagcaagagagttttcagtatgtttttggagactcttgtggattttataataattcataaggatgatttacaagactggctttttgttcttctcacacaattacttaagaaaatgggagcagatttacttggatctgtgcaagcaaaagttcaaaaggctctagatgtcacaagggactcctttccatttgatcaacaatttaacattttgatgagatttattgtggatcaaactcaaactccaaacctcaaggtcaaagttgcaatcctgaaatacattgagtctctggccagacagatggatccaacagattttgtaaactctagtgagacaaggcttgctgtttctagaatcataacctggacaacagaaccaaagagttcagacgtgagaaaggcagcacagattgtgctaatctctctgtttgaattgaatactcctgaatttaccatgttacttggtgccttgccaaaaacattccaggatggtgccaccaaactcctgcacaaccacctcaagaattccagtaacaccagtgtggtgagtgctttggtcacgattggtgcctatgtgatgtccatgacctctgcgtagcccttatctagaacctactctaatagaataccccgtttccttgtcctctttcaggaaatgtcgagcatcctgaggatggggccatcttaagccccagtgaatgaatgaatctgatatttaagtatgccgttttttctcaggttgttcagtcaactacattttcactaggttatccagttagtcattcattcactgagttggtcttatttttcaacactggaaagatgcaagtgctcaattttgtctgtcactctagcacacccaacatcaatcatttgactccaggagtgcttgtatgatgattattcatttttggtttatatacacttaaaattggccttatgattctaagggaaaaaaaaaaccatcctgggcagattctacccatttatttacatgtgggttaaaagaccaaggaaagaatagaatatattctatatacagcccttgaataacgatgcctattctgcttcaccccagggctctccaagcaatacgattggccggacgccctcccgacacaccagcagcaggaccagccccctgacctcacccaccaactgttcccatgggggtctgtctccaagtcggttatggggttggagtgccgacgggttagcgaagcacccacctcccttttctcagcctaactccatccccaccgctccctcccacaaggctctcaggcgctcttactctcccagcatgctggactatgatacagagaacctgaactctgaagaaatctatagttctctacgtggagttacagaagccattgaaaagtttagttttcgaagccaagaagatctgaatgagccaattaaacgagatggcaaaaaggagtgtgatattgtgtcccgcgatgggggcgctgcctcccctgccactgagggccgggggggtagtgaagtagaaggaggccggacagctctggataacaagacctcactactcaacacccagcctccgcgcgccttcccggggccgcgggcgcgagactacaacccgtacccctactcagatgccatcaacacctacgacaagaccgccctgaaagaggctgtgttcgatgacgacatggagcagcttcgagacgtgcccatcgaccattctgacctggtggctgaccttctgaaagagctgtccaaccacaatgagcgagtggaggaacggaagggagccctgctggagctgctcaagatcacgcgggaagacagccttggtgtctgggaggagcacttcaagaccattctgctcctgctgctggagacccttggagacaaagaccattcaattcgagcactggcgttaagagttttgagggaaattctgagaaatcaaccagcaagatttaaaaactacgccgagctgacgattatgaagactctggaagcccacaaagactcccataaggaggtggtgagagcggctgaggaggctgcgtccacactggccagttccatccacccggagcagtgcatcaaggtgctctgccccatcatccagacggccgactaccccatcaaccttgctgccatcaagatgcagaccaaagtcgtcgagaggatcgcaaaggagtcattgctgcagctccttgtcgacatcatcccaggcttgctgcagggttatgacaacaccgaaagtagtgtgcgtaaggccagcgtgttttgcttagtggcaatttattccgtaatcggagaagacctgaaacctcaccttgcacagctcacagggagcaagatgaagctactaaacttatacataaagagggcccagaccaccaacagcaacagcagctcctcctccgatgtctccacgcacagctaatggcagtacctgtctcttgtgtagacctagaagcaatcggtggtgcctctcagagacctttccccacccccttcatcggctgcccagtcagtacaaggaggcccacaaatatttattacaatcagtattttggtcccttccagcttttctgtagaatcttactggtattgaatgtaaaggaagcaaggcctgtattgcagtcttcatacaaaacaaaaggaataagaacagaaaagagccatactgaaacatgtcttgtacagcctgctgagatggcgaaaccctgtgtgtggggtgcagtttttaaaaatcagagcgctctagccactacttggtagaaagtagcattttttttttcagttaataacatatttgggggtggggtggggtgttactttgtgttcttcctccttagcctattttcttgtgcgtatggtctgtgtggggcccctttcacagctgacaccacgaaaggtgatatatctttaagttgtgttctgagacctactaaaaatgggaatcaagtcttggcaagaacagtctgaagatggccttttaacaaacgctgggaattttgcttgtcatatccagactggaggccgactgccctggctttcagcgtagaattgggagtgcaccctgacagtctccttccagctctccctaatcgactccaccgacaaggtccctaccccagagcttccatgcaaaggaattcttcaagtttaaatctggacacaaaaataagataaatgtatggcatcatttagggatgcctgagatggcagttcatgaagcacagaagataaagaagaagtctttcatctttactgctgagatccttgggaacactgttgtcatgggggctctgccaagaccctcatctctgggctacacggtgattcagattgagcaccaacttgtttcctcccctcaaagttctgcctaagccgttcagttctaacatggtctcagttaatctggtaaatggcatctttaccatcttagttctgacttctcagtttaatgtgggattaagagccaagaaaagcctagagagactggatatcacaattttttttaattttataaactgaagtagttccttgaatgtctgttgatgaaatagtcactgtttaaggaaaaaagtaattatgaggtgtagcagattgcagaaaaacaggattagaaacacacttaaaaagaacacacatttagagtctctcttcctcctcagcgaaccactaggccccctttttaaaaacacctttagagcctaattactccaataaaagtaactagaggtttggagtctggttaaataaattctgagtaaaattcttaagccaaatggaaattcttaatgcaatcatgaggacttctattgtctcttactgttgtattagatcctataaattgaactgatttttccataaggaaaatgcttcttttgagattaattctaataacgtatttgctattgcagtgcagagcccactgcaactgctaggactgaaagcagaggctgggtgccagagcacgtgattcttaacatcatttccacagacccctctgccctgaccctctgcattggatgcaggaagctgggaaagactgatgttgatttggaaacatgggctgaaaatgaaggccccatagtgcataggaacagtaaagccagggtgctgacgtgtgtgtgtgtgtgtgtgtgtgtgtgtgtgtgtgtgtgtgttgtgtgtgtttgtgcgtgcaccctacacatgtgtggtacctcactgctgctgtttagggaacttgagggacgcgtttcaaggggttgggtattactgacgagctttggctcaaaatatagcaggaccaggtcttttgttgataagtactgtttgtttattaatatgtcattaatggtatttcttttttacactctacaagtgaattagggagtctcttgttgacccctttgttgcaggaatgtgcgtcgggctaggttatccatgagtttctttattcctaatgcagttagaaagacctttctccttgagctctttgactcccagaaggtaccccagtccccagtgtacttagaaaggatctcgaacattgctggacgtcctcatagtactcacaaagggctagccttgaatgtcactcgcccagtcttcagtctcctgacttagagatacaatcacgtcacaggtctcttggcctcaatctgaaaactgctgccgccgcgccgaggagactcgcatgccgccaccacctcactgggagggcgccgagcccaccgtcgccccctagaccctgacagctgcagctgccttgccttgccgccgcctccctgcagggcccctgttccaatgaaaaacagaacacaaaagagcagagcacctaagcctgtctctgcctccctgtctaccggactggccagggcccaagacccccgctgctccactgcggggctgggcgggctgactccctgcttcctccaagctgctgcctcccctgcagccagggtctgggcagggtgcagccggtcctcggggcacgcagcttccttcaagtacactgtgtgtgcttcccggacctgcggcgatgccacgggcctgccttttctatgcgcctcactagcttaccaccctgtgcaggtaatgcaactgactttgtctcatcagtctttttctttccctgccaccctttatttatcaagcgtaatgttacactttaaaggacagcaaataagaactttgtagaatcccaccaggactttgctaacaataatgtttggaaataaagaagtgctctgaaaaaatatcagccaccaaaatagttatgttggcactgtgttcacacgcatggtccccacacccccaggttgggtgggtttttttgttttttgggtttttttggggggggggctttttcatgttacatccatatctgtatttatatcttatttgtttcactttcaagtgtatcatggcaaatgtacagatttttttgttaataatgtgctaggatttgctaaaaaagaaaacaaaaaaaacccttttgagtttgccctagaataaatgagacttaattca

SEQ ID NO: 454532 - DNA, 8526 bp, Homo sapiens
ttttttttaatccccgcaccaagcgcttaacctcattggggtggaggagaaggcggcggctctctggtccgcagcggcaacagtaacgaaaaacagggctaatggactgctgaattatgaagtatttcagacccagtagtagaacatcactctgccactcactcctttatctcctactagttatttaaattggacttttaatatcctaccagctgctcttcagacacacatggtgcattgttgccattccccagattgcatctttgaaacacaggctcttaggtaaccttcagcgaacaaagagggcaacctcccagatacgtctgctggggagggagtcatcgtgactgccctctaggcttttgctgggatctgggatttgaattcccactatggagcctcgcatggagtcctgcctggcgcaggtgttgcagaaggatgtggggaaacgattgcaggttggccaagaactgatagactatttctcagacaaacagaagtctgctgaccttgagcatgaccagaccatgttagataaacttgtggatggacttgctacctcttgggtgaactctagcaattacaaggtggttctgctgggcatggacatcctgtccgccctggtgacccggctgcaggatcggttcaaggcgcagatcggcacagtgctgccaagtctaatagacagactaggagatgctaaagactctgtgagggagcaggaccaaactctgctgctaaagatcatggatcaagctgctaatccccagtacgtatgggacagaatgcttggaggcttcaaacacaagaatttccgtactcgagaaggcatctgtctctgccttatagcaacactcaatgcctctggagcacagactttaacactaagcaagattgtgccacatatatgcaacttacttggagatccaaacagccaggttcgagatgcagcaataaacagcttagtggaaatttacagacatgtaggagaacgtgtgagggcagatctcagtaaaaaaggattgccacagtcccggttgaatgtaatttttacaaaatttgatgaagtccagaaatctggaaacatgatacaatctgcaaatgataaaaatttcgacgatgaagattctgtggatggtaacagaccttcctctgctagttctacatcatccaaggctccaccaagttctcggagaaacgttggaatgggaaccacccgccggcttggttcatccacccttggatccaagtcttcagctgcaaaagaaggagctggtgctgttgatgaagaggattttattaaagcatttgatgatgtacctgtagtacagatttattccagccgagaccttgaggaatccataaacaaaattagggaaatattatctgatgacaagcatgattgggagcagagagtaaatgctctaaaaaagattagatctttacttttggctggtgctgctgagtatgataacttctttcaacatttgcgtcttttggatggagcctttaaactctctgctaaggacctgcggtctcaggtagtgcgggaggcttgtatcacgttggggcatctgtcatcagttctggggaataagtttgaccatggagctgaagccattatgccaactatctttaatttaattccaaacagtgccaaaattatggccacatctggtgttgtagctgttaggttaattattcggcacacacacatccctaggttaatacctgtcataacaagcaactgtacctctaagtctgtcgcagttagaaggcgctgttttgaatttttagatttgcttttacaagaatggcagacacattcactagaacgacacatatcagtattagctgaaacaataaagaagggaatacatgatgctgattccgaagcaagaatagaagccagaaaatgttactggggtttccacagtcacttcagcagagaagcagagcacttgtaccacaccttggagtcctcctaccagaaagccctgcagtcccacctgaagaactcagacagcatagtgtctctgcctcagtcagaccgctcatcttccagctctcaagagagtctaaatcgtccgctgtctgccaaaagaagtcctactggaagtaccacatctagagcttctacagttagtaccaaatctgtgtcaacgactgggtccctccagcgatctcgaagtgatattgatgtgaacgcagcagccagtgccaaatccaaagtctcctcatcttcgggcacgacgcctttcagctctgcagcagctttgcctccagggtcatacgcatccttaggtcggatccgcacaagacggcaaagctctgggagtgccaccaacgtcgcctctacacctgataaccggggccgcagtcgcgctaaagtggtttcacagtcccagcgatccagatctgctaatcctgctggtgctggcagccggtcaagttccccaggaaaattgttgggaagtggttatggtggacttactgggggctcctcacgaggcccacctgtgacaccgtcttcagaaaagcgaagcaagattcccaggagccagggatgtagccgggaaacaagtccaaaccgaataggattagcacggagcagccgtatccctcgacccagcatgagtcaggggtgcagccgcgataccagccgtgagagcagccgagatacaagccctgctcggggctttcctccacttgatcggtttgggcttggccagccaggaagaatacctggttctgtgaatgccatgagagttctgagcacaagtacagatcttgaagctgctgttgctgatgctttgaagaagcctgtgaggaggagatatgagccgtatgggatgtattctgacgatgatgccaacagtgatgcctcaagtgtttgctctgagcgctcatatggctccaggaatggtggcattccccattatctgcggcagactgaggatgtagcagaagttctcaaccactgtgctagttcaaactggtcagaaaggaaagaagggcttctgggcctgcagaacttactgaagagccaaagaacactgagtcgagttgaactgaaaaggttgtgtgagatcttcactcggatgtttgctgaccctcatagcaagagaaaatgggagcagatttacttggatctgtgcaagcaaaagttcaaaaggctctagatgtcacaagggactcctttccatttgatcaacaatttaacattttgatgagatttattgtggatcaaactcaaactccaaacctcaaggtcaaagttgcaatcctgaaatacattgagtctctggccagacagatggatccaacagattttgtaaactctagtgagacaaggcttgctgtttctagaatcataacctggacaacagaaccaaagagttcagacgtgagaaaggcagcacagattgtgctaatctctctgtttgaattgaatactcctgaatttaccatgttacttggtgccttgccaaaaacattccaggatggtgccaccaaactcctgcacaaccacctcaagaattccagtaacaccagtgtggtgagtgctttggtcacgattggtgcctatgtgatgtccatgacctctgcgtagcccttatctagaacctactctaatagaataccccgtttccttgtcctctttcaggaaatgtcgagcatcctgaggatggggccatcttaagccccagtgaatgaatgaatctgatatttaagtatgccgttttttctcaggttgttcagtcaactacattttcactaggttatccagttagtcattcattcactgagttggtcttatttttcaacactggaaagatgcaagtgctcaattttgtctgtcactctagcacacccaacatcaatcatttgactccaggagtgcttgtatgatgattattcatttttggtttatatacacttaaaattggccttatgattctaagggaaaaaaaaaaccatcctgggcagattctacccatttatttacatgtgggttaaaagaccaaggaaagaatagaatatattctatatacagcccttgaataacgatgcctattctgcttcaccccagggctctccaagcaatacgattggccggacgccctcccgacacaccagcagcaggaccagccccctgacctcacccaccaactgttcccatgggggtctgtctccaagtcggttatggggttggagtgccgacgggttagcgaagcacccacctcccttttctcagcctaactccatccccaccgctccctcccacaaggctctcaggcgctcttactctcccagcatgctggactatgatacagagaacctgaactctgaagaaatctatagttctctacgtggagttacagaagccattgaaaagtttagttttcgaagccaagaagatctgaatgagccaattaaacgagatggcaaaaaggagtgtgatattgtgtcccgcgatgggggcgctgcctcccctgccactgagggccgggggggtagtgaagtagaaggaggccggacagctctggataacaagacctcactactcaacacccagcctccgcgcgccttcccggggccgcgggcgcgagactacaacccgtacccctactcagatgccatcaacacctacgacaagaccgccctgaaagaggctgtgttcgatgacgacatggagcagcttcgagacgtgcccatcgaccattctgacctggtggctgaccttctgaaagagctgtccaaccacaatgagcgagtggaggaacggaagggagccctgctggagctgctcaagatcacgcgggaagacagccttggtgtctgggaggagcacttcaagaccattctgctcctgctgctggagacccttggagacaaagaccattcaattcgagcactggcgttaagagttttgagggaaattctgagaaatcaaccagcaagatttaaaaactacgccgagctgacgattatgaagactctggaagcccacaaagactcccataaggaggtggtgagagcggctgaggaggctgcgtccacactggccagttccatccacccggagcagtgcatcaaggtgctctgccccatcatccagacggccgactaccccatcaaccttgctgccatcaagatgcagaccaaagtcgtcgagaggatcgcaaaggagtcattgctgcagctccttgtcgacatcatcccaggcttgctgcagggttatgacaacaccgaaagtagtgtgcgtaaggccagcgtgttttgcttagtggcaatttattccgtaatcggagaagacctgaaacctcaccttgcacagctcacagggagcaagatgaagctactaaacttatacataaagagggcccagaccaccaacagcaacagcagctcctcctccgatgtctccacgcacagctaatggcagtacctgtctcttgtgtagacctagaagcaatcggtggtgcctctcagagacctttccccacccccttcatcggctgcccagtcagtacaaggaggcccacaaatatttattacaatcagtattttggtcccttccagcttttctgtagaatcttactggtattgaatgtaaaggaagcaaggcctgtattgcagtcttcatacaaaacaaaaggaataagaacagaaaagagccatactgaaacatgtcttgtacagcctgctgagatggcgaaaccctgtgtgtggggtgcagtttttaaaaatcagagcgctctagccactacttggtagaaagtagcattttttttttcagttaataacatatttgggggtggggtggggtgttactttgtgttcttcctccttagcctattttcttgtgcgtatggtctgtgtggggcccctttcacagctgacaccacgaaaggtgatatatctttaagttgtgttctgagacctactaaaaatgggaatcaagtcttggcaagaacagtctgaagatggccttttaacaaacgctgggaattttgcttgtcatatccagactggaggccgactgccctggctttcagcgtagaattgggagtgcaccctgacagtctccttccagctctccctaatcgactccaccgacaaggtccctaccccagagcttccatgcaaaggaattcttcaagtttaaatctggacacaaaaataagataaatgtatggcatcatttagggatgcctgagatggcagttcatgaagcacagaagataaagaagaagtctttcatctttactgctgagatccttgggaacactgttgtcatgggggctctgccaagaccctcatctctgggctacacggtgattcagattgagcaccaacttgtttcctcccctcaaagttctgcctaagccgttcagttctaacatggtctcagttaatctggtaaatggcatctttaccatcttagttctgacttctcagtttaatgtgggattaagagccaagaaaagcctagagagactggatatcacaattttttttaattttataaactgaagtagttccttgaatgtctgttgatgaaatagtcactgtttaaggaaaaaagtaattatgaggtgtagcagattgcagaaaaacaggattagaaacacacttaaaaagaacacacatttagagtctctcttcctcctcagcgaaccactaggccccctttttaaaaacacctttagagcctaattactccaataaaagtaactagaggtttggagtctggttaaataaattctgagtaaaattcttaagccaaatggaaattcttaatgcaatcatgaggacttctattgtctcttactgttgtattagatcctataaattgaactgatttttccataaggaaaatgcttcttttgagattaattctaataacgtatttgctattgcagtgcagagcccactgcaactgctaggactgaaagcagaggctgggtgccagagcacgtgattcttaacatcatttccacagacccctctgccctgaccctctgcattggatgcaggaagctgggaaagactgatgttgatttggaaacatgggctgaaaatgaaggccccatagtgcataggaacagtaaagccagggtgctgacgtgtgtgtgtgtgtgtgtgtgtgtgtgtgtgtgtgtgtgtgttgtgtgtgtttgtgcgtgcaccctacacatgtgtggtacctcactgctgctgtttagggaacttgagggacgcgtttcaaggggttgggtattactgacgagctttggctcaaaatatagcaggaccaggtcttttgttgataagtactgtttgtttattaatatgtcattaatggtatttcttttttacactctacaagtgaattagggagtctcttgttgacccctttgttgcaggaatgtgcgtcgggctaggttatccatgagtttctttattcctaatgcagttagaaagacctttctccttgagctctttgactcccagaaggtaccccagtccccagtgtacttagaaaggatctcgaacattgctggacgtcctcatagtactcacaaagggctagccttgaatgtcactcgcccagtcttcagtctcctgacttagagatacaatcacgtcacaggtctcttggcctcaatctgaaaactgctgccgccgcgccgaggagactcgcatgccgccaccacctcactgggagggcgccgagcccaccgtcgccccctagaccctgacagctgcagctgccttgccttgccgccgcctccctgcagggcccctgttccaatgaaaaacagaacacaaaagagcagagcacctaagcctgtctctgcctccctgtctaccggactggccagggcccaagacccccgctgctccactgcggggctgggcgggctgactccctgcttcctccaagctgctgcctcccctgcagccagggtctgggcagggtgcagccggtcctcggggcacgcagcttccttcaagtacactgtgtgtgcttcccggacctgcggcgatgccacgggcctgccttttctatgcgcctcactagcttaccaccctgtgcaggtaatgcaactgactttgtctcatcagtctttttctttccctgccaccctttatttatcaagcgtaatgttacactttaaaggacagcaaataagaactttgtagaatcccaccaggactttgctaacaataatgtttggaaataaagaagtgctctgaaaaaatatcagccaccaaaatagttatgttggcactgtgttcacacgcatggtccccacacccccaggttgggtgggtttttttgttttttgggtttttttggggggggggctttttcatgttacatccatatctgtatttatatcttatttgtttcactttcaagtgtatcatggcaaatgtacagatttttttgttaataatgtgctaggatttgctaaaaaagaaaacaaaaaaaacccttttgagtttgccctagaataaatgagacttaattca

SEQ ID NO: 454533 - DNA, 8537 bp, Homo sapiens
ttttttttaatccccgcaccaagcgcttaacctcattggggtggaggagaaggcggcggctctctggtccgcagcggcaacagtaacgaaaaacagggctaatggactgctgaattatgaagtatttcagacccagtagtagaacatcactctgccactcactcctttatctcctactagttatttaaattggacttttaatatcctaccagctgctcttcagacacacatggtgcattgttgccattccccagattgcatctttgaaacacaggctcttaggtaaccttcagcgaacaaagagggcaacctcccagatacgtctgctggggagggagtcatcgtgactgccctctaggcttttgctgggatctgggatttgaattcccactatggagcctcgcatggagtcctgcctggcgcaggtgttgcagaaggatgtggggaaacgattgcaggttggccaagaactgatagactatttctcagacaaacagaagtctgctgaccttgagcatgaccagaccatgttagataaacttgtggatggacttgctacctcttgggtgaactctagcaattacaaggtggttctgctgggcatggacatcctgtccgccctggtgacccggctgcaggatcggttcaaggcgcagatcggcacagtgctgccaagtctaatagacagactaggagatgctaaagactctgtgagggagcaggaccaaactctgctgctaaagatcatggatcaagctgctaatccccagtacgtatgggacagaatgcttggaggcttcaaacacaagaatttccgtactcgagaaggcatctgtctctgccttatagcaacactcaatgcctctggagcacagactttaacactaagcaagattgtgccacatatatgcaacttacttggagatccaaacagccaggttcgagatgcagcaataaacagcttagtggaaatttacagacatgtaggagaacgtgtgagggcagatctcagtaaaaaaggattgccacagtcccggttgaatgtaatttttacaaaatttgatgaagtccagaaatctggaaacatgatacaatctgcaaatgataaaaatttcgacgatgaagattctgtggatggtaacagaccttcctctgctagttctacatcatccaaggctccaccaagttctcggagaaacgttggaatgggaaccacccgccggcttggttcatccacccttggatccaagtcttcagctgcaaaagaaggagctggtgctgttgatgaagaggattttattaaagcatttgatgatgtacctgtagtacagatttattccagccgagaccttgaggaatccataaacaaaattagggaaatattatctgatgacaagcatgattgggagcagagagtaaatgctctaaaaaagattagatctttacttttggctggtgctgctgagtatgataacttctttcaacatttgcgtcttttggatggagcctttaaactctctgctaaggacctgcggtctcaggtagtgcgggaggcttgtatcacgttggggcatctgtcatcagttctggggaataagtttgaccatggagctgaagccattatgccaactatctttaatttaattccaaacagtgccaaaattatggccacatctggtgttgtagctgttaggttaattattcggcacacacacatccctaggttaatacctgtcataacaagcaactgtacctctaagtctgtcgcagttagaaggcgctgttttgaatttttagatttgcttttacaagaatggcagacacattcactagaacgacacatatcagtattagctgaaacaataaagaagggaatacatgatgctgattccgaagcaagaatagaagccagaaaatgttactggggtttccacagtcacttcagcagagaagcagagcacttgtaccacaccttggagtcctcctaccagaaagccctgcagtcccacctgaagaactcagacagcatagtgtctctgcctcagtcagaccgctcatcttccagctctcaagagagtctaaatcgtccgctgtctgccaaaagaagtcctactggaagtaccacatctagagcttctacagttagtaccaaatctgtgtcaacgactgggtccctccagcgatctcgaagtgatattgatgtgaacgcagcagccagtgccaaatccaaagtctcctcatcttcgggcacgacgcctttcagctctgcagcagctttgcctccagggtcatacgcatccttaggtcggatccgcacaagacggcaaagctctgggagtgccaccaacgtcgcctctacacctgataaccggggccgcagtcgcgctaaagtggtttcacagtcccagcgatccagatctgctaatcctgctggtgctggcagccggtcaagttccccaggaaaattgttgggaagtggttatggtggacttactgggggctcctcacgaggcccacctgtgacaccgtcttcagaaaagcgaagcaagattcccaggagccagggatgtagccgggaaacaagtccaaaccgaataggattagcacggagcagccgtatccctcgacccagcatgagtcaggggtgcagccgcgataccagccgtgagagcagccgagatacaagccctgctcggggctttcctccacttgatcggtttgggcttggccagccaggaagaatacctggttctgtgaatgccatgagagttctgagcacaagtacagatcttgaagctgctgttgctgatgctttgaagaagcctgtgaggaggagatatgagccgtatgggatgtattctgacgatgatgccaacagtgatgcctcaagtgtttgctctgagcgctcatatggctccaggaatggtggcattccccattatctgcggcagactgaggatgtagcagaagttctcaaccactgtgctagttcaaactggtcagaaaggaaagaagggcttctgggcctgcagaacttactgaagagccaaagaacactgagtcgagttgaactgaaaaggttgtgtgagatcttcactcggatgtttgctgaccctcatagcaagagagttttcagtatgtttttggagactcttgtggattttataataattcataaggatgatttacaagactggctttttgttcttctcacacaattacttaagaaaatgggagcagatttacttggatctgtgcaagcaaaagttcaaaaggctctagatgtcacaagggactcctttccatttgatcaacaatttaacattttgatgagatttattgtggatcaaactcaaactccaaacctcaaggtcaaagttgcaatcctgaaatacattgagtctctggccagacagatggatccaacagattttgtaaactctagtgagacaaggcttgctgtttctagaatcataacctggacaacagaaccaaagagttcagacgtgagaaaggcagcacagattgtgctaatctctctgtttgaattgaatactcctgaatttaccatgttacttggtgccttgccaaaaacattccaggatggtgccaccaaactcctgcacaaccacctcaagaattccagtaacaccagtgtggtgagtgctttggtcacgattggtgcctatgtgatgtccatgacctctgcgtagcccttatctagaacctactctaatagaataccccgtttccttgtcctctttcaggaaatgtcgagcatcctgaggatggggccatcttaagccccagtgaatgaatgaatctgatatttaagtatgccgttttttctcaggttgttcagtcaactacattttcactaggttatccagttagtcattcattcactgagttggtcttatttttcaacactggaaagatgcaagtgctcaattttgtctgtcactctagcacacccaacatcaatcatttgactccaggagtgcttgtatgatgattattcatttttggtttatatacacttaaaattggccttatgattctaagggaaaaaaaaaaccatcctgggcagattctacccatttatttacatgtgggttaaaagaccaaggaaagaatagaatatattctatatacagcccttgaataacgatgcctattctgcttcaccccagggctctccaagcaatacgattggccggacgccctcccgacacaccagcagcaggaccagccccctgacctcacccaccaactgttcccatgggggtctgtctccaagtcggttatggggttggagtgccgacgggttagcgaagcacccacctcccttttctcagcctaactccatccccaccgctccctcccacaaggctctcaggcgctcttactctcccagcatgctggactatgatacagagaacctgaactctgaagaaatctatagttctctacgtggagttacagaagccattgaaaagtttagttttcgaagccaagaagatctgaatgagccaattaaacgagatggcaaaaaggagtgtgatattgtgtcccgcgatgggggcgctgcctcccctgccactgagggccgggggggtagtgaagtagaaggaggccggacagctctggataacaagacctcactactcaacacccagcctccgcgcgccttcccggggccgcgggcgcgagactacaacccgtacccctactcagatgccatcaacacctacgacaagaccgccctgaaagaggctgtgttcgatgacgacatggagcagcttcgagacgtgcccatcgaccattctgacctggtggctgaccttctgaaagagctgtccaaccacaatgagcgagtggaggaacggaagggagccctgctggagctgctcaagatcacgcgggaagacagccttggtgtctgggaggagcacttcaagaccattctgctcctgctgctggagacccttggagacaaagaccattcaattcgagcactggcgttaagagttttgagggaaattctgagaaatcaaccagcaagatttaaaaactacgccgagctgacgattatgaagactctggaagcccacaaagactcccataaggaggtggtgagagcggctgaggaggctgcgtccacactggccagttccatccacccggagcagtgcatcaaggtgctctgccccatcatccagacggccgactaccccatcaaccttgctgccatcaagatgcagaccaaagtcgtcgagaggatcgcaaaggagtcattgctgcagctccttgtcgacatcatcccaggcttgctgcagggttatgacaacaccgaaagtagtgtgcgtaaggccagcgtgttttgcttagtggcaatttattccgtaatcggagaagacctgaaacctcaccttgcacagctcacagggagcaagatgaagctactaaacttatacataaagagggcccagaccaccaacagcaacagcagctcctcctccgatgtctccacgcacagctaatggcagtacctgtctcttgtgtagacctagaagcaatcggtggtgcctctcagagacctttccccacccccttcatcggctgcccagtcagtacaaggaggcccacaaatatttattacaatcagtattttggtcccttccagcttttctgtagaatcttactggtattgaatgtaaaggaagcaaggcctgtattgcagtcttcatacaaaacaaaaggaataagaacagaaaagagccatactgaaacatgtcttgtacagcctgctgagatggcgaaaccctgtgtgtggggtgcagtttttaaaaatcagagcgctctagccactacttggtagaaagtagcattttttttttcagttaataacatatttgggggtggggtggggtgttactttgtgttcttcctccttagcctattttcttgtgcgtatggtctgtgtggggcccctttcacagctgacaccacgaaaggtgatatatctttaagttgtgttctgagacctactaaaaatgggaatcaagtcttggcaagaacagtctgaagatggccttttaacaaacgctgggaattttgcttgtcatatccagactggaggccgactgccctggctttcagcgtagaattgggagtgcaccctgacagtctccttccagctctccctaatcgactccaccgacaaggtccctaccccagagcttccatgcaaaggaattcttcaagtttaaatctggacacaaaaataagataaatgtatggcatcatttagggatgcctgagatggcagttcatgaagcacagaagataaagaagaagtctttcatctttactgctgagatccttgggaacactgttgtcatgggggctctgccaagaccctcatctctgggctacacggtgattcagattgagcaccaacttgtttcctcccctcaaagttctgcctaagccgttcagttctaacatggtctcagttaatctggtaaatggcatctttaccatcttagttctgacttctcagtttaatgtgggattaagagccaagaaaagcctagagagactggatatcacaattttttttaattttataaactgaagtagttccttgaatgtctgttgatgaaatagtcactgtttaaggaaaaaagtaattatgaggtgtagcagattgcagaaaaacaggattagaaacacacttaaaaagaacacacatttagagtctctcttcctcctcagcgaaccactaggccccctttttaaaaacacctttagagcctaattactccaataaaagtaactagaggtttggagtctggttaaataaattctgagtaaaattcttaagccaaatggaaattcttaatgcaatcatgaggacttctattgtctcttactgttgtattagatcctataaattgaactgatttttccataaggaaaatgcttcttttgagattaattctaataacgtatttgctattgcagtgcagagcccactgcaactgctaggactgaaagcagaggctgggtgccagagcacgtgattcttaacatcatttccacagacccctctgccctgaccctctgcattggatgcaggaagctgggaaagactgatgttgatttggaaacatgggctgaaaatgaaggccccatagtgcataggaacaatgtgtggtacctcactgctgctgtttagggaacttgagggacgcgtttcaaggggttgggtattactgacgagctttggctcaaaatatagcaggaccaggtcttttgttgataagtactgtttgtttattaatatgtcattaatggtatttcttttttacactctacaagtgaattagggagtctcttgttgacccctttgttgcaggaatgtgcgtcgggctaggttatccatgagtttctttattcctaatgcagttagaaagacctttctccttgagctctttgactcccagaaggtaccccagtccccagtgtacttagaaaggatctcgaacattgctggacgtcctcatagtactcacaaagggctagccttgaatgtcactcgcccagtcttcagtctcctgacttagagatacaatcacgtcacaggtctcttggcctcaatctgaaaactgctgccgccgcgccgaggagactcgcatgccgccaccacctcactgggagggcgccgagcccaccgtcgccccctagaccctgacagctgcagctgccttgccttgccgccgcctccctgcagggcccctgttccaatgaaaaacagaacacaaaagagcagagcacctaagcctgtctctgcctccctgtctaccggactggccagggcccaagacccccgctgctccactgcggggctgggcgggctgactccctgcttcctccaagctgctgcctcccctgcagccagggtctgggcagggtgcagccggtcctcggggcacgcagcttccttcaagtacactgtgtgtgcttcccggacctgcggcgatgccacgggcctgccttttctatgcgcctcactagcttaccaccctgtgcaggtaatgcaactgactttgtctcatcagtctttttctttccctgccaccctttatttatcaagcgtaatgttacactttaaaggacagcaaataagaactttgtagaatcccaccaggactttgctaacaataatgtttggaaataaagaagtgctctgaaaaaatatcagccaccaaaatagttatgttggcactgtgttcacacgcatggtccccacacccccaggttgggtgggtttttttgttttttgggtttttttggggggggggctttttcatgttacatccatatctgtatttatatcttatttgtttcactttcaagtgtatcatggcaaatgtacagatttttttgttaataatgtgctaggatttgctaaaaaagaaaacaaaaaaaacccttttgagtttgccctagaataaatgagacttaattca

SEQ ID NO: 454534 - DNA, 3621 bp, Homo sapiens
taaaggtgtgaaggttagaggatttgccctctgaccttggcccagccacttcccccctgtggagcggggttctcaccctgctttttccctggctctgatggagcctttgggctgcagtcgtgcttgagatgaatggccctgcccccgtatcccttcctccatgagctgctgcggcccacctagttgtgacacctggtggtggtcttgtaattgcccacggcttttccctctcctctggactctggcctcctccctccctctgtggccctagcacctggcagatgcattggatgggcagcaggcactcagaacatgtttttataatgaattcctcaaccaagggaactaagggacttgctgtttccttactgtcacctgggattctttttgctgttttctactttctgattgcttttcttcctgctaattcagtttcatcttctcttttcagatgaagctactaaacttatacataaagagggcccagaccaccaacagcaacagcagctcctcctccgatgtctccacgcacagctaatggcagtacctgtctcttgtgtagacctagaagcaatcggtggtgcctctcagagacctttccccacccccttcatcggctgcccagtcagtacaaggaggcccacaaatatttattacaatcagtattttggtcccttccagcttttctgtagaatcttactggtattgaatgtaaaggaagcaaggcctgtattgcagtcttcatacaaaacaaaaggaataagaacagaaaagagccatactgaaacatgtcttgtacagcctgctgagatggcgaaaccctgtgtgtggggtgcagtttttaaaaatcagagcgctctagccactacttggtagaaagtagcattttttttttcagttaataacatatttgggggtggggtggggtgttactttgtgttcttcctccttagcctattttcttgtgcgtatggtctgtgtggggcccctttcacagctgacaccacgaaaggtgatatatctttaagttgtgttctgagacctactaaaaatgggaatcaagtcttggcaagaacagtctgaagatggccttttaacaaacgctgggaattttgcttgtcatatccagactggaggccgactgccctggctttcagcgtagaattgggagtgcaccctgacagtctccttccagctctccctaatcgactccaccgacaaggtccctaccccagagcttccatgcaaaggaattcttcaagtttaaatctggacacaaaaataagataaatgtatggcatcatttagggatgcctgagatggcagttcatgaagcacagaagataaagaagaagtctttcatctttactgctgagatccttgggaacactgttgtcatgggggctctgccaagaccctcatctctgggctacacggtgattcagattgagcaccaacttgtttcctcccctcaaagttctgcctaagccgttcagttctaacatggtctcagttaatctggtaaatggcatctttaccatcttagttctgacttctcagtttaatgtgggattaagagccaagaaaagcctagagagactggatatcacaattttttttaattttataaactgaagtagttccttgaatgtctgttgatgaaatagtcactgtttaaggaaaaaagtaattatgaggtgtagcagattgcagaaaaacaggattagaaacacacttaaaaagaacacacatttagagtctctcttcctcctcagcgaaccactaggccccctttttaaaaacacctttagagcctaattactccaataaaagtaactagaggtttggagtctggttaaataaattctgagtaaaattcttaagccaaatggaaattcttaatgcaatcatgaggacttctattgtctcttactgttgtattagatcctataaattgaactgatttttccataaggaaaatgcttcttttgagattaattctaataacgtatttgctattgcagtgcagagcccactgcaactgctaggactgaaagcagaggctgggtgccagagcacgtgattcttaacatcatttccacagacccctctgccctgaccctctgcattggatgcaggaagctgggaaagactgatgttgatttggaaacatgggctgaaaatgaaggccccatagtgcataggaacagtaaagccagggtgctgacgtgtgtgtgtgtgtgtgtgtgtgtgtgtgtgtgtgtgtgtgttgtgtgtgtttgtgcgtgcaccctacacatgtgtggtacctcactgctgctgtttagggaacttgagggacgcgtttcaaggggttgggtattactgacgagctttggctcaaaatatagcaggaccaggtcttttgttgataagtactgtttgtttattaatatgtcattaatggtatttcttttttacactctacaagtgaattagggagtctcttgttgacccctttgttgcaggaatgtgcgtcgggctaggttatccatgagtttctttattcctaatgcagttagaaagacctttctccttgagctctttgactcccagaaggtaccccagtccccagtgtacttagaaaggatctcgaacattgctggacgtcctcatagtactcacaaagggctagccttgaatgtcactcgcccagtcttcagtctcctgacttagagatacaatcacgtcacaggtctcttggcctcaatctgaaaactgctgccgccgcgccgaggagactcgcatgccgccaccacctcactgggagggcgccgagcccaccgtcgccccctagaccctgacagctgcagctgccttgccttgccgccgcctccctgcagggcccctgttccaatgaaaaacagaacacaaaagagcagagcacctaagcctgtctctgcctccctgtctaccggactggccagggcccaagacccccgctgctccactgcggggctgggcgggctgactccctgcttcctccaagctgctgcctcccctgcagccagggtctgggcagggtgcagccggtcctcggggcacgcagcttccttcaagtacactgtgtgtgcttcccggacctgcggcgatgccacgggcctgccttttctatgcgcctcactagcttaccaccctgtgcaggtaatgcaactgactttgtctcatcagtctttttctttccctgccaccctttatttatcaagcgtaatgttacactttaaaggacagcaaataagaactttgtagaatcccaccaggactttgctaacaataatgtttggaaataaagaagtgctctgaaaaaatatcagccaccaaaatagttatgttggcactgtgttcacacgcatggtccccacacccccaggttgggtgggtttttttgttttttgggtttttttggggggggggctttttcatgttacatccatatctgtatttatatcttatttgtttcactttcaagtgtatcatggcaaatgtacagatttttttgttaataatgtgctaggatttgctaaaaaagaaaacaaaaaaaacccttttgagtttgccctagaataaatgagacttaattca

SEQ ID NO: 454535 - DNA, 5123 bp, Homo sapiens
ttttttttaatccccgcaccaagcgcttaacctcattggggtggaggagaaggcggcggctctctggtccgcagcggcaacagtaacgaaaaacagggctaatggactgctgaattatgaagtatttcagacccagtagtagaacatcactctgccactcactcctttatctcctactagttatttaaattggacttttaatatcctaccagctgctcttcagacacacatggtgcattgttgccattccccagattgcatctttgaaacacaggctcttaggtaaccttcagcgaacaaagagggcaacctcccagatacgtctgctggggagggagtcatcgtgactgccctctaggcttttgctgggatctgggatttgaattcccactatggagcctcgcatggagtcctgcctggcgcaggtgttgcagaaggatgtggggaaacgattgcaggttggccaagaactgatagactatttctcagacaaacagaagtctgctgaccttgagcatgaccagaccatgttagataaacttgtggatggacttgctacctcttgggtgaactctagcaattacaaggtggttctgctgggcatggacatcctgtccgccctggtgacccggctgcaggatcggttcaaggcgcagatcggcacagtgctgccaagtctaatagacagactaggagatgctaaagactctgtgagggagcaggaccaaactctgctgctaaagatcatggatcaagctgctaatccccagtacgtatgggacagaatgcttggaggcttcaaacacaagaatttccgtactcgagaaggcatctgtctctgccttatagcaacactcaatgcctctggagcacagactttaacactaagcaagattgtgccacatatatgcaacttacttggagatccaaacagccaggttcgagatgcagcaataaacagcttagtggaaatttacagacatgtaggagaacgtgtgagggcagatctcagtaaaaaaggattgccacagtcccggttgaatgtaatttttacaaaatttgatgaagtccagaaatctggaaacatgatacaatctgcaaatgataaaaatttcgacgatgaagattctgtggatggtaacagaccttcctctgctagttctacatcatccaaggctccaccaagttctcggagaaacgttggaatgggaaccacccgccggcttggttcatccacccttggatccaagtcttcagctgcaaaagaaggagctggtgctgttgatgaagaggattttattaaagcatttgatgatgtacctgtagtacagatttattccagccgagaccttgaggaatccataaacaaaattagggaaatattatctgatgacaagcatgattgggagcagagagtaaatgctctaaaaaagattagatctttacttttggctggtgctgctgagtatgataacttctttcaacatttgcgtcttttggatggagcctttaaactctctgctaaggacctgcggtctcaggtagtgcgggaggcttgtatcacgttggggcatctgtcatcagttctggggaataagtttgaccatggagctgaagccattatgccaactatctttaatttaattccaaacagtgccaaaattatggccacatctggtgttgtagctgttaggttaattattcggcacacacacatccctaggttaatacctgtcataacaagcaactgtacctctaagtctgtcgcagttagaaggcgctgttttgaatttttagatttgcttttacaagaatggcagacacattcactagaacgacacatatcagtattagctgaaacaataaagaagggaatacatgatgctgattccgaagcaagaatagaagccagaaaatgttactggggtttccacagtcacttcagcagagaagcagagcacttgtaccacaccttggagtcctcctaccagaaagccctgcagtcccacctgaagaactcagacagcatagtgtctctgcctcagtcagaccgctcatcttccagctctcaagagagtctaaatcgtccgctgtctgccaaaagaagtcctactggaagtaccacatctagagcttctacagttagtaccaaatctgtgtcaacgactgggtccctccagcgatctcgaagtgatattgatgtgaacgcagcagccagtgccaaatccaaagtctcctcatcttcgggcacgacgcctttcagctctgcagcagctttgcctccagggtcatacgcatccttaggtcggatccgcacaagacggcaaagctctgggagtgccaccaacgtcgcctctacacctgataaccggggccgcagtcgcgctaaagtggtttcacagtcccagcgatccagatctgctaatcctgctggtgctggcagccggtcaagttccccaggaaaattgttgggaagtggttatggtggacttactgggggctcctcacgaggcccacctgtgacaccgtcttcagaaaagcgaagcaagattcccaggagccagggatgtagccgggaaacaagtccaaaccgaataggattagcacggagcagccgtatccctcgacccagcatgagtcaggggtgcagccgcgataccagccgtgagagcagccgagatacaagccctgctcggggctttcctccacttgatcggtttgggcttggccagccaggaagaatacctggttctgtgaatgccatgagagttctgagcacaagtacagatcttgaagctgctgttgctgatgctttgaagaagcctgtgaggaggagatatgagccgtatgggatgtattctgacgatgatgccaacagtgatgcctcaagtgtttgctctgagcgctcatatggctccaggaatggtggcattccccattatctgcggcagactgaggatgtagcagaagttctcaaccactgtgctagttcaaactggtcagaaaggaaagaagggcttctgggcctgcagaacttactgaagagccaaagaacactgagtcgagttgaactgaaaaggttgtgtgagatcttcactcggatgtttgctgaccctcatagcaagagagttttcagtatgtttttggagactcttgtggattttataataattcataaggatgatttacaagactggctttttgttcttctcacacaattacttaagaaaatgggagcagatttacttggatctgtgcaagcaaaagttcaaaaggctctagatgtcacaagggactcctttccatttgatcaacaatttaacattttgatgagatttattgtggatcaaactcaaactccaaacctcaaggtcaaagttgcaatcctgaaatacattgagtctctggccagacagatggatccaacagattttgtaaactctagtgagacaaggcttgctgtttctagaatcataacctggacaacagaaccaaagagttcagacgtgagaaaggcagcacagattgtgctaatctctctgtttgaattgaatactcctgaatttaccatgttacttggtgccttgccaaaaacattccaggatggtgccaccaaactcctgcacaaccacctcaagaattccagtaacaccagtgtggtgagtgctttggtcacgattggtgcctatgtgatgtccatgacctctgcgtagcccttatctagaacctactctaatagaataccccgtttccttgtcctctttcaggaaatgtcgagcatcctgaggatggggccatcttaagccccagtgaatgaatgaatctgatatttaagtatgccgttttttctcaggttgttcagtcaactacattttcactaggttatccagttagtcattcattcactgagttggtcttatttttcaacactggaaagatgcaagtgctcaattttgtctgtcactctagcacacccaacatcaatcatttgactccaggagtgcttgtatgatgattattcatttttggtttatatacacttaaaattggccttatgattctaagggaaaaaaaaaaccatcctgggcagattctacccatttatttacatgtgggttaaaagaccaaggaaagaatagaatatattctatatacagcccttgaataacgatgcctattctgcttcaccccagggctctccaagcaatacgattggccggacgccctcccgacacaccagcagcaggaccagccccctgacctcacccaccaactgttcccatgggggtctgtctccaagtcggttatggggttggagtgccgacgggttagcgaagcacccacctcccttttctcagcctaactccatccccaccgctccctcccacaaggctctcaggcgctcttactctcccagcatgctggactatgatacagagaacctgaactctgaagaaatctatagttctctacgtggagttacagaagccattgaaaagtttagttttcgaagccaagaagatctgaatgagccaattaaacgagatggcaaaaaggagtgtgatattgtgtcccgcgatgggggcgctgcctcccctgccactgagggccgggggggtagtgaagtagaaggaggccggacagctctggataacaagacctcactactcaacacccagcctccgcgcgccttcccggggccgcgggcgcgagactacaacccgtacccctactcagatgccatcaacacctacgacaagaccgccctgaaagaggctgtgttcgatgacgacatggagcagcttcgagacgtgcccatcgaccattctgacctggtggctgaccttctgaaagagctgtccaaccacaatgagcgagtggaggaacggaagggagccctgctggagctgctcaagatcacgcgggaagacagccttggtgtctgggaggagcacttcaagaccattctgctcctgctgctggagacccttggagacaaagacgtgagatgctggtttggccttatcttgcccctttccatgtaatggggtcacgatgtccttttcttattgggcttagcttcagctttactttctgggttgtgcttactgtttacatcaaaa

SEQ ID NO: 454536 - DNA, 3073 bp, Homo sapiens
ttttttttaatccccgcaccaagcgcttaacctcattggggtggaggagaaggcggcggctctctggtccgcagcggcaacagtaacgaaaaacagggctaatggactgctgaattatgaagtatttcagacccagtagtagaacatcactctgccactcactcctttatctcctactagttatttaaattggacttttaatatcctaccagctgctcttcagacacacatggtgcattgttgccattccccagattgcatctttgaaacacaggctcttaggtaaccttcagcgaacaaagagggcaacctcccagatacgtctgctggggagggagtcatcgtgactgccctctaggcttttgctgggatctgggatttgaattcccactatggagcctcgcatggagtcctgcctggcgcaggtgttgcagaaggatgtggggaaacgattgcaggttggccaagaactgatagactatttctcagacaaacagaagtctgctgaccttgagcatgaccagaccatgttagataaacttgtggatggacttgctacctcttgggtgaactctagcaattacaaggtggttctgctgggcatggacatcctgtccgccctggtgacccggctgcaggatcggttcaaggcgcagatcggcacagtgctgccaagtctaatagacagactaggagatgctaaagactctgtgagggagcaggaccaaactctgctgctaaagatcatggatcaagctgctaatccccagtacgtatgggacagaatgcttggaggcttcaaacacaagaatttccgtactcgagaaggcatctgtctctgccttatagcaacactcaatgcctctggagcacagactttaacactaagcaagattgtgccacatatatgcaacttacttggagatccaaacagccaggttcgagatgcagcaataaacagcttagtggaaatttacagacatgtaggagaacgtgtgagggcagatctcagtaaaaaaggattgccacagtcccggttgaatgtaatttttacaaaatttgatgaagtccagaaatctggaaacatgatacaatctgcaaatgataaaaatttcgacgatgaagattctgtggatggtaacagaccttcctctgctagttctacatcatccaaggctccaccaagttctcggagaaacgttggaatgggaaccacccgccggcttggttcatccacccttggatccaagtcttcagctgcaaaagaaggagctggtgctgttgatgaagaggattttattaaagcatttgatgatgtacctgtagtacagatttattccagccgagaccttgaggaatccataaacaaaattagggaaatattatctgatgacaagcatgattgggagcagagagtaaatgctctaaaaaagattagatctttacttttggctggtgctgctgagtatgataacttctttcaacatttgcgtcttttggatggagcctttaaactctctgctaaggacctgcggtctcaggtagtgcgggaggcttgtatcacgttggggcatctgtcatcagttctggggaataagtttgaccatggagctgaagccattatgccaactatctttaatttaattccaaacagtgccaaaattatggccacatctggtgttgtagctgttaggttaattattcggcacacacacatccctaggttaatacctgtcataacaagcaactgtacctctaagtctgtcgcagttagaaggcgctgttttgaatttttagatttgcttttacaagaatggcagacacattcactagaacgacacatatcagtattagctgaaacaataaagaagggaatacatgatgctgattccgaagcaagaatagaagccagaaaatgttactggggtttccacagtcacttcagcagagaagcagagcacttgtaccacaccttggagtcctcctaccagaaagccctgcagtcccacctgaagaactcagacagcatagtgtctctgcctcagtcagaccgctcatcttccagctctcaagagagtctaaatcgtccgctgtctgccaaaagaagtcctactggaagtaccacatctagagcttctacagttagtaccaaatctgtgtcaacgactgggtccctccagcgatctcgaagtgatattgatgtgaacgcagcagccagtgccaaatccaaagtctcctcatcttcgggcacgacgcctttcagctctgcagcagctttgcctccagggtcatacgcatccttaggtcggatccgcacaagacggcaaagctctgggagtgccaccaacgtcgcctctacacctgataaccggggccgcagtcgcgctaaagtggtttcacagtcccagcgatccagatctgctaatcctgctggtgctggcagccggtcaagttccccaggaaaattgttgggaagtggttatggtggacttactgggggctcctcacgaggcccacctgtgacaccgtcttcagaaaagcgaagcaagattcccaggagccagggatgtagccgggaaacaagtccaaaccgaataggattagcacggagcagccgtatccctcgacccagcatgagtcaggggtgcagccgcgataccagccgtgagagcagccgagatacaagccctgctcggggctttcctccacttgatcggtttgggcttggccagccaggaagaatacctggttctgtgaatgccatgagagttctgagcacaagtacagatcttgaagctgctgttgctgatgctttggtaagaggcacagtatgtatgtacacagtctttttgaaatactcatctgcatttctctctgtcctaacaggaaattgcccccaaatcaggttatgaattcatctttgaaactctttaaaattgtgttaatgttgggtaaatttatattgttattgtttgccccttaaacttttacctctgcacacatataagtgaaaatggactttacagaaaatattagcatcaagtatttcttatctgtgctcttcagtatcaag

SEQ ID NO: 454537 - DNA, 485 bp, Homo sapiens
gttatgtcatttcatgaggagacgccctagatgtgagcattttttccttatttcacttcttcgtagtaagcagaaacatggtccatttctttggggtttatagtcttcaataacaagaaaacaaatgtaattgatacattacaattgagatcacttgtagtttccttcggcattgcctgaactctcttcagggaccaggagaaactgtttgtcagttttttatgctccagcatttgttaaaacttggtatttgttttcaggaaagcaaaacaacatcagattttagcaatgtattttcaaaattctatgtagtccttattcatatttcctcctttatcactaaagcttctacagttagtaccaaatctgtgtcaacgactgggtccctccagcgatctcgaagtgatattgatgtgaacgcagcagccagtgccaaatccaaagtctcctcatcttcgggcacgacgcctttcagctctgcagca

SEQ ID NO: 454538 - DNA, 421 bp, Homo sapiens
agagttttcagtatgtttttggagactcttgtggattttataataattcataaggatgatttacaagactggctttttgttcttctcacacaattacttaagaaaatgggagcagatttacttggatctgtgcaagcaaaagttcaaaaggctctagatgtcacaaggtaagtgtttaagggttaggtccattttgatgttacaggatacttgtaagtgactttttgccattctcttttgttacccatggcctttgtcacccccttgaatatctcttttactcagttctcactttctgttgttgacatacttgttgacatgtcccaccagtccatgaaatgaaataccatatcttccttgtgttgatattacttttgtgagtatttaagacatatataataaacaaatgtaaaactttgga

SEQ ID NO: 454539 - DNA, 721 bp, Homo sapiens
ttttttttaatccccgcaccaagcgcttaacctcattggggtggaggagaaggcggcggctctctggtccgcagcggcaacagtaacgaaaaacagggctaatggactgctgaattatgaagtatttcagacccagtagtagaacatcactctgccactcactcctttatctcctactagttatttaaattggacttttaatatcctaccagctgctcttcagacacacatggtgcattgttgccattccccagattgcatctttgaaacacaggctcttaggtaaccttcagcgaacaaagagggcaacctcccagatacgtctgctggggagggagtcatcgtgactgccctctaggcttttgctgggatctgggatttgaattcccactatggagcctcgcatggagtcctgcctggcgcaggtgttgcagaaggatgtggggaaacgattgcaggttggccaagaactgatagactatttctcagacaaacagaagtctgctgaccttgagcatgaccagaccatgttagataaacttgtggatggacttgctacctcttgggtgaactctagcaattacaaggtggttctgctgggcatggacatcctgtccgccctggtgacccggctgcaggatcggttcaaggcgcagatcggcacaggtgagctgcggcacttgtggagcggacccggccccttcagacccccagccgagcc

SEQ ID NO: 454540 - DNA, 8092 bp, Homo sapiens
ttttttttaatccccgcaccaagcgcttaacctcattggggtggaggagaaggcggcggctctctggtccgcagcggcaacagtaacgaaaaacagggctaatggactgctgaattatgaagtatttcagacccagtagtagaacatcactctgccactcactcctttatctcctactagttatttaaattggacttttaatatcctaccagctgctcttcagacacacatggtgcattgttgccattccccagattgcatctttgaaacacaggctcttaggtaaccttcagcgaacaaagagggcaacctcccagatacgtctgctggggagggagtcatcgtgactgccctctaggcttttgctgggatctgggatttgaattcccactatggagcctcgcatggagtcctgcctggcgcaggtgttgcagaaggatgtggggaaacgattgcaggttggccaagaactgatagactatttctcagacaaacagaagtctgctgaccttgagcatgaccagaccatgttagataaacttgtggatggacttgctacctcttgggtgaactctagcaattacaaggtggttctgctgggcatggacatcctgtccgccctggtgacccggctgcaggatcggttcaaggcgcagatcggcacagtgctgccaagtctaatagacagactaggagatgctaaagactctgtgagggagcaggaccaaactctgctgctaaagatcatggatcaagctgctaatccccagtacgtatgggacagaatgcttggaggcttcaaacacaagaatttccgtactcgagaaggcatctgtctctgccttatagcaacactcaatgcctctggagcacagactttaacactaagcaagattgtgccacatatatgcaacttacttggagatccaaacagccaggttcgagatgcagcaataaacagcttagtggaaatttacagacatgtaggagaacgtgtgagggcagatctcagtaaaaaaggattgccacagtcccggttgaatgtaatttttacaaaatttgatgaagtccagaaatctggaaacatgatacaatctgcaaatgataaaaatttcgacgatgaagattctgtggatggtaacagaccttcctctgctagttctacatcatccaaggctccaccaagttctcggagaaacgttggaatgggaaccacccgccggcttggttcatccacccttggatccaagtcttcagctgcaaaagaaggagctggtgctgttgatgaagaggattttattaaagcatttgatgatgtacctgtagtacagatttattccagccgagaccttgaggaatccataaacaaaattagggaaatattatctgatgacaagcatgattgggagcagagagtaaatgctctaaaaaagattagatctttacttttggctggtgctgctgagtatgataacttctttcaacatttgcgtcttttggatggagcctttaaactctctgctaaggacctgcggtctcaggtagtgcgggaggcttgtatcacgttggggcatctgtcatcagttctggggaataagtttgaccatggagctgaagccattatgccaactatctttaatttaattccaaacagtgccaaaattatggccacatctggtgttgtagctgttaggttaattattcggcacacacacatccctaggttaatacctgtcataacaagcaactgtacctctaagtctgtcgcagttagaaggcgctgttttgaatttttagatttgcttttacaagaatggcagacacattcactagaacgacacatatcagtattagctgaaacaataaagaagggaatacatgatgctgattccgaagcaagaatagaagccagaaaatgttactggggtttccacagtcacttcagcagagaagcagagcacttgtaccacaccttggagtcctcctaccagaaagccctgcagtcccacctgaagaactcagacagcatagtgtctctgcctcagtcagaccgctcatcttccagctctcaagagagtctaaatcgtccgctgtctgccaaaagaagtcctactggaagtaccacatctagagcttctacagttagtaccaaatctgtgtcaacgactgggtccctccagcgatctcgaagtgatattgatgtgaacgcagcagccagtgccaaatccaaagtctcctcatcttcgggcacgacgcctttcagctctgcagcagctttgcctccagggtcatacgcatccttaggtcggatccgcacaagacggcaaagctctgggagtgccaccaacgtcgcctctacacctgataaccggggccgcagtcgcgctaaagtggtttcacagtcccagcgatccagatctgctaatcctgctggtgctggcagccggtcaagttccccaggaaaattgttgggaagtggttatggtggacttactgggggctcctcacgaggcccacctgtgacaccgtcttcagaaaagcgaagcaagattcccaggagccagggatgtagccgggaaacaagtccaaaccgaataggattagcacggagcagccgtatccctcgacccagcatgagtcaggggtgcagccgcgataccagccgtgagagcagccgagatacaagccctgctcggggctttcctccacttgatcggtttgggcttggccagccaggaagaatacctggttctgtgaatgccatgagagttctgagcacaagtacagatcttgaagctgctgttgctgatgctttgaagaagcctgtgaggaggagatatgagccgtatgggatgtattctgacgatgatgccaacagtgatgcctcaagtgtttgctctgagcgctcatatggctccaggaatggtggcattccccattatctgcggcagactgaggatgtagcagaagttctcaaccactgtgctagttcaaactggtcagaaaggaaagaagggcttctgggcctgcagaacttactgaagagccaaagaacactgagtcgagttgaactgaaaaggttgtgtgagatcttcactcggatgtttgctgaccctcatagcaagagagttttcagtatgtttttggagactcttgtggattttataataattcataaggatgatttacaagactggctttttgttcttctcacacaattacttaagaaaatgggagcagatttacttggatctgtgcaagcaaaagttcaaaaggctctagatgtcacaagggactcctttccatttgatcaacaatttaacattttgatgagatttattgtggatcaaactcaaactccaaacctcaaggtcaaagttgcaatcctgaaatacattgagtctctggccagacagatggatccaacagattttgtaaactctagtgagacaaggcttgctgtttctagaatcataacctggacaacagaaccaaagagttcagacgtgagaaaggcagcacagattgtgctaatctctctgtttgaattgaatactcctgaatttaccatgttacttggtgccttgccaaaaacattccaggatggtgccaccaaactcctgcacaaccacctcaagaattccagtaacaccagtgtgggctctccaagcaatacgattggccggacgccctcccgacacaccagcagcaggaccagccccctgacctcacccaccaactgttcccatgggggtctgtctccaagtcggttatggggttggagtgccgacgggttagcgaagcacccacctcccttttctcagcctaactccatccccaccgctccctcccacaaggctctcaggcgctcttactctcccagcatgctggactatgatacagagaacctgaactctgaagaaatctatagttctctacgtggagttacagaagccattgaaaagtttagttttcgaagccaagaagatctgaatgagccaattaaacgagatggcaaaaaggagtgtgatattgtgtcccgcgatgggggcgctgcctcccctgccactgagggccgggggggtagtgaagtagaaggaggccggacagctctggataacaagacctcactactcaacacccagcctccgcgcgccttcccggggccgcgggcgcgagactacaacccgtacccctactcagatgccatcaacacctacgacaagaccgccctgaaagaggctgtgttcgatgacgacatggagcagcttcgagacgtgcccatcgaccattctgacctggtggctgaccttctgaaagagctgtccaaccacaatgagcgagtggaggaacggaagggagccctgctggagctgctcaagatcacgcgggaagacagccttggtgtctgggaggagcacttcaagaccattctgctcctgctgctggagacccttggagacaaagaccattcaattcgagcactggcgttaagagttttgagggaaattctgagaaatcaaccagcaagatttaaaaactacgccgagctgacgattatgaagactctggaagcccacaaagactcccataaggaggtggtgagagcggctgaggaggctgcgtccacactggccagttccatccacccggagcagtgcatcaaggtgctctgccccatcatccagacggccgactaccccatcaaccttgctgccatcaagatgcagaccaaagtcgtcgagaggatcgcaaaggagtcattgctgcagctccttgtcgacatcatcccaggcttgctgcagggttatgacaacaccgaaagtagtgtgcgtaaggccagcgtgttttgcttagtggcaatttattccgtaatcggagaagacctgaaacctcaccttgcacagctcacagggagcaagatgaagctactaaacttatacataaagagggcccagaccaccaacagcaacagcagctcctcctccgatgtctccacgcacagctaatggcagtacctgtctcttgtgtagacctagaagcaatcggtggtgcctctcagagacctttccccacccccttcatcggctgcccagtcagtacaaggaggcccacaaatatttattacaatcagtattttggtcccttccagcttttctgtagaatcttactggtattgaatgtaaaggaagcaaggcctgtattgcagtcttcatacaaaacaaaaggaataagaacagaaaagagccatactgaaacatgtcttgtacagcctgctgagatggcgaaaccctgtgtgtggggtgcagtttttaaaaatcagagcgctctagccactacttggtagaaagtagcattttttttttcagttaataacatatttgggggtggggtggggtgttactttgtgttcttcctccttagcctattttcttgtgcgtatggtctgtgtggggcccctttcacagctgacaccacgaaaggtgatatatctttaagttgtgttctgagacctactaaaaatgggaatcaagtcttggcaagaacagtctgaagatggccttttaacaaacgctgggaattttgcttgtcatatccagactggaggccgactgccctggctttcagcgtagaattgggagtgcaccctgacagtctccttccagctctccctaatcgactccaccgacaaggtccctaccccagagcttccatgcaaaggaattcttcaagtttaaatctggacacaaaaataagataaatgtatggcatcatttagggatgcctgagatggcagttcatgaagcacagaagataaagaagaagtctttcatctttactgctgagatccttgggaacactgttgtcatgggggctctgccaagaccctcatctctgggctacacggtgattcagattgagcaccaacttgtttcctcccctcaaagttctgcctaagccgttcagttctaacatggtctcagttaatctggtaaatggcatctttaccatcttagttctgacttctcagtttaatgtgggattaagagccaagaaaagcctagagagactggatatcacaattttttttaattttataaactgaagtagttccttgaatgtctgttgatgaaatagtcactgtttaaggaaaaaagtaattatgaggtgtagcagattgcagaaaaacaggattagaaacacacttaaaaagaacacacatttagagtctctcttcctcctcagcgaaccactaggccccctttttaaaaacacctttagagcctaattactccaataaaagtaactagaggtttggagtctggttaaataaattctgagtaaaattcttaagccaaatggaaattcttaatgcaatcatgaggacttctattgtctcttactgttgtattagatcctataaattgaactgatttttccataaggaaaatgcttcttttgagattaattctaataacgtatttgctattgcagtgcagagcccactgcaactgctaggactgaaagcagaggctgggtgccagagcacgtgattcttaacatcatttccacagacccctctgccctgaccctctgcattggatgcaggaagctgggaaagactgatgttgatttggaaacatgggctgaaaatgaaggccccatagtgcataggaacagtaaagccagggtgctgacgtgtgtgtgtgtgtgtgtgtgtgtgtgtgtgtgtgtgtgtgttgtgtgtgtttgtgcgtgcaccctacacatgtgtggtacctcactgctgctgtttagggaacttgagggacgcgtttcaaggggttgggtattactgacgagctttggctcaaaatatagcaggaccaggtcttttgttgataagtactgtttgtttattaatatgtcattaatggtatttcttttttacactctacaagtgaattagggagtctcttgttgacccctttgttgcaggaatgtgcgtcgggctaggttatccatgagtttctttattcctaatgcagttagaaagacctttctccttgagctctttgactcccagaaggtaccccagtccccagtgtacttagaaaggatctcgaacattgctggacgtcctcatagtactcacaaagggctagccttgaatgtcactcgcccagtcttcagtctcctgacttagagatacaatcacgtcacaggtctcttggcctcaatctgaaaactgctgccgccgcgccgaggagactcgcatgccgccaccacctcactgggagggcgccgagcccaccgtcgccccctagaccctgacagctgcagctgccttgccttgccgccgcctccctgcagggcccctgttccaatgaaaaacagaacacaaaagagcagagcacctaagcctgtctctgcctccctgtctaccggactggccagggcccaagacccccgctgctccactgcggggctgggcgggctgactccctgcttcctccaagctgctgcctcccctgcagccagggtctgggcagggtgcagccggtcctcggggcacgcagcttccttcaagtacactgtgtgtgcttcccggacctgcggcgatgccacgggcctgccttttctatgcgcctcactagcttaccaccctgtgcaggtaatgcaactgactttgtctcatcagtctttttctttccctgccaccctttatttatcaagcgtaatgttacactttaaaggacagcaaataagaactttgtagaatcccaccaggactttgctaacaataatgtttggaaataaagaagtgctctgaaaaaatatcagccaccaaaatagttatgttggcactgtgttcacacgcatggtccccacacccccaggttgggtgggtttttttgttttttgggtttttttggggggggggctttttcatgttacatccatatctgtatttatatcttatttgtttcactttcaagtgtatcatggcaaatgtacagatttttttgttaataatgtgctaggatttgctaaaaaagaaaacaaaaaaaacccttttgagtttgccctagaataaatgagacttaattca

SEQ ID NO: 454541 - DNA, 8597 bp, Homo sapiens
ttttttttaatccccgcaccaagcgcttaacctcattggggtggaggagaaggcggcggctctctggtccgcagcggcaacagtaacgaaaaacagggctaatggactgctgaattatgaagtatttcagacccagtagtagaacatcactctgccactcactcctttatctcctactagttatttaaattggacttttaatatcctaccagctgctcttcagacacacatggtgcattgttgccattccccagattgcatctttgaaacacaggctcttaggtaaccttcagcgaacaaagagggcaacctcccagatacgtctgctggggagggagtcatcgtgactgccctctaggcttttgctgggatctgggatttgaattcccactatggagcctcgcatggagtcctgcctggcgcaggtgttgcagaaggatgtggggaaacgattgcaggttggccaagaactgatagactatttctcagacaaacagaagtctgctgaccttgagcatgaccagaccatgttagataaacttgtggatggacttgctacctcttgggtgaactctagcaattacaaggtggttctgctgggcatggacatcctgtccgccctggtgacccggctgcaggatcggttcaaggcgcagatcggcacagtgctgccaagtctaatagacagactaggagatgctaaagactctgtgagggagcaggaccaaactctgctgctaaagatcatggatcaagctgctaatccccagtacgtatgggacagaatgcttggaggcttcaaacacaagaatttccgtactcgagaaggcatctgtctctgccttatagcaacactcaatgcctctggagcacagactttaacactaagcaagattgtgccacatatatgcaacttacttggagatccaaacagccaggttcgagatgcagcaataaacagcttagtggaaatttacagacatgtaggagaacgtgtgagggcagatctcagtaaaaaaggattgccacagtcccggttgaatgtaatttttacaaaatttgatgaagtccagaaatctggaaacatgatacaatctgcaaatgataaaaatttcgacgatgaagattctgtggatggtaacagaccttcctctgctagttctacatcatccaaggctccaccaagttctcggagaaacgttggaatgggaaccacccgccggcttggttcatccacccttggatccaagtcttcagctgcaaaagaaggagctggtgctgttgatgaagaggattttattaaagcatttgatgatgtacctgtagtacagatttattccagccgagaccttgaggaatccataaacaaaattagggaaatattatctgatgacaagcatgattgggagcagagagtaaatgctctaaaaaagattagatctttacttttggctggtgctgctgagtatgataacttctttcaacatttgcgtcttttggatggagcctttaaactctctgctaaggacctgcggtctcaggcatctgtcatcagttctggggaataagtttgaccatggagctgaagccattatgccaactatctttaatttaattccaaacagtgccaaaattatggccacatctggtgttgtagctgttaggttaattattcggcacacacacatccctaggttaatacctgtcataacaagcaactgtacctctaagtctgtcgcagttagaaggcgctgttttgaatttttagatttgcttttacaagaatggcagacacattcactagaacgacacatatcagtattagctgaaacaataaagaagggaatacatgatgctgattccgaagcaagaatagaagccagaaaatgttactggggtttccacagtcacttcagcagagaagcagagcacttgtaccacaccttggagtcctcctaccagaaagccctgcagtcccacctgaagaactcagacagcatagtgtctctgcctcagtcagaccgctcatcttccagctctcaagagagtctaaatcgtccgctgtctgccaaaagaagtcctactggaagtaccacatctagagcttctacagttagtaccaaatctgtgtcaacgactgggtccctccagcgatctcgaagtgatattgatgtgaacgcagcagccagtgccaaatccaaagtctcctcatcttcgggcacgacgcctttcagctctgcagcagctttgcctccagggtcatacgcatccttaggtcggatccgcacaagacggcaaagctctgggagtgccaccaacgtcgcctctacacctgataaccggggccgcagtcgcgctaaagtggtttcacagtcccagcgatccagatctgctaatcctgctggtgctggcagccggtcaagttccccaggaaaattgttgggaagtggttatggtggacttactgggggctcctcacgaggcccacctgtgacaccgtcttcagaaaagcgaagcaagattcccaggagccagggatgtagccgggaaacaagtccaaaccgaataggattagcacggagcagccgtatccctcgacccagcatgagtcaggggtgcagccgcgataccagccgtgagagcagccgagatacaagccctgctcggggctttcctccacttgatcggtttgggcttggccagccaggaagaatacctggttctgtgaatgccatgagagttctgagcacaagtacagatcttgaagctgctgttgctgatgctttgaagaagcctgtgaggaggagatatgagccgtatgggatgtattctgacgatgatgccaacagtgatgcctcaagtgtttgctctgagcgctcatatggctccaggaatggtggcattccccattatctgcggcagactgaggatgtagcagaagttctcaaccactgtgctagttcaaactggtcagaaaggaaagaagggcttctgggcctgcagaacttactgaagagccaaagaacactgagtcgagttgaactgaaaaggttgtgtgagatcttcactcggatgtttgctgaccctcatagcaagagagttttcagtatgtttttggagactcttgtggattttataataattcataaggatgatttacaagactggctttttgttcttctcacacaattacttaagaaaatgggagcagatttacttggatctgtgcaagcaaaagttcaaaaggctctagatgtcacaagggactcctttccatttgatcaacaatttaacattttgatgagatttattgtggatcaaactcaaactccaaacctcaaggtcaaagttgcaatcctgaaatacattgagtctctggccagacagatggatccaacagattttgtaaactctagtgagacaaggcttgctgtttctagaatcataacctggacaacagaaccaaagagttcagacgtgagaaaggcagcacagattgtgctaatctctctgtttgaattgaatactcctgaatttaccatgttacttggtgccttgccaaaaacattccaggatggtgccaccaaactcctgcacaaccacctcaagaattccagtaacaccagtgtggtgagtgctttggtcacgattggtgcctatgtgatgtccatgacctctgcgtagcccttatctagaacctactctaatagaataccccgtttccttgtcctctttcaggaaatgtcgagcatcctgaggatggggccatcttaagccccagtgaatgaatgaatctgatatttaagtatgccgttttttctcaggttgttcagtcaactacattttcactaggttatccagttagtcattcattcactgagttggtcttatttttcaacactggaaagatgcaagtgctcaattttgtctgtcactctagcacacccaacatcaatcatttgactccaggagtgcttgtatgatgattattcatttttggtttatatacacttaaaattggccttatgattctaagggaaaaaaaaaaccatcctgggcagattctacccatttatttacatgtgggttaaaagaccaaggaaagaatagaatatattctatatacagcccttgaataacgatgcctattctgcttcaccccagggctctccaagcaatacgattggccggacgccctcccgacacaccagcagcaggaccagccccctgacctcacccaccaactgttcccatgggggtctgtctccaagtcggttatggggttggagtgccgacgggttagcgaagcacccacctcccttttctcagcctaactccatccccaccgctccctcccacaaggctctcaggcgctcttactctcccagcatgctggactatgatacagagaacctgaactctgaagaaatctatagttctctacgtggagttacagaagccattgaaaagtttagttttcgaagccaagaagatctgaatgagccaattaaacgagatggcaaaaaggagtgtgatattgtgtcccgcgatgggggcgctgcctcccctgccactgagggccgggggggtagtgaagtagaaggaggccggacagctctggataacaagacctcactactcaacacccagcctccgcgcgccttcccggggccgcgggcgcgagactacaacccgtacccctactcagatgccatcaacacctacgacaagaccgccctgaaagaggctgtgttcgatgacgacatggagcagcttcgagacgtgcccatcgaccattctgacctggtggctgaccttctgaaagagctgtccaaccacaatgagcgagtggaggaacggaagggagccctgctggagctgctcaagatcacgcgggaagacagccttggtgtctgggaggagcacttcaagaccattctgctcctgctgctggagacccttggagacaaagaccattcaattcgagcactggcgttaagagttttgagggaaattctgagaaatcaaccagcaagatttaaaaactacgccgagctgacgattatgaagactctggaagcccacaaagactcccataaggaggtggtgagagcggctgaggaggctgcgtccacactggccagttccatccacccggagcagtgcatcaaggtgctctgccccatcatccagacggccgactaccccatcaaccttgctgccatcaagatgcagaccaaagtcgtcgagaggatcgcaaaggagtcattgctgcagctccttgtcgacatcatcccaggcttgctgcagggttatgacaacaccgaaagtagtgtgcgtaaggccagcgtgttttgcttagtggcaatttattccgtaatcggagaagacctgaaacctcaccttgcacagctcacagggagcaagatgaagctactaaacttatacataaagagggcccagaccaccaacagcaacagcagctcctcctccgatgtctccacgcacagctaatggcagtacctgtctcttgtgtagacctagaagcaatcggtggtgcctctcagagacctttccccacccccttcatcggctgcccagtcagtacaaggaggcccacaaatatttattacaatcagtattttggtcccttccagcttttctgtagaatcttactggtattgaatgtaaaggaagcaaggcctgtattgcagtcttcatacaaaacaaaaggaataagaacagaaaagagccatactgaaacatgtcttgtacagcctgctgagatggcgaaaccctgtgtgtggggtgcagtttttaaaaatcagagcgctctagccactacttggtagaaagtagcattttttttttcagttaataacatatttgggggtggggtggggtgttactttgtgttcttcctccttagcctattttcttgtgcgtatggtctgtgtggggcccctttcacagctgacaccacgaaaggtgatatatctttaagttgtgttctgagacctactaaaaatgggaatcaagtcttggcaagaacagtctgaagatggccttttaacaaacgctgggaattttgcttgtcatatccagactggaggccgactgccctggctttcagcgtagaattgggagtgcaccctgacagtctccttccagctctccctaatcgactccaccgacaaggtccctaccccagagcttccatgcaaaggaattcttcaagtttaaatctggacacaaaaataagataaatgtatggcatcatttagggatgcctgagatggcagttcatgaagcacagaagataaagaagaagtctttcatctttactgctgagatccttgggaacactgttgtcatgggggctctgccaagaccctcatctctgggctacacggtgattcagattgagcaccaacttgtttcctcccctcaaagttctgcctaagccgttcagttctaacatggtctcagttaatctggtaaatggcatctttaccatcttagttctgacttctcagtttaatgtgggattaagagccaagaaaagcctagagagactggatatcacaattttttttaattttataaactgaagtagttccttgaatgtctgttgatgaaatagtcactgtttaaggaaaaaagtaattatgaggtgtagcagattgcagaaaaacaggattagaaacacacttaaaaagaacacacatttagagtctctcttcctcctcagcgaaccactaggccccctttttaaaaacacctttagagcctaattactccaataaaagtaactagaggtttggagtctggttaaataaattctgagtaaaattcttaagccaaatggaaattcttaatgcaatcatgaggacttctattgtctcttactgttgtattagatcctataaattgaactgatttttccataaggaaaatgcttcttttgagattaattctaataacgtatttgctattgcagtgcagagcccactgcaactgctaggactgaaagcagaggctgggtgccagagcacgtgattcttaacatcatttccacagacccctctgccctgaccctctgcattggatgcaggaagctgggaaagactgatgttgatttggaaacatgggctgaaaatgaaggccccatagtgcataggaacagtaaagccagggtgctgacgtgtgtgtgtgtgtgtgtgtgtgtgtgtgtgtgtgtgtgtgttgtgtgtgtttgtgcgtgcaccctacacatgtgtggtacctcactgctgctgtttagggaacttgagggacgcgtttcaaggggttgggtattactgacgagctttggctcaaaatatagcaggaccaggtcttttgttgataagtactgtttgtttattaatatgtcattaatggtatttcttttttacactctacaagtgaattagggagtctcttgttgacccctttgttgcaggaatgtgcgtcgggctaggttatccatgagtttctttattcctaatgcagttagaaagacctttctccttgagctctttgactcccagaaggtaccccagtccccagtgtacttagaaaggatctcgaacattgctggacgtcctcatagtactcacaaagggctagccttgaatgtcactcgcccagtcttcagtctcctgacttagagatacaatcacgtcacaggtctcttggcctcaatctgaaaactgctgccgccgcgccgaggagactcgcatgccgccaccacctcactgggagggcgccgagcccaccgtcgccccctagaccctgacagctgcagctgccttgccttgccgccgcctccctgcagggcccctgttccaatgaaaaacagaacacaaaagagcagagcacctaagcctgtctctgcctccctgtctaccggactggccagggcccaagacccccgctgctccactgcggggctgggcgggctgactccctgcttcctccaagctgctgcctcccctgcagccagggtctgggcagggtgcagccggtcctcggggcacgcagcttccttcaagtacactgtgtgtgcttcccggacctgcggcgatgccacgggcctgccttttctatgcgcctcactagcttaccaccctgtgcaggtaatgcaactgactttgtctcatcagtctttttctttccctgccaccctttatttatcaagcgtaatgttacactttaaaggacagcaaataagaactttgtagaatcccaccaggactttgctaacaataatgtttggaaataaagaagtgctctgaaaaaatatcagccaccaaaatagttatgttggcactgtgttcacacgcatggtccccacacccccaggttgggtgggtttttttgttttttgggtttttttggggggggggctttttcatgttacatccatatctgtatttatatcttatttgtttcactttcaagtgtatcatggcaaatgtacagatttttttgttaataatgtgctaggatttgctaaaaaagaaaacaaaaaaaacccttttgagtttgccctagaataaatgagacttaattca

SEQ ID NO: 454542 - DNA, 7330 bp, Homo sapiens
tcaagttcaacgtgggcaaggtagtgagatcctgcctctagaaaacaaacaaaaagctccacagactagttggaaatgtttttttttaaaaaaaaaaacaacaaaacttttgggctaagaactatttgccaagttcttaacatgcacatcggaaatctcagacccttgtcctttctagataactttaaatgaaggctctagatgttaagtggtttatatgcttcactgtctctaagaaaaataactatagtccagtatccttttcttgttttaggcatctgtcatcagttctggggaataagtttgaccatggagctgaagccattatgccaactatctttaatttaattccaaacagtgccaaaattatggccacatctggtgttgtagctgttaggttaattattcggcacacacacatccctaggttaatacctgtcataacaagcaactgtacctctaagtctgtcgcagttagaaggcgctgttttgaatttttagatttgcttttacaagaatggcagacacattcactagaacgacacatatcagtattagctgaaacaataaagaagggaatacatgatgctgattccgaagcaagaatagaagccagaaaatgttactggggtttccacagtcacttcagcagagaagcagagcacttgtaccacaccttggagtcctcctaccagaaagccctgcagtcccacctgaagaactcagacagcatagtgtctctgcctcagtcagaccgctcatcttccagctctcaagagagtctaaatcgtccgctgtctgccaaaagaagtcctactggaagtaccacatctagagcttctacagttagtaccaaatctgtgtcaacgactgggtccctccagcgatctcgaagtgatattgatgtgaacgcagcagccagtgccaaatccaaagtctcctcatcttcgggcacgacgcctttcagctctgcagcagctttgcctccagggtcatacgcatccttaggtcggatccgcacaagacggcaaagctctgggagtgccaccaacgtcgcctctacacctgataaccggggccgcagtcgcgctaaagtggtttcacagtcccagcgatccagatctgctaatcctgctggtgctggcagccggtcaagttccccaggaaaattgttgggaagtggttatggtggacttactgggggctcctcacgaggcccacctgtgacaccgtcttcagaaaagcgaagcaagattcccaggagccagggatgtagccgggaaacaagtccaaaccgaataggattagcacggagcagccgtatccctcgacccagcatgagtcaggggtgcagccgcgataccagccgtgagagcagccgagatacaagccctgctcggggctttcctccacttgatcggtttgggcttggccagccaggaagaatacctggttctgtgaatgccatgagagttctgagcacaagtacagatcttgaagctgctgttgctgatgctttgaagaagcctgtgaggaggagatatgagccgtatgggatgtattctgacgatgatgccaacagtgatgcctcaagtgtttgctctgagcgctcatatggctccaggaatggtggcattccccattatctgcggcagactgaggatgtagcagaagttctcaaccactgtgctagttcaaactggtcagaaaggaaagaagggcttctgggcctgcagaacttactgaagagccaaagaacactgagtcgagttgaactgaaaaggttgtgtgagatcttcactcggatgtttgctgaccctcatagcaagagagttttcagtatgtttttggagactcttgtggattttataataattcataaggatgatttacaagactggctttttgttcttctcacacaattacttaagaaaatgggagcagatttacttggatctgtgcaagcaaaagttcaaaaggctctagatgtcacaagggactcctttccatttgatcaacaatttaacattttgatgagatttattgtggatcaaactcaaactccaaacctcaaggtcaaagttgcaatcctgaaatacattgagtctctggccagacagatggatccaacagattttgtaaactctagtgagacaaggcttgctgtttctagaatcataacctggacaacagaaccaaagagttcagacgtgagaaaggcagcacagattgtgctaatctctctgtttgaattgaatactcctgaatttaccatgttacttggtgccttgccaaaaacattccaggatggtgccaccaaactcctgcacaaccacctcaagaattccagtaacaccagtgtggtgagtgctttggtcacgattggtgcctatgtgatgtccatgacctctgcgtagcccttatctagaacctactctaatagaataccccgtttccttgtcctctttcaggaaatgtcgagcatcctgaggatggggccatcttaagccccagtgaatgaatgaatctgatatttaagtatgccgttttttctcaggttgttcagtcaactacattttcactaggttatccagttagtcattcattcactgagttggtcttatttttcaacactggaaagatgcaagtgctcaattttgtctgtcactctagcacacccaacatcaatcatttgactccaggagtgcttgtatgatgattattcatttttggtttatatacacttaaaattggccttatgattctaagggaaaaaaaaaaccatcctgggcagattctacccatttatttacatgtgggttaaaagaccaaggaaagaatagaatatattctatatacagcccttgaataacgatgcctattctgcttcaccccagggctctccaagcaatacgattggccggacgccctcccgacacaccagcagcaggaccagccccctgacctcacccaccaactgttcccatgggggtctgtctccaagtcggttatggggttggagtgccgacgggttagcgaagcacccacctcccttttctcagcctaactccatccccaccgctccctcccacaaggctctcaggcgctcttactctcccagcatgctggactatgatacagagaacctgaactctgaagaaatctatagttctctacgtggagttacagaagccattgaaaagtttagttttcgaagccaagaagatctgaatgagccaattaaacgagatggcaaaaaggagtgtgatattgtgtcccgcgatgggggcgctgcctcccctgccactgagggccgggggggtagtgaagtagaaggaggccggacagctctggataacaagacctcactactcaacacccagcctccgcgcgccttcccggggccgcgggcgcgagactacaacccgtacccctactcagatgccatcaacacctacgacaagaccgccctgaaagaggctgtgttcgatgacgacatggagcagcttcgagacgtgcccatcgaccattctgacctggtggctgaccttctgaaagagctgtccaaccacaatgagcgagtggaggaacggaagggagccctgctggagctgctcaagatcacgcgggaagacagccttggtgtctgggaggagcacttcaagaccattctgctcctgctgctggagacccttggagacaaagaccattcaattcgagcactggcgttaagagttttgagggaaattctgagaaatcaaccagcaagatttaaaaactacgccgagctgacgattatgaagactctggaagcccacaaagactcccataaggaggtggtgagagcggctgaggaggctgcgtccacactggccagttccatccacccggagcagtgcatcaaggtgctctgccccatcatccagacggccgactaccccatcaaccttgctgccatcaagatgcagaccaaagtcgtcgagaggatcgcaaaggagtcattgctgcagctccttgtcgacatcatcccaggcttgctgcagggttatgacaacaccgaaagtagtgtgcgtaaggccagcgtgttttgcttagtggcaatttattccgtaatcggagaagacctgaaacctcaccttgcacagctcacagggagcaagatgaagctactaaacttatacataaagagggcccagaccaccaacagcaacagcagctcctcctccgatgtctccacgcacagctaatggcagtacctgtctcttgtgtagacctagaagcaatcggtggtgcctctcagagacctttccccacccccttcatcggctgcccagtcagtacaaggaggcccacaaatatttattacaatcagtattttggtcccttccagcttttctgtagaatcttactggtattgaatgtaaaggaagcaaggcctgtattgcagtcttcatacaaaacaaaaggaataagaacagaaaagagccatactgaaacatgtcttgtacagcctgctgagatggcgaaaccctgtgtgtggggtgcagtttttaaaaatcagagcgctctagccactacttggtagaaagtagcattttttttttcagttaataacatatttgggggtggggtggggtgttactttgtgttcttcctccttagcctattttcttgtgcgtatggtctgtgtggggcccctttcacagctgacaccacgaaaggtgatatatctttaagttgtgttctgagacctactaaaaatgggaatcaagtcttggcaagaacagtctgaagatggccttttaacaaacgctgggaattttgcttgtcatatccagactggaggccgactgccctggctttcagcgtagaattgggagtgcaccctgacagtctccttccagctctccctaatcgactccaccgacaaggtccctaccccagagcttccatgcaaaggaattcttcaagtttaaatctggacacaaaaataagataaatgtatggcatcatttagggatgcctgagatggcagttcatgaagcacagaagataaagaagaagtctttcatctttactgctgagatccttgggaacactgttgtcatgggggctctgccaagaccctcatctctgggctacacggtgattcagattgagcaccaacttgtttcctcccctcaaagttctgcctaagccgttcagttctaacatggtctcagttaatctggtaaatggcatctttaccatcttagttctgacttctcagtttaatgtgggattaagagccaagaaaagcctagagagactggatatcacaattttttttaattttataaactgaagtagttccttgaatgtctgttgatgaaatagtcactgtttaaggaaaaaagtaattatgaggtgtagcagattgcagaaaaacaggattagaaacacacttaaaaagaacacacatttagagtctctcttcctcctcagcgaaccactaggccccctttttaaaaacacctttagagcctaattactccaataaaagtaactagaggtttggagtctggttaaataaattctgagtaaaattcttaagccaaatggaaattcttaatgcaatcatgaggacttctattgtctcttactgttgtattagatcctataaattgaactgatttttccataaggaaaatgcttcttttgagattaattctaataacgtatttgctattgcagtgcagagcccactgcaactgctaggactgaaagcagaggctgggtgccagagcacgtgattcttaacatcatttccacagacccctctgccctgaccctctgcattggatgcaggaagctgggaaagactgatgttgatttggaaacatgggctgaaaatgaaggccccatagtgcataggaacagtaaagccagggtgctgacgtgtgtgtgtgtgtgtgtgtgtgtgtgtgtgtgtgtgtgtgttgtgtgtgtttgtgcgtgcaccctacacatgtgtggtacctcactgctgctgtttagggaacttgagggacgcgtttcaaggggttgggtattactgacgagctttggctcaaaatatagcaggaccaggtcttttgttgataagtactgtttgtttattaatatgtcattaatggtatttcttttttacactctacaagtgaattagggagtctcttgttgacccctttgttgcaggaatgtgcgtcgggctaggttatccatgagtttctttattcctaatgcagttagaaagacctttctccttgagctctttgactcccagaaggtaccccagtccccagtgtacttagaaaggatctcgaacattgctggacgtcctcatagtactcacaaagggctagccttgaatgtcactcgcccagtcttcagtctcctgacttagagatacaatcacgtcacaggtctcttggcctcaatctgaaaactgctgccgccgcgccgaggagactcgcatgccgccaccacctcactgggagggcgccgagcccaccgtcgccccctagaccctgacagctgcagctgccttgccttgccgccgcctccctgcagggcccctgttccaatgaaaaacagaacacaaaagagcagagcacctaagcctgtctctgcctccctgtctaccggactggccagggcccaagacccccgctgctccactgcggggctgggcgggctgactccctgcttcctccaagctgctgcctcccctgcagccagggtctgggcagggtgcagccggtcctcggggcacgcagcttccttcaagtacactgtgtgtgcttcccggacctgcggcgatgccacgggcctgccttttctatgcgcctcactagcttaccaccctgtgcaggtaatgcaactgactttgtctcatcagtctttttctttccctgccaccctttatttatcaagcgtaatgttacactttaaaggacagcaaataagaactttgtagaatcccaccaggactttgctaacaataatgtttggaaataaagaagtgctctgaaaaaatatcagccaccaaaatagttatgttggcactgtgttcacacgcatggtccccacacccccaggttgggtgggtttttttgttttttgggtttttttggggggggggctttttcatgttacatccatatctgtatttatatcttatttgtttcactttcaagtgtatcatggcaaatgtacagatttttttgttaataatgtgctaggatttgctaaaaaagaaaacaaaaaaaacccttttgagtttgccctagaataaatgagacttaattca

SEQ ID NO: 454543 - DNA, 5564 bp, Homo sapiens
ttttttttaatccccgcaccaagcgcttaacctcattggggtggaggagaaggcggcggctctctggtccgcagcggcaacagtaacgaaaaacagggctaatggactgctgaattatgaagtatttcagacccagtagtagaacatcactctgccactcactcctttatctcctactagttatttaaattggacttttaatatcctaccagctgctcttcagacacacatggtgcattgttgccattccccagattgcatctttgaaacacaggctcttaggtaaccttcagcgaacaaagagggcaacctcccagatacgtctgctggggagggagtcatcgtgactgccctctaggcttttgctgggatctgggatttgaattcccactatggagcctcgcatggagtcctgcctggcgcaggtgttgcagaaggatgtggggaaacgattgcaggttggccaagaactgatagactatttctcagacaaacagaagtctgctgaccttgagcatgaccagaccatgttagataaacttgtggatggacttgctacctcttgggtgaactctagcaattacaaggtggttctgctgggcatggacatcctgtccgccctggtgacccggctgcaggatcggttcaaggcgcagatcggcacagtgctgccaagtctaatagacagactaggagatgctaaagactctgtgagggagcaggaccaaactctgctgctaaagatcatggatcaagctgctaatccccagtacgtatgggacagaatgcttggaggcttcaaacacaagaatttccgtactcgagaaggcatctgtctctgccttatagcaacactcaatgcctctggagcacagactttaacactaagcaagattgtgccacatatatgcaacttacttggagatccaaacagccaggttcgagatgcagcaataaacagcttagtggaaatttacagacatgtaggagaacgtgtgagggcagatctcagtaaaaaaggattgccacagtcccggttgaatgtaatttttacaaaatttgatgaagtccagaaatctggaaacatgatacaatctgcaaatgataaaaatttcgacgatgaagattctgtggatggtaacagaccttcctctgctagttctacatcatccaaggctccaccaagttctcggagaaacgttggaatgggaaccacccgccggcttggttcatccacccttggatccaagtcttcagctgcaaaagaaggagctggtgctgttgatgaagaggattttattaaagcatttgatgatgtacctgtagtacagatttattccagccgagaccttgaggaatccataaacaaaattagggaaatattatctgatgacaagcatgattgggagcagagagtaaatgctctaaaaaagattagatctttacttttggctggtgctgctgagtatgataacttctttcaacatttgcgtcttttggatggagcctttaaactctctgctaaggacctgcggtctcaggtagtgcgggaggcttgtatcacgttggggcatctgtcatcagttctggggaataagtttgaccatggagctgaagccattatgccaactatctttaatttaattccaaacagtgccaaaattatggccacatctggtgttgtagctgttaggttaattattcggcacacacacatccctaggttaatacctgtcataacaagcaactgtacctctaagtctgtcgcagttagaaggcgctgttttgaatttttagatttgcttttacaagaatggcagacacattcactagaacgacacatatcagtattagctgaaacaataaagaagggaatacatgatgctgattccgaagcaagaatagaagccagaaaatgttactggggtttccacagtcacttcagcagagaagcagagcacttgtaccacaccttggagtcctcctaccagaaagccctgcagtcccacctgaagaactcagacagcatagtgtctctgcctcagtcagaccgctcatcttccagctctcaagagagtctaaatcgtccgctgtctgccaaaagaagtcctactggaagtaccacatctagagcttctacagttagtaccaaatctgtgtcaacgactgggtccctccagcgatctcgaagtgatattgatgtgaacgcagcagccagtgccaaatccaaagtctcctcatcttcgggcacgacgcctttcagctctgcagcagctttgcctccagggtcatacgcatccttaggtcggatccgcacaagacggcaaagctctgggagtgccaccaacgtcgcctctacacctgataaccggggccgcagtcgcgctaaagtggtttcacagtcccagcgatccagatctgctaatcctgctggtgctggcagccggtcaagttccccaggaaaattgttgggaagtggttatggtggacttactgggggctcctcacgaggcccacctgtgacaccgtcttcagaaaagcgaagcaagattcccaggagccagggatgtagccgggaaacaagtccaaaccgaataggattagcacggagcagccgtatccctcgacccagcatgagtcaggggtgcagccgcgataccagccgtgagagcagccgagatacaagccctgctcggggctttcctccacttgatcggtttgggcttggccagccaggaagaatacctggttctgtgaatgccatgagagttctgagcacaagtacagatcttgaagctgctgttgctgatgctttgaagaagcctgtgaggaggagatatgagccgtatgggatgtattctgacgatgatgccaacagtgatgcctcaagtgtttgctctgagcgctcatatggctccaggaatggtggcattccccattatctgcggcagactgaggatgtagcagaagttctcaaccactgtgctagttcaaactggtcagaaaggaaagaagggcttctgggcctgcagaacttactgaagagccaaagaacactgagtcgagttgaactgaaaaggttgtgtgagatcttcactcggatgtttgctgaccctcatagcaagagagttttcagtatgtttttggagactcttgtggattttataataattcataaggatgatttacaagactggctttttgttcttctcacacaattacttaagaaaatgggagcagatttacttggatctgtgcaagcaaaagttcaaaaggctctagatgtcacaagggactcctttccatttgatcaacaatttaacattttgatgagatttattgtggatcaaactcaaactccaaacctcaaggtcaaagttgcaatcctgaaatacattgagtctctggccagacagatggatccaacagattttgtaaactctagtgagacaaggcttgctgtttctagaatcataacctggacaacagaaccaaagagttcagacgtgagaaaggcagcacagattgtgctaatctctctgtttgaattgaatactcctgaatttaccatgttacttggtgccttgccaaaaacattccaggatggtgccaccaaactcctgcacaaccacctcaagaattccagtaacaccagtgtggtgagtgctttggtcacgattggtgcctatgtgatgtccatgacctctgcgtagcccttatctagaacctactctaatagaataccccgtttccttgtcctctttcaggaaatgtcgagcatcctgaggatggggccatcttaagccccagtgaatgaatgaatctgatatttaagtatgccgttttttctcaggttgttcagtcaactacattttcactaggttatccagttagtcattcattcactgagttggtcttatttttcaacactggaaagatgcaagtgctcaattttgtctgtcactctagcacacccaacatcaatcatttgactccaggagtgcttgtatgatgattattcatttttggtttatatacacttaaaattggccttatgattctaagggaaaaaaaaaaccatcctgggcagattctacccatttatttacatgtgggttaaaagaccaaggaaagaatagaatatattctatatacagcccttgaataacgatgcctattctgcttcaccccagggctctccaagcaatacgattggccggacgccctcccgacacaccagcagcaggaccagccccctgacctcacccaccaactgttcccatgggggtctgtctccaagtcggttatggggttggagtgccgacgggttagcgaagcacccacctcccttttctcagcctaactccatccccaccgctccctcccacaaggctctcaggcgctcttactctcccagcatgctggactatgatacagagaacctgaactctgaagaaatctatagttctctacgtggagttacagaagccattgaaaagtttagttttcgaagccaagaagatctgaatgagccaattaaacgagatggcaaaaaggagtgtgatattgtgtcccgcgatgggggcgctgcctcccctgccactgagggccgggggggtagtgaagtagaaggaggccggacagctctggataacaagacctcactactcaacacccagcctccgcgcgccttcccggggccgcgggcgcgagactacaacccgtacccctactcagatgccatcaacacctacgacaagaccgccctgaaagaggctgtgttcgatgacgacatggagcagcttcgagacgtgcccatcgaccattctgacctggtggctgaccttctgaaagagctgtccaaccacaatgagcgagtggaggaacggaagggagccctgctggagctgctcaagatcacgcgggaagacagccttggtgtctgggaggagcacttcaagaccattctgctcctgctgctggagacccttggagacaaagaccattcaattcgagcactggcgttaagagttttgagggaaattctgagaaatcaaccagcaagatttaaaaactacgccgagctgacgattatgaagactctggaagcccacaaagactcccataaggaggtggtgagagcggctgaggaggctgcgtccacactggccagttccatccacccggagcagtgcatcaaggtgctctgccccatcatccagacggccgactaccccatcaaccttgctgccatcaagatgcagaccaaagtcgtcgagaggatcgcaaaggagtcattgctgcagctccttgtcgacatcatcccaggcttgctgcagggttatgacaacaccgaaagtagtgtgcgtaaggccagcgtgttttgcttagtggcaatttattccgtaatcggagaagacctgaaacctcaccttgcacagctcacagggagcaagatgaagctactaaacttatacataaagagggcccagaccaccaacagcaacagcagcaccaccaggacagcagcaccaccaggacagcagcaccaccgacggtaccgc

SEQ ID NO: 454544 - DNA, 493 bp, Homo sapiens
gttatagacatgatgtatgtaataactttaatactattagtatgttacaaaacttaagacagttgctgtcgtactgtctacgatagtttaggaataaaagaccgattaaaactgaactttgtaagacacctatactccctgaagtatttctagtcaatttgcagccccaagggaccaaaataaaccaaattgtggggatggtagtgggtcttttaaactttgagatgtcattgtatctgtgtctgaaaacaataattctttaaaataggtggttgaaaagaaaactaaaccatacattcaagttgatattggaggtgggcaaacaaagacatttgctcctgaagaaatttctgccatggttctcactaaaatgaaagaaaccgctgaggcttatttgggaaagaaggtaaatatttctagaacaatgttaagtattttttgatcattagtattctcggttggctgttatgtatagaagccttcgtgaagggtt

SEQ ID NO: 454545 - DNA, 3961 bp, Homo sapiens
taagccgagtaggcggactggtgaggtcgacgccggccaagacagcacagacagattgacctattggggtgtttcgcgagtgtgagagggaagcgccgcggcctgtatttctagacctgcccttcgcctggttcgtggcgccttgtgaccccgggcccctgccgcctgcaagtcggaaattgcgctgtgctcctgtgctacggcctgtggctggactgcctgctgctgcccaactggctggcaagatgaagctctccctggtggccgcgatgctgctgctgctcagcgcggcgcgggccgaggaggaggacaagaaggaggacgtgggcacggtggtcggcatcgacctggggaccacctactcctgcgtcggcgtgttcaagaacggccgcgtggagatcatcgccaacgatcagggcaaccgcatcacgccgtcctatgtcgccttcactcctgaaggggaacgtctgattggcgatgccgccaagaaccagctcacctccaaccccgagaacacggtctttgacgccaagcggctcatcggccgcacgtggaatgacccgtctgtgcagcaggacatcaagttcttgccgttcaaggtggttgaaaagaaaactaaaccatacattcaagttgatattggaggtgggcaaacaaagacatttgctcctgaagaaatttctgccatggttctcactaaaatgaaagaaaccgctgaggcttatttgggaaagaaggttacccatgcagttgttactgtaccagcctattttaatgatgcccaacgccaagcaaccaaagacgctggaactattgctggcctaaatgttatgaggatcatcaacgagcctacggcagctgctattgcttatggcctggataagagggagggggagaagaacatcctggtgtttgacctgggtggcggaaccttcgatgtgtctcttctcaccattgacaatggtgtcttcgaagttgtggccactaatggagatactcatctgggtggagaagactttgaccagcgtgtcatggaacacttcatcaaactgtacaaaaagaagacgggcaaagatgtcaggaaagacaatagagctgtgcagaaactccggcgcgaggtagaaaaggccaaacgggccctgtcttctcagcatcaagcaagaattgaaattgagtccttctatgaaggagaagacttttctgagaccctgactcgggccaaatttgaagagctcaacatggatctgttccggtctactatgaagcccgtccagaaagtgttggaagattctgatttgaagaagtctgatattgatgaaattgttcttgttggtggctcgactcgaattccaaagattcagcaactggttaaagagttcttcaatggcaaggaaccatcccgtggcataaacccagatgaagctgtagcgtatggtgctgctgtccaggctggtgtgctctctggtgatcaagatacaggtgacctggtactgcttgatgtatgtccccttacacttggtattgaaactgtgggaggtgtcatgaccaaactgattccaaggaacacagtggtgcctaccaagaagtctcagatcttttctacagcttctgataatcaaccaactgttacaatcaaggtctatgaaggtgaaagacccctgacaaaagacaatcatcttctgggtacatttgatctgactggaattcctcctgctcctcgtggggtcccacagattgaagtcacctttgagatagatgtgaatggtattcttcgagtgacagctgaagacaagggtacagggaacaaaaataagatcacaatcaccaatgaccagaatcgcctgacacctgaagaaatcgaaaggatggttaatgatgctgagaagtttgctgaggaagacaaaaagctcaaggagcgcattgatactagaaatgagttggaaagctatgcctattctctaaagaatcagattggagataaagaaaagctgggaggtaaactttcctctgaagataaggagaccatggaaaaagctgtagaagaaaagattgaatggctggaaagccaccaagatgctgacattgaagacttcaaagctaagaagaaggaactggaagaaattgttcaaccaattatcagcaaactctatggaagtgcaggccctcccccaactggtgaagaggatacagcagaaaaagatgagttgtagacactgatctgctagtgctgtaatattgtaaatactggactcaggaacttttgttaggaaaaaattgaaagaacttaagtctcgaatgtaattggaatcttcacctcagagtggagttgaaactgctatagcctaagcggctgtttactgcttttcattagcagttgctcacatgtctttgggtgggggggagaagaagaattggccatcttaaaaagcgggtaaaaaacctgggttagggtgtgtgttcaccttcaaaatgttctatttaacaactgggtcatgtgcatctggtgtaggaagttttttctaccataagtgacaccaataaatgtttgttatttacactgtggtctaatgtttgtgagaagcttctaattagatcaattacttattttaggaaatttaagactagatactcgtgtgtggggtgaggggagggagtatttggtatgttgggataaggaaacacttctatttaatgcttccagggatttttttttttttttttaaccctcctgggcccaagtgatccttccacctcagtctcccagctaattgagaccacaggcttgttaccaccatgctcggcttttgcattaatctaagaaaaggggagagaagttaatccacatctttactcaggcaaggggcatttcacagtgcccaagagtggggttttcttgaacatacttggtttcctatttccccttatctttctaaaactgcctttctggtggctttttttaaaattattactaatgatgcttttatagctgcttggattctctgagaaatgatggggagtgagtgatcactggtattaactttatacacttggatttcatttgtaactttaggatgtaaaggtatattgtgaaccctagctgtgtcagaatctccatccctgaaatttctcattagtggtactggggtgggatcttggatggtgacattgaaactacactaaatcccctcactatgaatgggttgttaaaggcaatggtttgtgtcaaaactggtttaggattacttagattgtgttcctgaagaaaagagtccaggtaaatggtatgatcaataaaggacaggctggtgctaacataaaatccaatattgtaatcctagcactttgggaggccaaggcgggtggatcacaaggtcaagagatagagaccatctttgccaacatggtgaaactccatctctactgaaaatacaaaaattagctgggcgtggtagtgcaagctgaaggctgaggcaggagaatcactcgaacctgggaggcagaggttgcagtgagccgagatcacaccactgtactccagcccggcactccagcctggcgacaagagtgagactccacctcaaaaaaaaaaaaaaagaatccaatactgcccaaggataggtattttatagatgggcaactggctgaaaggttaattctctagggctagtagaactggatcccaacaccaaactcttaattagacctaggcctcagctgcactgcccgaaaagcatttgggcagaccctgagcagaatactggtctcaggccaagcccaatacagccattaaagatgacctacagtgctgtgtaccctggggcaatagggttaaatggtagttagcaactagggctagtcttcccttacctcaaaggctctcactaccgtggaccacctagtctgtaactctttctgaggagctgttactgaatattaaaaagatagacttcaactatgtgtc

SEQ ID NO: 454546 - DNA, 3209 bp, Homo sapiens
taagccgagtaggcggactggtgaggtcgacgccggccaagacagcacagacagattgacctattggggtgtttcgcgagtgtgagagggaagcgccgcggcctgtatttctagacctgcccttcgcctggttcgtggcgccttgtgaccccgggcccctgccgcctgcaagtcggaaattgcgctgtgctcctgtgctacggcctgtggctggactgcctgctgctgcccaactggctggcaagatgaagctctccctggtggccgcgatgctgctgctgctcagcgcggcgcgggccgaggaggaggacaagaaggaggacgtgggcacggtggtcggcatcgacctggggaccacctactcctgcgtcggcgtgttcaagaacggccgcgtggagatcatcgccaacgatcagggcaaccgcatcacgccgtcctatgtcgccttcactcctgaaggggaacgtctgattggcgatgccgccaagaaccagctcacctccaaccccgagaacacggtctttgacgccaagcggctcatcggccgcacgtggaatgacccgtctgtgcagcaggacatcaagttcttgccgttcaaggtggttgaaaagaaaactaaaccatacattcaagttgatattggaggtgggcaaacaaagacatttgctcctgaagaaatttctgccatggttctcactaaaatgaaagaaaccgctgaggcttatttgggaaagaaggttacccatgcagttgttactgtaccagcctattttaatgatgcccaacgccaagcaaccaaagacgctggaactattgctggcctaaatgttatgaggatcatcaacgagcctacggcagctgctattgcttatggcctggataagagggagggggagaagaacatcctggtgtttgacctgggtggcggaaccttcgatgtgtctcttctcaccattgacaatggtgtcttcgaagttgtggccactaatggagatactcatctgggtggagaagactttgaccagcgtgtcatggaacacttcatcaaactgtacaaaaagaagacgggcaaagatgtcaggaaagacaatagagctgtgcagaaactccggcgcgaggtagaaaaggccaaacgggccctgtcttctcagcatcaagcaagaattgaaattgagtccttctatgaaggagaagacttttctgagaccctgactcgggccaaatttgaagagctcaacatggatctgttccggtctactatgaagcccgtccagaaagtgttggaagattctgatttgaagaagtctgatattgatgaaattgttcttgttggtggctcgactcgaattccaaagattcagcaactggttaaagagttcttcaatggcaaggaaccatcccgtggcataaacccagatgaagctgtagcgtatggtgctgctgtccaggctggtgtgctctctggtgatcaagatacaggtgacctggtactgcttgatgtatgtccccttacacttggtattgaaactgtgggaggtgtcatgaccaaactgattccaaggaacacagtggtgcctaccaagaagtctcagatcttttctacagcttctgataatcaaccaactgttacaatcaaggtctatgaaggtgaaagacccctgacaaaagacaatcatcttctgggtacatttgatctgactggaattcctcctgctcctcgtggggtcccacagattgaagtcacctttgagatagatgtgaatggtattcttcgagtgacagctgaagacaagggtacagggaacaaaaataagatcacaatcaccaatgaccagaatcgcctgacacctgaagaaatcgaaaggatggttaatgatgctgagaagtttgctgaggaagacaaaaagctcaaggagcgcattgatactagaaatgagttggaaagctatgcctattctctaaagaatcagattggagataaagaaaagctgggaggtaaactttcctctgaagataaggagaccatggaaaaagctgtagaagaaaagattgaatggctggaaagccaccaagatgctgacattgaagacttcaaagctaagaagaaggaactggaagaaattgttcaaccaattatcagcaaactctatggaagtgcaggccctcccccaactggtgaagaggatacagcagaaaaagatgagttgtagacactgatctgctagtgctgtaatattgtaaatactggactcaggaacttttgttaggaaaaaattgaaagaacttaagtctcgaatgtaattggaatcttcacctcagagtggagttgaaactgctatagcctaagcggctgtttactgcttttcattagcagttgctcacatgtctttgggtgggggggagaagaagaattggccatcttaaaaagcgggtaaaaaacctgggttagggtgtgtgttcaccttcaaaatgttctatttaacaactgggtcatgtgcatctggtgtaggaagttttttctaccataagtgacaccaataaatgtttgttatttacactgtaaaaaaaaaaaaaaaaaaaaaaaaaaaaaggggggggggtaaaaatttcccccggggggcccagtttagggttccccggtttttttgccccaagggggcccctatgggggtcgtataataggcagggcaggggccgtgttttaccacgcgtgcgtgcgggggagcacccggctcgctggggcccttgggggagggaacccctaaccttcggcgggggcccatattggcccccctcaccctacagagtttaagcggtcctcagggtcaatttacactctcacgtgttacggtctacccacgcgaattgctggcgtggaagtcggtcccaggtttgttctgagcatcttcaccacgggctgccgccacaaaacaacagggaacagaaaccaatagagccacggagaggaacaacgagaactatagagccaagaggtataccagaggcacaagccagtcaaaaggaccagggacatggagagaaacacattctttgcacgccagcagacagagacgagacagcaaagaacagaaaccacgaacccaacaggaaaccaatcaaaacacgcaagacctcagccgaacaaacagcatcttacaagagagatcactaccaactcagcagacgagacaaacacaagagacaaaccg

SEQ ID NO: 454547 - DNA, 2934 bp, Homo sapiens
taagccgagtaggcggactggtgaggtcgacgccggccaagacagcacagacagattgacctattggggtgtttcgcgagtgtgagagggaagcgccgcggcctgtatttctagacctgcccttcgcctggttcgtggcgccttgtgaccccgggcccctgccgcctgcaagtcggaaattgcgctgtgctcctgtgctacggcctgtggctggactgcctgctgctgcccaactggctggcaagatgaagctctccctggtggccgcgatgctgctgctgctcagcgcggcgcgggccgaggaggaggacaagaaggaggacgtgggcacggtggtcggcatcgacctggggaccacctactcctgcgtcggcgtgttcaagaacggccgcgtggagatcatcgccaacgatcagggcaaccgcatcacgccgtcctatgtcgccttcactcctgaaggggaacgtctgattggcgatgccgccaagaaccagctcacctccaaccccgagaacacggtctttgacgccaagcggctcatcggccgcacgtggaatgacccgtctgtgcagcaggacatcaagttcttgccgttcaaggtggttgaaaagaaaactaaaccatacattcaagttgatattggaggtgggcaaacaaagacatttgctcctgaagaaatttctgccatggttctcactaaaatgaaagaaaccgctgaggcttatttgggaaagaaggttacccatgcagttgttactgtaccagcctattttaatgatgcccaacgccaagcaaccaaagacgctggaactattgctggcctaaatgttatgaggatcatcaacgagcctacggcagctgctattgcttatggcctggataagagggagggggagaagaacatcctggtgtttgacctgggtggcggaaccttcgatgtgtctcttctcaccattgacaatggtgtcttcgaagttgtggccactaatggagatactcatctgggtggagaagactttgaccagcgtgtcatggaacacttcatcaaactgtacaaaaagaagacgggcaaagatgtcaggaaagacaatagagctgtgcagaaactccggcgcgaggtagaaaaggccaaacgggccctgtcttctcagcatcaagcaagaattgaaattgagtccttctatgaaggagaagacttttctgagaccctgactcgggccaaatttgaagagctcaacatggatctgttccggtctactatgaagcccgtccagaaagtgttggaagattctgatttgaagaagtctgatattgatgaaattgttcttgttggtggctcgactcgaattccaaagattcagcaactggttaaagagttcttcaatggcaaggaaccatcccgtggcataaacccagatgaagctgtagcgtatggtgctgctgtccaggctggtgtgctctctggtgatcaagatacaggtgacctggtactgcttgatgtatgtccccttacacttggtattgaaactgtgggaggtgtcatgaccaaactgattccaaggaacacagtggtgcctaccaagaagtctcagatcttttctacagcttctgataatcaaccaactgttacaatcaaggtctatgaaggtgaaagacccctgacaaaagacaatcatcttctgggtacatttgatctgactggaattcctcctgctcctcgtggggtcccacagattgaagtcacctttgagatagatgtgaatggtattcttcgagtgacagctgaagacaagggtacagggaacaaaaataagatcacaatcaccaatgaccagaatcgcctgacacctgaagaaatcgaaaggatggttaatgatgctgagaagtttgctgaggaagacaaaaagctcaaggagcgcattgatactagaaatgagttggaaagctatgcctattctctaaagaatcagattggagataaagaaaagctgggaggtaaactttcctctgaagataaggagaccatggaaaaagctgtagaagaaaagattgaatggctggaaagccaccaagatgctgacattgaagacttcaaagctaagaagaaggaactggaagaaattgttcaaccaattatcagcaaactctatggaagtgcaggccctcccccaactggtgaagaggatacagcagaaaaagatgagttgtagacactgatctgctagtgctgtaatattgtaaatactggactcaggaacttttgttaggaaaaaattgaaagaacttaagtctcgaatgtaattggaatcttcacctcagagtggagttgaaactgctatagcctaagcggctgtttactgcttttcattagcagttgctcacatgtctttgggtgggggggagaagaagaattggccatcttaaaaagcgggtaaaaaacctgggttagggtgtgtgttcaccttcaaaatgttctatttaacaactgggtcatgtgcatctggtgtaggaagttttttctaccataagtgacaccaataaatgtttgttatttacactgaaaaaaaaaaaaaaaaaaactcgagttttttttttttttttttttaagatggataagcaaaagcatttattggtcaatgtgatatgttacggttgaggcatacccaggataagaactaagcaatactaaatcagttattacccaatatttactcttggctcaccatgtacatcaaacatttataaatctcaatgtgcttctggaatttgaataaggattttggagcacctcaaggccaatctgtgattaatgagaactgttgagttacttggcttggtgtcacagctgcccactggtgaaaaggctggctttagtatctctactatagccagggattcccactttatcatggctgtctctctctgaggcacttc

SEQ ID NO: 454548 - DNA, 2613 bp, Homo sapiens
taagccgagtaggcggactggtgaggtcgacgccggccaagacagcacagacagattgacctattggggtgtttcgcgagtgtgagagggaagcgccgcggcctgtatttctagacctgcccttcgcctggttcgtggcgccttgtgaccccgggcccctgccgcctgcaagtcggaaattgcgctgtgctcctgtgctacggcctgtggctggactgcctgctgctgcccaactggctggcaagatgaagctctccctggtggccgcgatgctgctgctgctcagcgcggcgcgggccgaggaggaggacaagaaggaggacgtgggcacggtggtcggcatcgacctggggaccacctactcctgcgtcggcgtgttcaagaacggccgcgtggagatcatcgccaacgatcagggcaaccgcatcacgccgtcctatgtcgccttcactcctgaaggggaacgtctgattggcgatgccgccaagaaccagctcacctccaaccccgagaacacggtctttgacgccaagcggctcatcggccgcacgtggaatgacccgtctgtgcagcaggacatcaagttcttgccgttcaaggtggttgaaaagaaaactaaaccatacattcaagttgatattggaggtgggcaaacaaagacatttgctcctgaagaaatttctgccatggttctcactaaaatgaaagaaaccgctgaggcttatttgggaaagaaggttacccatgcagttgttactgtaccagcctattttaatgatgcccaacgccaagcaaccaaagacgctggaactattgctggcctaaatgttatgaggatcatcaacgagcctacggcagctgctattgcttatggcctggataagagggagggggagaagaacatcctggtgtttgacctgggtggcggaaccttcgatgtgtctcttctcaccattgacaatggtgtcttcgaagttgtggccactaatggagatactcatctgggtggagaagactttgaccagcgtgtcatggaacacttcatcaaactgtacaaaaagaagacgggcaaagatgtcaggaaagacaatagagctgtgcagaaactccggcgcgaggtagaaaaggccaaacgggccctgtcttctcagcatcaagcaagaattgaaattgagtccttctatgaaggagaagacttttctgagaccctgactcgggccaaatttgaagagctcaacatggatctgttccggtctactatgaagcccgtccagaaagtgttggaagattctgatttgaagaagtctgatattgatgaaattgttcttgttggtggctcgactcgaattccaaagattcagcaactggttaaagagttcttcaatggcaaggaaccatcccgtggcataaacccagatgaagctgtagcgtatggtgctgctgtccaggctggtgtgctctctggtgatcaagatacaggtgacctggtactgcttgatgtatgtccccttacacttggtattgaaactgtgggaggtgtcatgaccaaactgattccaaggaacacagtggtgcctaccaagaagtctcagatcttttctacagcttctgataatcaaccaactgttacaatcaaggtctatgaaggtgaaagacccctgacaaaagacaatcatcttctgggtacatttgatctgactggaattcctcctgctcctcgtggggtcccacagattgaagtcacctttgagatagatgtgaatggtattcttcgagtgacagctgaagacaagggtacagggaacaaaaataagatcacaatcaccaatgaccagaatcgcctgacacctgaagaaatcgaaaggatggttaatgatgctgagaagtttgctgaggaagacaaaaagctcaaggagcgcattgatactagaaatgagttggaaagctatgcctattctctaaagaatcagattggagataaagaaaagctgggaggtaaactttcctctgaagataaggagaccatggaaaaagctgtagaagaaaagattgaatggctggaaagccaccaagatgctgacattgaagacttcaaagctaagaagaaggaactggaagaaattgttcaaccaattatcagcaaactctatggaagtgcaggccctcccccaactggtgaagaggatacagcagaaaaagatgagttgtagacactgatctgctagtgctgtaatattgtaaatactggactcaggaacttttgttaggaaaaaattgaaagaacttaagtctcgaatgtaattggaatcttcacctcagagtggagttgaaactgctatagcctaagcggctgtttactgcttttcattagcagttgctcacatgtctttgggtgggggggagaagaagaattggccatcttaaaaagcgggtaaaaaacctgggttagggtgtgtgttcaccttcaaaatgttctatttaacaactgggtcatgtgcatctggtgtaggaagttttttctaccataagtgacaccaataaatgtttgttatttacactggcaaaagaaataaaagtagaggcaattagtaagcaaaagaataaagtagggac

SEQ ID NO: 454549 - DNA, 2841 bp, Homo sapiens
taagccgagtaggcggactggtgaggtcgacgccggccaagacagcacagacagattgacctattggggtgtttcgcgagtgtgagagggaagcgccgcggcctgtatttctagacctgcccttcgcctggttcgtggcgccttgtgaccccgggcccctgccgcctgcaagtcggaaattgcgctgtgctcctgtgctacggcctgtggctggactgcctgctgctgcccaactggctggcaagatgaagctctccctggtggccgcgatgctgctgctgctcagcgcggcgcgggccgaggaggaggacaagaaggaggacgtgggcacggtggtcggcatcgacctggggaccacctactcctgcgtcggcgtgttcaagaacggccgcgtggagatcatcgccaacgatcagggcaaccgcatcacgccgtcctatgtcgccttcactcctgaaggggaacgtctgattggcgatgccgccaagaaccagctcacctccaaccccgagaacacggtctttgacgccaagcggctcatcggccgcacgtggaatgacccgtctgtgcagcaggacatcaagttcttgccgttcaaggtggttgaaaagaaaactaaaccatacattcaagttgatattggaggtgggcaaacaaagacatttgctcctgaagaaatttctgccatggttctcactaaaatgaaagaaaccgctgaggcttatttgggaaagaaggttacccatgcagttgttactgtaccagcctattttaatgatgcccaacgccaagcaaccaaagacgctggaactattgctggcctaaatgttatgaggatcatcaacgagcctacggcagctgctattgcttatggcctggataagagggagggggagaagaacatcctggtgtttgacctgggtggcggaaccttcgatgtgtctcttctcaccattgacaatggtgtcttcgaagttgtggccactaatggagatactcatctgggtggagaagactttgaccagcgtgtcatggaacacttcatcaaactgtacaaaaagaagacgggcaaagatgtcaggaaagacaatagagctgtgcagaaactccggcgcgaggtagaaaaggccaaacgggccctgtcttctcagcatcaagcaagaattgaaattgagtccttctatgaaggagaagacttttctgagaccctgactcgggccaaatttgaagagctcaacatggatctgttccggtctactatgaagcccgtccagaaagtgttggaagattctgatttgaagaagtctgatattgatgaaattgttcttgttggtggctcgactcgaattccaaagattcagcaactggttaaagagttcttcaatggcaaggaaccatcccgtggcataaacccagatgaagctgtagcgtatggtgctgctgtccaggctggtgtgctctctggtgatcaagatacaggtaggtcatcatcgcagcatctttcttagtgattcagtagcttgatggaagactcattagctattgctttagaaaataccagaatatgagcaacaaggtcacacagctagtaaagggtataagtgaagacaagactggggtagtctcaagatcattagcaactgtttaattcactgcctttaaaatgtgtgtgttagaacctaaccaaatgttagagagataaactttacatagctcatagggagaacttgaattaaaagttaaataacttatccttacaggtgacctggtactgcttgatgtatgtccccttacacttggtattgaaactgtgggaggtgtcatgaccaaactgattccaaggaacacagtggtgcctaccaagaagtctcagatcttttctacagcttctgataatcaaccaactgttacaatcaaggtctatgaaggtgaaagacccctgacaaaagacaatcatcttctgggtacatttgatctgactggaattcctcctgctcctcgtggggtcccacagattgaagtcacctttgagatagatgtgaatggtattcttcgagtgacagctgaagacaagggtacagggaacaaaaataagatcacaatcaccaatgaccagaatcgcctgacacctgaagaaatcgaaaggatggttaatgatgctgagaagtttgctgaggaagacaaaaagctcaaggagcgcattgatactagaaatgagttggaaagctatgcctattctctaaagaatcagattggagataaagaaaagctgggaggtaaactttcctctgaagataaggagaccatggaaaaagctgtagaagaaaagattgaatggctggaaagccaccaagatgctgacattgaagacttcaaagctaagaagaaggaactggaagaaattgttcaaccaattatcagcaaactctatggaagtgcaggccctcccccaactggtgaagaggatacagcagaaaaagatgagttgtagacactgatctgctagtgctgtaatattgtaaatactggactcaggaacttttgttaggaaaaaattgaaagaacttaagtctcgaatgtaattggaatcttcacctcagagtggagttgaaactgctatagcctaagcggctgtttactgcttttcattagcagttgctcacatgtctttgggtgggggggagaagaagaattggccatcttaaaaagcgggtaaaaaacctgggttagggtgtgtgttcaccttcaaaatgttctatttaacaactgggtcatgtgcatctggtgtaggaagttttttctaccataagtgacaccaataaatgtttgttatttacactg

SEQ ID NO: 454550 - DNA, 2730 bp, Homo sapiens
taagccgagtaggcggactggtgaggtcgacgccggccaagacagcacagacagattgacctattggggtgtttcgcgagtgtgagagggaagcgccgcggcctgtatttctagacctgcccttcgcctggttcgtggcgccttgtgaccccgggcccctgccgcctgcaagtcggaaattgcgctgtgctcctgtgctacggcctgtggctggactgcctgctgctgcccaactggctggcaagatgaagctctccctggtggccgcgatgctgctgctgctcagcgcggcgcgggccgaggaggaggacaagaaggaggacgtgggcacggtggtcggcatcgacctggggaccacctactcctgcgtcggcgtgttcaagaacggccgcgtggagatcatcgccaacgatcagggcaaccgcatcacgccgtcctatgtcgccttcactcctgaaggggaacgtctgattggcgatgccgccaagaaccagctcacctccaaccccgagaacacggtctttgacgccaagcggctcatcggccgcacgtggaatgacccgtctgtgcagcaggacatcaagttcttgccgttcaaggtggttgaaaagaaaactaaaccatacattcaagttgatattggaggtgggcaaacaaagacatttgctcctgaagaaatttctgccatggttctcactaaaatgaaagaaaccgctgaggcttatttgggaaagaaggttacccatgcagttgttactgtaccagcctattttaatgatgcccaacgccaagcaaccaaagacgctggaactattgctggcctaaatgttatgaggatcatcaacgagcctacggcagctgctattgcttatggcctggataagagggagggggagaagaacatcctggtgtttgacctgggtggcggaaccttcgatgtgtctcttctcaccattgacaatggtgtcttcgaagttgtggccactaatggagatactcatctgggtggagaagactttgaccagcgtgtcatggaacacttcatcaaactgtacaaaaagaagacgggcaaagatgtcaggaaagacaatagagctgtgcagaaactccggcgcgaggtagaaaaggccaaacgggccctgtcttctcagcatcaagcaagaattgaaattgagtccttctatgaaggagaagacttttctgagaccctgactcgggccaaatttgaagagctcaacatggatctgttccggtctactatgaagcccgtccagaaagtgttggaagattctgatttgaagaagtctgatattgatgaaattgttcttgttggtggctcgactcgaattccaaagattcagcaactggttaaagagttcttcaatggcaaggaaccatcccgtggcataaacccagatgaagctgtagcgtatggtgctgctgtccaggctggtgtgctctctggtgatcaagatacaggtgacctggtactgcttgatgtatgtccccttacacttggtattgaaactgtgggaggtgtcatgaccaaactgattccaaggaacacagtggtgcctaccaagaagtctcagatcttttctacagcttctgataatcaaccaactgttacaatcaaggtctatgaaggtgaaagacccctgacaaaagacaatcatcttctgggtacatttgatctgactggaattcctcctgctcctcgtggggtcccacagattgaagtcacctttgagatagatgtgaatggtattcttcgagtgacagctgaagacaagggtacagggaacaaaaataagatcacaatcaccaatgaccagaatcgcctgacacctgaagaaatcgaaaggatggttaatgatgctgagaagtttgctgaggaagacaaaaagctcaaggagcgcattgatactagaaatgagttggaaagctatgcctattctctaaagaatcagattggagataaagaaaagctgggaggtaaactttcctctgaagataaggagaccatggaaaaagctgtagaagaaaagattgaatggctggaaagccaccaagatgctgacattgaagacttcaaagctaagaagaaggaactggaagaaattgttcaaccaattatcagcaaactctatggaagtgcaggccctcccccaactggtgaagaggatacagcagaaaaagatgagttgtagacactgatctgctagtgctgtaatattgtaaatactggactcaggaacttttgttaggaaaaaattgaaagaacttaagtctcgaatgtaattggaatcttcacctcagagtggagttgaaactgctatagcctaagcggctgtttactgcttttcattagcagttgctcacatgtctttgggtgggggggagaagaagaattggccatcttaaaaagcgggtaaaaaacctgggttagggtgtgtgttctcctaccccagtcgacaccgaataactgttgcgtctcttcacaaacgtagtatttcgttgtaccgcccacaaaccgtggggggcctgctttggcccaacgcgggtgctgggctcgcggagcggttatcgccggcgcgcgcatatttggcgccctgtggggcaatttggccctttgggggagctgctccaccgagcccagtggccccggggttcgccaccccgccgcccctgaaattagccgggccttgcgccacgttaattaagagtcga

SEQ ID NO: 454551 - DNA, 1783 bp, Homo sapiens
aattaggctagtacgaggctgggttgaattcggccgaggctggcctaaatgttatgaggatcatcaacgagcctacggcagctgctattgcttatggcctggataagagggagggggagaagaacatcctggtgtttgacctgggtggcggaaccttcgatgtgtctcttctcaccattgacaatggtgtcttcgaagttgtggccactaatggagatactcatctgggtggagaagactttgaccagcgtgtcatggaacacttcatcaaactgtacaaaaagaagacgggcaaagatgtcaggaaagacaatagagctgtgcagaaactccggcgcgaggtagaaaaggccaaacgggccctgtcttctcagcatcaagcaagaattgaaattgagtccttctatgaaggagaagacttttctgagaccctgactcgggccaaatttgaagagctcaacatggatctgttccggtctactatgaagcccgtccagaaagtgttggaagattctgatttgaagaagtctgatattgatgaaattgttcttgttggtggctcgactcgaattccaaagattcagcaactggttaaagagttcttcaatggcaaggaaccatcccgtggcataaacccagatgaagctgtagcgtatggtgctgctgtccaggctggtgtgctctctggtgatcaagatacaggtgacctggtactgcttgatgtatgtccccttacacttggtattgaaactgtgggaggtgtcatgaccaaactgattccaaggaacacagtggtgcctaccaagaagtctcagatcttttctacagcttctgataatcaaccaactgttacaatcaaggtctatgaaggtgaaagacccctgacaaaagacaatcatcttctgggtacatttgatctgactggaattcctcctgctcctcgtggggtcccacagattgaagtcacctttgagatagatgtgaatggtattcttcgagtgacagctgaagacaagggtacagggaacaaaaataagatcacaatcaccaatgaccagaatcgcctgacacctgaagaaatcgaaaggatggttaatgatgctgagaagtttgctgaggaagacaaaaagctcaaggagcgcattgatactagaaatgagttggaaagctatgcctattctctaaagaatcagattggagataaagaaaagctgggaggtaaactttcctctgaagataaggagaccatggaaaaagctgtagaagaaaagattgaatggctggaaagccaccaagatgctgacattgaagacttcaaagctaagaagaaggaactggaagaaattgttcaaccaattatcagcaaactctatggaagtgcaggccctcccccaactggtgaagaggatacagcagaaaaagatgagttgtagacactgatctgctagtgctgtaatattgtaaatactggactcaggaacttttgttaggaaaaaattgaaagaacttaagtctcgaatgtaattggaatcttcacctcagagtggagttgaaactgctatagcctaagcggctgtttactgcttttcattagcagttgctcacatgtctttgggtgggggggagaagaagaattggccatcttaaaaagcgggtaaaaaacctgggttagggtgtgtgttcaccttcaaaatgttctatttaacaactgggtcatgtgcatctggtgtaggaagttttttctaccataagtgacaccaataaatgtttgttatttacactg

SEQ ID NO: 454552 - DNA, 1736 bp, Homo sapiens
gccccccccttttggtggtgggcccccccttcgatcggctcgtacctcgtccgcatcagcaagaatgaaatgagtccttctatgaaggagagacttgtctgagagcctgactcgggccaaatttgaagagctcaacatggatctgttccggtctactatgaagcccgtccagaaagtgttggaagattctgatttgaccagcgtgtcatggaacacttcatcaaactgtacaaaaagaagacgggcaaagatgtcaggaaagacaatagagctgtgcagaaactccggcgcgaggtagaaaaggccaaacgggccctgtcttctcagcatcaagcaagaattgaaattgagtccttctatgaaggagaagacttttctgagaccctgactcgggccaaatttgaagagctcaacatggatctgttccggtctactatgaagcccgtccagaaagtgttggaagattctgatttgaagaagtctgatattgatgaaattgttcttgttggtggctcgactcgaattccaaagattcagcaactggttaaagagttcttcaatggcaaggaaccatcccgtggcataaacccagatgaagctgtagcgtatggtgctgctgtccaggctggtgtgctctctggtgatcaagatacaggtgacctggtactgcttgatgtatgtccccttacacttggtattgaaactgtgggaggtgtcatgaccaaactgattccaaggaacacagtggtgcctaccaagaagtctcagatcttttctacagcttctgataatcaaccaactgttacaatcaaggtctatgaaggtgaaagacccctgacaaaagacaatcatcttctgggtacatttgatctgactggaattcctcctgctcctcgtggggtcccacagattgaagtcacctttgagatagatgtgaatggtattcttcgagtgacagctgaagacaagggtacagggaacaaaaataagatcacaatcaccaatgaccagaatcgcctgacacctgaagaaatcgaaaggatggttaatgatgctgagaagtttgctgaggaagacaaaaagctcaaggagcgcattgatactagaaatgagttggaaagctatgcctattctctaaagaatcagattggagataaagaaaagctgggaggtaaactttcctctgaagataaggagaccatggaaaaagctgtagaagaaaagattgaatggctggaaagccaccaagatgctgacattgaagacttcaaagctaagaagaaggaactggaagaaattgttcaaccaattatcagcaaactctatggaagtgcaggccctcccccaactggtgaagaggatacagcagaaaaagatgagttgtagacactgatctgctagtgctgtaatattgtaaatactggactcaggaacttttgttaggaaaaaattgaaagaacttaagtctcgaatgtaattggaatcttcacctcagagtggagttgaaactgctatagcctaagcggctgtttactgcttttcattagcagttgctcacatgtctttgggtgggggggagaagaagaattggccatcttaaaaagcgggtaaaaaacctgggttagggtgtgtgttcaccttcaaaatgttctatttaacaactgggtcatgtgcatctggtgtaggaagttttttctaccataagtgacaccaataaatgtttgttatttacactg

SEQ ID NO: 454553 - DNA, 2598 bp, Homo sapiens
taagccgagtaggcggactggtgaggtcgacgccggccaagacagcacagacagattgacctattggggtgtttcgcgagtgtgagagggaagcgccgcggcctgtatttctagacctgcccttcgcctggttcgtggcgccttgtgaccccgggcccctgccgcctgcaagtcggaaattgcgctgtgctcctgtgctacggcctgtggctggactgcctgctgctgcccaactggctggcaagatgaagctctccctggtggccgcgatgctgctgctgctcagcgcggcgcgggccgaggaggaggacaagaaggaggacgtgggcacggtggtcggcatcgacctggggaccacctactcctgcgtcggcgtgttcaagaacggccgcgtggagatcatcgccaacgatcagggcaaccgcatcacgccgtcctatgtcgccttcactcctgaaggggaacgtctgattggcgatgccgccaagaaccagctcacctccaaccccgagaacacggtctttgacgccaagcggctcatcggccgcacgtggaatgacccgtctgtgcagcaggacatcaagttcttgccgttcaaggtggttgaaaagaaaactaaaccatacattcaagttgatattggaggtgggcaaacaaagacatttgctcctgaagaaatttctgccatggttctcactaaaatgaaagaaaccgctgaggcttatttgggaaagaaggttacccatgcagttgttactgtaccagcctattttaatgatgcccaacgccaagcaaccaaagacgctggaactattgctggcctaaatgttatgaggatcatcaacgagcctacggcagctgctattgcttatggcctggataagagggagggggagaagaacatcctggtgtttgacctgggtggcggaaccttcgatgtgtctcttctcaccattgacaatggtgtcttcgaagttgtggccactaatggagatactcatctgggtggagaagactttgaccagcgtgtcatggaacacttcatcaaactgtacaaaaagaagacgggcaaagatgtcaggaaagacaatagagctgtgcagaaactccggcgcgaggtagaaaaggccaaacgggccctgtcttctcagcatcaagcaagaattgaaattgagtccttctatgaaggagaagacttttctgagaccctgactcgggccaaatttgaagagctcaacatggatctgttccggtctactatgaagcccgtccagaaagtgttggaagattctgatttgaagaagtctgatattgatgaaattgttcttgttggtggctcgactcgaattccaaagattcagcaactggttaaagagttcttcaatggcaaggaaccatcccgtggcataaacccagatgaagctgtagcgtatggtgctgctgtccaggctggtgtgctctctggtgatcaagatacaggtgacctggtactgcttgatgtatgtccccttacacttggtattgaaactgtgggaggtgtcatgaccaaactgattccaaggaacacagtggtgcctaccaagaagtctcagatcttttctacagcttctgataatcaaccaactgttacaatcaaggtctatgaaggtgaaagacccctgacaaaagacaatcatcttctgggtacatttgatctgactggaattcctcctgctcctcgtggggtcccacagattgaagtcacctttgagatagatgtgaatggtattcttcgagtgacagctgaagacaagggtacagggaacaaaaataagatcacaatcaccaatacacacaaatggaacagaaatagaaaataaacaacatgaagaaaaatagaaaagatagagaaaaaagaatagaaagaagaagaaaagaatagaaagaaagaaaaaaaaagaataaaggaagagaaatacgaataaatagaaatgagttggaaagctatgcctattctctaaagaatcagattggagataaagaaaagctgggaggtaaactttcctctgaagataaggagaccatggaaaaagctgtagaagaaaagattgaatggctggaaagccaccaagatgctgacattgaagacttcaaagctaagaagaaggaactggaagaaattgttcaaccaattatcagcaaactctatggaagtgcaggccctcccccaactggtgaagaggatacagcagaaaaagatgagttgtagacactgatctgctagtgctgtaatattgtaaatactggactcaggaacttttgttaggaaaaaattgaaagaacttaagtctcgaatgtaattggaatcttcacctcagagtggagttgaaactgctatagcctaagcggctgtttactgcttttcattagcagttgctcacatgtctttgggtgggggggagaagaagaattggccatcttaaaaagcgggtaaaaaacctgggttagggtgtgtgttcaccttcaaaatgttctatttaacaactgggtcatgtgcatctggtgtaggaagttttttctaccataagtgacaccaataaatgtttgttatttacactg

SEQ ID NO: 454554 - DNA, 1359 bp, Homo sapiens
atcaatatcagacttcttcaaatttgaagagctcaacatggatctgttccggtctactatgaagcccgtccagaaagtgttggaagattctgatttgaagaagtctgatattgatgaaattgttcttgttggtggctcgactcgaattccaaagattcagcaactggttaaagagttcttcaatggcaaggaaccatcccgtggcataaacccagatgaagctgtagcgtatggtgctgctgtccaggctggtgtgctctctggtgatcaagatacaggtgacctggtactgcttgatgtatgtccccttacacttggtattgaaactgtgggaggtgtcatgaccaaactgattccaaggaacacagtggtgcctaccaagaagtctcagatcttttctacagcttctgataatcaaccaactgttacaatcaaggtctatgaaggtgaaagacccctgacaaaagacaatcatcttctgggtacatttgatctgactggaattcctcctgctcctcgtggggtcccacagattgaagtcacctttgagatagatgtgaatggtattcttcgagtgacagctgaagacaagggtacagggaacaaaaataagatcacaatcaccaatgaccagaatcgcctgacacctgaagaaatcgaaaggatggttaatgatgctgagaagtttgctgaggaagacaaaaagctcaaggagcgcattgatactagaaatgagttggaaagctatgcctattctctaaagaatcagattggagataaagaaaagctgggaggtaaactttcctctgaagataaggagaccatggaaaaagctgtagaagaaaagattgaatggctggaaagccaccaagatgctgacattgaagacttcaaagctaagaagaaggaactggaagaaattgttcaaccaattatcagcaaactctatggaagtgcaggccctcccccaactggtgaagaggatacagcagaaaaagatgagttgtagacactgatctgctagtgctgtaatattgtaaatactggactcaggaacttttgttaggaaaaaattgaaagaacttaagtctcgaatgtaattggaatcttcacctcagagtggagttgaaactgctatagcctaagcggctgtttactgcttttcattagcagttgctcacatgtctttgggtgggggggagaagaagaattggccatcttaaaaagcgggtaaaaaacctgggttagggtgtgtgttcaccttcaaaatgttctatttaacaactgggtcatgtgcatctggtgtaggaagttttttctaccataagtgacaccaataaatgtttgttatttacactg

SEQ ID NO: 454555 - DNA, 1145 bp, Homo sapiens
cacgcgtccggtgacctggtactgcttgatgtatgtccccttacacttggtatcgaaactgtgggaggtgtcatgaccaaactcgaattccaaagattcagcaactggttaaagagttcttcaatggcaaggaaccatcccgtggcataaacccagatgaagctgtagcgtatggtgctgctgtccaggctggtgtgtaatcaaccaactgttacaatcaaggtctatgaaggtgaaagacccctgacaaaagacaatcatcttctgggtacatttgatctgactggaattcctcctgctcctcgtggggtcccacagattgaagtcacctttgagatagatgtgaatggtattcttcgagtgacagctgaagacaagggtacagggaacaaaaataagatcacaatcaccaatgaccagaatcgcctgacacctgaagaaatcgaaaggatggttaatgatgctgagaagtttgctgaggaagacaaaaagctcaaggagcgcattgatactagaaatgagttggaaagctatgcctattctctaaagaatcagattggagataaagaaaagctgggaggtaaactttcctctgaagataaggagaccatggaaaaagctgtagaagaaaagattgaatggctggaaagccaccaagatgctgacattgaagacttcaaagctaagaagaaggaactggaagaaattgttcaaccaattatcagcaaactctatggaagtgcaggccctcccccaactggtgaagaggatacagcagaaaaagatgagttgtagacactgatctgctagtgctgtaatattgtaaatactggactcaggaacttttgttaggaaaaaattgaaagaacttaagtctcgaatgtaattggaatcttcacctcagagtggagttgaaactgctatagcctaagcggctgtttactgcttttcattagcagttgctcacatgtctttgggtgggggggagaagaagaattggccatcttaaaaagcgggtaaaaaacctgggttagggtgtgtgttcaccttcaaaatgttctatttaacaactgggtcatgtgcatctggtgtaggaagttttttctaccataagtgacaccaataaatgtttgttatttacactg

SEQ ID NO: 454556 - DNA, 897 bp, Homo sapiens
ctgtcactcgaagaataccattcacatctatctcaaaggtgacttcaatctgtgggaccccacgaggagcaggaggaattccagtcagatagatgtgaatggtattcttcgagtgacagctgaagacaagggtacagggaacaaaaataagatcacaatcaccaatgaccagaatcgcctgacacctgaagaaatcgaaaggatggttaatgatgctgagaagtttgctgaggaagacaaaaagctcaaggagcgcattgatactagaaatgagttggaaagctatgcctattctctaaagaatcagattggagataaagaaaagctgggaggtaaactttcctctgaagataaggagaccatggaaaaagctgtagaagaaaagattgaatggctggaaagccaccaagatgctgacattgaagacttcaaagctaagaagaaggaactggaagaaattgttcaaccaattatcagcaaactctatggaagtgcaggccctcccccaactggtgaagaggatacagcagaaaaagatgagttgtagacactgatctgctagtgctgtaatattgtaaatactggactcaggaacttttgttaggaaaaaattgaaagaacttaagtctcgaatgtaattggaatcttcacctcagagtggagttgaaactgctatagcctaagcggctgtttactgcttttcattagcagttgctcacatgtctttgggtgggggggagaagaagaattggccatcttaaaaagcgggtaaaaaacctgggttagggtgtgtgttcaccttcaaaatgttctatttaacaactgggtcatgtgcatctggtgtaggaagttttttctaccataagtgacaccaataaatgtttgttatttacactg

SEQ ID NO: 454557 - DNA, 790 bp, Homo sapiens
taatatttcgcccactaagccaatcactttattgactcaggtggtgtgcacaccacctggaccagaatcgcctgacacctgaagaaatcgaaaggatggttaatgatgctgagaagtttgctgaggaagacaaaaagctcaaggagcgcattgatactagaaatgagttggaaagctatgcctattctctaaagaatcagattggagataaagaaaagctgggaggtaaactttcctctgaagataaggagaccatggaaaaagctgtagaagaaaagattgaatggctggaaagccaccaagatgctgacattgaagacttcaaagctaagaagaaggaactggaagaaattgttcaaccaattatcagcaaactctatggaagtgcaggccctcccccaactggtgaagaggatacagcagaaaaagatgagttgtagacactgatctgctagtgctgtaatattgtaaatactggactcaggaacttttgttaggaaaaaattgaaagaacttaagtctcgaatgtaattggaatcttcacctcagagtggagttgaaactgctatagcctaagcggctgtttactgcttttcattagcagttgctcacatgtctttgggtgggggggagaagaagaattggccatcttaaaaagcgggtaaaaaacctgggttagggtgtgtgttcaccttcaaaatgttctatttaacaactgggtcatgtgcatctggtgtaggaagttttttctaccataagtgacaccaataaatgtttgttatttacactg

SEQ ID NO: 454558 - DNA, 2039 bp, Homo sapiens
taagccgagtaggcggactggtgaggtcgacgccggccaagacagcacagacagattgacctattggggtgtttcgcgagtgtgagagggaagcgccgcggcctgtatttctagacctgcccttcgcctggttcgtggcgccttgtgaccccgggcccctgccgcctgcaagtcggaaattgcgctgtgctcctgtgctacggcctgtggctggactgcctgctgctgcccaactggctggcaagatgaagctctccctggtggccgcgatgctgctgctgctcagcgcggcgcgggccgaggaggaggacaagaaggaggacgtgggcacggtggtcggcatcgacctggggaccacctactcctgcgtcggcgtgttcaagaacggccgcgtggagatcatcgccaacgatcagggcaaccgcatcacgccgtcctatgtcgccttcactcctgaaggggaacgtctgattggcgatgccgccaagaaccagctcacctccaaccccgagaacacggtctttgacgccaagcggctcatcggccgcacgtggaatgacccgtctgtgcagcaggacatcaagttcttgccgttcaaggtggttgaaaagaaaactaaaccatacattcaagttgatattggaggtgggcaaacaaagacatttgctcctgaagaaatttctgccatggttctcactaaaatgaaagaaaccgctgaggcttatttgggaaagaaggttacccatgcagttgttactgtaccagcctattttaatgatgcccaacgccaagcaaccaaagacgctggaactattgctggcctaaatgttatgaggatcatcaacgagcctacggcagctgctattgcttatggcctggataagagggagggggagaagaacatcctggtgtttgacctgggtggcggaaccttcgatgtgtctcttctcaccattgacaatggtgtcttcgaagttgtggccactaatggagatactcatctgggtggagaagactttgaccagcgtgtcatggaacacttcatcaaactgtacaaaaagaagacgggcaaagatgtcaggaaagacaatagagctgtgcagaaactccggcgcgaggtagaaaaggccaaacgggccctgtcttctcagcatcaagcaagaattgaaattgagtccttctatgaaggagaagacttttctgagaccctgactcgggccaaatttgaagagctcaacatggatctgttccggtctactatgaagcccgtccagaaagtgttggaagattctgatttgaagaagtctgatattgatgaaattgttcttgttggtggctcgactcgaattccaaagattcagcaactggttaaagagttcttcaatggcaaggaaccatcccgtggcataaacccagatgaagctgtagcgtatggtgctgctgtccaggctggtgtgctctctggtgatcaagatacaggtgacctggtactgcttgatgtatgtccccttacacttggtattgaaactgtgggaggtgtcatgaccaaactgattccaaggaacacagtggtgcctaccaagaagtctcagatcttttctacagcttctgataatcaaccaactgttacaatcaaggtctatgaaggtgaaagacccctgacaaaagacaatcatcttctgggtacatttgatctgactggaattcctcctgctcctcgtggggtcccacagattgaagtcacctttgagatagatgtgaatggtattcttcgagtgacagctgaagacaagggtacagggaacaaaaataagatcacaatcaccaatgaccagaatcgcctgacacctgaagaaatcgaaaggatggttaatgatgctgagaagtttgctgaggaagacaaaaagctcaaggagcgcattgatactagaaatgagttggaaagctatagatatggtggtctttaatgaggtaccagtcgaaccaaaatcgtgaataactgggagccaatcatctggcatgtaatagattacgttgct

SEQ ID NO: 454559 - DNA, 1994 bp, Homo sapiens
taagccgagtaggcggactggtgaggtcgacgccggccaagacagcacagacagattgacctattggggtgtttcgcgagtgtgagagggaagcgccgcggcctgtatttctagacctgcccttcgcctggttcgtggcgccttgtgaccccgggcccctgccgcctgcaagtcggaaattgcgctgtgctcctgtgctacggcctgtggctggactgcctgctgctgcccaactggctggcaagatgaagctctccctggtggccgcgatgctgctgctgctcagcgcggcgcgggccgaggaggaggacaagaaggaggacgtgggcacggtggtcggcatcgacctggggaccacctactcctgcgtcggcgtgttcaagaacggccgcgtggagatcatcgccaacgatcagggcaaccgcatcacgccgtcctatgtcgccttcactcctgaaggggaacgtctgattggcgatgccgccaagaaccagctcacctccaaccccgagaacacggtctttgacgccaagcggctcatcggccgcacgtggaatgacccgtctgtgcagcaggacatcaagttcttgccgttcaaggtggttgaaaagaaaactaaaccatacattcaagttgatattggaggtgggcaaacaaagacatttgctcctgaagaaatttctgccatggttctcactaaaatgaaagaaaccgctgaggcttatttgggaaagaaggttacccatgcagttgttactgtaccagcctattttaatgatgcccaacgccaagcaaccaaagacgctggaactattgctggcctaaatgttatgaggatcatcaacgagcctacggcagctgctattgcttatggcctggataagagggagggggagaagaacatcctggtgtttgacctgggtggcggaaccttcgatgtgtctcttctcaccattgacaatggtgtcttcgaagttgtggccactaatggagatactcatctgggtggagaagactttgaccagcgtgtcatggaacacttcatcaaactgtacaaaaagaagacgggcaaagatgtcaggaaagacaatagagctgtgcagaaactccggcgcgaggtagaaaaggccaaacgggccctgtcttctcagcatcaagcaagaattgaaattgagtccttctatgaaggagaagacttttctgagaccctgactcgggccaaatttgaagagctcaacatggatctgttccggtctactatgaagcccgtccagaaagtgttggaagattctgatttgaagaagtctgatattgatgaaattgttcttgttggtggctcgactcgaattccaaagattcagcaactggttaaagagttcttcaatggcaaggaaccatcccgtggcataaacccagatgaagctgtagcgtatggtgctgctgtccaggctggtgtgctctctggtgatcaagatacaggtaggtcatcatcgcagcatctttcttagtgattcagtagcttgatggaagactcattagctattgctttagaaaataccagaatatgagcaacaaggtcacacagctagtaaagggtataagtgaagacaagactggggtagtctcaagatcattagcaactgtttaattcactgcctttaaaatgtgtgtgttagaacctaaccaaatgttagagagataaactttacatagctcatagggagaacttgaattaaaagttaaataacttatccttacaggtgacctggtactgcttgatgtatgtccccttacacttggtattgaaactgtgggaggtgtcatgaccaaactgattccaaggaacacagtggtgcctaccaagaagtctcagatcttttctacagcttctgataatcaaccaactgttacaatcaaggtctatgaaggtaattacttaagtttgttaatatcatggctttttttttgagactctgtctcaaacaaaaaaaaaa

SEQ ID NO: 454560 - DNA, 910 bp, Homo sapiens
ccggtcactgtcgtacgtattactcactcctctgcttaaaatgttcccccagttcttctcatggctacttgcttctcatccgtggaggcttcagctcaaatacctccccaaaccctcatttaaatatgctcctccctgcttagaagaaaaaactaagaagaaatacttaaactactttaaaaaatattgttcagttaattgaaggaaatcagtaaaaccagccattggggctactataatgaattggtatggtattggtacagaaagaggccaccagaacagagtaggaagtccaaaaccagtcatgttacatggatatttaatatacattgaaggtgccacttcaggtctgtggggaatattttaagcagaggagtgagtaagctgtagaagaaaagattgaatggctggaaagccaccaagatgctgacattgaagacttcaaagctaagaagaaggaactggaagaaattgttcaaccaattatcagcaaactctatggaagtgcaggccctcccccaactggtgaagaggatacagcagaaaaagatgagttgtagacactgatctgctagtgctgtaatattgtaaatactggactcaggaacttttgttaggaaaaaattgaaagaacttaagtctcgaatgtaattggaatcttcacctcagagtggagttgaaactgctatagcctaagcggctgtttactgcttttcattagcagttgctcacatgtctttgggtgggggggagaagaagaattggccatcttaaaaagcgggtaaaaaacctgggttagggtgtgtgttcaccttcaaaatgttctatttaacaactgggtcatgtgcatctggtgtaggaagttttttctaccataagtgacaccaataaatgtttgttatttacactg

SEQ ID NO: 454561 - DNA, 489 bp, Homo sapiens
gccccccccttttggtggtgggcccccccttcgatcggctcgtacctcgtccgcatcagcaagaatgaaatgagtccttctatgaaggagagacttgtctgagagcctgactcgggccaaatttgaagagctcaacatggatctgttccggtctactatgaagcccgtccagaaagtgttggaagattctgatttgaccagcgtgtcatggaacacttcatcaaactgtacaaaaagaagacgggcaaagatgtcaggaaagacaatagagctgtgcagaaactccggcgcgaggtagaaaaggccaaacgggccctgtcttctcagcatcaagcaagaattggccatcttaaaaagcgggtaaaaaacctgggttagggtgtgtgttcaccttcaaaatgttctatttaacaactgggtcatgtgcatctggtgtaggaagttttttctaccataagtgacaccaataaatgtttgttatttacactg

SEQ ID NO: 454562 - DNA, 2560 bp, Homo sapiens
taagccgagtaggcggactggtgaggtcgacgccggccaagacagcacagacagattgacctattggggtgtttcgcgagtgtgagagggaagcgccgcggcctgtatttctagacctgcccttcgcctggttcgtggcgccttgtgaccccgggcccctgccgcctgcaagtcggaaattgcgctgtgctcctgtgctacggcctgtggctggactgcctgctgctgcccaactggctggcaagatgaagctctccctggtggccgcgatgctgctgctgctcagcgcggcgcgggccgaggaggaggacaagaaggaggacgtgggcacggtggtcggcatcgacctggggaccacctactcctgcgtcggcgtgttcaagaacggccgcgtggagatcatcgccaacgatcagggcaaccgcatcacgccgtcctatgtcgccttcactcctgaaggggaacgtctgattggcgatgccgccaagaaccagctcacctccaaccccgagaacacggtctttgacgccaagcggctcatcggccgcacgtggaatgacccgtctgtgcagcaggacatcaagttcttgccgttcaaggtggttgaaaagaaaactaaaccatacattcaagttgatattggaggtgggcaaacaaagacatttgctcctgaagaaatttctgccatggttctcactaaaatgaaagaaaccgctgaggcttatttgggaaagaaggttacccatgcagttgttactgtaccagcctattttaatgatgcccaacgccaagcaaccaaagacgctggaactattgctggcctaaatgttatgaggatcatcaacgagcctacggcagctgctattgcttatggcctggataagagggagggggagaagaacatcctggtgtttgacctgggtggcggaaccttcgatgtgtctcttctcaccattgacaatggtgtcttcgaagttgtggccactaatggagatactcatctgggtggagaagactttgaccagcgtgtcatggaacacttcatcaaactgtacaaaaagaagacgggcaaagatgtcaggaaagacaatagagctgtgcagaaactccggcgcgaggtagaaaaggccaaacgggccctgtcttctcagcatcaagcaagaattgaaattgagtccttctatgaaggagaagacttttctgagaccctgactcgggccaaatttgaagagctcaacatggatctgttccggtctactatgaagcccgtccagaaagtgttggaagattctgatttgaagaagtctgatattgatgaaattgttcttgttggtggctcgactcgaattccaaagattcagcaactggttaaagagttcttcaatggcaaggaaccatcccgtggcataaacccagatgaagctgtagcgtatggtgctgctgtccaggctggtgtgctctctggtgatcaagatacaggtgacctggtactgcttgatgtatgtccccttacacttggtattgaaactgtgggaggtgtcatgaccaaactgattccaaggaacacagtggtgcctaccaagaagtctcagatcttttctacagcttctgataatcaaccaactgttacaatcaaggtctatgaaggtgaaagacccctgacaaaagacaatcatcttctgggtacatttgatctgactggaattcctcctgctcctcgtggggtcccacagattgaagtcacctttgagatagatgtgaatggtattcttcgagtgacagctgaagacaagggtacagggaacaaaaataagatcacaatcaccaatgaccagaatcgcctgacacctgaagaaatcgaaaggatggttaatgatgctgagaagtttgctgaggaagacaaaaagctcaaggagcgcattgatactagaaatgagttggaaagctatgcctattctctaaagaatcagattggagataaagaaaagctgggaggtaaactttcctctgaagataaggagaccatggaaaaagctgtagaagaaaagattgaatggctggaaagccaccaagatgctgacattgaagacttcaaagctaagaagaaggaactggaagaaattgttcaaccaattatcagcaaactctatggaagtgcaggccctcccccaactggtgaagaggatacagcagaaaaagatgagttgtagacactgatctgctagtgctgtaatattgtaaatactggactcaggaacttttgttaggaaaaaattgaaagaacttaagtctcgaatgtaattggaatcttcacctcagagtggagttgaaactgctatagcctaagcggctgtttactgcttttcattagcagttgctcacatgtctttgggtgggggggagaagaagaattggccatcttaaaaagcgggtaaaaaacctgggttagggtgtgtgttcaccttcaaaatgttctatttaacaactgggtcatgtgcatctggtgtaggaagttttttctaccataagtgacaccaataaatgtttgttatttacactg

SEQ ID NO: 454563 - DNA, 3013 bp, Homo sapiens
taagccgagtaggcggactggtgaggtcgacgccggccaagacagcacagacagattgacctattggggtgtttcgcgagtgtgagagggaagcgccgcggcctgtatttctagacctgcccttcgcctggttcgtggcgccttgtgaccccgggcccctgccgcctgcaagtcggaaattgcgctgtgctcctgtgctacggcctgtggctggactgcctgctgctgcccaactggctggcaagatgaagctctccctggtggccgcgatgctgctgctgctcagcgcggcgcgggccgaggaggaggacaagaaggaggacgtgggcacggtggtcggcatcgacctggggaccacctactcctgcgtcggcgtgttcaagaacggccgcgtggagatcatcgccaacgatcagggcaaccgcatcacgccgtcctatgtcgccttcactcctgaaggggaacgtctgattggcgatgccgccaagaaccagctcacctccaaccccgagaacacggtctttgacgccaagcggctcatcggccgcacgtggaatgacccgtctgtgcagcaggacatcaagttcttgccgttcaaggtggttgaaaagaaaactaaaccatacattcaagttgatattggaggtgggcaaacaaagacatttgctcctgaagaaatttctgccatggttctcactaaaatgaaagaaaccgctgaggcttatttgggaaagaaggttacccatgcagttgttactgtaccagcctattttaatgatgcccaacgccaagcaaccaaagacgctggaactattgctggcctaaatgttatgaggatcatcaacgagcctacggcagctgctattgcttatggcctggataagagggagggggagaagaacatcctggtgtttgacctgggtggcggaaccttcgatgtgtctcttctcaccattgacaatggtgtcttcgaagttgtggccactaatggagatactcatctgggtggagaagactttgaccagcgtgtcatggaacacttcatcaaactgtacaaaaagaagacgggcaaagatgtcaggaaagacaatagagctgtgcagaaactccggcgcgaggtagaaaaggccaaacgggccctgtcttctcagcatcaagcaagaattgaaattgagtccttctatgaaggagaagacttttctgagaccctgactcgggccaaatttgaagagctcaacatggatctgttccggtctactatgaagcccgtccagaaagtgttggaagattctgatttgaagaagtctgatattgatgaaattgttcttgttggtggctcgactcgaattccaaagattcagcaactggttaaagagttcttcaatggcaaggaaccatcccgtggcataaacccagatgaagctgtagcgtatggtgctgctgtccaggctggtgtgctctctggtgatcaagatacaggtgacctggtactgcttgatgtatgtccccttacacttggtattgaaactgtgggaggtgtcatgaccaaactgattccaaggaacacagtggtgcctaccaagaagtctcagatcttttctacagcttctgataatcaaccaactgttacaatcaaggtctatgaaggtgaaagacccctgacaaaagacaatcatcttctgggtacatttgatctgactggaattcctcctgctcctcgtggggtcccacagattgaagtcacctttgagatagatgtgaatggtattcttcgagtgacagctgaagacaagggtacagggaacaaaaataagatcacaatcaccaatgaccagaatcgcctgacacctgaagaaatcgaaaggatggttaatgatgctgagaagtttgctgaggaagacaaaaagctcaaggagcgcattgatactagaaatgagttggaaagctatgcctattctctaaagaatcagattggagataaagaaaagctgggaggtaaactttcctctgaagataaggagaccatggaaaaagctgtagaagaaaagattgaatggctggaaagccaccaagatgctgacattgaagacttcaaagctaagaagaaggaactggaagaaattgttcaaccaattatcagcaaactctatggaagtgcaggccctcccccaactggtgaagaggatacagcagaaaaagatgagttgtagacactgatctgctagtgctgtaatattgtaaatactggactcaggaacttttgttaggaaaaaattgaaagaacttaagtctcgaatgtaattggaatcttcacctcagagtggagttgaaactgctatagcctaagcggctgtttactgcttttcattagcagttgctcacatgtctttgggtgggggggagaagaagaattggccatcttaaaaagcgggtaaaaaacctgggttagggtgtgtgttcaccttcaaaatgttctatttaacaactgggtcatgtgcatctggtgtaggaagttttttctaccataagtgacaccaataaatgtttgttatttacactgtaaaaaaaaaaaaaaaaaaaaaaaaaaaaaaaaaaaaaaaaaaaaaaaaaaaaaaaaaaaaaaaaaaaaaaaaaaaaaaaaaaaaaaaaaaaaaaaaaagaaaataaaaaaagaaaaaaactgacaagaaagagaacaaaaagtagaaaagaaaacgagaagggacggggggacgcggcatactacctgccggtggagtagataactaaagattatgaatgacacgagaatccataggtatctttatagaaatcaagaagatgagtagaagagaagccgtatatgtgtggatatactaatataataaacatgaggcgatagtgtagcactttaaataaaaaaacaacagatacagacggaacgaaacaatacagcggtgtcgtaagaatgatctacagaaaaaaaactaaagttatggagagaaaagacagaaaaggcggaaacaacagagaa

SEQ ID NO: 454564 - DNA, 2964 bp, Homo sapiens
taagccgagtaggcggactggtgaggtcgacgccggccaagacagcacagacagattgacctattggggtgtttcgcgagtgtgagagggaagcgccgcggcctgtatttctagacctgcccttcgcctggttcgtggcgccttgtgaccccgggcccctgccgcctgcaagtcggaaattgcgctgtgctcctgtgctacggcctgtggctggactgcctgctgctgcccaactggctggcaagatgaagctctccctggtggccgcgatgctgctgctgctcagcgcggcgcgggccgaggaggaggacaagaaggaggacgtgggcacggtggtcggcatcgacctggggaccacctactcctgcgtcggcgtgttcaagaacggccgcgtggagatcatcgccaacgatcagggcaaccgcatcacgccgtcctatgtcgccttcactcctgaaggggaacgtctgattggcgatgccgccaagaaccagctcacctccaaccccgagaacacggtctttgacgccaagcggctcatcggccgcacgtggaatgacccgtctgtgcagcaggacatcaagttcttgccgttcaaggtggttgaaaagaaaactaaaccatacattcaagttgatattggaggtgggcaaacaaagacatttgctcctgaagaaatttctgccatggttctcactaaaatgaaagaaaccgctgaggcttatttgggaaagaaggttacccatgcagttgttactgtaccagcctattttaatgatgcccaacgccaagcaaccaaagacgctggaactattgctggcctaaatgttatgaggatcatcaacgagcctacggcagctgctattgcttatggcctggataagagggagggggagaagaacatcctggtgtttgacctgggtggcggaaccttcgatgtgtctcttctcaccattgacaatggtgtcttcgaagttgtggccactaatggagatactcatctgggtggagaagactttgaccagcgtgtcatggaacacttcatcaaactgtacaaaaagaagacgggcaaagatgtcaggaaagacaatagagctgtgcagaaactccggcgcgaggtagaaaaggccaaacgggccctgtcttctcagcatcaagcaagaattgaaattgagtccttctatgaaggagaagacttttctgagaccctgactcgggccaaatttgaagagctcaacatggatctgttccggtctactatgaagcccgtccagaaagtgttggaagattctgatttgaagaagtctgatattgatgaaattgttcttgttggtggctcgactcgaattccaaagattcagcaactggttaaagagttcttcaatggcaaggaaccatcccgtggcataaacccagatgaagctgtagcgtatggtgctgctgtccaggctggtgtgctctctggtgatcaagatacaggtgacctggtactgcttgatgtatgtccccttacacttggtattgaaactgtgggaggtgtcatgaccaaactgattccaaggaacacagtggtgcctaccaagaagtctcagatcttttctacagcttctgataatcaaccaactgttacaatcaaggtctatgaaggtgaaagacccctgacaaaagacaatcatcttctgggtacatttgatctgactggaattcctcctgctcctcgtggggtcccacagattgaagtcacctttgagatagatgtgaatggtattcttcgagtgacagctgaagacaagggtacagggaacaaaaataagatcacaatcaccaatgaccagaatcgcctgacacctgaagaaatcgaaaggatggttaatgatgctgagaagtttgctgaggaagacaaaaagctcaaggagcgcattgatactagaaatgagttggaaagctatgcctattctctaaagaatcagattggagataaagaaaagctgggaggtaaactttcctctgaagataaggagaccatggaaaaagctgtagaagaaaagattgaatggctggaaagccaccaagatgctgacattgaagacttcaaagctaagaagaaggaactggaagaaattgttcaaccaattatcagcaaactctatggaagtgcaggccctcccccaactggtgaagaggatacagcagaaaaagatgagttgtagacactgatctgctagtgctgtaatattgtaaatactggactcaggaacttttgttaggaaaaaattgaaagaacttaagtctcgaatgtaattggaatcttcacctcagagtggagttgaaactgctatagcctaagcggctgtttactgcttttcattagcagttgctcacatgtctttgggtgggggggagaagaagaattggccatcttaaaaagcgggtaaaaaacctgggttagggtgtgtgttcaccttcaaaatgttctatttaacaactgggtcatgtgcatctggtgtaggaagttttttctaccataagtgacaccaataaatgtttgttatttacactgaaaaaaaaaaaaaaaaaaaaaaaaaaaaaaaaaaaaaaaaaaaaaaaaaagaaaataaaaaaagaaaaaaactgacaagaaagagaacaaaaagtagaaaagaaaacgagaagggacggggggacgcggcatactacctgccggtggagtagataactaaagattatgaatgacacgagaatccataggtatctttatagaaatcaagaagatgagtagaagagaagccgtatatgtgtggatatactaatataataaacatgaggcgatagtgtagcactttaaataaaaaaacaacagatacagacggaacgaaacaatacagcggtgtcgtaagaatgatctacagaaaaaaaactaaagttatggagagaaaagacagaaaaggcggaaacaacagagaa

SEQ ID NO: 454565 - DNA, 2673 bp, Homo sapiens
taagccgagtaggcggactggtgaggtcgacgccggccaagacagcacagacagattgacctattggggtgtttcgcgagtgtgagagggaagcgccgcggcctgtatttctagacctgcccttcgcctggttcgtggcgccttgtgaccccgggcccctgccgcctgcaagtcggaaattgcgctgtgctcctgtgctacggcctgtggctggactgcctgctgctgcccaactggctggcaagatgaagctctccctggtggccgcgatgctgctgctgctcagcgcggcgcgggccgaggaggaggacaagaaggaggacgtgggcacggtggtcggcatcgacctggggaccacctactcctgcgtcggcgtgttcaagaacggccgcgtggagatcatcgccaacgatcagggcaaccgcatcacgccgtcctatgtcgccttcactcctgaaggggaacgtctgattggcgatgccgccaagaaccagctcacctccaaccccgagaacacggtctttgacgccaagcggctcatcggccgcacgtggaatgacccgtctgtgcagcaggacatcaagttcttgccgttcaaggtggttgaaaagaaaactaaaccatacattcaagttgatattggaggtgggcaaacaaagacatttgctcctgaagaaatttctgccatggttctcactaaaatgaaagaaaccgctgaggcttatttgggaaagaaggttacccatgcagttgttactgtaccagcctattttaatgatgcccaacgccaagcaaccaaagacgctggaactattgctggcctaaatgttatgaggatcatcaacgagcctacggcagctgctattgcttatggcctggataagagggagggggagaagaacatcctggtgtttgacctgggtggcggaaccttcgatgtgtctcttctcaccattgacaatggtgtcttcgaagttgtggccactaatggagatactcatctgggtggagaagactttgaccagcgtgtcatggaacacttcatcaaactgtacaaaaagaagacgggcaaagatgtcaggaaagacaatagagctgtgcagaaactccggcgcgaggtagaaaaggccaaacgggccctgtcttctcagcatcaagcaagaattgaaattgagtccttctatgaaggagaagacttttctgagaccctgactcgggccaaatttgaagagctcaacatggtatgttccttgttttctgctttgctaatgagatctccttagactctgaattcaggacattgcatctagatacttagataacagacatcacagtaaccatgtcttttttctaggatctgttccggtctactatgaagcccgtccagaaagtgttggaagattctgatttgaagaagtctgatattgatgaaattgttcttgttggtggctcgactcgaattccaaagattcagcaactggttaaagagttcttcaatggcaaggaaccatcccgtggcataaacccagatgaagctgtagcgtatggtgctgctgtccaggctggtgtgctctctggtgatcaagatacaggtgacctggtactgcttgatgtatgtccccttacacttggtattgaaactgtgggaggtgtcatgaccaaactgattccaaggaacacagtggtgcctaccaagaagtctcagatcttttctacagcttctgataatcaaccaactgttacaatcaaggtctatgaaggtgaaagacccctgacaaaagacaatcatcttctgggtacatttgatctgactggaattcctcctgctcctcgtggggtcccacagattgaagtcacctttgagatagatgtgaatggtattcttcgagtgacagctgaagacaagggtacagggaacaaaaataagatcacaatcaccaatgaccagaatcgcctgacacctgaagaaatcgaaaggatggttaatgatgctgagaagtttgctgaggaagacaaaaagctcaaggagcgcattgatactagaaatgagttggaaagctatgcctattctctaaagaatcagattggagataaagaaaagctgggaggtaaactttcctctgaagataaggagaccatggaaaaagctgtagaagaaaagattgaatggctggaaagccaccaagatgctgacattgaagacttcaaagctaagaagaaggaactggaagaaattgttcaaccaattatcagcaaactctatggaagtgcaggccctcccccaactggtgaagaggatacagcagaaaaagatgagttgtagacactgatctgctagtgctgtaatattgtaaatactggactcaggaacttttgttaggaaaaaattgaaagaacttaagtctcgaatgtaattggaatcttcacctcagagtggagttgaaactgctatagcctaagcggctgtttactgcttttcattagcagttgctcacatgtctttgggtgggggggagaagaagaattggccatcttaaaaagcgggtaaaaaacctgggttagggtgtgtgttcaccttcaaaatgttctatttaacaactgggtcatgtgcatctggtgtaggaagttttttctaccataagtgacaccaataaatgtttgttatttacactg

SEQ ID NO: 454566 - DNA, 2016 bp, Homo sapiens
tttaattttcagtagagacagggtttctccacattgcccaggctggtcttgaaatcctgccctcaggtgatcctcctgcctcagcctcccaaagtgctgggattataggcagaagccaccgcctggccagactgtaatttaaataagggttaaactatgtgacaatacacttaattatcttttatccttttaggttacccatgcagttgttactgtaccagcctattttaatgatgcccaacgccaagcaaccaaagacgctggaactattgctggcctaaatgttatgaggatcatcaacgagcctacggcagctgctattgcttatggcctggataagagggagggggagaagaacatcctggtgtttgacctgggtggcggaaccttcgatgtgtctcttctcaccattgacaatggtgtcttcgaagttgtggccactaatggagatactcatctgggtggagaagactttgaccagcgtgtcatggaacacttcatcaaactgtacaaaaagaagacgggcaaagatgtcaggaaagacaatagagctgtgcagaaactccggcgcgaggtagaaaaggccaaacgggccctgtcttctcagcatcaagcaagaattgaaattgagtccttctatgaaggagaagacttttctgagaccctgactcgggccaaatttgaagagctcaacatggatctgttccggtctactatgaagcccgtccagaaagtgttggaagattctgatttgaagaagtctgatattgatgaaattgttcttgttggtggctcgactcgaattccaaagattcagcaactggttaaagagttcttcaatggcaaggaaccatcccgtggcataaacccagatgaagctgtagcgtatggtgctgctgtccaggctggtgtgctctctggtgatcaagatacaggtgacctggtactgcttgatgtatgtccccttacacttggtattgaaactgtgggaggtgtcatgaccaaactgattccaaggaacacagtggtgcctaccaagaagtctcagatcttttctacagcttctgataatcaaccaactgttacaatcaaggtctatgaaggtgaaagacccctgacaaaagacaatcatcttctgggtacatttgatctgactggaattcctcctgctcctcgtggggtcccacagattgaagtcacctttgagatagatgtgaatggtattcttcgagtgacagctgaagacaagggtacagggaacaaaaataagatcacaatcaccaatgaccagaatcgcctgacacctgaagaaatcgaaaggatggttaatgatgctgagaagtttgctgaggaagacaaaaagctcaaggagcgcattgatactagaaatgagttggaaagctatgcctattctctaaagaatcagattggagataaagaaaagctgggaggtaaactttcctctgaagataaggagaccatggaaaaagctgtagaagaaaagattgaatggctggaaagccaccaagatgctgacattgaagacttcaaagctaagaagaaggaactggaagaaattgttcaaccaattatcagcaaactctatggaagtgcaggccctcccccaactggtgaagaggatacagcagaaaaagatgagttgtagacactgatctgctagtgctgtaatattgtaaatactggactcaggaacttttgttaggaaaaaattgaaagaacttaagtctcgaatgtaattggaatcttcacctcagagtggagttgaaactgctatagcctaagcggctgtttactgcttttcattagcagttgctcacatgtctttgggtgggggggagaagaagaattggccatcttaaaaagcgggtaaaaaacctgggttagggtgtgtgttcaccttcaaaatgttctatttaacaactgggtcatgtgcatctggtgtaggaagttttttctaccataagtgacaccaataaatgtttgttatttacactg

SEQ ID NO: 454567 - DNA, 1798 bp, Homo sapiens
taagccgagtaggcggactggtgaggtcgacgccggccaagacagcacagacagattgacctattggggtgtttcgcgagtgtgagagggaagcgccgcggcctgtatttctagacctgcccttcgcctggttcgtggcgccttgtgaccccgggcccctgccgcctgcaagtcggaaattgcgctgtgctcctgtgctacggcctgtggctggactgcctgctgctgcccaactggctggcaagatgaagctctccctggtggccgcgatgctgctgctgctcagcgcggcgcgggccgaggaggaggacaagaaggaggacgtgggcacggtggtcggcatcgacctggggaccacctactcctgcgtcggcgtgttcaagaacggccgcgtggagatcatcgccaacgatcagggcaaccgcatcacgccgtcctatgtcgccttcactcctgaaggggaacgtctgattggcgatgccgccaagaaccagctcacctccaaccccgagaacacggtctttgacgccaagcggctcatcggccgcacgtggaatgacccgtctgtgcagcaggacatcaagttcttgccgttcaaggtggttgaaaagaaaactaaaccatacattcaagttgatattggaggtgggcaaacaaagacatttgctcctgaagaaatttctgccatggttctcactaaaatgaaagaaaccgctgaggcttatttgggaaagaaggttacccatgcagttgttactgtaccagcctattttaatgatgcccaacgccaagcaaccaaagacgctggaactattgctggcctaaatgttatgaggatcatcaacgagcctaatcaaccaactgttacaatcaaggtctatgaaggtgaaagacccctgacaaaagacaatcatcttctgggtacatttgatctgactggaattcctcctgctcctcgtggggtcccacagattgaagtcacctttgagatagatgtgaatggtattcttcgagtgacagctgaagacaagggtacagggaacaaaaataagatcacaatcaccaatgaccagaatcgcctgacacctgaagaaatcgaaaggatggttaatgatgctgagaagtttgctgaggaagacaaaaagctcaaggagcgcattgatactagaaatgagttggaaagctatgcctattctctaaagaatcagattggagataaagaaaagctgggaggtaaactttcctctgaagataaggagaccatggaaaaagctgtagaagaaaagattgaatggctggaaagccaccaagatgctgacattgaagacttcaaagctaagaagaaggaactggaagaaattgttcaaccaattatcagcaaactctatggaagtgcaggccctcccccaactggtgaagaggatacagcagaaaaagatgagttgtagacactgatctgctagtgctgtaatattgtaaatactggactcaggaacttttgttaggaaaaaattgaaagaacttaagtctcgaatgtaattggaatcttcacctcagagtggagttgaaactgctatagcctaagcggctgtttactgcttttcattagcagttgctcacatgtctttgggtgggggggagaagaagaattggccatcttaaaaagcgggtaaaaaacctgggttagggtgtgtgttcaccttcaaaatgttctatttaacaactgggtcatgtgcatctggtgtaggaagttttttctaccataagtgacaccaataaatgtttgttatttacactg

SEQ ID NO: 454568 - DNA, 2261 bp, Homo sapiens
taagccgagtaggcggactggtgaggtcgacgccggccaagacagcacagacagattgacctattggggtgtttcgcgagtgtgagagggaagcgccgcggcctgtatttctagacctgcccttcgcctggttcgtggcgccttgtgaccccgggcccctgccgcctgcaagtcggaaattgcgctgtgctcctgtgctacggcctgtggctggactgcctgctgctgcccaactggctggcaagatgaagctctccctggtggccgcgatgctgctgctgctcagcgcggcgcgggccgaggaggaggacaagaaggaggacgtgggcacggtggtcggcatcgacctggggaccacctactcctgcgtcggcgtgttcaagaacggccgcgtggagatcatcgccaacgatcagggcaaccgcatcacgccgtcctatgtcgccttcactcctgaaggggaacgtctgattggcgatgccgccaagaaccagctcacctccaaccccgagaacacggtctttgacgccaagcggctcatcggccgcacgtggaatgacccgtctgtgcagcaggacatcaagttcttgccgttcaaggtggttgaaaagaaaactaaaccatacattcaagttgatattggaggtgggcaaacaaagacatttgctcctgaagaaatttctgccatggttctcactaaaatgaaagaaaccgctgaggcttatttgggaaagaaggttacccatgcagttgttactgtaccagcctattttaatgatgcccaacgccaagcaaccaaagacgctggaactattgctggcctaaatgttatgaggatcatcaacgagcctacggcagctgctattgcttatggcctggataagagggagggggagaagaacatcctggtgtttgacctgggtggcggaaccttcgatgtgtctcttctcaccattgacaatggtgtcttcgaagttgtggccactaatggagatactcatctgggtggagaagactttgaccagcgtgtcatggaacacttcatcaaactgtacaaaaagaagacgggcaaagatgtcaggaaagacaatagagctgtgcagaaactccggcgcgaggtagaaaaggccaaacgggccctgtcttctcagcatcaagcaagaattgaaattgagtccttctatgaaggagaagacttttctgagaccctgactcgggccaaatttgaagagctcaacatggatctgttccggtctactatgaagcccgtccagaaagtgttggaagattctgatttgaagaagtctgatattgatgaaattgttcttgttggtggctcgactcgaattccaaagattcagcaactggttaaagagttcttcaatggcaaggaaccatcccgtggcataaacccagatgaagctgtagcgtatggtgctgctgtccaggctggtgtgctctctggtgatcaagatacaggtgacctggtactgcttgatgtatgtccccttacacttggtattgaaactgtgggaggtgtcatgaccaaactgattccaaggaacacagtggtgcctaccaagaagttttgctgaggaagacaaaaagctcaaggagcgcattgatactagaaatgagttggaaagctatgcctattctctaaagaatcagattggagataaagaaaagctgggaggtaaactttcctctgaagataaggagaccatggaaaaagctgtagaagaaaagattgaatggctggaaagccaccaagatgctgacattgaagacttcaaagctaagaagaaggaactggaagaaattgttcaaccaattatcagcaaactctatggaagtgcaggccctcccccaactggtgaagaggatacagcagaaaaagatgagttgtagacactgatctgctagtgctgtaatattgtaaatactggactcaggaacttttgttaggaaaaaattgaaagaacttaagtctcgaatgtaattggaatcttcacctcagagtggagttgaaactgctatagcctaagcggctgtttactgcttttcattagcagttgctcacatgtctttgggtgggggggagaagaagaattggccatcttaaaaagcgggtaaaaaacctgggttagggtgtgtgttcaccttcaaaatgttctatttaacaactgggtcatgtgcatctggtgtaggaagttttttctaccataagtgacaccaataaatgtttgttatttacactg

SEQ ID NO: 454569 - DNA, 1458 bp, Homo sapiens
gccccccccttttggtggtgggcccccccttcgatcggctcgtacctcgtccgcatcagcaagaatgaaatgagtccttctatgaaggagagacttgtctgagagcctgactcgggccaaatttgaagagctcaacatggatctgttccggtctactatgaagcccgtccagaaagtgttggaagattctgatttgaagaagtctgatattgatgaaattgttcttgttggtggctcgactcgaattccaaagattcagcaactggttaaagagttcttcaatggcaaggaaccatcccgtggcataaacccagatgaagctgtagcgtatggtgctgctgtccaggctggtgtgctctctggtgatcaagatacaggtgacctggtactgcttgatgtatgtccccttacacttggtattgaaactgtgggaggtgtcatgaccaaactgattccaaggaacacagtggtgcctaccaagaagtctcagatcttttctacagcttctgataatcaaccaactgttacaatcaaggtctatgaaggtgaaagacccctgacaaaagacaatcatcttctgggtacatttgatctgactggaattcctcctgctcctcgtggggtcccacagattgaagtcacctttgagatagatgtgaatggtattcttcgagtgacagctgaagacaagggtacagggaacaaaaataagatcacaatcaccaatgaccagaatcgcctgacacctgaagaaatcgaaaggatggttaatgatgctgagaagtttgctgaggaagacaaaaagctcaaggagcgcattgatactagaaatgagttggaaagctatgcctattctctaaagaatcagattggagataaagaaaagctgggaggtaaactttcctctgaagataaggagaccatggaaaaagctgtagaagaaaagattgaatggctggaaagccaccaagatgctgacattgaagacttcaaagctaagaagaaggaactggaagaaattgttcaaccaattatcagcaaactctatggaagtgcaggccctcccccaactggtgaagaggatacagcagaaaaagatgagttgtagacactgatctgctagtgctgtaatattgtaaatactggactcaggaacttttgttaggaaaaaattgaaagaacttaagtctcgaatgtaattggaatcttcacctcagagtggagttgaaactgctatagcctaagcggctgtttactgcttttcattagcagttgctcacatgtctttgggtgggggggagaagaagaattggccatcttaaaaagcgggtaaaaaacctgggttagggtgtgtgttcaccttcaaaatgttctatttaacaactgggtcatgtgcatctggtgtaggaagttttttctaccataagtgacaccaataaatgtttgttatttacactg

SEQ ID NO: 454570 - DNA, 2216 bp, Homo sapiens
taagccgagtaggcggactggtgaggtcgacgccggccaagacagcacagacagattgacctattggggtgtttcgcgagtgtgagagggaagcgccgcggcctgtatttctagacctgcccttcgcctggttcgtggcgccttgtgaccccgggcccctgccgcctgcaagtcggaaattgcgctgtgctcctgtgctacggcctgtggctggactgcctgctgctgcccaactggctggcaagatgaagctctccctggtggccgcgatgctgctgctgctcagcgcggcgcgggccgaggaggaggacaagaaggaggacgtgggcacggtggtcggcatcgacctggggaccacctactcctgcgtcggcgtgttcaagaacggccgcgtggagatcatcgccaacgatcagggcaaccgcatcacgccgtcctatgtcgccttcactcctgaaggggaacgtctgattggcgatgccgccaagaaccagctcacctccaaccccgagaacacggtctttgacgccaagcggctcatcggccgcacgtggaatgacccgtctgtgcagcaggacatcaagttcttgccgttcaaggtggttgaaaagaaaactaaaccatacattcaagttgatattggaggtgggcaaacaaagacatttgctcctgaagaaatttctgccatggttctcactaaaatgaaagaaaccgctgaggcttatttgggaaagaaggttacccatgcagttgttactgtaccagcctattttaatgatgcccaacgccaagcaaccaaagacgctggaactattgctggcctaaatgttatgaggatcatcaacgagcctacggcagctgctattgcttatggcctggataagagggagggggagaagaacatcctggtgtttgacctgggtggcggaaccttcgatgtgtctcttctcaccattgacaatggtgtcttcgaagttgtggccactaatggagatactcatctgggtggagaagactttgaccagcgtgtcatggaacacttcatcaaactgtacaaaaagaagacgggcaaagatgtcaggaaagacaatagagctgtgcagaaactccggcgcgaggtagaaaaggccaaacgggccctgtcttctcagcatcaagcaagaattgaaattgagtccttctatgaaggagaagacttttctgagaccctgactcgggccaaatttgaagagctcaacatggatctgttccggtctactatgaagcccgtccagaaagtgttggaagattctgatttgaagaagtctgatattgatgaaattgttcttgttggtggctcgactcgaattccaaagattcagcaactggttaaagagttcttcaatggcaaggaaccatcccgtggcataaacccagatgaagctgtagcgtatggtgctgctgtccaggctggtgtgctctctggtgatcaagatacaggtgacctggtactgcttgatgtatgtccccttacacttggtattgaaactgtgggaggtgtcatgaccaaactgattccaaggaacacagtggtgcctaccaagaagtctcagatcttttctacagcttctgataatcaaccaactgttacaatcaaggtctatgaaggtgaaagacccctgacaaaagacaatcatcttctgggtacatttgatctgactggaattcctcctgctcctcgtggggtcccacagattgaagtcacctttgagatagatgtgaatggtattcttcgagtgacagctgaagacaagggtacagggaacaaaaataagatcacaatcaccaatgaccagaatcgcctgacacctgaagaaatcgaaaggatggttaatgatgctgagaagtttgctgaggaagacaaaaagctcaaggagcgcattgatactagaaatgagttggaaagctatgcctattctctaaagaatcagattggagataaagaaaagctgggaggtaaactttcctctgaagataaggagaccatggaaaaagctgtagaagaaaagattgaatggctggaaagccaccaagatgctgacattgaagacttcaaagctaagaagaaggaactggaagaaattgttcaaccaattatcagcaaactctatggaagtgcaggccctcccccaactggtgaagaggatacagcagaactccaccaccaccaccaccac

SEQ ID NO: 454571 - DNA, 784 bp, Homo sapiens
ttaaataacaaacatttattggtgtcacttatggtagaaaaaacttcctacacgaccagaatcgcctgacacctgaagaaatcgaaaggatggttaatgatgctgagaagtttgctgaggaagacaaaaagctcaaggagcgcattgatactagaaatgagttggaaagctatgcctattctctaaagaatcagattggagataaagaaaagctgggaggtaaactttcctctgaagataaggagaccatggaaaaagctgtagaagaaaagattgaatggctggaaagccaccaagatgctgacattgaagacttcaaagctaagaagaaggaactggaagaaattgttcaaccaattatcagcaaactctatggaagtgcaggccctcccccaactggtgaagaggatacagcagaaaaagatgagttgtagacactgatctgctagtgctgtaatattgtaaatactggactcaggaacttttgttaggaaaaaattgaaagaacttaagtctcgaatgtaattggaatcttcacctcagagtggagttgaaactgctatagcctaagcggctgtttactgcttttcattagcagttgctcacatgtctttgggtgggggggagaagaagaattggccatcttaaaaagcgggtaaaaaacctgggttagggtgtgtgttcaccttcaaaatgttctatttaacaactgggtcatgtgcatctggtgtaggaagttttttctaccataagtgacaccaataaatgtttgttatttacactg

SEQ ID NO: 454572 - DNA, 1696 bp, Homo sapiens
taagccgagtaggcggactggtgaggtcgacgccggccaagacagcacagacagattgacctattggggtgtttcgcgagtgtgagagggaagcgccgcggcctgtatttctagacctgcccttcgcctggttcgtggcgccttgtgaccccgggcccctgccgcctgcaagtcggaaattgcgctgtgctcctgtgctacggcctgtggctggactgcctgctgctgcccaactggctggcaagatgaagctctccctggtggccgcgatgctgctgctgctcagcgcggcgcgggccgaggaggaggacaagaaggaggacgtgggcacggtggtcggcatcgacctggggaccacctactcctgcgtcggcgtgttcaagaacggccgcgtggagatcatcgccaacgatcagggcaaccgcatcacgccgtcctatgtcgccttcactcctgaaggggaacgtctgattggcgatgccgccaagaaccagctcacctccaaccccgagaacacggtctttgacgccaagcggctcatcggccgcacgtggaatgacccgtctgtgcagcaggacatcaagttcttgccgttcaaggtggttgaaaagaaaactaaaccatacattcaagttgatattggaggtgggcaaacaaagacatttgctcctgaagaaatttctgccatggttctcactaaaatgaaagaaaccgctgaggcttatttgggaaagaaggttacccatgcagttgttactgtaccagcctattttaatgatgcccaacgccaagcaaccaaagacgctggaactattgctggcctaaatgttatgaggatcatcaacgagcctacggcagctgctattgcttatggcctggataagagggagggggagaagaacatcctggtgtttgacctgggtggcggaaccttcgatgtgtctcttctcaccattgacaatggtgtcttcgaagttgtggccactaatggagatactcatctgggtggagaagactttgaccagcgtgtcatggaacacttcatcaaactgtacaaaaagaagacgggcaaagatgtcaggaaagacaatagagctgtgcagaaactccggcgcgaggtagaaaaggccaaacgggccctgtcttctcagcatcaagcaagaattgaaattgagtccttctatgaaggagaagacttttctgagaccctgactcgggccaaatttgaagagctcaacatggatctgttccggtctactatgaagcccgtccagaaagtgttggaagattctgatttgaagaagtctgatattgatgaaattgttcttgttggtggctcgactcgaattccaaagattcagcaactggttaaagagttcttcaatggcaaggaaccatcccgtggcataaacccagatgaagctgtagcgtatggtgctgctgtccaggctggtgtgctctctggtgatcaagatacaggtgacctggtactgcttgatgtatgtccccttacacttggtattgaaactgtgggaggtgtcatgaccaaactgattccaaggaacacagtggtgcctaccaagaagtctcagatcttttctacagcttctgataatcaaccaactgttacaatcaaggtctatgaaggtgaaagacccctgacaaaagaccttgattgtaacagttggcggccgca

SEQ ID NO: 454573 - DNA, 559 bp, Homo sapiens
  misc_feature (24)..(24): n is a, c, g, or t
aagctgattctggcggatcccttnacgacgaagctgtagaagaaaagattgaatggctggaaagccaccaagatgctgacattgaagacttcaaagctaagaagaaggaactggaagaaattgttcaaccaattatcagcaaactctatggaagtgcaggccctcccccaactggtgaagaggatacagcagaaaaagatgagttgtagacactgatctgctagtgctgtaatattgtaaatactggactcaggaacttttgttaggaaaaaattgaaagaacttaagtctcgaatgtaattggaatcttcacctcagagtggagttgaaactgctatagcctaagcggctgtttactgcttttcattagcagttgctcacatgtctttgggtgggggggagaagaagaattggccatcttaaaaagcgggtaaaaaacctgggttagggtgtgtgttcaccttcaaaatgttctatttaacaactgggtcatgtgcatctggtgtaggaagttttttctaccataagtgacaccaataaatgtttgttatttacactg

SEQ ID NO: 454574 - DNA, 963 bp, Homo sapiens
gcaatggcatgatctgggctcactgcaacctccgcctcccgggttcaagcgattctcctgcctcagcctcctgagtagctgggatgcatgtgccaccatttctccatgttggtcaggctggtcttgaactcccgacctcaggtgatctgcctgccttggcctcccaaagcactggcattacaggtgtgagccaccgcgcccagccctgttactcttgagtttttatctccacatacttgaattaaactgtgtagttctttttcccatctgatatttacaatctcttcactgggtcatactccacagctattttaccactttctgaaataaagttagcaaggatcaattcagaatctttttcattctaaaacttcctgcatatactggtcgcaccccacaatgagacattcttttggtttctaaaagcagaaaataagatgtgatgattaaatgaaataatggccagatcttggttcacattccacacaacagggaaccacgactctagggaatgtggctgattcccaggctgtagcaggaaagggttatgagatcagtctggattcttgttgtaccagaaattttaaaaatgctcaaagtatggattggggcatgtcaaatggacacaagagctagctcaaagaggcactgactggccagatcttggacaatattttttggtaacagctttattgagatataattcatgtatcatagaattaattccattaacgtgtacaattcaatggtttttagtatatttgcagagttatgcaactaccacctcactcagttttagaatattttcaccaatctaaaacaaaaccccatttagcagttactgcccaccccgctcctcccaatgcctggcaaccactagtctactttctgtctctatggatttgcctactctggacatttcatatacatggagttacataaaacatggcattttgtatctgg

SEQ ID NO: 454575 - DNA, 2473 bp, Homo sapiens
  misc_feature (2201)..(2201): n is a, c, g, or t
  misc_feature (2208)..(2208): n is a, c, g, or t
  misc_feature (2240)..(2240): n is a, c, g, or t
  misc_feature (2257)..(2257): n is a, c, g, or t
  misc_feature (2268)..(2268): n is a, c, g, or t
  misc_feature (2270)..(2270): n is a, c, g, or t
  misc_feature (2274)..(2274): n is a, c, g, or t
  misc_feature (2301)..(2301): n is a, c, g, or t
  misc_feature (2328)..(2328): n is a, c, g, or t
  misc_feature (2334)..(2334): n is a, c, g, or t
  misc_feature (2342)..(2343): n is a, c, g, or t
  misc_feature (2358)..(2358): n is a, c, g, or t
  misc_feature (2364)..(2364): n is a, c, g, or t
  misc_feature (2366)..(2366): n is a, c, g, or t
  misc_feature (2373)..(2373): n is a, c, g, or t
  misc_feature (2380)..(2380): n is a, c, g, or t
  misc_feature (2390)..(2390): n is a, c, g, or t
  misc_feature (2399)..(2399): n is a, c, g, or t
  misc_feature (2410)..(2410): n is a, c, g, or t
  misc_feature (2423)..(2423): n is a, c, g, or t
  misc_feature (2429)..(2429): n is a, c, g, or t
  misc_feature (2452)..(2452): n is a, c, g, or t
  misc_feature (2456)..(2456): n is a, c, g, or t
  misc_feature (2460)..(2460): n is a, c, g, or t
  misc_feature (2470)..(2470): n is a, c, g, or t
gacgtgggccccgagtgcaatcgcgggaagccagggtttccagctaggacacagcaggtcgtgatccgggtcgggacactgcctggcagaggctgcgagcatggggccctggggctggaaattgcgctggaccgtcgccttgctcctcgccgcggcggggactgcagtgggcgacagatgcgaaagaaacgagttccagtgccaagacgggaaatgcatctcctacaagtgggtctgcgatggcagcgctgagtgccaggatggctctgatgagtcccaggagacgtgcttgtctgtcacctgcaaatccggggacttcagctgtgggggccgtgtcaaccgctgcattcctcagttctggaggtgcgatggccaagtggactgcgacaacggctcagacgagcaaggctgtccccccaagacgtgctcccaggacgagtttcgctgccacgatgggaagtgcatctctcggcagttcgtctgtgactcagaccgggactgcttggacggctcagacgaggcctcctgcccggtgctcacctgtggtcccgccagcttccagtgcaacagctccacctgcatcccccagctgtgggcctgcgacaacgaccccgactgcgaagatggctcggatgagtggccgcagcgctgtaggggtctttacgtgttccaaggggacagtagcccctgctcggccttcgagttccactgcctaagtggcgagtgcatccactccagctggcgctgtgatggtggccccgactgcaaggacaaatctgacgaggaaaactgcgggcagatccacagtccgcttttcgtggccggagcgcaccctccgcaaaggcaggccacatccggccgcccctggaacgccaggcgtccggctatccggcccggcagccctcccctccgcgcagcctgtccggactggcagcgagggcttggggaggagaggaaggagagggcgcggccgggagtctcgcagcgtccgccctcccgggccgggcggatggctggaaggtggagccccgcccgtcacttggcgccgagccccagcgccaggggctaaggcgatggcccctgggcccaccgctccccagatcggggatgcaggggaccgcgccctgcccctccgccccgtcattgacctgcgcgaaggcttcacccagggcaggctacctggcttctgagcagccgcagcatcattgcgtggaccaggagacggagcgcccagttgcaatgctggagccgggaggtccaatccgccgccctctctcttccggtgccagggcttagagtcggcccccgacacctgggtgcttcgagcctggccacgccccagcggctgggcagggcccccgcacctggtcccggcgagtggagcgatcgtccgccctctgccgcgtcctcctgggggacggagaacctgtttgccaggctgccgccggagcgcgcgagggcctccagcctgcaggtgctcccgcgcccaccagggtctccgatctcccacaccccccgcctcaccgtccacactcaaattccagaatcccagcccctagtcactccttttggggaattctagggtcccgtgccaaactgctactttcagacctgcactgcacgaaggcaaccattccaaggctggagaccggagtggaacagggtctgtttcccacgccgtcagcgggggccgtggctgccggctccagagacaaaggcctctgcccgcttgtcacctaattaaagcattttctctggtccaaggcccacctccagcatcgccaaccccgagcagggcaggctaacgtagggtccagctacggggctttgcgggtgggtgttcttccccctgtgaggagaggaaggagagattgtaagaaataaagacacaagacaaagagataaagagaaaacagctgggcccgggggaccactaccatcaagacgcagagaccggtagtggccccgaatggctgggcgcgctgatatttattgtatacaagacaagggggggcaggataaggagggtgagtcgtccaaatgactgataaggtcaagcaagtcacgtgatcatgggacagggggcccttcccttttaggcagccgaagcagaaagagaaggcagcatatgtcagcgttttcttctctgcacttataagaaagatcaaagactttaagactttcactatttcgggcgggcncggtggntcacgcctgtaatcccagcactttgggaggcngaggcgggcggatcacnaggtcaggagntngagnccatcctggctaacacggtgaaacccngtctctactaaaaatacaaaaaattanccgggngtggtggnnggcgcctgtagtccnagctantngggaggntgaggcnggagaatggngtgaacccnggaggcggagnttgcagtgagccnagatcncgccactgcactccagcctgggngacngagngagactccgnctc

SEQ ID NO: 454576 - DNA, 586 bp, Homo sapiens
cacgtgccaccacggcagactaattttattttatttttgggaagagacaaagtcttgttatgttggcctggctggtctcaaactcagggtgcaagcgatcctcccgcctcagccttccaaactgctgggattacaggcgtgggccaccgtacccagcctccttgaagtttttctgacctgcaactcccctacctgcccattggagagggcgtcacaggggaggggttcaggctcacatgtggttggagctgcctctccaggtgcttttctgctaggtccctggcagggggtcttcctgcccggagcagcgtggccaggccctcaggaccctctgggactggcatcagcacgtgacctctccttatccacttgtgtgtctagatctcctcagtggccgcctctactgggttgactccaaacttcactccatctcaagcatcgatgtcaatgggggcaaccggaagaccatcttggaggatgaaaagaggctggcccaccccttctccttggccgtctttgaggtgtggcttacgtacgagatgcaagcacttaggtggcggatagacacagactatagatcactcaa

SEQ ID NO: 454577 - DNA, 351 bp, Homo sapiens
gctcagacacacctgaccttcctccttcctctctctggctctcacagtgacactctgcgagggacccaacaagttcaagtgtcacagcggcgaatgcatcaccctggacaaagtctgcaacatggctagagactgccgggactggtcagatgaacccatcaaagagtgcggtgagtctcggtgcaggcggcttgcagagtttgtggggagccaggaaagggactgagacatgagtgctgtagggttttgggaactccactctgcccaccctgtgcaaagggctccttttttcattttgagacagtctgggcaacaagagtgaaactccatccaaaaaaaaaagaaaagaaa

SEQ ID NO: 454578 - DNA, 5261 bp, Homo sapiens
gacgtgggccccgagtgcaatcgcgggaagccagggtttccagctaggacacagcaggtcgtgatccgggtcgggacactgcctggcagaggctgcgagcatggggccctggggctggaaattgcgctggaccgtcgccttgctcctcgccgcggcggggactgcagtgggcgacagatgcgaaagaaacgagttccagtgccaagacgggaaatgcatctcctacaagtgggtctgcgatggcagcgctgagtgccaggatggctctgatgagtcccaggagacgtgcttgtctgtcacctgcaaatccggggacttcagctgtgggggccgtgtcaaccgctgcattcctcagttctggaggtgcgatggccaagtggactgcgacaacggctcagacgagcaaggctgtccccccaagacgtgctcccaggacgagtttcgctgccacgatgggaagtgcatctctcggcagttcgtctgtgactcagaccgggactgcttggacggctcagacgaggcctcctgcccggtgctcacctgtggtcccgccagcttccagtgcaacagctccacctgcatcccccagctgtgggcctgcgacaacgaccccgactgcgaagatggctcggatgagtggccgcagcgctgtaggggtctttacgtgttccaaggggacagtagcccctgctcggccttcgagttccactgcctaagtggcgagtgcatccactccagctggcgctgtgatggtggccccgactgcaaggacaaatctgacgaggaaaactgcgctgtggccacctgtcgccctgacgaattccagtgctctgatggaaactgcatccatggcagccggcagtgtgaccgggaatatgactgcaaggacatgagcgatgaagttggctgcgttaatgtgacactctgcgagggacccaacaagttcaagtgtcacagcggcgaatgcatcaccctggacaaagtctgcaacatggctagagactgccgggactggtcagatgaacccatcaaagagtgcgggaccaacgaatgcttggacaacaacggcggctgttcccacgtctgcaatgaccttaagatcggctacgagtgcctgtgccccgacggcttccagctggtggcccagcgaagatgcgaagatatcgatgagtgtcaggatcccgacacctgcagccagctctgcgtgaacctggagggtggctacaagtgccagtgtgaggaaggcttccagctggacccccacacgaaggcctgcaaggctgtgggctccatcgcctacctcttcttcaccaaccggcacgaggtcaggaagatgacgctggaccggagcgagtacaccagcctcatccccaacctgaggaacgtggtcgctctggacacggaggtggccagcaatagaatctactggtctgacctgtcccagagaatgatctgcagcacccagcttgacagagcccacggcgtctcttcctatgacaccgtcatcagcagggacatccaggcccccgacgggctggctgtggactggatccacagcaacatctactggaccgactctgtcctgggcactgtctctgttgcggataccaagggcgtgaagaggaaaacgttattcagggagaacggctccaagccaagggccatcgtggtggatcctgttcatggcttcatgtactggactgactggggaactcccgccaagatcaagaaagggggcctgaatggtgtggacatctactcgctggtgactgaaaacattcagtggcccaatggcatcaccctagatctcctcagtggccgcctctactgggttgactccaaacttcactccatctcaagcatcgatgtcaatgggggcaaccggaagaccatcttggaggatgaaaagaggctggcccaccccttctccttggccgtctttgaggacaaagtattttggacagatatcatcaacgaagccattttcagtgccaaccgcctcacaggttccgatgtcaacttgttggctgaaaacctactgtccccagaggatatggtcctcttccacaacctcacccagccaagaggagtgaactggtgtgagaggaccaccctgagcaatggcggctgccagtatctgtgcctccctgccccgcagatcaacccccactcgcccaagtttacctgcgcctgcccggacggcatgctgctggccagggacatgaggagctgcctcacagaggctgaggctgcagtggccacccaggagacatccaccgtcaggctaaaggtcagctccacagccgtaaggacacagcacacaaccacccggcctgttcccgacacctcccggctgcctggggccacccctgggctcaccacggtggagatagtgacaatgtctcaccaagctctgggcgacgttgctggcagaggaaatgagaagaagcccagtagcgtgagggctctgtccattgtcctccccatcgccacggagctgggtctctggtctcgggggcagctgtgtgacagagcgtgcctctccctacagtgctcctcgtcttcctttgcctgggggtcttccttctatggaagaactggcggcttaagaacatcaacagcatcaactttgacaaccccgtctatcagaagaccacagaggatgaggtccacatttgccacaaccaggacggctacagctacccctcgagacagatggtcagtctggaggatgacgtggcgtgaacatctgcctggagtcccgtccctgcccagaacccttcctgagacctcgccggccttgttttattcaaagacagagaagaccaaagcattgcctgccagagctttgttttatatatttattcatctgggaggcagaacaggcttcggacagtgcccatgcaatggcttgggttgggattttggtttcttcctttcctcgtgaaggataagagaaacaggcccggggggaccaggatgacacctccatttctctccaggaagttttgagtttctctccaccgtgacacaatcctcaaacatggaagatgaaagggcaggggatgtcaggcccagagaagcaagtggctttcaacacacaacagcagatggcaccaacgggaccccctggccctgcctcatccaccaatctctaagccaaacccctaaactcaggagtcaacgtgtttacctcttctatgcaagccttgctagacagccaggttagcctttgccctgtcacccccgaatcatgacccacccagtgtctttcgaggtgggtttgtaccttccttaagccaggaaagggattcatggcgtcggaaatgatctggctgaatccgtggtggcaccgagaccaaactcattcaccaaatgatgccacttcccagaggcagagcctgagtcaccggtcacccttaatatttattaagtgcctgagacacccggttaccttggccgtgaggacacgtggcctgcacccaggtgtggctgtcaggacaccagcctggtgcccatcctcccgacccctacccacttccattcccgtggtctccttgcactttctcagttcagagttgtacactgtgtacatttggcatttgtgttattattttgcactgttttctgtcgtgtgtgttgggatgggatcccaggccagggaaagcccgtgtcaatgaatgccggggacagagaggggcaggttgaccgggacttcaaagccgtgatcgtgaatatcgagaactgccattgtcgtctttatgtccgcccacctagtgcttccacttctatgcaaatgcctccaagccattcacttccccaatcttgtcgttgatgggtatgtgtttaaaacatgcacggtgaggccgggcgcagtggctcacgcctgtaatcccagcactttgggaggccgaggcgggtggatcatgaggtcaggagatcgagaccatcctggctaacaaggtgaaaccccgtctctactaaaaatacaaaaaattagccgggcgcggtggcgggcacctgtagtcccagctactcgggaggctgaggcaggagaatggtgtgaacccgggaagcggagcttgcagtgagccgagattgcgccactgcagtccgcagtctggcctgggcgacagagcgagactccgtctcaaaaaaaaaaaacaaaaaaaaaccatgcatggtgcatcagcagcccatggcctctggccaggcatggcgaggctgaggtgggaggatggtttgagctcaggcatttgaggctgtcgtgagctatgattatgccactgctttccagcctgggcaacatagtaagaccccatctcttaaaaaatgaatttggccagacacaggtgcctcacgcctgtaatcccagcactttgggaggctgagctggatcacttgagttcaggagttggagaccaggcctgagcaacaaagcgagatcccatctctacaaaaaccaaaaagttaaaaatcagctgggtacggtggcacgtgcctgtgatcccagctacttgggaggctgaggcaggaggatcgcctgagcccaggaggtggaggttgcagtgagccatgatcgagccactgcactccagcctgggcaacagatgaagaccctatttcagaaatacaactataaaaaaataaataaatcctccagtctggatcgtttgacgggacttcaggttctttctgaaatcgccgtgttactgttgcactgatgtccggagagacagtgacagcctccgtcagactcccgcgtgaagatgtcacaagggattggcaattgtccccagggacaaaacactgtgtcccccccagtgcagggaaccgtgataagcctttctggtttcggagcacgtaaatgcgtccctgtacagatagtggggattttttgttatgtttgcactttgtatattggttgaaactgttatcacttatatatatatatacacacatatatataaaatctatttatttttgcaaaccctggttgctgtatttgttcagtgactattctcggggccctgtgtagggggttattgcctctgaaatgcctcttctttatgtacaaagattatttgcacgaactggactgtgtgcaacgctttttgggagaatgatgtccccgttgtatgtatgagtggcttctgggagatgggtgtcactttttaaaccactgtatagaaggtttttgtagcctgaatgtcttactgtgatcaattaaatttcttaaatgaaccaaaaaaaaaaaactc

SEQ ID NO: 454579 - DNA, 4867 bp, Homo sapiens
aaatatccggcgcatcatctgtccgaccagacgtacggcccaagcaggactgcgacaacggctcagacgagcaaggctgtccccccaagacgtgctcccaggacgagtttcgctgccacgatgggaagtgcatctctcggcagttcgtctgtgactcagaccgggactgcttggacggctcagacgaggcctcctgcccggtgctcacctgtggtcccgccagcttccagtgcaacagctccacctgcatcccccagctgtgggcctgcgacaacgaccccgactgcgaagatggctcggatgagtggccgcagcgctgtaggggtctttacgtgttccaaggggacagtagcccctgctcggccttcgagttccactgcctaagtggcgagtgcatccactccagctggcgctgtgatggtggccccgactgcaaggacaaatctgacgaggaaaactgcgctgtggccacctgtcgccctgacgaattccagtgctctgatggaaactgcatccatggcagccggcagtgtgaccgggaatatgactgcaaggacatgagcgatgaagttggctgcgttaatgtgacactctgcgagggacccaacaagttcaagtgtcacagcggcgaatgcatcaccctggacaaagtctgcaacatggctagagactgccgggactggtcagatgaacccatcaaagagtgcgggaccaacgaatgcttggacaacaacggcggctgttcccacgtctgcaatgaccttaagatcggctacgagtgcctgtgccccgacggcttccagctggtggcccagcgaagatgcgaagatatcgatgagtgtcaggatcccgacacctgcagccagctctgcgtgaacctggagggtggctacaagtgccagtgtgaggaaggcttccagctggacccccacacgaaggcctgcaaggctgtgggctccatcgcctacctcttcttcaccaaccggcacgaggtcaggaagatgacgctggaccggagcgagtacaccagcctcatccccaacctgaggaacgtggtcgctctggacacggaggtggccagcaatagaatctactggtctgacctgtcccagagaatgatctgcagcacccagcttgacagagcccacggcgtctcttcctatgacaccgtcatcagcagggacatccaggcccccgacgggctggctgtggactggatccacagcaacatctactggaccgactctgtcctgggcactgtctctgttgcggataccaagggcgtgaagaggaaaacgttattcagggagaacggctccaagccaagggccatcgtggtggatcctgttcatggcttcatgtactggactgactggggaactcccgccaagatcaagaaagggggcctgaatggtgtggacatctactcgctggtgactgaaaacattcagtggcccaatggcatcaccctagatctcctcagtggccgcctctactgggttgactccaaacttcactccatctcaagcatcgatgtcaatgggggcaaccggaagaccatcttggaggatgaaaagaggctggcccaccccttctccttggccgtctttgaggacaaagtattttggacagatatcatcaacgaagccattttcagtgccaaccgcctcacaggttccgatgtcaacttgttggctgaaaacctactgtccccagaggatatggtcctcttccacaacctcacccagccaagaggagtgaactggtgtgagaggaccaccctgagcaatggcggctgccagtatctgtgcctccctgccccgcagatcaacccccactcgcccaagtttacctgcgcctgcccggacggcatgctgctggccagggacatgaggagctgcctcacagaggctgaggctgcagtggccacccaggagacatccaccgtcaggctaaaggtcagctccacagccgtaaggacacagcacacaaccacccggcctgttcccgacacctcccggctgcctggggccacccctgggctcaccacggtggagatagtgacaatgtctcaccaagctctgggcgacgttgctggcagaggaaatgagaagaagcccagtagcgtgagggctctgtccattgtcctccccatcgtgctcctcgtcttcctttgcctgggggtcttccttctatggaagaactggcggcttaagaacatcaacagcatcaactttgacaaccccgtctatcagaagaccacagaggatgaggtccacatttgccacaaccaggacggctacagctacccctcgagacagatggtcagtctggaggatgacgtggcgtgaacatctgcctggagtcccgtccctgcccagaacccttcctgagacctcgccggccttgttttattcaaagacagagaagaccaaagcattgcctgccagagctttgttttatatatttattcatctgggaggcagaacaggcttcggacagtgcccatgcaatggcttgggttgggattttggtttcttcctttcctcgtgaaggataagagaaacaggcccggggggaccaggatgacacctccatttctctccaggaagttttgagtttctctccaccgtgacacaatcctcaaacatggaagatgaaagggcaggggatgtcaggcccagagaagcaagtggctttcaacacacaacagcagatggcaccaacgggaccccctggccctgcctcatccaccaatctctaagccaaacccctaaactcaggagtcaacgtgtttacctcttctatgcaagccttgctagacagccaggttagcctttgccctgtcacccccgaatcatgacccacccagtgtctttcgaggtgggtttgtaccttccttaagccaggaaagggattcatggcgtcggaaatgatctggctgaatccgtggtggcaccgagaccaaactcattcaccaaatgatgccacttcccagaggcagagcctgagtcaccggtcacccttaatatttattaagtgcctgagacacccggttaccttggccgtgaggacacgtggcctgcacccaggtgtggctgtcaggacaccagcctggtgcccatcctcccgacccctacccacttccattcccgtggtctccttgcactttctcagttcagagttgtacactgtgtacatttggcatttgtgttattattttgcactgttttctgtcgtgtgtgttgggatgggatcccaggccagggaaagcccgtgtcaatgaatgccggggacagagaggggcaggttgaccgggacttcaaagccgtgatcgtgaatatcgagaactgccattgtcgtctttatgtccgcccacctagtgcttccacttctatgcaaatgcctccaagccattcacttccccaatcttgtcgttgatgggtatgtgtttaaaacatgcacggtgaggccgggcgcagtggctcacgcctgtaatcccagcactttgggaggccgaggcgggtggatcatgaggtcaggagatcgagaccatcctggctaacaaggtgaaaccccgtctctactaaaaatacaaaaaattagccgggcgcggtggcgggcacctgtagtcccagctactcgggaggctgaggcaggagaatggtgtgaacccgggaagcggagcttgcagtgagccgagattgcgccactgcagtccgcagtctggcctgggcgacagagcgagactccgtctcaaaaaaaaaaaacaaaaaaaaaccatgcatggtgcatcagcagcccatggcctctggccaggcatggcgaggctgaggtgggaggatggtttgagctcaggcatttgaggctgtcgtgagctatgattatgccactgctttccagcctgggcaacatagtaagaccccatctcttaaaaaatgaatttggccagacacaggtgcctcacgcctgtaatcccagcactttgggaggctgagctggatcacttgagttcaggagttggagaccaggcctgagcaacaaagcgagatcccatctctacaaaaaccaaaaagttaaaaatcagctgggtacggtggcacgtgcctgtgatcccagctacttgggaggctgaggcaggaggatcgcctgagcccaggaggtggaggttgcagtgagccatgatcgagccactgcactccagcctgggcaacagatgaagaccctatttcagaaatacaactataaaaaaataaataaatcctccagtctggatcgtttgacgggacttcaggttctttctgaaatcgccgtgttactgttgcactgatgtccggagagacagtgacagcctccgtcagactcccgcgtgaagatgtcacaagggattggcaattgtccccagggacaaaacactgtgtcccccccagtgcagggaaccgtgataagcctttctggtttcggagcacgtaaatgcgtccctgtacagatagtggggattttttgttatgtttgcactttgtatattggttgaaactgttatcacttatatatatatatacacacatatatataaaatctatttatttttgcaaaccctggttgctgtatttgttcagtgactattctcggggccctgtgtagggggttattgcctctgaaatgcctcttctttatgtacaaagattatttgcacgaactggactgtgtgcaacgctttttgggagaatgatgtccccgttgtatgtatgagtggcttctgggagatgggtgtcactttttaaaccactgtatagaaggtttttgtagcctgaatgtcttactgtgatcaattaaatttcttaaatgaaccaaaaaaaaaaaactc

SEQ ID NO: 454580 - DNA, 5059 bp, Homo sapiens
gacgtgggccccgagtgcaatcgcgggaagccagggtttccagctaggacacagcaggtcgtgatccgggtcgggacactgcctggcagaggctgcgagcatggggccctggggctggaaattgcgctggaccgtcgccttgctcctcgccgcggcggggactgcagtgggcgacagatgcgaaagaaacgagttccagtgccaagacgggaaatgcatctcctacaagtgggtctgcgatggcagcgctgagtgccaggatggctctgatgagtcccaggagacgtgcttgtctgtcacctgcaaatccggggacttcagctgtgggggccgtgtcaaccgctgcattcctcagttctggaggtgcgatggccaagtggactgcgacaacggctcagacgagcaaggctgtccccccaagacgtgctcccaggacgagtttcgctgccacgatgggaagtgcatctctcggcagttcgtctgtgactcagaccgggactgcttggacggctcagacgaggcctcctgcccggtgctcacctgtggtcccgccagcttccagtgcaacagctccacctgcatcccccagctgtgggcctgcgacaacgaccccgactgcgaagatggctcggatgagtggccgcagcgctgtaggggtctttacgtgttccaaggggacagtagcccctgctcggccttcgagttccactgcctaagtggcgagtgcatccactccagctggcgctgtgatggtggccccgactgcaaggacaaatctgacgaggaaaactgcgctgtggccacctgtcgccctgacgaattccagtgctctgatggaaactgcatccatggcagccggcagtgtgaccgggaatatgactgcaaggacatgagcgatgaagttggctgcgttaatgtgacactctgcgagggacccaacaagttcaagtgtcacagcggcgaatgcatcaccctggacaaagtctgcaacatggctagagactgccgggactggtcagatgaacccatcaaagagtgcgggaccaacgaatgcttggacaacaacggcggctgttcccacgtctgcaatgaccttaagatcggctacgagtgcctgtgccccgacggcttccagctggtggcccagcgaagatgcgaagatatcgatgagtgtcaggatcccgacacctgcagccagctctgcgtgaacctggagggtggctacaagtgccagtgtgaggaaggcttccagctggacccccacacgaaggcctgcaaggctgtgggctccatcgcctacctcttcttcaccaaccggcacgaggtcaggaagatgacgctggaccggagcgagtacaccagcctcatccccaacctgaggaacgtggtcgctctggacacggaggtggccagcaatagaatctactggtctgacctgtcccagagaatgatctgcagcacccagcttgacagagcccacggcgtctcttcctatgacaccgtcatcagcagggacatccaggcccccgacgggctggctgtggactggatccacagcaacatctactggaccgactctgtcctgggcactgtctctgttgcggataccaagggcgtgaagaggaaaacgttattcagggagaacggctccaagccaagggccatcgtggtggatcctgttcatggcttcatgtactggactgactggggaactcccgccaagatcaagaaagggggcctgaatggtgtggacatctactcgctggtgactgaaaacattcagtggcccaatggcatcaccctaggacaaagtattttggacagatatcatcaacgaagccattttcagtgccaaccgcctcacaggttccgatgtcaacttgttggctgaaaacctactgtccccagaggatatggtcctcttccacaacctcacccagccaagaggagtgaactggtgtgagaggaccaccctgagcaatggcggctgccagtatctgtgcctccctgccccgcagatcaacccccactcgcccaagtttacctgcgcctgcccggacggcatgctgctggccagggacatgaggagctgcctcacagaggctgaggctgcagtggccacccaggagacatccaccgtcaggctaaaggtcagctccacagccgtaaggacacagcacacaaccacccggcctgttcccgacacctcccggctgcctggggccacccctgggctcaccacggtggagatagtgacaatgtctcaccaagctctgggcgacgttgctggcagaggaaatgagaagaagcccagtagcgtgagggctctgtccattgtcctccccatcgtgctcctcgtcttcctttgcctgggggtcttccttctatggaagaactggcggcttaagaacatcaacagcatcaactttgacaaccccgtctatcagaagaccacagaggatgaggtccacatttgccacaaccaggacggctacagctacccctcgagacagatggtcagtctggaggatgacgtggcgtgaacatctgcctggagtcccgtccctgcccagaacccttcctgagacctcgccggccttgttttattcaaagacagagaagaccaaagcattgcctgccagagctttgttttatatatttattcatctgggaggcagaacaggcttcggacagtgcccatgcaatggcttgggttgggattttggtttcttcctttcctcgtgaaggataagagaaacaggcccggggggaccaggatgacacctccatttctctccaggaagttttgagtttctctccaccgtgacacaatcctcaaacatggaagatgaaagggcaggggatgtcaggcccagagaagcaagtggctttcaacacacaacagcagatggcaccaacgggaccccctggccctgcctcatccaccaatctctaagccaaacccctaaactcaggagtcaacgtgtttacctcttctatgcaagccttgctagacagccaggttagcctttgccctgtcacccccgaatcatgacccacccagtgtctttcgaggtgggtttgtaccttccttaagccaggaaagggattcatggcgtcggaaatgatctggctgaatccgtggtggcaccgagaccaaactcattcaccaaatgatgccacttcccagaggcagagcctgagtcaccggtcacccttaatatttattaagtgcctgagacacccggttaccttggccgtgaggacacgtggcctgcacccaggtgtggctgtcaggacaccagcctggtgcccatcctcccgacccctacccacttccattcccgtggtctccttgcactttctcagttcagagttgtacactgtgtacatttggcatttgtgttattattttgcactgttttctgtcgtgtgtgttgggatgggatcccaggccagggaaagcccgtgtcaatgaatgccggggacagagaggggcaggttgaccgggacttcaaagccgtgatcgtgaatatcgagaactgccattgtcgtctttatgtccgcccacctagtgcttccacttctatgcaaatgcctccaagccattcacttccccaatcttgtcgttgatgggtatgtgtttaaaacatgcacggtgaggccgggcgcagtggctcacgcctgtaatcccagcactttgggaggccgaggcgggtggatcatgaggtcaggagatcgagaccatcctggctaacaaggtgaaaccccgtctctactaaaaatacaaaaaattagccgggcgcggtggcgggcacctgtagtcccagctactcgggaggctgaggcaggagaatggtgtgaacccgggaagcggagcttgcagtgagccgagattgcgccactgcagtccgcagtctggcctgggcgacagagcgagactccgtctcaaaaaaaaaaaacaaaaaaaaaccatgcatggtgcatcagcagcccatggcctctggccaggcatggcgaggctgaggtgggaggatggtttgagctcaggcatttgaggctgtcgtgagctatgattatgccactgctttccagcctgggcaacatagtaagaccccatctcttaaaaaatgaatttggccagacacaggtgcctcacgcctgtaatcccagcactttgggaggctgagctggatcacttgagttcaggagttggagaccaggcctgagcaacaaagcgagatcccatctctacaaaaaccaaaaagttaaaaatcagctgggtacggtggcacgtgcctgtgatcccagctacttgggaggctgaggcaggaggatcgcctgagcccaggaggtggaggttgcagtgagccatgatcgagccactgcactccagcctgggcaacagatgaagaccctatttcagaaatacaactataaaaaaataaataaatcctccagtctggatcgtttgacgggacttcaggttctttctgaaatcgccgtgttactgttgcactgatgtccggagagacagtgacagcctccgtcagactcccgcgtgaagatgtcacaagggattggcaattgtccccagggacaaaacactgtgtcccccccagtgcagggaaccgtgataagcctttctggtttcggagcacgtaaatgcgtccctgtacagatagtggggattttttgttatgtttgcactttgtatattggttgaaactgttatcacttatatatatatatacacacatatatataaaatctatttatttttgcaaaccctggttgctgtatttgttcagtgactattctcggggccctgtgtagggggttattgcctctgaaatgcctcttctttatgtacaaagattatttgcacgaactggactgtgtgcaacgctttttgggagaatgatgtccccgttgtatgtatgagtggcttctgggagatgggtgtcactttttaaaccactgtatagaaggtttttgtagcctgaatgtcttactgtgatcaattaaatttcttaaatgaaccaaaaaaaaaaaactc

SEQ ID NO: 454581 - DNA, 3775 bp, Homo sapiens
cacgtgccaccacggcagactaattttattttatttttgggaagagacaaagtcttgttatgttggcctggctggtctcaaactcagggtgcaagcgatcctcccgcctcagccttccaaactgctgggattacaggcgtgggccaccgtacccagcctccttgaagtttttctgacctgcaactcccctacctgcccattggagagggcgtcacaggggaggggttcaggctcacatgtggttggagctgcctctccaggtgcttttctgctaggtccctggcagggggtcttcctgcccggagcagcgtggccaggccctcaggaccctctgggactggcatcagcacgtgacctctccttatccacttgtgtgtctagatctcctcagtggccgcctctactgggttgactccaaacttcactccatctcaagcatcgatgtcaatgggggcaaccggaagaccatcttggaggatgaaaagaggctggcccaccccttctccttggccgtctttgaggacaaagtattttggacagatatcatcaacgaagccattttcagtgccaaccgcctcacaggttccgatgtcaacttgttggctgaaaacctactgtccccagaggatatggtcctcttccacaacctcacccagccaagaggagtgaactggtgtgagaggaccaccctgagcaatggcggctgccagtatctgtgcctccctgccccgcagatcaacccccactcgcccaagtttacctgcgcctgcccggacggcatgctgctggccagggacatgaggagctgcctcacagaggctgaggctgcagtggccacccaggagacatccaccgtcaggctaaaggtcagctccacagccgtaaggacacagcacacaaccacccggcctgttcccgacacctcccggctgcctggggccacccctgggctcaccacggtggagatagtgacaatgtctcaccaagctctgggcgacgttgctggcagaggaaatgagaagaagcccagtagcgtgagggctctgtccattgtcctccccatcgtgctcctcgtcttcctttgcctgggggtcttccttctatggaagaactggcggcttaagaacatcaacagcatcaactttgacaaccccgtctatcagaagaccacagaggatgaggtccacatttgccacaaccaggacggctacagctacccctcgagacagatggtcagtctggaggatgacgtggcgtgaacatctgcctggagtcccgtccctgcccagaacccttcctgagacctcgccggccttgttttattcaaagacagagaagaccaaagcattgcctgccagagctttgttttatatatttattcatctgggaggcagaacaggcttcggacagtgcccatgcaatggcttgggttgggattttggtttcttcctttcctcgtgaaggataagagaaacaggcccggggggaccaggatgacacctccatttctctccaggaagttttgagtttctctccaccgtgacacaatcctcaaacatggaagatgaaagggcaggggatgtcaggcccagagaagcaagtggctttcaacacacaacagcagatggcaccaacgggaccccctggccctgcctcatccaccaatctctaagccaaacccctaaactcaggagtcaacgtgtttacctcttctatgcaagccttgctagacagccaggttagcctttgccctgtcacccccgaatcatgacccacccagtgtctttcgaggtgggtttgtaccttccttaagccaggaaagggattcatggcgtcggaaatgatctggctgaatccgtggtggcaccgagaccaaactcattcaccaaatgatgccacttcccagaggcagagcctgagtcaccggtcacccttaatatttattaagtgcctgagacacccggttaccttggccgtgaggacacgtggcctgcacccaggtgtggctgtcaggacaccagcctggtgcccatcctcccgacccctacccacttccattcccgtggtctccttgcactttctcagttcagagttgtacactgtgtacatttggcatttgtgttattattttgcactgttttctgtcgtgtgtgttgggatgggatcccaggccagggaaagcccgtgtcaatgaatgccggggacagagaggggcaggttgaccgggacttcaaagccgtgatcgtgaatatcgagaactgccattgtcgtctttatgtccgcccacctagtgcttccacttctatgcaaatgcctccaagccattcacttccccaatcttgtcgttgatgggtatgtgtttaaaacatgcacggtgaggccgggcgcagtggctcacgcctgtaatcccagcactttgggaggccgaggcgggtggatcatgaggtcaggagatcgagaccatcctggctaacaaggtgaaaccccgtctctactaaaaatacaaaaaattagccgggcgcggtggcgggcacctgtagtcccagctactcgggaggctgaggcaggagaatggtgtgaacccgggaagcggagcttgcagtgagccgagattgcgccactgcagtccgcagtctggcctgggcgacagagcgagactccgtctcaaaaaaaaaaaacaaaaaaaaaccatgcatggtgcatcagcagcccatggcctctggccaggcatggcgaggctgaggtgggaggatggtttgagctcaggcatttgaggctgtcgtgagctatgattatgccactgctttccagcctgggcaacatagtaagaccccatctcttaaaaaatgaatttggccagacacaggtgcctcacgcctgtaatcccagcactttgggaggctgagctggatcacttgagttcaggagttggagaccaggcctgagcaacaaagcgagatcccatctctacaaaaaccaaaaagttaaaaatcagctgggtacggtggcacgtgcctgtgatcccagctacttgggaggctgaggcaggaggatcgcctgagcccaggaggtggaggttgcagtgagccatgatcgagccactgcactccagcctgggcaacagatgaagaccctatttcagaaatacaactataaaaaaataaataaatcctccagtctggatcgtttgacgggacttcaggttctttctgaaatcgccgtgttactgttgcactgatgtccggagagacagtgacagcctccgtcagactcccgcgtgaagatgtcacaagggattggcaattgtccccagggacaaaacactgtgtcccccccagtgcagggaaccgtgataagcctttctggtttcggagcacgtaaatgcgtccctgtacagatagtggggattttttgttatgtttgcactttgtatattggttgaaactgttatcacttatatatatatatacacacatatatataaaatctatttatttttgcaaaccctggttgctgtatttgttcagtgactattctcggggccctgtgtagggggttattgcctctgaaatgcctcttctttatgtacaaagattatttgcacgaactggactgtgtgcaacgctttttgggagaatgatgtccccgttgtatgtatgagtggcttctgggagatgggtgtcactttttaaaccactgtatagaaggtttttgtagcctgaatgtcttactgtgatcaattaaatttcttaaatgaaccaaaaaaaaaaaactc

SEQ ID NO: 454582 - DNA, 3540 bp, Homo sapiens
ggtttcaccatgttagccaggctggtcttgaactcctaacctcaggcgattcacctgcctcggcctcccaaagtgctgggattaaaggtatgagccacctcgcctggtgtgagccacctcgcccagcctgagccacctcacccagcctaagccactgtgcctggcctgattttggactttttaaaaattttattaataattatttttgggtttcttttttttgagacagggtcttactctgtcatccaggccatcctgtctgtctgtcatcccagtgatgggatcataccttgctgcagcctctacctcctgggctcaagcgatcctcccccctcagcctcctgagtagctgggagtacaggtgtgcaccaccacacctggctaatttttttttttttttttgtatatagagatggtattttgccatgttgaccaggctagtcttaaactcctggactcactcaagagatcctcctgccttggcctcccaaggtcatttgagactttcgtcattaggcgcacacctatgagaagggcctgcaggcacgtggcactcagaagacgtttatttattctttcagaggctgaggctgcagtggccacccaggagacatccaccgtcaggctaaaggtcagctccacagccgtaaggacacagcacacaaccacccggcctgttcccgacacctcccggctgcctggggccacccctgggctcaccacggtggagatagtgacaatgtctcaccaagctctgggcgacgttgctggcagaggaaatgagaagaagcccagtagcgtgagggctctgtccattgtcctccccatcgtgctcctcgtcttcctttgcctgggggtcttccttctatggaagaactggcggcttaagaacatcaacagcatcaactttgacaaccccgtctatcagaagaccacagaggatgaggtccacatttgccacaaccaggacggctacagctacccctcgagacagatggtcagtctggaggatgacgtggcgtgaacatctgcctggagtcccgtccctgcccagaacccttcctgagacctcgccggccttgttttattcaaagacagagaagaccaaagcattgcctgccagagctttgttttatatatttattcatctgggaggcagaacaggcttcggacagtgcccatgcaatggcttgggttgggattttggtttcttcctttcctcgtgaaggataagagaaacaggcccggggggaccaggatgacacctccatttctctccaggaagttttgagtttctctccaccgtgacacaatcctcaaacatggaagatgaaagggcaggggatgtcaggcccagagaagcaagtggctttcaacacacaacagcagatggcaccaacgggaccccctggccctgcctcatccaccaatctctaagccaaacccctaaactcaggagtcaacgtgtttacctcttctatgcaagccttgctagacagccaggttagcctttgccctgtcacccccgaatcatgacccacccagtgtctttcgaggtgggtttgtaccttccttaagccaggaaagggattcatggcgtcggaaatgatctggctgaatccgtggtggcaccgagaccaaactcattcaccaaatgatgccacttcccagaggcagagcctgagtcaccggtcacccttaatatttattaagtgcctgagacacccggttaccttggccgtgaggacacgtggcctgcacccaggtgtggctgtcaggacaccagcctggtgcccatcctcccgacccctacccacttccattcccgtggtctccttgcactttctcagttcagagttgtacactgtgtacatttggcatttgtgttattattttgcactgttttctgtcgtgtgtgttgggatgggatcccaggccagggaaagcccgtgtcaatgaatgccggggacagagaggggcaggttgaccgggacttcaaagccgtgatcgtgaatatcgagaactgccattgtcgtctttatgtccgcccacctagtgcttccacttctatgcaaatgcctccaagccattcacttccccaatcttgtcgttgatgggtatgtgtttaaaacatgcacggtgaggccgggcgcagtggctcacgcctgtaatcccagcactttgggaggccgaggcgggtggatcatgaggtcaggagatcgagaccatcctggctaacaaggtgaaaccccgtctctactaaaaatacaaaaaattagccgggcgcggtggcgggcacctgtagtcccagctactcgggaggctgaggcaggagaatggtgtgaacccgggaagcggagcttgcagtgagccgagattgcgccactgcagtccgcagtctggcctgggcgacagagcgagactccgtctcaaaaaaaaaaaacaaaaaaaaaccatgcatggtgcatcagcagcccatggcctctggccaggcatggcgaggctgaggtgggaggatggtttgagctcaggcatttgaggctgtcgtgagctatgattatgccactgctttccagcctgggcaacatagtaagaccccatctcttaaaaaatgaatttggccagacacaggtgcctcacgcctgtaatcccagcactttgggaggctgagctggatcacttgagttcaggagttggagaccaggcctgagcaacaaagcgagatcccatctctacaaaaaccaaaaagttaaaaatcagctgggtacggtggcacgtgcctgtgatcccagctacttgggaggctgaggcaggaggatcgcctgagcccaggaggtggaggttgcagtgagccatgatcgagccactgcactccagcctgggcaacagatgaagaccctatttcagaaatacaactataaaaaaataaataaatcctccagtctggatcgtttgacgggacttcaggttctttctgaaatcgccgtgttactgttgcactgatgtccggagagacagtgacagcctccgtcagactcccgcgtgaagatgtcacaagggattggcaattgtccccagggacaaaacactgtgtcccccccagtgcagggaaccgtgataagcctttctggtttcggagcacgtaaatgcgtccctgtacagatagtggggattttttgttatgtttgcactttgtatattggttgaaactgttatcacttatatatatatatacacacatatatataaaatctatttatttttgcaaaccctggttgctgtatttgttcagtgactattctcggggccctgtgtagggggttattgcctctgaaatgcctcttctttatgtacaaagattatttgcacgaactggactgtgtgcaacgctttttgggagaatgatgtccccgttgtatgtatgagtggcttctgggagatgggtgtcactttttaaaccactgtatagaaggtttttgtagcctgaatgtcttactgtgatcaattaaatttcttaaatgaaccaaaaaaaaaaaactc

SEQ ID NO: 454583 - DNA, 3163 bp, Homo sapiens
tgtgcgtgtgttctggtctcatatttgtttgttttgagacagggtgtcgctctgtcactgagtctggagtgcagtggcgcaatcagagttcactgcagcctcaaactcttgggctcagttgattctcccacttcagcctcccaagtagctggaactacaggtgaacaccactgtgcccagctaatttattttatttttagtagagatgaggtctcactatgttgcccaggctggtctcgaactcttgacctcatgatccgcccgcctcagcctcccaaaatgctgggattacaggcgtgagccaccaggcccaggccgcaaggcgatctctaaacaaacataaaagaccaggagtcaaggttatggtacgatgcccgtgttttcactccagccacggagctgggtctctggtctcgggggcagctgtgtgacagagcgtgcctctccctacagtgctcctcgtcttcctttgcctgggggtcttccttctatggaagaactggcggcttaagaacatcaacagcatcaactttgacaaccccgtctatcagaagaccacagaggatgaggtccacatttgccacaaccaggacggctacagctacccctcgagacagatggtcagtctggaggatgacgtggcgtgaacatctgcctggagtcccgtccctgcccagaacccttcctgagacctcgccggccttgttttattcaaagacagagaagaccaaagcattgcctgccagagctttgttttatatatttattcatctgggaggcagaacaggcttcggacagtgcccatgcaatggcttgggttgggattttggtttcttcctttcctcgtgaaggataagagaaacaggcccggggggaccaggatgacacctccatttctctccaggaagttttgagtttctctccaccgtgacacaatcctcaaacatggaagatgaaagggcaggggatgtcaggcccagagaagcaagtggctttcaacacacaacagcagatggcaccaacgggaccccctggccctgcctcatccaccaatctctaagccaaacccctaaactcaggagtcaacgtgtttacctcttctatgcaagccttgctagacagccaggttagcctttgccctgtcacccccgaatcatgacccacccagtgtctttcgaggtgggtttgtaccttccttaagccaggaaagggattcatggcgtcggaaatgatctggctgaatccgtggtggcaccgagaccaaactcattcaccaaatgatgccacttcccagaggcagagcctgagtcaccggtcacccttaatatttattaagtgcctgagacacccggttaccttggccgtgaggacacgtggcctgcacccaggtgtggctgtcaggacaccagcctggtgcccatcctcccgacccctacccacttccattcccgtggtctccttgcactttctcagttcagagttgtacactgtgtacatttggcatttgtgttattattttgcactgttttctgtcgtgtgtgttgggatgggatcccaggccagggaaagcccgtgtcaatgaatgccggggacagagaggggcaggttgaccgggacttcaaagccgtgatcgtgaatatcgagaactgccattgtcgtctttatgtccgcccacctagtgcttccacttctatgcaaatgcctccaagccattcacttccccaatcttgtcgttgatgggtatgtgtttaaaacatgcacggtgaggccgggcgcagtggctcacgcctgtaatcccagcactttgggaggccgaggcgggtggatcatgaggtcaggagatcgagaccatcctggctaacaaggtgaaaccccgtctctactaaaaatacaaaaaattagccgggcgcggtggcgggcacctgtagtcccagctactcgggaggctgaggcaggagaatggtgtgaacccgggaagcggagcttgcagtgagccgagattgcgccactgcagtccgcagtctggcctgggcgacagagcgagactccgtctcaaaaaaaaaaaacaaaaaaaaaccatgcatggtgcatcagcagcccatggcctctggccaggcatggcgaggctgaggtgggaggatggtttgagctcaggcatttgaggctgtcgtgagctatgattatgccactgctttccagcctgggcaacatagtaagaccccatctcttaaaaaatgaatttggccagacacaggtgcctcacgcctgtaatcccagcactttgggaggctgagctggatcacttgagttcaggagttggagaccaggcctgagcaacaaagcgagatcccatctctacaaaaaccaaaaagttaaaaatcagctgggtacggtggcacgtgcctgtgatcccagctacttgggaggctgaggcaggaggatcgcctgagcccaggaggtggaggttgcagtgagccatgatcgagccactgcactccagcctgggcaacagatgaagaccctatttcagaaatacaactataaaaaaataaataaatcctccagtctggatcgtttgacgggacttcaggttctttctgaaatcgccgtgttactgttgcactgatgtccggagagacagtgacagcctccgtcagactcccgcgtgaagatgtcacaagggattggcaattgtccccagggacaaaacactgtgtcccccccagtgcagggaaccgtgataagcctttctggtttcggagcacgtaaatgcgtccctgtacagatagtggggattttttgttatgtttgcactttgtatattggttgaaactgttatcacttatatatatatatacacacatatatataaaatctatttatttttgcaaaccctggttgctgtatttgttcagtgactattctcggggccctgtgtagggggttattgcctctgaaatgcctcttctttatgtacaaagattatttgcacgaactggactgtgtgcaacgctttttgggagaatgatgtccccgttgtatgtatgagtggcttctgggagatgggtgtcactttttaaaccactgtatagaaggtttttgtagcctgaatgtcttactgtgatcaattaaatttcttaaatgaaccaaaaaaaaaaaactc

SEQ ID NO: 454584 - DNA, 3866 bp, Homo sapiens
gacgtgggccccgagtgcaatcgcgggaagccagggtttccagctaggacacagcaggtcgtgatccgggtcgggacactgcctggcagaggctgcgagcatggggccctggggctggaaattgcgctggaccgtcgccttgctcctcgccgcggcggggactgcagtgggcgacagatgcgaaagaaacgagttccagtgccaagacgggaaatgcatctcctacaagtgggtctgcgatggcagcgctgagtgccaggatggctctgatgagtcccaggagacgtgcttgtctgtcacctgcaaatccggggacttcagctgtgggggccgtgtcaaccgctgcattcctcagttctggaggtgcgatggccaagtggactgcgacaacggctcagacgagcaaggctgtccccccaagacgtgctcccaggacgagtttcgctgccacgatgggaagtgcatctctcggcagttcgtctgtgactcagaccgggactgcttggacggctcagacgaggcctcctgcccggtgctcacctgtggtcccgccagcttccagtgcaacagctccacctgcatcccccagctgtgggcctgcgacaacgaccccgactgcgaagatggctcggatgagtggccgcagcgctgtaggggtctttacgtgttccaaggggacagtagcccctgctcggccttcgagttccactgcctaagtggcgagtgcatccactccagctggcgctgtgatggtggccccgactgcaaggacaaatctgacgaggaaaactgcgctgtggccacctgtcgccctgacgaattccagtgctctgatggaaactgcatccatggcagccggcagtgtgaccgggaatatgactgcaaggacatgagcgatgaagttggctgcgttaatgtgacactctgcgagggacccaacaagttcaagtgtcacagcggcgaatgcatcaccctggacaaagtctgcaacatggctagagactgccgggactggtcagatgaacccatcaaagagtgcgggaccaacgaatgcttggacaacaacggcggctgttcccacgtctgcaatgaccttaagatcggctacgagtgcctgtgccccgacggcttccagctggtggcccagcgaagatgcgaagatatcgatgagtgtcaggatcccgacacctgcagccagctctgcgtgaacctggagggtggctacaagtgccagtgtgaggaaggcttccagctggacccccacacgaaggcctgcaaggctgtgggctccatcgcctacctcttcttcaccaaccggcacgaggtcaggaagatgacgctggaccggagcgagtacaccagcctcatccccaacctgaggaacgtggtcgctctggacacggaggtggccagcaatagaatctactggtctgacctgtcccagagaatgatctgcagcacccagcttgacagagcccacggcgtctcttcctatgacaccgtcatcagcagggacatccaggcccccgacgggctggctgtggactggatccacagcaacatctactggaccgactctgtcctgggcactgtctctgttgcggataccaagggcgtgaagaggaaaacgttattcagggagaacggctccaagccaagggccatcgtggtggatcctgttcatggcttcatgtactggactgactggggaactcccgccaagatcaagaaagggggcctgaatggtgtggacatctactcgctggtgactgaaaacattcagtggcccaatggcatcaccctagatctcctcagtggccgcctctactgggttgactccaaacttcactccatctcaagcatcgatgtcaatgggggcaaccggaagaccatcttggaggatgaaaagaggctggcccaccccttctccttggccgtctttgaggacaaagtattttggacagatatcatcaacgaagccattttcagtgccaaccgcctcacaggttccgatgtcaacttgttggctgaaaacctactgtccccagaggatatggtcctcttccacaacctcacccagccaagaggagtgaactggtgtgagaggaccaccctgagcaatggcggctgccagtatctgtgcctccctgccccgcagatcaacccccactcgcccaagtttacctgcgcctgcccggacggcatgctgctggccagggacatgaggagctgcctcacagaggctgaggctgcagtggccacccaggagacatccaccgtcaggctaaaggtcagctccacagccgtaaggacacagcacacaaccacccggcctgttcccgacacctcccggctgcctggggccacccctgggctcaccacggtggagatagtgacaatgtctcaccaagctctgggcgacgttgctggcagaggaaatgagaagaagcccagtagcgtgagggctctgtccattgtcctccccatcgtgctcctcgtcttcctttgcctgggggtcttccttctatggaagaactggcggcttaagaacatcaacagcatcaactttgacaaccccgtctctactaaaaatacaaaaaattagccgggcgcggtggcgggcacctgtagtcccagctactcgggaggctgaggcaggagaatggtgtgaacccgggaagcggagcttgcagtgagccgagattgcgccactgcagtccgcagtctggcctgggcgacagagcgagactccgtctcaaaaaaaaaaaacaaaaaaaaaccatgcatggtgcatcagcagcccatggcctctggccaggcatggcgaggctgaggtgggaggatggtttgagctcaggcatttgaggctgtcgtgagctatgattatgccactgctttccagcctgggcaacatagtaagaccccatctcttaaaaaatgaatttggccagacacaggtgcctcacgcctgtaatcccagcactttgggaggctgagctggatcacttgagttcaggagttggagaccaggcctgagcaacaaagcgagatcccatctctacaaaaaccaaaaagttaaaaatcagctgggtacggtggcacgtgcctgtgatcccagctacttgggaggctgaggcaggaggatcgcctgagcccaggaggtggaggttgcagtgagccatgatcgagccactgcactccagcctgggcaacagatgaagaccctatttcagaaatacaactataaaaaaataaataaatcctccagtctggatcgtttgacgggacttcaggttctttctgaaatcgccgtgttactgttgcactgatgtccggagagacagtgacagcctccgtcagactcccgcgtgaagatgtcacaagggattggcaattgtccccagggacaaaacactgtgtcccccccagtgcagggaaccgtgataagcctttctggtttcggagcacgtaaatgcgtccctgtacagatagtggggattttttgttatgtttgcactttgtatattggttgaaactgttatcacttatatatatatatacacacatatatataaaatctatttatttttgcaaaccctggttgctgtatttgttcagtgactattctcggggccctgtgtagggggttattgcctctgaaatgcctcttctttatgtacaaagattatttgcacgaactggactgtgtgcaacgctttttgggagaatgatgtccccgttgtatgtatgagtggcttctgggagatgggtgtcactttttaaaccactgtatagaaggtttttgtagcctgaatgtcttactgtgatcaattaaatttcttaaatgaaccaaaaaaaaaaaactc

SEQ ID NO: 454585 - DNA, 3159 bp, Homo sapiens
gacgtgggccccgagtgcaatcgcgggaagccagggtttccagctaggacacagcaggtcgtgatccgggtcgggacactgcctggcagaggctgcgagcatggggccctggggctggaaattgcgctggaccgtcgccttgctcctcgccgcggcggggactgcagtgggcgacagatgcgaaagaaacgagttccagtgccaagacgggaaatgcatctcctacaagtgggtctgcgatggcagcgctgagtgccaggatggctctgatgagtcccaggagacgtgcttgtctgtcacctgcaaatccggggacttcagctgtgggggccgtgtcaaccgctgcattcctcagttctggaggtgcgatggccaagtggactgcgacaacggctcagacgagcaaggctgtccccccaagacgtgctcccaggacgagtttcgctgccacgatgggaagtgcatctctcggcagttcgtctgtgactcagaccgggactgcttggacggctcagacgaggcctcctgcccggtgctcacctgtggtcccgccagcttccagtgcaacagctccacctgcatcccccagctgtgggcctgcgacaacgaccccgactgcgaagatggctcggatgagtggccgcagcgctgtaggggtctttacgtgttccaaggggacagtagcccctgctcggccttcgagttccactgcctaagtggcgagtgcatccactccagctggcgctgtgatggtggccccgactgcaaggacaaatctgacgaggaaaactgcgctgtggccacctgtcgccctgacgaattccagtgctctgatggaaactgcatccatggcagccggcagtgtgaccgggaatatgactgcaaggacatgagcgatgaagttggctgcgttaatgtgacactctgcgagggacccaacaagttcaagtgtcacagcggcgaatgcatcaccctggacaaagtctgcaacatggctagagactgccgggactggtcagatgaacccatcaaagagtgcgggaccaacgaatgcttggacaacaacggcggctgttcccacgtctgcaatgaccttaagatcggctacgagtgcctgtgccccgacggcttccagctggtggcccagcgaagatgcgaagatatcgatgagtgtcaggatcccgacacctgcagccagctctgcgtgaacctggagggtggctacaagtgccagtgtgaggaaggcttccagctggacccccacacgaaggcctgcaaggctgtgggctccatcgcctacctcttcttcaccaaccggcacgaggtcaggaagatgacgctggaccggagcgagtacaccagcctcatccccaacctgaggaacgtggtcgctctggacacggaggtggccagcaatagaatctactggtctgacctgtcccagagaatgatctgcagcacccagcttgacagagcccacggcgtctcttcctatgacaccgtcatcagcagggacatccaggcccccgacgggctggctgtggactggatccacagcaacatctactggaccgactctgtcctgggcactgtctctgttgcggataccaagggcgtgaagaggaaaacgttattcagggagaacggctccaagccaagggccatcgtggtggatcctgttcatggcttcatgtactggactgactggggaactcccgccaagatcaagaaagggggcctgaatggtgtggacatctactcgctggtgactgaaaacattcagtggcccaatggcatcaccctagatctcctcagtggccgcctctactgggttgactccaaacttcactccatctcaagcatcgatgtcaatgggggcaaccggaagaccatcttggaggatgaaaagaggctggcccaccccttctccttggccgtctttgaggacaaagtattttggacagatatcatcaacgaagccattttcagtgccaaccgcctcacaggttccgatgtcaacttgttggctgaaaacctactgtccccagaggatatggtcctcttccacaacctcacccagccaagaggagtgaactggtgtgagaggaccaccctgagcaatggcggctgccagtatctgtgcctccctgccccgcagatcaacccccactcgcccaagtttacctgcgcctgcccggacggcatgctgctggccagggacatgaggagctgcctcacagaggctgaggctgcagtggccacccaggagacatccaccgtcaggctaaaggtcagctccacagccgtaaggacacagcacacaaccacccggcctgttcccgacacctcccggctgcctggggccacccctgggctcaccacggtggagatagtgacaatgtctcaccaagctctgggcgacgttgctggcagaggaaatgagaagaagcccagtagcgtgagggctctgtccattgtcctccccatcgtgctcctcgtcttcctttgcctgggggtcttccttctatggaagaactggcggcttaagaacatcaacagcatcaactttgacaaccccgtctatcagaagaccacagaggatgaggtccacatttgccacaaccaggacggctacagctacccctcgagacagatggtcagtctggaggatgacgtggcgtgaacatctgcctggagtcccgtccctgcccagaacccttcctgagacctcgccggccttgttttattcaaagacagagaagaccaaagcattgcctgccagagctttgttttatatatttattcatctgggaggcagaacaggcttcggacagtgcccatgcaatggcttgggttgggattttggtttcttcctttcctcgtgaaggataagagaaacaggcccggggggaccaggatgacacctccatttctctccaggaagttttgagtttctctccaccgtgacacaatcctcaaacatggaagatgaaagggcaggggatgtcaggcccagagaagcaagtggctttcaacacacaacagcagatggcaccaacgggaccccctggcccttgccctccatcccacccaacctccttaaagcccaaaacccccttaaaacttccagggaaattcaaaccgttgtttttaaccctc

SEQ ID NO: 454586 - DNA, 2682 bp, Homo sapiens
gacgtgggccccgagtgcaatcgcgggaagccagggtttccagctaggacacagcaggtcgtgatccgggtcgggacactgcctggcagaggctgcgagcatggggccctggggctggaaattgcgctggaccgtcgccttgctcctcgccgcggcggggactgcagtgggcgacagatgcgaaagaaacgagttccagtgccaagacgggaaatgcatctcctacaagtgggtctgcgatggcagcgctgagtgccaggatggctctgatgagtcccaggagacgtgcttgtctgtcacctgcaaatccggggacttcagctgtgggggccgtgtcaaccgctgcattcctcagttctggaggtgcgatggccaagtggactgcgacaacggctcagacgagcaaggctgtccccccaagacgtgctcccaggacgagtttcgctgccacgatgggaagtgcatctctcggcagttcgtctgtgactcagaccgggactgcttggacggctcagacgaggcctcctgcccggtgctcacctgtggtcccgccagcttccagtgcaacagctccacctgcatcccccagctgtgggcctgcgacaacgaccccgactgcgaagatggctcggatgagtggccgcagcgctgtaggggtctttacgtgttccaaggggacagtagcccctgctcggccttcgagttccactgcctaagtggcgagtgcatccactccagctggcgctgtgatggtggccccgactgcaaggacaaatctgacgaggaaaactgcgctgtggccacctgtcgccctgacgaattccagtgctctgatggaaactgcatccatggcagccggcagtgtgaccgggaatatgactgcaaggacatgagcgatgaagttggctgcgttaatgtgacactctgcgagggacccaacaagttcaagtgtcacagcggcgaatgcatcaccctggacaaagtctgcaacatggctagagactgccgggactggtcagatgaacccatcaaagagtgcgggaccaacgaatgcttggacaacaacggcggctgttcccacgtctgcaatgaccttaagatcggctacgagtgcctgtgccccgacggcttccagctggtggcccagcgaagatgcgaagatatcgatgagtgtcaggatcccgacacctgcagccagctctgcgtgaacctggagggtggctacaagtgccagtgtgaggaaggcttccagctggacccccacacgaaggcctgcaaggctgtgggctccatcgcctacctcttcttcaccaaccggcacgaggtcaggaagatgacgctggaccggagcgagtacaccagcctcatccccaacctgaggaacgtggtcgctctggacacggaggtggccagcaatagaatctactggtctgacctgtcccagagaatgatctgcagcacccagcttgacagagcccacggcgtctcttcctatgacaccgtcatcagcagggacatccaggcccccgacgggctggctgtggactggatccacagcaacatctactggaccgactctgtcctgggcactgtctctgttgcggataccaagggcgtgaagaggaaaacgttattcagggagaacggctccaagccaagggccatcgtggtggatcctgttcatggcttcatgtactggactgactggggaactcccgccaagatcaagaaagggggcctgaatggtgtggacatctactcgctggtgactgaaaacattcagtggcccaatggcatcaccctagatctcctcagtggccgcctctactgggttgactccaaacttcactccatctcaagcatcgatgtcaatgggggcaaccggaagaccatcttggaggatgaaaagaggctggcccaccccttctccttggccgtctttgaggacaaagtattttggacagatatcatcaacgaagccattttcagtgccaaccgcctcacaggttccgatgtcaacttgttggctgaaaacctactgtccccagaggatatggtcctcttccacaacctcacccagccaagaggagtgaactggtgtgagaggaccaccctgagcaatggcggctgccagtatctgtgcctccctgccccgcagatcaacccccactcgcccaagtttacctgcgcctgcccggacggcatgctgctggccagggacatgaggagctgcctcacagaggctgaggctgcagtggccacccaggagacatccaccgtcaggctaaaggtcagctccacagccgtaaggacacagcacacaaccacccggcctgttcccgacacctcccggctgcctggggccacccctgggctcaccacggtggagatagtgacaatgtctcaccaaggtaaagactgggccctccctaggcccctcttcacccagagacgggtcccttcagtggccacgaacattttggtcacgagatggagtccaggtgtcgtcctcactcccttgctgaccttctctcacttgggccgtgtgtctctgggccctcagtttccctatctgtaaagtgggtctaataacagttcttgccctctttgcaaggattaaatgggccaaatcatatgaggggccaggtccttcaggctcctgttcccaaagtcagcacgcac

SEQ ID NO: 454587 - DNA, 1895 bp, Homo sapiens
gacgtgggccccgagtgcaatcgcgggaagccagggtttccagctaggacacagcaggtcgtgatccgggtcgggacactgcctggcagaggctgcgagcatggggccctggggctggaaattgcgctggaccgtcgccttgctcctcgccgcggcggggactgcagtgggcgacagatgcgaaagaaacgagttccagtgccaagacgggaaatgcatctcctacaagtgggtctgcgatggcagcgctgagtgccaggatggctctgatgagtcccaggagacgtgcttgtctgtcacctgcaaatccggggacttcagctgtgggggccgtgtcaaccgctgcattcctcagttctggaggtgcgatggccaagtggactgcgacaacggctcagacgagcaaggctgtccccccaagacgtgctcccaggacgagtttcgctgccacgatgggaagtgcatctctcggcagttcgtctgtgactcagaccgggactgcttggacggctcagacgaggcctcctgcccggtgctcacctgtggtcccgccagcttccagtgcaacagctccacctgcatcccccagctgtgggcctgcgacaacgaccccgactgcgaagatggctcggatgagtggccgcagcgctgtaggggtctttacgtgttccaaggggacagtagcccctgctcggccttcgagttccactgcctaagtggcgagtgcatccactccagctggcgctgtgatggtggccccgactgcaaggacaaatctgacgaggaaaactgcgctgtggccacctgtcgccctgacgaattccagtgctctgatggaaactgcatccatggcagccggcagtgtgaccgggaatatgactgcaaggacatgagcgatgaagttggctgcgttaatgtgacactctgcgagggacccaacaagttcaagtgtcacagcggcgaatgcatcaccctggacaaagtctgcaacatggctagagactgccgggactggtcagatgaacccatcaaagagtgcgggaccaacgaatgcttggacaacaacggcggctgttcccacgtctgcaatgaccttaagatcggctacgagtgcctgtgccccgacggcttccagctggtggcccagcgaagatgcgaagatatcgatgagtgtcaggatcccgacacctgcagccagctctgcgtgaacctggagggtggctacaagtgccagtgtgaggaaggcttccagctggacccccacacgaaggcctgcaaggctgtgggctccatcgcctacctcttcttcaccaaccggcacgaggtcaggaagatgacgctggaccggagcgagtacaccagcctcatccccaacctgaggaacgtggtcgctctggacacggaggtggccagcaatagaatctactggtctgacctgtcccagagaatgatctgcagcacccagcttgacagagcccacggcgtctcttcctatgacaccgtcatcagcagggacatccaggcccccgacgggctggctgtggactggatccacagcaacatctactggaccgactctgtcctgggcactgtctctgttgcggataccaagggcgtgaagaggaaaacgttattcagggagaacggctccaagccaagggccatcgtggtggatcctgttcatgggtgcgtatccacgacgctgagggctgcagagggaatggaggttgcagtgagccaagacagccccactgcactccagcctgggtgacagagtgagactccgtctcaaaaaaaatagaaccccagtcttcattaccatctactatagttactgacccatggctgatcttgttctttcttccttccctctctttcccaagtattttgaagtt

SEQ ID NO: 454588 - DNA, 1532 bp, Homo sapiens
  misc_feature (1406)..(1406): n is a, c, g, or t
tgtgcgtgtgttctggtctcatatttgtttgttttgagacagggtgtcgctctgtcactgagtctggagtgcagtggcgcaatcagagttcactgcagcctcaaactcttgggctcagttgattctcccacttcagcctcccaagtagctggaactacaggtgaacaccactgtgcccagctaatttattttatttttagtagagatgaggtctcactatgttgcccaggctggtctcgaactcttgacctcatgatccgcccgcctcagcctcccaaaatgctgggattacaggcgtgagccaccaggcccaggccgcaaggcgatctctaaacaaacataaaagaccaggagtcaaggttatggtacgatgcccgtgttttcactccagccacggagctgggtctctggtctcgggggcagctgtgtgacagagcgtgcctctccctacagtgctcctcgtcttcctttgcctgggggtcttccttctatggaagaactggcggcttaagaacatcaacagcatcaactttgacaaccccgtctatcagaagaccacagaggatgaggtccacatttgccacaaccaggacggctacagctacccctcggtgagtgaccctctctagaaagccagagcccatggcggccccctcccagctggaggcatatgatcctcaagggaccaggccgaggcttccccagccctccagatcgaggacagcattaggtgaatgcttctgtgcgctcattcagaatgtcagcggacaatggccttggtggtgtagaggaatgttggataagcaaatagagagctccatcagatggtgacagggcaaagaaagtcaaaaggagttcagaggccgggcgcggtggctcatgcctgtaatcccaggactttgggaggccgaggctggcggatcacctgaagtcaggagtttgagaccagcttggccatcatgacaaaaccccgtctctattaaaaatacaaaaaattagccaggcgtgggagtgggcgcctgtaatcccagctactcgggaggccgaggtagaaaaatcgcttgaacctaggaggcagaggttgcagtgagccgagatcgcgccactgcattccagcccgggaggcaagagcaaaactccatctcaaaaaaaaatagacatacaacaggggttctcatgagtgcccggcttggttggttccactccttgttgaccccagaaattctcggggggttgaacgccggcgagattcccctgagtctcctgcagtccaagaccagccctggtcaggctgcagtaagaccccgtctcgtgctgttctgtcattttaccccgggtgtgtgtgttcagcgccttagttcccagctactagggagggcctaggccggaggcatggcctgaggcanagggtggacattgaagatttcagctgactgtgatggcgtcactggccccgccgtgtgacacaccagcgcttttccttacccaaacaccccccgaaggttctcggggcggccgcggcgcccaggtca

SEQ ID NO: 454589 - DNA, 260 bp, Homo sapiens
aaaacgttattcagggagaacggctccaagccaagggccatcgtggtggatcctgttcatgggtgcgtatccacgacgctgagggctgcagagggaatggagggagcaggaaggagcttcaggaactggttagtgggctgggcatggtggctcaaagcacctgtaatcccagcactttgggaggccaaggtgggtggatcatcaagaccagcctgaccaacatggtgaaacctcgtctctactaaaaatacaaaaattag

SEQ ID NO: 454590 - DNA, 441 bp, Homo sapiens
tttcatttgttgtgcttgcttaattccctgggaatcagactgttcctgatcggatgacatttctggttaattctttagttggcaggaaatagacacaggaaacgtggtcagtttctgattctggcgttgagagaccctttctccttttcctctctctcagtgggcgacagatgcgaaagaaacgagttccagtgccaagacgggaaatgcatctcctacaagtgggtctgcgatggcagcgctgagtgccaggatggctctgatgagtcccaggagacgtgctgtgagtcccctttgggcatgatatgcatttatttttgtaatagagacagggtctcgccatgttggccaggctggtcttgaatttctggtctcaagtgatccgctggcctcggcctcccaaagtgctgggattacaggcaccacgcctggcctgtgaca

SEQ ID NO: 454591 - DNA, 5199 bp, Homo sapiens
gacgtgggccccgagtgcaatcgcgggaagccagggtttccagctaggacacagcaggtcgtgatccgggtcgggacactgcctggcagaggctgcgagcatggggccctggggctggaaattgcgctggaccgtcgccttgctcctcgccgcggcggggactgcagtgggcgacagatgcgaaagaaacgagttccagtgccaagacgggaaatgcatctcctacaagtgggtctgcgatggcagcgctgagtgccaggatggctctgatgagtcccaggagacgtgcttgtctgtcacctgcaaatccggggacttcagctgtgggggccgtgtcaaccgctgcattcctcagttctggaggtgcgatggccaagtggactgcgacaacggctcagacgagcaaggctgtccccccaagacgtgctcccaggacgagtttcgctgccacgatgggaagtgcatctctcggcagttcgtctgtgactcagaccgggactgcttggacggctcagacgaggcctcctgcccggtgctcacctgtggtcccgccagcttccagtgcaacagctccacctgcatcccccagctgtgggcctgcgacaacgaccccgactgcgaagatggctcggatgagtggccgcagcgctgtaggggtctttacgtgttccaaggggacagtagcccctgctcggccttcgagttccactgcctaagtggcgagtgcatccactccagctggcgctgtgatggtggccccgactgcaaggacaaatctgacgaggaaaactgcgctgtggccacctgtcgccctgacgaattccagtgctctgatggaaactgcatccatggcagccggcagtgtgaccgggaatatgactgcaaggacatgagcgatgaagttggctgcgttaatgtgacactctgcgagggacccaacaagttcaagtgtcacagcggcgaatgcatcaccctggacaaagtctgcaacatggctagagactgccgggactggtcagatgaacccatcaaagagtgcgggaccaacgaatgcttggacaacaacggcggctgttcccacgtctgcaatgaccttaagatcggctacgagtgcctgtgccccgacggcttccagctggtggcccagcgaagatgcgaagatatcgatgagtgtcaggatcccgacacctgcagccagctctgcgtgaacctggagggtggctacaagtgccagtgtgaggaaggcttccagctggacccccacacgaaggcctgcaaggctgtgggctccatcgcctacctcttcttcaccaaccggcacgaggtcaggaagatgacgctggaccggagcgagtacaccagcctcatccccaacctgaggaacgtggtcgctctggacacggaggtggccagcaatagaatctactggtctgacctgtcccagagaatgatctgcagcacccagcttgacagagcccacggcgtctcttcctatgacaccgtcatcagcagggacatccaggcccccgacgggctggctgtggactggatccacagcaacatctactggaccgactctgtcctgggcactgtctctgttgcggataccaagggcgtgaagaggaaaacgttattcagggagaacggctccaagccaagggccatcgtggtggatcctgttcatggcttcatgtactggactgactggggaactcccgccaagatcaagaaagggggcctgaatggtgtggacatctactcgctggtgactgaaaacattcagtggcccaatggcatcaccctagatctcctcagtggccgcctctactgggttgactccaaacttcactccatctcaagcatcgatgtcaatgggggcaaccggaagaccatcttggaggatgaaaagaggctggcccaccccttctccttggccgtctttgaggacaaagtattttggacagatatcatcaacgaagccattttcagtgccaaccgcctcacaggttccgatgtcaacttgttggctgaaaacctactgtccccagaggatatggtcctcttccacaacctcacccagccaagaggagtgaactggtgtgagaggaccaccctgagcaatggcggctgccagtatctgtgcctccctgccccgcagatcaacccccactcgcccaagtttacctgcgcctgcccggacggcatgctgctggccagggacatgaggagctgcctcacagaggctgaggctgcagtggccacccaggagacatccaccgtcaggctaaaggtcagctccacagccgtaaggacacagcacacaaccacccggcctgttcccgacacctcccggctgcctggggccacccctgggctcaccacggtggagatagtgacaatgtctcaccaagctctgggcgacgttgctggcagaggaaatgagaagaagcccagtagcgtgagggctctgtccattgtcctccccatcgtgctcctcgtcttcctttgcctgggggtcttccttctatggaagaactggcggcttaagaacatcaacagcatcaactttgacaaccccgtctatcagaagaccacagaggatgaggtccacatttgccacaaccaggacggctacagctacccctcgagacagatggtcagtctggaggatgacgtggcgtgaacatctgcctggagtcccgtccctgcccagaacccttcctgagacctcgccggccttgttttattcaaagacagagaagaccaaagcattgcctgccagagctttgttttatatatttattcatctgggaggcagaacaggcttcggacagtgcccatgcaatggcttgggttgggattttggtttcttcctttcctcgtgaaggataagagaaacaggcccggggggaccaggatgacacctccatttctctccaggaagttttgagtttctctccaccgtgacacaatcctcaaacatggaagatgaaagggcaggggatgtcaggcccagagaagcaagtggctttcaacacacaacagcagatggcaccaacgggaccccctggccctgcctcatccaccaatctctaagccaaacccctaaactcaggagtcaacgtgtttacctcttctatgcaagccttgctagacagccaggttagcctttgccctgtcacccccgaatcatgacccacccagtgtctttcgaggtgggtttgtaccttccttaagccaggaaagggattcatggcgtcggaaatgatctggctgaatccgtggtggcaccgagaccaaactcattcaccaaatgatgccacttcccagaggcagagcctgagtcaccggtcacccttaatatttattaagtgcctgagacacccggttaccttggccgtgaggacacgtggcctgcacccaggtgtggctgtcaggacaccagcctggtgcccatcctcccgacccctacccacttccattcccgtggtctccttgcactttctcagttcagagttgtacactgtgtacatttggcatttgtgttattattttgcactgttttctgtcgtgtgtgttgggatgggatcccaggccagggaaagcccgtgtcaatgaatgccggggacagagaggggcaggttgaccgggacttcaaagccgtgatcgtgaatatcgagaactgccattgtcgtctttatgtccgcccacctagtgcttccacttctatgcaaatgcctccaagccattcacttccccaatcttgtcgttgatgggtatgtgtttaaaacatgcacggtgaggccgggcgcagtggctcacgcctgtaatcccagcactttgggaggccgaggcgggtggatcatgaggtcaggagatcgagaccatcctggctaacaaggtgaaaccccgtctctactaaaaatacaaaaaattagccgggcgcggtggcgggcacctgtagtcccagctactcgggaggctgaggcaggagaatggtgtgaacccgggaagcggagcttgcagtgagccgagattgcgccactgcagtccgcagtctggcctgggcgacagagcgagactccgtctcaaaaaaaaaaaacaaaaaaaaaccatgcatggtgcatcagcagcccatggcctctggccaggcatggcgaggctgaggtgggaggatggtttgagctcaggcatttgaggctgtcgtgagctatgattatgccactgctttccagcctgggcaacatagtaagaccccatctcttaaaaaatgaatttggccagacacaggtgcctcacgcctgtaatcccagcactttgggaggctgagctggatcacttgagttcaggagttggagaccaggcctgagcaacaaagcgagatcccatctctacaaaaaccaaaaagttaaaaatcagctgggtacggtggcacgtgcctgtgatcccagctacttgggaggctgaggcaggaggatcgcctgagcccaggaggtggaggttgcagtgagccatgatcgagccactgcactccagcctgggcaacagatgaagaccctatttcagaaatacaactataaaaaaataaataaatcctccagtctggatcgtttgacgggacttcaggttctttctgaaatcgccgtgttactgttgcactgatgtccggagagacagtgacagcctccgtcagactcccgcgtgaagatgtcacaagggattggcaattgtccccagggacaaaacactgtgtcccccccagtgcagggaaccgtgataagcctttctggtttcggagcacgtaaatgcgtccctgtacagatagtggggattttttgttatgtttgcactttgtatattggttgaaactgttatcacttatatatatatatacacacatatatataaaatctatttatttttgcaaaccctggttgctgtatttgttcagtgactattctcggggccctgtgtagggggttattgcctctgaaatgcctcttctttatgtacaaagattatttgcacgaactggactgtgtgcaacgctttttgggagaatgatgtccccgttgtatgtatgagtggcttctgggagatgggtgtcactttttaaaccactgtatagaaggtttttgtagcctgaatgtcttactgtgatcaattaaatttcttaaatgaaccaaaaaaaaaaaactc

SEQ ID NO: 454592 - DNA, 920 bp, Homo sapiens
gacgtgggccccgagtgcaatcgcgggaagccagggtttccagctaggacacagcaggtcgtgatccgggtcgggacactgcctggcagaggctgcgagcatggggccctggggctggaaattgcgctggaccgtcgccttgctcctcgccgcggcggggactgcagtgggcgacagatgcgaaagaaacgagttccagtgccaagacgggaaatgcatctcctacaagtgggtctgcgatggcagcgctgagtgccaggatggctctgatgagtcccaggagacgtgcttgtctgtcacctgcaaatccggggacttcagctgtgggggccgtgtcaaccgctgcattcctcagttctggaggtgcgatggccaagtggactgcgacaacggctcagacgagcaaggctgtcgtaagtgtggccctgcctttgctattgagcctatctgagtcctggggagtggtctgactttgtctctacggggtcctgctcgagctgcaaggcagctgccccgaactgggctccatctcttgggggctcataccaagcctcttccgcccttcaaatccccccttgaccaggaggcattacaaagtggggatggtgctacctcttcgggtttgtcacgcacagtcagggaggctgtccctgccgagggctagccacctggcacacacactggcaagccgctgtgattcccgctggtcgtgatccccgtgatcctgtgatccccgccccgtgaggctgaacacatagtgacgcttgctagccaagcctcaatgacccacgtaacatgaagggggaaaagccagaaagttctgccaaggagcaaggccaagaatcccgaagggaaatggactttgaagctgggcgtcttcttggctgtcttaatacaagtggcacatccaaatccaaaac

SEQ ID NO: 454593 - DNA, 5145 bp, Homo sapiens
gacgtgggccccgagtgcaatcgcgggaagccagggtttccagctaggacacagcaggtcgtgatccgggtcgggacactgcctggcagaggctgcgagcatggggccctggggctggaaattgcgctggaccgtcgccttgctcctcgccgcggcggggactgcagtgggcgacagatgcgaaagaaacgagttccagtgccaagacgggaaatgcatctcctacaagtgggtctgcgatggcagcgctgagtgccaggatggctctgatgagtcccaggagacgtgcttgtctgtcacctgcaaatccggggacttcagctgtgggggccgtgtcaaccgctgcattcctcagttctggaggtgcgatggccaagtggactgcgacaacggctcagacgagcaaggctgtccccccaagacgtgctcccaggacgagtttcgctgccacgatgggaagtgcatctctcggcagttcgtctgtgactcagaccgggactgcttggacggctcagacgaggcctcctgcccggtgctcacctgtggtcccgccagcttccagtgcaacagctccacctgcatcccccagctgtgggcctgcgacaacgaccccgactgcgaagatggctcggatgagtggccgcagcgctgtaggggtctttacgtgttccaaggggacagtagcccctgctcggccttcgagttccactgcctaagtggcgagtgcatccactccagctggcgctgtgatggtggccccgactgcaaggacaaatctgacgaggaaaactgcgctgtggccacctgtcgccctgacgaattccagtgctctgatggaaactgcatccatggcagccggcagtgtgaccgggaatatgactgcaaggacatgagcgatgaagttggctgcgttaatgtgacactctgcgagggacccaacaagttcaagtgtcacagcggcgaatgcatcaccctggacaaagtctgcaacatggctagagactgccgggactggtcagatgaacccatcaaagagtgcgggaccaacgaatgcttggacaacaacggcggctgttcccacgtctgcaatgaccttaagatcggctacgagtgcctgtgccccgacggcttccagctggtggcccagcgaagatgcgaagatatcgatgagtgtcaggatcccgacacctgcagccagctctgcgtgaacctggagggtggctacaagtgccagtgtgaggaaggcttccagctggacccccacacgaaggcctgcaaggctgtgggctccatcgcctacctcttcttcaccaaccggcacgaggtcaggaagatgacgctggaccggagcgagtacaccagcctcatccccaacctgaggaacgtggtcgctctggacacggaggtggccagcaatagaatctactggtctgacctgtcccagagaatgatctgcagcacccagcttgacagagcccacggcgtctcttcctatgacaccgtcatcagcagggacatccaggcccccgacgggctggctgtggactggatccacagcaacatctactggaccgactctgtcctgggcactgtctctgttgcggataccaagggcgtgaagaggaaaacgttattcagggagaacggctccaagccaagggccatcgtggtggatcctgttcatggcttcatgtactggactgactggggaactcccgccaagatcaagaaagggggcctgaatggtgtggacatctactcgctggtgactgaaaacattcagtggcccaatggcatcaccctagatctcctcagtggccgcctctactgggttgactccaaacttcactccatctcaagcatcgatgtcaatgggggcaaccggaagaccatcttggaggatgaaaagaggctggcccaccccttctccttggccgtctttgaggacaaagtattttggacagatatcatcaacgaagccattttcagtgccaaccgcctcacaggttccgatgtcaacttgttggctgaaaacctactgtccccagaggatatggtcctcttccacaacctcacccagccaagaggagtgaactggtgtgagaggaccaccctgagcaatggcggctgccagtatctgtgcctccctgccccgcagatcaacccccactcgcccaagtttacctgcgcctgcccggacggcatgctgctggccagggacatgaggagctgcctcacagaggctgaggctgcagtggccacccaggagacatccaccgtcaggctaaaggtcagctccacagccgtaaggacacagcacacaaccacccggcctgttcccgacacctcccggctgcctggggccacccctgggctcaccacggtggagatagtgacaatgtctcaccaagctctgggcgacgttgctggcagaggaaatgagaagaagcccagtagcgtgagggctctgtccattgtcctccccatcgtgctcctcgtcttcctttgcctgggggtcttccttctatggaagaactggcggcttaagaacatcaacagcatcaactttgacaaccccgtctatcagaagaccacagaggatgaggtccacatttgccacaaccaggacggctacagctacccctcgagacagatggtcagtctggaggatgacgtggcgtgaacatctgcctggagtcccgtccctgcccagaacccttcctgagacctcgccggccttgttttattcaaagacagagaagaccaaagcattgcctgccagagctttgttttatatatttattcatctgggaggcagaacaggcttcggacagtgcccatgcaatggcttgggttgggattttggtttcttcctttcctcgtgaaggataagagaaacaggcccggggggaccaggatgacacctccatttctctccaggaagttttgagtttctctccaccgtgacacaatcctcaaacatggaagatgaaagggcaggggatgtcaggcccagagaagcaagtggctttcaacacacaacagcagatggcaccaacgggaccccctggccctgcctcatccaccaatctctaagccaaacccctaaactcaggagtcaacgtgtttacctcttctatgcaagccttgctagacagccaggttagcctttgccctgtcacccccgaatcatgacccacccagtgtctttcgaggtgggtttgtaccttccttaagccaggaaagggattcatggcgtcggaaatgatctggctgaatccgtggtggcaccgagaccaaactcattcaccaaatgatgccacttcccagaggcagagcctgagtcaccggtcacccttaatatttattaagtgcctgagacacccggttaccttggccgtgaggacacgtggcctgcacccaggtgtggctgtcaggacaccagcctggtgcccatcctcccgacccctacccacttccattcccgtggtctccttgcactttctcagttcagagttgtacactgtgtacatttggcatttgtgttattattttgcactgttttctgtcgtgtgtgttgggatgggatcccaggccagggaaagcccgtgtcaatgaatgccggggacagagaggggcaggttgaccgggacttcaaagccgtgatcgtgaatatcgagaactgccattgtcgtctttatgtccgcccacctagtgcttccacttctatgcaaatgcctccaagccattcacttccccaatcttgtcgttgatgggtatgtgtttaaaacatgcacggtgaggccgggcgcagtggctcacgcctgtaatcccagcactttgggaggccgaggcgggtggatcatgaggtcaggagatcgagaccatcctggctaacaaggtgaaaccccgtctctactaaaaatacaagaggcaggagaatggtgtgaacccgggaagcggagcttgcagtgagccgagattgcgccactgcagtccgcagtctggcctgggcgacagagcgagactccgtctcaaaaaaaaaaaacaaaaaaaaaccatgcatggtgcatcagcagcccatggcctctggccaggcatggcgaggctgaggtgggaggatggtttgagctcaggcatttgaggctgtcgtgagctatgattatgccactgctttccagcctgggcaacatagtaagaccccatctcttaaaaaatgaatttggccagacacaggtgcctcacgcctgtaatcccagcactttgggaggctgagctggatcacttgagttcaggagttggagaccaggcctgagcaacaaagcgagatcccatctctacaaaaaccaaaaagttaaaaatcagctgggtacggtggcacgtgcctgtgatcccagctacttgggaggctgaggcaggaggatcgcctgagcccaggaggtggaggttgcagtgagccatgatcgagccactgcactccagcctgggcaacagatgaagaccctatttcagaaatacaactataaaaaaataaataaatcctccagtctggatcgtttgacgggacttcaggttctttctgaaatcgccgtgttactgttgcactgatgtccggagagacagtgacagcctccgtcagactcccgcgtgaagatgtcacaagggattggcaattgtccccagggacaaaacactgtgtcccccccagtgcagggaaccgtgataagcctttctggtttcggagcacgtaaatgcgtccctgtacagatagtggggattttttgttatgtttgcactttgtatattggttgaaactgttatcacttatatatatatatacacacatatatataaaatctatttatttttgcaaaccctggttgctgtatttgttcagtgactattctcggggccctgtgtagggggttattgcctctgaaatgcctcttctttatgtacaaagattatttgcacgaactggactgtgtgcaacgctttttgggagaatgatgtccccgttgtatgtatgagtggcttctgggagatgggtgtcactttttaaaccactgtatagaaggtttttgtagcctgaatgtcttactgtgatcaattaaatttcttaaatgaaccaaaaaaaaaaaactc

SEQ ID NO: 454594 - DNA, 4362 bp, Homo sapiens
gaggacgggagcggttaaccatcgggagggggaccagagtgccccacactaggcacgctagttcactgtcactgcacagctgactcggagcatctgtgggcttaatacaacacccgccagctaccggttctgtgggtcggggcctgaatgtaacatggctagagactgccgggactggtcagatgaacccatcaaagagtgcgggaccaacgaatgcttggacaacaacggcggctgttcccacgtctgcaatgaccttaagatcggctacgagtgcctgtgccccgacggcttccagctggtggcccagcgaagatgcgaagatatcgatgagtgtcaggatcccgacacctgcagccagctctgcgtgaacctggagggtggctacaagtgccagtgtgaggaaggcttccagctggacccccacacgaaggcctgcaaggctgtgggctccatcgcctacctcttcttcaccaaccggcacgaggtcaggaagatgacgctggaccggagcgagtacaccagcctcatccccaacctgaggaacgtggtcgctctggacacggaggtggccagcaatagaatctactggtctgacctgtcccagagaatgatctgcagcacccagcttgacagagcccacggcgtctcttcctatgacaccgtcatcagcagggacatccaggcccccgacgggctggctgtggactggatccacagcaacatctactggaccgactctgtcctgggcactgtctctgttgcggataccaagggcgtgaagaggaaaacgttattcagggagaacggctccaagccaagggccatcgtggtggatcctgttcatggcttcatgtactggactgactggggaactcccgccaagatcaagaaagggggcctgaatggtgtggacatctactcgctggtgactgaaaacattcagtggcccaatggcatcaccctagatctcctcagtggccgcctctactgggttgactccaaacttcactccatctcaagcatcgatgtcaatgggggcaaccggaagaccatcttggaggatgaaaagaggctggcccaccccttctccttggccgtctttgaggacaaagtattttggacagatatcatcaacgaagccattttcagtgccaaccgcctcacaggttccgatgtcaacttgttggctgaaaacctactgtccccagaggatatggtcctcttccacaacctcacccagccaagaggagtgaactggtgtgagaggaccaccctgagcaatggcggctgccagtatctgtgcctccctgccccgcagatcaacccccactcgcccaagtttacctgcgcctgcccggacggcatgctgctggccagggacatgaggagctgcctcacagaggctgaggctgcagtggccacccaggagacatccaccgtcaggctaaaggtcagctccacagccgtaaggacacagcacacaaccacccggcctgttcccgacacctcccggctgcctggggccacccctgggctcaccacggtggagatagtgacaatgtctcaccaagctctgggcgacgttgctggcagaggaaatgagaagaagcccagtagcgtgagggctctgtccattgtcctccccatcgtgctcctcgtcttcctttgcctgggggtcttccttctatggaagaactggcggcttaagaacatcaacagcatcaactttgacaaccccgtctatcagaagaccacagaggatgaggtccacatttgccacaaccaggacggctacagctacccctcgagacagatggtcagtctggaggatgacgtggcgtgaacatctgcctggagtcccgtccctgcccagaacccttcctgagacctcgccggccttgttttattcaaagacagagaagaccaaagcattgcctgccagagctttgttttatatatttattcatctgggaggcagaacaggcttcggacagtgcccatgcaatggcttgggttgggattttggtttcttcctttcctcgtgaaggataagagaaacaggcccggggggaccaggatgacacctccatttctctccaggaagttttgagtttctctccaccgtgacacaatcctcaaacatggaagatgaaagggcaggggatgtcaggcccagagaagcaagtggctttcaacacacaacagcagatggcaccaacgggaccccctggccctgcctcatccaccaatctctaagccaaacccctaaactcaggagtcaacgtgtttacctcttctatgcaagccttgctagacagccaggttagcctttgccctgtcacccccgaatcatgacccacccagtgtctttcgaggtgggtttgtaccttccttaagccaggaaagggattcatggcgtcggaaatgatctggctgaatccgtggtggcaccgagaccaaactcattcaccaaatgatgccacttcccagaggcagagcctgagtcaccggtcacccttaatatttattaagtgcctgagacacccggttaccttggccgtgaggacacgtggcctgcacccaggtgtggctgtcaggacaccagcctggtgcccatcctcccgacccctacccacttccattcccgtggtctccttgcactttctcagttcagagttgtacactgtgtacatttggcatttgtgttattattttgcactgttttctgtcgtgtgtgttgggatgggatcccaggccagggaaagcccgtgtcaatgaatgccggggacagagaggggcaggttgaccgggacttcaaagccgtgatcgtgaatatcgagaactgccattgtcgtctttatgtccgcccacctagtgcttccacttctatgcaaatgcctccaagccattcacttccccaatcttgtcgttgatgggtatgtgtttaaaacatgcacggtgaggccgggcgcagtggctcacgcctgtaatcccagcactttgggaggccgaggcgggtggatcatgaggtcaggagatcgagaccatcctggctaacaaggtgaaaccccgtctctactaaaaatacaaaaaattagccgggcgcggtggcgggcacctgtagtcccagctactcgggaggctgaggcaggagaatggtgtgaacccgggaagcggagcttgcagtgagccgagattgcgccactgcagtccgcagtctggcctgggcgacagagcgagactccgtctcaaaaaaaaaaaacaaaaaaaaaccatgcatggtgcatcagcagcccatggcctctggccaggcatggcgaggctgaggtgggaggatggtttgagctcaggcatttgaggctgtcgtgagctatgattatgccactgctttccagcctgggcaacatagtaagaccccatctcttaaaaaatgaatttggccagacacaggtgcctcacgcctgtaatcccagcactttgggaggctgagctggatcacttgagttcaggagttggagaccaggcctgagcaacaaagcgagatcccatctctacaaaaaccaaaaagttaaaaatcagctgggtacggtggcacgtgcctgtgatcccagctacttgggaggctgaggcaggaggatcgcctgagcccaggaggtggaggttgcagtgagccatgatcgagccactgcactccagcctgggcaacagatgaagaccctatttcagaaatacaactataaaaaaataaataaatcctccagtctggatcgtttgacgggacttcaggttctttctgaaatcgccgtgttactgttgcactgatgtccggagagacagtgacagcctccgtcagactcccgcgtgaagatgtcacaagggattggcaattgtccccagggacaaaacactgtgtcccccccagtgcagggaaccgtgataagcctttctggtttcggagcacgtaaatgcgtccctgtacagatagtggggattttttgttatgtttgcactttgtatattggttgaaactgttatcacttatatatatatatacacacatatatataaaatctatttatttttgcaaaccctggttgctgtatttgttcagtgactattctcggggccctgtgtagggggttattgcctctgaaatgcctcttctttatgtacaaagattatttgcacgaactggactgtgtgcaacgctttttgggagaatgatgtccccgttgtatgtatgagtggcttctgggagatgggtgtcactttttaaaccactgtatagaaggtttttgtagcctgaatgtcttactgtgatcaattaaatttcttaaatgaaccaaaaaaaaaaaactc

SEQ ID NO: 454595 - DNA, 4271 bp, Homo sapiens
gacgtgggccccgagtgcaatcgcgggaagccagggtttccagctaggacacagcaggtcgtgatccgggtcgggacactgcctggcagaggctgcgagcatggggccctggggctggaaattgcgctggaccgtcgccttgctcctcgccgcggcggggactgcagtgggcgacagatgcgaaagaaacgagttccagtgccaagacgggaaatgcatctcctacaagtgggtctgcgatggcagcgctgagtgccaggatggctctgatgagtcccaggagacgtgcttgtctgtcacctgcaaatccggggacttcagctgtgggggccgtgtcaaccgctgcattcctcagttctggaggtgcgatggccaagtggactgcgacaacggctcagacgagcaaggctgtccccccaagacgtgctcccaggacgagtttcgctgccacgatgggaagtgcatctctcggcagttcgtctgtgactcagaccgggactgcttggacggctcagacgaggcctcctgcccggtgctcacctgtggtcccgccagcttccagtgcaacagctccacctgcatcccccagctgtgggcctgcgacaacgaccccgactgcgaagatggctcggatgagtggccgcagcgctgtaggggtctttacgtgttccaaggggacagtagcccctgctcggccttcgagttccactgcctaagtggcgagtgcatccactccagctggcgctgtgatggtggccccgactgcaaggacaaatctgacgaggaaaactgcgctgtggccacctgtcgccctgacgaattccagtgctctgatggaaactgcatccatggcagccggcagtgtgaccgggaatatgactgcaaggacatgagcgatgaagttggctgcgttaatgtgacactctgcgagggacccaacaagttcaagtgtcacagcggcgaatgcatcaccctggacaaagtctgcaacatggctagagactgccgggactggtcagatgaacccatcaaagagtgcgggaccaacgaatgcttggacaacaacggcggctgttcccacgtctgcaatgaccttaagatcggctacgagtgcctgtgccccgacggcttccagctggtggcccagcgaagatgcgaagatatcgatgagtgtcaggatcccgacacctgcagccagctctgcgtgaacctggagggtggctacaagtgccagtgtgaggaaggcttccagctggacccccacacgaaggcctgcaaggctgtgggctccatcgcctacctcttcttcaccaaccggcacgaggtcaggaagatgacgctggaccggagcgagtacaccagcctcatccccaacctgaggaacgtggtcgctctggacacggaggtggccagcaatagaatctactggtctgacctgtcccagagaatgatctgcagcacccagcttgacagagcccacggcgtctcttcctatgacaccgtcatcagcagggacatccaggcccccgacgggctggctgtggactggatccacagcaacatctactggaccgactctgtcctgggcactgtctctgttgcggataccaagggcgtgaagaggaaaacgttattcagggagaacggctccaagccaagggccatcgtggtggatcctgttcatggcttcatgtactggactgactggggaactcccgccaagatcaagaaagggggcctgaatggtgtggacatctactcgctggtgactgaaaacattcagtggcccaatggcatcaccctagatctcctcagtggccgcctctactgggttgactccaaacttcactccatctcaagcatcgatgtcaatgggggcaaccggaagaccatcttggaggatgaaaagaggctggcccaccccttctccttggccgtctttgaggacaaagtattttggacagatatcatcaacgaagccattttcagtgccaaccgcctcacaggttccgatgtcaacttgttggctgaaaacctactgtccccagaggatatggtcctcttccacaacctcacccagccaagaggagtgaactggtgtgagaggaccaccctgagcaatggcggctgccagtatctgtgcctccctgccccgcagatcaacccccactcgcccaagtttacctgcgcctgcccggacggcatgctgctggccagggacatgaggagctgcctcacagaggctgaggctgcagtggccacccaggagacatccaccgtcaggctaaaggtcagctccacagccgtaaggacacagcacacaaccacccggcctgttcccgacacctcccggctgcctggggccacccctgggctcaccacggtggagatagtgacaatgtctcaccaagctctgggcgacgttgctggcagaggaaatgagaagaagcccagtagcgtgagggctctgtccattgtcctccccatcgtgctcctcgtcttcctttgcctgggggtcttccttctatggaagaactggcggcttaagaacatcaacagcatcaactttgacaaccccgtctatcagaagaccacagaggatgaggtccacatttgccacaaccaggacggctacagctacccctcgagacagatggtcagtctggaggatgacgtggcgtgaacatctgcctggagtcccgtccctgcccagaacccttcctgagacctcgccggccttgttttattcaaagacagagaagaccaaagcattgcctgccagagctttgttttatatatttattcatctgggaggcagaacaggcttcggacagtgcccatgcaatggcttgggttgggattttggtttcttcctttcctcgtgaaggataagagaaacaggcccggggggaccaggatgacacctccatttctctccaggaagttttgagtttctctccaccgtgacacaatcctcaaacatggaagatgaaagggcaggggatgtcaggcccagagaagcaagtggctttcaacacacaacagcagatggcaccaacgggaccccctggccctgcctcatccaccaatctctaagccaaacccctaaactcaggagtcaacgtgtttacctcttctatgcaagccttgctagacagccaggttagcctttgccctgtcacccccgaatcatgacccacccagtgtctttcgaggtgggtttgtaccttccttaagccaggaaagggattcatggcgtcggaaatgatctggctgaatccgtggtggcaccgagaccaaactcattcaccaaatgatgccacttcccagaggcagagcctgagtcaccggtcacccttaatatttattaagtgcctgagacacccggttaccttggccgtgaggacacgtggcctgcacccaggtgtggctgtcaggacaccagcctggtgcccatcctcccgacccctacccacttccattcccgtggtctccttgcactttctcagttcagagttgtacactgtgtacatttggcatttgtgttattattttgcactgttttctgtcgtgtgtgttgggatgggatcccaggccagggaaagcccgtgtcaatgaatgccggggacagagaggggcaggttgaccgggacttcaaagccgtgatcgtgaatatcgagaactgccattgtcgtctttatgtccgcccacctagtgcttccacttctatgcaaatgcctccaagccattcacttccccaatcttgtcgttgatgggtatgtgtttaaaacatgcacggtgaggccgggcgcagtggctcacgcctgtaatcccagcactttgggaggccgaggcgggtggatcatgaggtcaggagatcgagaccatcctggctaacaaggtgaaaccccgtctctactaaaaatacaaaaaattagccgggcgcggtggcgggcacctgtagtcccagctactcgggaggctgaggcaggagaatggtgtgaacccgggaagcggagcttgcagtgagccgagattgcgccactgtactccagcctgggcaacaaaagtgaaactctgtctgaaacaaacaaacaaacaaacaaacagacaaacaaaaaaactagttgtggagagagggtggcctgtgtctcatcccagtgtttaacgggatttgtcatcttccttgctgcctgtttaggacaaagtattttggacagatatcatcaacgaagccattttcagtacaactgcggtgggggtaggagctc

SEQ ID NO: 454596 - DNA, 3361 bp, Homo sapiens
ccaaaaccaaaagggaaaaacaaaaaaactagttgtggagagagggtggcctgtgtctcatcgccagtgtttaacgggatttgtcatcttccttgctgcctgtttaggacaaagtattttggacagatatcatcaacgaagccattttcagtgccaaccgcctcacaggttccgatgtcaacttgttggctgaaaacctactgtccccagaggatatggtcctcttccacaacctcacccagccaagaggagtgaactggtgtgagaggaccaccctgagcaatggcggctgccagtatctgtgcctccctgccccgcagatcaacccccactcgcccaagtttacctgcgcctgcccggacggcatgctgctggccagggacatgaggagctgcctcacagaggctgaggctgcagtggccacccaggagacatccaccgtcaggctaaaggtcagctccacagccgtaaggacacagcacacaaccacccggcctgttcccgacacctcccggctgcctggggccacccctgggctcaccacggtggagatagtgacaatgtctcaccaagctctgggcgacgttgctggcagaggaaatgagaagaagcccagtagcgtgagggctctgtccattgtcctccccatcgtgctcctcgtcttcctttgcctgggggtcttccttctatggaagaactggcggcttaagaacatcaacagcatcaactttgacaaccccgtctatcagaagaccacagaggatgaggtccacatttgccacaaccaggacggctacagctacccctcgagacagatggtcagtctggaggatgacgtggcgtgaacatctgcctggagtcccgtccctgcccagaacccttcctgagacctcgccggccttgttttattcaaagacagagaagaccaaagcattgcctgccagagctttgttttatatatttattcatctgggaggcagaacaggcttcggacagtgcccatgcaatggcttgggttgggattttggtttcttcctttcctcgtgaaggataagagaaacaggcccggggggaccaggatgacacctccatttctctccaggaagttttgagtttctctccaccgtgacacaatcctcaaacatggaagatgaaagggcaggggatgtcaggcccagagaagcaagtggctttcaacacacaacagcagatggcaccaacgggaccccctggccctgcctcatccaccaatctctaagccaaacccctaaactcaggagtcaacgtgtttacctcttctatgcaagccttgctagacagccaggttagcctttgccctgtcacccccgaatcatgacccacccagtgtctttcgaggtgggtttgtaccttccttaagccaggaaagggattcatggcgtcggaaatgatctggctgaatccgtggtggcaccgagaccaaactcattcaccaaatgatgccacttcccagaggcagagcctgagtcaccggtcacccttaatatttattaagtgcctgagacacccggttaccttggccgtgaggacacgtggcctgcacccaggtgtggctgtcaggacaccagcctggtgcccatcctcccgacccctacccacttccattcccgtggtctccttgcactttctcagttcagagttgtacactgtgtacatttggcatttgtgttattattttgcactgttttctgtcgtgtgtgttgggatgggatcccaggccagggaaagcccgtgtcaatgaatgccggggacagagaggggcaggttgaccgggacttcaaagccgtgatcgtgaatatcgagaactgccattgtcgtctttatgtccgcccacctagtgcttccacttctatgcaaatgcctccaagccattcacttccccaatcttgtcgttgatgggtatgtgtttaaaacatgcacggtgaggccgggcgcagtggctcacgcctgtaatcccagcactttgggaggccgaggcgggtggatcatgaggtcaggagatcgagaccatcctggctaacaaggtgaaaccccgtctctactaaaaatacaaaaaattagccgggcgcggtggcgggcacctgtagtcccagctactcgggaggctgaggcaggagaatggtgtgaacccgggaagcggagcttgcagtgagccgagattgcgccactgcagtccgcagtctggcctgggcgacagagcgagactccgtctcaaaaaaaaaaaacaaaaaaaaaccatgcatggtgcatcagcagcccatggcctctggccaggcatggcgaggctgaggtgggaggatggtttgagctcaggcatttgaggctgtcgtgagctatgattatgccactgctttccagcctgggcaacatagtaagaccccatctcttaaaaaatgaatttggccagacacaggtgcctcacgcctgtaatcccagcactttgggaggctgagctggatcacttgagttcaggagttggagaccaggcctgagcaacaaagcgagatcccatctctacaaaaaccaaaaagttaaaaatcagctgggtacggtggcacgtgcctgtgatcccagctacttgggaggctgaggcaggaggatcgcctgagcccaggaggtggaggttgcagtgagccatgatcgagccactgcactccagcctgggcaacagatgaagaccctatttcagaaatacaactataaaaaaataaataaatcctccagtctggatcgtttgacgggacttcaggttctttctgaaatcgccgtgttactgttgcactgatgtccggagagacagtgacagcctccgtcagactcccgcgtgaagatgtcacaagggattggcaattgtccccagggacaaaacactgtgtcccccccagtgcagggaaccgtgataagcctttctggtttcggagcacgtaaatgcgtccctgtacagatagtggggattttttgttatgtttgcactttgtatattggttgaaactgttatcacttatatatatatatacacacatatatataaaatctatttatttttgcaaaccctggttgctgtatttgttcagtgactattctcggggccctgtgtagggggttattgcctctgaaatgcctcttctttatgtacaaagattatttgcacgaactggactgtgtgcaacgctttttgggagaatgatgtccccgttgtatgtatgagtggcttctgggagatgggtgtcactttttaaaccactgtatagaaggtttttgtagcctgaatgtcttactgtgatcaattaaatttcttaaatgaaccaaaaaaaaaaaactc

SEQ ID NO: 454597 - DNA, 1857 bp, Homo sapiens
aagcgcccttcagccggctccgcactccagtcccctggtctccgacacacgtactcaccgaccgagtcggggaggcttctccccgcatgcaccatcatccgggcctggtgcccatcctcccgacccctacccacttccattcccgtggtctccttgcactttctcagttcagagttgtacactgtgtacatttggcatttgtgttattattttgcactgttttctgtcgtgtgtgttgggatgggatcccaggccagggaaagcccgtgtcaatgaatgccggggacagagaggggcaggttgaccgggacttcaaagccgtgatcgtgaatatcgagaactgccattgtcgtctttatgtccgcccacctagtgcttccacttctatgcaaatgcctccaagccattcacttccccaatcttgtcgttgatgggtatgtgtttaaaacatgcacggtgaggccgggcgcagtggctcacgcctgtaatcccagcactttgggaggccgaggcgggtggatcatgaggtcaggagatcgagaccatcctggctaacaaggtgaaaccccgtctctactaaaaatacaaaaaattagccgggcgcggtggcgggcacctgtagtcccagctactcgggaggctgaggcaggagaatggtgtgaacccgggaagcggagcttgcagtgagccgagattgcgccactgcagtccgcagtctggcctgggcgacagagcgagactccgtctcaaaaaaaaaaaacaaaaaaaaaccatgcatggtgcatcagcagcccatggcctctggccaggcatggcgaggctgaggtgggaggatggtttgagctcaggcatttgaggctgtcgtgagctatgattatgccactgctttccagcctgggcaacatagtaagaccccatctcttaaaaaatgaatttggccagacacaggtgcctcacgcctgtaatcccagcactttgggaggctgagctggatcacttgagttcaggagttggagaccaggcctgagcaacaaagcgagatcccatctctacaaaaaccaaaaagttaaaaatcagctgggtacggtggcacgtgcctgtgatcccagctacttgggaggctgaggcaggaggatcgcctgagcccaggaggtggaggttgcagtgagccatgatcgagccactgcactccagcctgggcaacagatgaagaccctatttcagaaatacaactataaaaaaataaataaatcctccagtctggatcgtttgacgggacttcaggttctttctgaaatcgccgtgttactgttgcactgatgtccggagagacagtgacagcctccgtcagactcccgcgtgaagatgtcacaagggattggcaattgtccccagggacaaaacactgtgtcccccccagtgcagggaaccgtgataagcctttctggtttcggagcacgtaaatgcgtccctgtacagatagtggggattttttgttatgtttgcactttgtatattggttgaaactgttatcacttatatatatatatacacacatatatataaaatctatttatttttgcaaaccctggttgctgtatttgttcagtgactattctcggggccctgtgtagggggttattgcctctgaaatgcctcttctttatgtacaaagattatttgcacgaactggactgtgtgcaacgctttttgggagaatgatgtccccgttgtatgtatgagtggcttctgggagatgggtgtcactttttaaaccactgtatagaaggtttttgtagcctgaatgtcttactgtgatcaattaaatttcttaaatgaaccaaaaaaaaaaaactc

SEQ ID NO: 454598 - DNA, 3568 bp, Homo sapiens
  misc_feature (3442)..(3442): n is a, c, g, or t
gacgtgggccccgagtgcaatcgcgggaagccagggtttccagctaggacacagcaggtcgtgatccgggtcgggacactgcctggcagaggctgcgagcatggggccctggggctggaaattgcgctggaccgtcgccttgctcctcgccgcggcggggactgcagtgggcgacagatgcgaaagaaacgagttccagtgccaagacgggaaatgcatctcctacaagtgggtctgcgatggcagcgctgagtgccaggatggctctgatgagtcccaggagacgtgcttgtctgtcacctgcaaatccggggacttcagctgtgggggccgtgtcaaccgctgcattcctcagttctggaggtgcgatggccaagtggactgcgacaacggctcagacgagcaaggctgtccccccaagacgtgctcccaggacgagtttcgctgccacgatgggaagtgcatctctcggcagttcgtctgtgactcagaccgggactgcttggacggctcagacgaggcctcctgcccggtgctcacctgtggtcccgccagcttccagtgcaacagctccacctgcatcccccagctgtgggcctgcgacaacgaccccgactgcgaagatggctcggatgagtggccgcagcgctgtaggggtctttacgtgttccaaggggacagtagcccctgctcggccttcgagttccactgcctaagtggcgagtgcatccactccagctggcgctgtgatggtggccccgactgcaaggacaaatctgacgaggaaaactgcgctgtggccacctgtcgccctgacgaattccagtgctctgatggaaactgcatccatggcagccggcagtgtgaccgggaatatgactgcaaggacatgagcgatgaagttggctgcgttaatgtgacactctgcgagggacccaacaagttcaagtgtcacagcggcgaatgcatcaccctggacaaagtctgcaacatggctagagactgccgggactggtcagatgaacccatcaaagagtgcgggaccaacgaatgcttggacaacaacggcggctgttcccacgtctgcaatgaccttaagatcggctacgagtgcctgtgccccgacggcttccagctggtggcccagcgaagatgcgaagatatcgatgagtgtcaggatcccgacacctgcagccagctctgcgtgaacctggagggtggctacaagtgccagtgtgaggaaggcttccagctggacccccacacgaaggcctgcaaggctgtgggctccatcgcctacctcttcttcaccaaccggcacgaggtcaggaagatgacgctggaccggagcgagtacaccagcctcatccccaacctgaggaacgtggtcgctctggacacggaggtggccagcaatagaatctactggtctgacctgtcccagagaatgatctgcagcacccagcttgacagagcccacggcgtctcttcctatgacaccgtcatcagcagggacatccaggcccccgacgggctggctgtggactggatccacagcaacatctactggaccgactctgtcctgggcactgtctctgttgcggataccaagggcgtgaagaggaaaacgttattcagggagaacggctccaagccaagggccatcgtggtggatcctgttcatggcttcatgtactggactgactggggaactcccgccaagatcaagaaagggggcctgaatggtgtggacatctactcgctggtgactgaaaacattcagtggcccaatggcatcaccctagatctcctcagtggccgcctctactgggttgactccaaacttcactccatctcaagcatcgatgtcaatgggggcaaccggaagaccatcttggaggatgaaaagaggctggcccaccccttctccttggccgtctttgaggacaaagtattttggacagatatcatcaacgaagccattttcagtgccaaccgcctcacaggttccgatgtcaacttgttggctgaaaacctactgtccccagaggatatggtcctcttccacaacctcacccagccaagaggagtgaactggtgtgagaggaccaccctgagcaatggcggctgccagtatctgtgcctccctgccccgcagatcaacccccactcgcccaagtttacctgcgcctgcccggacggcatgctgctggccagggacatgaggagctgcctcacagaggctgaggctgcagtggccacccaggagacatccaccgtcaggctaaaggtcagctccacagccgtaaggacacagcacacaaccacccggcctgttcccgacacctcccggctgcctggggccacccctgggctcaccacggtggagatagtgacaatgtctcaccaagctctgggcgacgttgctggcagaggaaatgagaagaagcccagtagcgtgagggctctgtccattgtcctccccatcgtgctcctcgtcttcctttgcctgggggtcttccttctatggaagaactggcggcttaagaacatcaacagcatcaactttgacaaccccgtctatcagaagaccacagaggatgaggtccacatttgccacaaccaggacggctacagctacccctcggtgagtgaccctctctagaaagccagagcccatggcggccccctcccagctggaggcatatgatcctcaagggaccaggccgaggcttccccagccctccagatcgaggacagcattaggtgaatgcttctgtgcgctcattcagaatgtcagcggacaatggccttggtggtgtagaggaatgttggataagcaaatagagagctccatcagatggtgacagggcaaagaaagtcaaaaggagttcagaggccgggcgcggtggctcatgcctgtaatcccaggactttgggaggccgaggctggcggatcacctgaagtcaggagtttgagaccagcttggccatcatgacaaaaccccgtctctattaaaaatacaaaaaattagccaggcgtgggagtgggcgcctgtaatcccagctactcgggaggccgaggtagaaaaatcgcttgaacctaggaggcagaggttgcagtgagccgagatcgcgccactgcattccagcccgggaggcaagagcaaaactccatctcaaaaaaaaatagacatacaacaggggttctcatgagtgcccggcttggttggttccactccttgttgaccccagaaattctcggggggttgaacgccggcgagattcccctgagtctcctgcagtccaagaccagccctggtcaggctgcagtaagaccccgtctcgtgctgttctgtcattttaccccgggtgtgtgtgttcagcgccttagttcccagctactagggagggcctaggccggaggcatggcctgaggcanagggtggacattgaagatttcagctgactgtgatggcgtcactggccccgccgtgtgacacaccagcgcttttccttacccaaacaccccccgaaggttctcggggcggccgcggcgcccaggtca

SEQ ID NO: 454599 - DNA, 2134 bp, Homo sapiens
gacgtgggccccgagtgcaatcgcgggaagccagggtttccagctaggacacagcaggtcgtgatccgggtcgggacactgcctggcagaggctgcgagcatggggccctggggctggaaattgcgctggaccgtcgccttgctcctcgccgcggcggggactgcagtgggcgacagatgcgaaagaaacgagttccagtgccaagacgggaaatgcatctcctacaagtgggtctgcgatggcagcgctgagtgccaggatggctctgatgagtcccaggagacgtgcttgtctgtcacctgcaaatccggggacttcagctgtgggggccgtgtcaaccgctgcattcctcagttctggaggtgcgatggccaagtggactgcgacaacggctcagacgagcaaggctgtccccccaagacgtgctcccaggacgagtttcgctgccacgatgggaagtgcatctctcggcagttcgtctgtgactcagaccgggactgcttggacggctcagacgaggcctcctgcccggtgctcacctgtggtcccgccagcttccagtgcaacagctccacctgcatcccccagctgtgggcctgcgacaacgaccccgactgcgaagatggctcggatgagtggccgcagcgctgtaggggtctttacgtgttccaaggggacagtagcccctgctcggccttcgagttccactgcctaagtggcgagtgcatccactccagctggcgctgtgatggtggccccgactgcaaggacaaatctgacgaggaaaactgcgctgtggccacctgtcgccctgacgaattccagtgctctgatggaaactgcatccatggcagccggcagtgtgaccgggaatatgactgcaaggacatgagcgatgaagttggctgcgttaatgtgacactctgcgagggacccaacaagttcaagtgtcacagcggcgaatgcatcaccctggacaaagtctgcaacatggctagagactgccgggactggtcagatgaacccatcaaagagtgcgggaccaacgaatgcttggacaacaacggcggctgttcccacgtctgcaatgaccttaagatcggctacgagtgcctgtgccccgacggcttccagctggtggcccagcgaagatgcgaagatatcgatgagtgtcaggatcccgacacctgcagccagctctgcgtgaacctggagggtggctacaagtgccagtgtgaggaaggcttccagctggacccccacacgaaggcctgcaaggctgtgggctccatcgcctacctcttcttcaccaaccggcacgaggtcaggaagatgacgctggaccggagcgagtacaccagcctcatccccaacctgaggaacgtggtcgctctggacacggaggtggccagcaatagaatctactggtctgacctgtcccagagaatgatctgcagcacccagcttgacagagcccacggcgtctcttcctatgacaccgtcatcagcagggacatccaggcccccgacgggctggctgtggactggatccacagcaacatctactggaccgactctgtcctgggcactgtctctgttgcggataccaagggcgtgaagaggaaaacgttattcagggagaacggctccaagccaagggccatcgtggtggatcctgttcatggcttcatgtactggactgactggggaactcccgccaagatcaagaaagggggcctgaatggtgtggacatctactcgctggtgactgaaaacattcagtggcccaatggcatcaccctagatctcctctgtgctgtccctcctctgtgctgtccgacagcacagaggaggcccagactcacctgtcctgatgcccgcgcccaagcacactgctcacatgcccatgcacactgccagcctattcaccctgggtactgccacctacatttgtcaacccttccagggtctgggccagaggaagaattgattccagcaccttctcacccctgactaaggcttagagctcaggccctgcacttatcccacaccccaagaaggaatgtcctgggcgggacccccacctcagagcctgcaggccggctcccactcctgcagccctcagctgcttcc

SEQ ID NO: 454600 - DNA, 682 bp, Homo sapiens
gctctcacccaaaaacaattagcccagagatttggacatttcaaccagccttatagctgttctcatcatcaccttctgcattgtgaccgtgcttggaagggaggctctcaccaaaggggcgctgtgggcagtctttctgctcgcagggtctgccctcctctgtgccgtggtcacgggcgtcatctggaggcagcccgagagcaagaccaagctctcatttaaggttcccttcctgccagtgctccccatcctgagcatcttcgtgaacgtctatctcatgatgcagctggaccagggcacctgggtccggtttgctgtgtggatgctgataggcttcatcatctactttggctatggcctgtggcacagcgaggaggcgtccctggatgccgaccaagcaaggactcctgacggcaacttggaccagtgcaagtgacgcacagccccgccccccggaggtggcagcagccccgagggacgcccccagaggaccgggaggcaccccaccctccccaccagtgcaacagaaaccacctgcgtccacaccctcactgcagccaaaggtgcaattacttgacctgcagccccagcccaccctcggctctgcagccggttctccgggccctggtcacctccagacagctgcctggccggggccactaggctgcggctggccactgtg

SEQ ID NO: 454601 - DNA, 2315 bp, Homo sapiens
gtggccagtggtgtggatgtgaatattcatccctgtggaggaaaatagtggggtctctgagatttgattctgaaaccttccttgtatccctcctgagacatctttgctgcaagatcgaggctgtcctctggtgagaaggtggtgaggcttcccgtcatattccagctctgaacagcaacatggggtgcaaagtcctgctcaacattgggcagcagatgctgcggcggaaggtggtggactgtagccgggaggagacgcggctgtctcgctgcctgaacacttttgatctggtggccctcggggtgggcagcacactgggtgctggtgtctacgtcctggctggagctgtggcccgtgagaatgcaggccctgccattgtcatctccttcctgatcgctgcgctggcctcagtgctggctggcctgtgctatggcgagtttggtgctcgggtccccaagacgggctcagcttacctctacagctatgtcaccgttggagagctctgggccttcatcaccggctggaacttaatcctctcctacatcatcggtacttcaagcgtagcgagggcctggagcgccaccttcgacgagctgataggcagacccatcggggagttctcacggacacacatgactctgaacgcccccggcgtgctggctgaaaaccccgacatattcgcagtgatcataattctcatcttgacaggacttttaactcttggtgtgaaagagtcggccatggtcaacaaaatattcacttgtattaacgtcctggtcctgggcttcataatggtgtcaggatttgtgaaaggatcggttaaaaactggcagctcacggaggaggattttgggaacacatcaggccgtctctgtttgaacaatgacacaaaagaagggaagcccggtgttggtggattcatgcccttcgggttctctggtgtcctgtcgggggcagcgacttgcttctatgccttcgtgggctttgactgcatcgccaccacaggtgaagaggtgaagaacccacagaaggccatccccgtggggatcgtggcgtccctcttgatctgcttcatcgcctactttggggtgtcggctgccctcacgctcatgatgccctacttctgcctggacaataacagccccctgcccgacgcctttaagcacgtgggctgggaaggtgccaagtacgcagtggccgtgggctccctctgcgctctttccgccagtcttctaggttccatgtttcccatgcctcgggttatctatgccatggctgaggatggactgctatttaaattcttagccaacgtcaatgataggaccaaaacaccaataatcgccacattagcctcgggtgccgttgctgctgtgatggccttcctctttgacctgaaggacttggtggacctcatgtccattggcactctcctggcttactcgttggtggctgcctgtgtgttggtcttacggtaccagccagagcagcctaacctggtataccagatggccagtacttccgacgagttagatccagcagaccaaaatgaattggcaagcaccaatgattcccagctggggtttttaccagaggcagagatgttctctttgaaaaccatactctcacccaaaaacatggagccttccaaaatctctgggctaattgtgaacatttcaaccagccttatagctgttctcatcatcaccttctgcattgtgaccgtgcttggaagggaggctctcaccaaaggggcgctgtgggcagtctttctgctcgcagggtctgccctcctctgtgccgtggtcacgggcgtcatctggaggcagcccgagagcaagaccaagctctcatttaaggttcccttcctgccagtgctccccatcctgagcatcttcgtgaacgtctatctcatgatgcagctggaccagggcacctgggtccggtttgctgtgtggatgctgataggcttcatcatctactttggctatggcctgtggcacagcgaggaggcgtccctggatgccgaccaagcaaggactcctgacggcaacttggaccagtgcaagtgacgcacagccccgccccccggaggtggcagcagccccgagggacgcccccagaggaccgggaggcaccccaccctccccaccagtgcaacagaaaccacctgcgtccacaccctcactgcagccaaaggtgcaattacttgacctgcagccccagcccaccctcggctctgcagccggttctccgggccctggtcacctccagacagctgcctggccggggccactaggctgcggctggccactgtg

SEQ ID NO: 454602 - DNA, 1061 bp, Homo sapiens
gcggccgcgggctcccgctaaccgcagcctccactcctctccccgcgcgccgcgcccccgccccgccccgcccggtctcgccggccgagcgtccgttggtccttgagcgcgtccgacagtctgtctgttcgcgatcctgccggagccccgccgccgccggcttggattctgaaaccttccttgtatccctcctgagacatctttgctgcaagatcgaggctgtcctctggtgagaaggtggtgaggcttcccgtcatattccagctctgaacagcaacatggggtgcaaagtcctgctcaacattgggcagcagatgctgcggcggaaggtggtggactgtagccgggaggagacgcggctgtctcgctgcctgaacacttttgatctggtggccctcggggtgggcagcacactgggtgctggtgtctacgtcctggctggagctgtggcccgtgagaatgcaggccctgccattgtcatctccttcctgatcgctgcgctggcctcagtgctggctggcctgtgctatggcgagtttggtgctcgggtccccaagacgggctcagcttacctctacagctatgtcaccgttggagagctctgggccttcatcaccggctggaacttaatcctctcctacatcatcggtacttcaagcgtagcgagggcctggagcgccaccttcgacgagctgataggcagacccatcggggagttctcacggacacacatgactctgaacgcccccggcgtgctggctgaaaaccccgacatattcgcagtgatcataattctcatcttgacaggacttttaactcttggtgtgaaagagtcggccatggtcaacaaaatattcacttgtattaacgtcctggtcctgggcttcataatggtgtcaggatttgtgaaaggatcggttaaaaactggcagctcacggaggaggattttgggaacacatcaggccgtctctgtttgaacaagtgagttgctgcttctgaccatttttcttagttgacatttaatgacatagattgtatgggggatataactggctaggat

SEQ ID NO: 454603 - DNA, 420 bp, Homo sapiens
cccttttgctccctacagcagtaattttgtgggaagtggcctagtatctttagcatctgagggccgctgccacttctcagagcaagagagatcctctcagggtattcctctgggctgctcatggtggaggtcatgtcgccccgaaggagagaccatggaggatgttccccagaagcaacagcgggaggtggtgttcccggtctctcctcgtctatctacaatgcagcatttgactatatccttcccattttataccttgtgtcccgggcagctcactttggaggcttattgagaacttgagttggtgcacgtcattttgcttgaagcagatgtggcggtcacgcaatgcctttcttcccaggtaccagccagagcagcctaacctggtataccagatggccagtacttccgacgagttag

SEQ ID NO: 454604 - DNA, 431 bp, Homo sapiens
ggtatctggaggtcacctaggagggcctgggaagcacccacaaccttggtgatttaaacccctgatccccgcccccagaaagataattaatccaccccattcccagaggctcacagaggtctgcagaggctcgatgcacttggattctttttcagtcgccttcttatccccatccaggaaggaccttcccagtttgtggttaacactcagacaaagttttgtgtctatgcactttttcaggacttttaactcttggtgtgaaagagtcggccatggtcaacaaaatattcacttgtattaacgtcctggtcctgggcttcataatggtgtcaggatttgtgaaaggatcggttaaaaactggcagctcacggaggaggattttgggaacacatcaggccgtctctgtttgaacaagtgagttgctgcttct

SEQ ID NO: 454605 - DNA, 2414 bp, Homo sapiens
gcggccgcgggctcccgctaaccgcagcctccactcctctccccgcgcgccgcgcccccgccccgccccgcccggtctcgccggccgagcgtccgttggtccttgagcgcgtccgacagtctgtctgttcgcgatcctgccggagccccgccgccgccggcttggattctgaaaccttccttgtatccctcctgagacatctttgctgcaagatcgaggctgtcctctggtgagaaggtggtgaggcttcccgtcatattccagctctgaacagcaacatggggtgcaaagtcctgctcaacattgggcagcagatgctgcggcggaaggtggtggactgtagccgggaggagacgcggctgtctcgctgcctgaacacttttgatctggtggccctcggggtgggcagcacactgggtgctggtgtctacgtcctggctggagctgtggcccgtgagaatgcaggccctgccattgtcatctccttcctgatcgctgcgctggcctcagtgctggctggcctgtgctatggcgagtttggtgctcgggtccccaagacgggctcagcttacctctacagctatgtcaccgttggagagctctgggccttcatcaccggctggaacttaatcctctcctacatcatcggtacttcaagcgtagcgagggcctggagcgccaccttcgacgagctgataggcagacccatcggggagttctcacggacacacatgactctgaacgcccccggcgtgctggctgaaaaccccgacatattcgcagtgatcataattctcatcttgacaggacttttaactcttggtgtgaaagagtcggccatggtcaacaaaatattcacttgtattaacgtcctggtcctgggcttcataatggtgtcaggatttgtgaaaggatcggttaaaaactggcagctcacggaggaggattttgggaacacatcaggccgtctctgtttgaacaatgacacaaaagaagggaagcccggtgttggtggattcatgcccttcgggttctctggtgtcctgtcgggggcagcgacttgcttctatgccttcgtgggctttgactgcatcgccaccacaggtgaagaggtgaagaacccacagaaggccatccccgtggggatcgtggcgtccctcttgatctgcttcatcgcctactttggggtgtcggctgccctcacgctcatgatgccctacttctgcctggacaataacagccccctgcccgacgcctttaagcacgtgggctgggaaggtgccaagtacgcagtggccgtgggctccctctgcgctctttccgccagtcttctaggttccatgtttcccatgcctcgggttatctatgccatggctgaggatggactgctatttaaattcttagccaacgtcaatgataggaccaaaacaccaataatcgccacattagcctcgggtgccgttgctgctgtgatggccttcctctttgacctgaaggacttggtggacctcatgtccattggcactctcctggcttactcgttggtggctgcctgtgtgttggtcttacggtaccagccagagcagcctaacctggtataccagatggccagtacttccgacgagttagatccagcagaccaaaatgaattggcaagcaccaatgattcccagctggggtttttaccagaggcagagatgttctctttgaaaaccatactctcacccaaaaacatggagccttccaaaatctctgggctaattgtgaacatttcaaccagccttatagctgttctcatcatcaccttctgcattgtgaccgtgcttggaagggaggctctcaccaaaggggcgctgtgggcagtctttctgctcgcagggtctgccctcctctgtgccgtggtcacgggcgtcatctggaggcagcccgagagcaagaccaagctctcatttaaggttcccttcctgccagtgctccccatcctgagcatcttcgtgaacgtctatctcatgatgcagctggaccagggcacctgggtccggtttgctgtgtggatgctgataggcttcatcatctactttggctatggcctgtggcacagcgaggaggcgtccctggatgccgaccaagcaaggactcctgacggcaacttggaccagtgcaagtgacgcacagccccgccccccggaggtggcagcagccccgagggacgcccccagaggaccgggaggcaccccaccctccccaccagtgcaacagaaaccacctgcgtccacaccctcactgcagccaaaggtgcaattacttgacctgcagccccagcccaccctcggctctgcagccggttctccgggccctggtcacctccagacagctgcctggccggggccactaggctgcggctggccactgtg

SEQ ID NO: 454606 - DNA, 2239 bp, Homo sapiens
gcggccgcgggctcccgctaaccgcagcctccactcctctccccgcgcgccgcgcccccgccccgccccgcccggtctcgccggccgagcgtccgttggtccttgagcgcgtccgacagtctgtctgttcgcgatcctgccggagccccgccgccgccggcttggattctgaaaccttccttgtatccctcctgagacatctttgctgcaagatcgaggctgtcctctggtgagaaggtggtgaggcttcccgtcatattccagctctgaacagcaacatggggtgcaaagtcctgctcaacattgggcagcagatgctgcggcggaaggtggtggactgtagccgggaggagacgcggctgtctcgctgcctgaacacttttgatctggtggccctcggggtgggcagcacactgggtgctggtgtctacgtcctggctggagctgtggcccgtgagaatgcaggccctgccattgtcatctccttcctgatcgctgcgctggcctcagtgctggctggcctgtgctatggcgagtttggtgctcgggtccccaagacgggctcagcttacctctacagctatgtcaccgttggagagctctgggccttcatcaccggctggaacttaatcctctcctacatcatcggtacttcaagcgtagcgagggcctggagcgccaccttcgacgagctgataggcagacccatcggggagttctcacggacacacatgactctgaacgcccccggcgtgctggctgaaaaccccgacatattcgcagtgatcataattctcatcttgacaggacttttaactcttggtgtgaaagagtcggccatggtcaacaaaatattcacttgtattaacgtcctggtcctgggcttcataatggtgtcaggatttgtgaaaggatcggttaaaaactggcagctcacggaggaggattttgggaacacatcaggccgtctctgtttgaacaatgacacaaaagaagggaagcccggtgttggtggattcatgcccttcgggttctctggtgtcctgtcgggggcagcgacttgcttctatgccttcgtgggctttgactgcatcgccaccacaggtgaagaggtgaagaacccacagaaggccatccccgtggggatcgtggcgtccctcttgatctgcttcatcgcctactttggggtgtcggctgccctcacgctcatgatgccctacttctgcctggacaataacagccccctgcccgacgcctttaagcacgtgggctgggaaggtgccaagtacgcagtggccgtgggctccctctgcgctctttccgccagtcttctaggttccatgtttcccatgcctcgggttatctatgccatggctgaggatggactgctatttaaattcttagccaacgtcaatgataggaccaaaacaccaataatcgccacattagcctcgggtgccgttgctgctgtgatggccttcctctttgacctgaaggacttggtggacctcatgtccattggcactctcctggcttactcgttggtggctgcctgtgtgttggtcttacggtaccagccagagcagcctaacctggtataccagatggccagtacttccgacgagttagatccagcagaccaaaatgaattggcaagcaccaatgattcccagctggggtttttaccagaggcagagatgttctctttgaaaaccatactctcacccaaaaacatggagccttccaaaatctctgggctaattgtgaacatttcaaccagccttatagctgttctcatcatcaccttctgcattgtgaccgtgcttggaagggaggctctcaccaaaggggcgctgtgggcagtctttctgctcgcagggtctgccctcctctgtgccgtggtcacgggcgtcatctggaggcagcccgagagcaagaccaagctctcatttaaggtgagcagctcggcctagggaaggaaccctggtacacagaccctggccctcctgatgcctggccagccctgcgtgggctcagccgggcctgggtgctcccgaggaaggtttttgctagccagcttcaggtaagatggggcaggggtcctgaaggcacagagaggaccagaccctggaaggaggcagcagcccttctcccctggacgtttccctgagtagtcaagggcaggctgacaccttcctgcatgacacaggccaagagagacctcgccagtccctggata

SEQ ID NO: 454607 - DNA, 953 bp, Homo sapiens
tcggcccgccccttggcttctgcactgatggtgggtggatgagtaatgcatccaggaagcctggaggcctgtggtttccgcacccgctgccacccccgcccctagcgtggacatttatcctctagcgctcaggccctgccgccatcgccgcagatccagcgcccagagagacaccagagaacccaccatggccccctttgagcccctggcttctggcatcctgttgttgctgtggctgatagcccccagcagggcctgcacctgtgtcccaccccacccacagacggccttctgcaattccgacctcgtcatcagggccaagttcgtggggacaccagaagtcaaccagaccaccttataccagcgttatgagatcaagatgaccaagatgtataaagggttccaagccttaggggatgccgctgacatccggttcgtctacacccccgccatggagagtgtctgcggatacttccacaggtcccacaaccgcagcgaggagtttctcattgctggaaaactgcaggatggactcttgcacatcactacctgcagttttgtggctccctggaacagcctgagcttagctcagcgccggggcttcaccaagacctacactgttggctgtgaggaatgcacagtgtttccctgtttatccatcccctgcaaactgcagagtggcactcattgcttgtggacggaccagctcctccaaggctctgaaaagggcttccagtcccgtcaccttgcctgcctgcctcgggagccagggctgtgcacctggcagtccctgcggtcccagatagcctgaatcctgcccggagtggaagctgaagcctgcacagtgtccaccctgttcccactcccatctttcttccggacaatgaaataaagagttaccacccagcaaaaaaaaaaacacagacgagcacccggcaccaccacaaaggggg

SEQ ID NO: 454608 - DNA, 657 bp, Homo sapiens
tccagcgcccagagagacaccagagtcatcagggccaagttcgtggggacaccagaagtcaaccagaccaccttataccagcgttatgagatcaagatgaccaagatgtataaagggttccaagccttaggggatgccgctgacatccggttcgtctacacccccgccatggagagtgtctgcggatacttccacaggtcccacaaccgcagcgaggagtttctcattgctggaaaactgcaggatggactcttgcacatcactacctgcagttttgtggctccctggaacagcctgagcttagctcagcgccggggcttcaccaagacctacactgttggctgtgaggaatgcacagtgtttccctgtttatccatcccctgcaaactgcagagtggcactcattgcttgtggacggaccagctcctccaaggctctgaaaagggcttccagtcccgtcaccttgcctgcctgcctcgggagccagggctgtgcacctggcagtccctgcggtcccagatagcctgaatcctgcccggagtggaagctgaagcctgcacagtgtccaccctgttcccactcccatctttcttccggacaatgaaataaagagttaccacccagcagaagaaaaaagagagaaaaaaagaagaaaaa

SEQ ID NO: 454609 - DNA, 462 bp, Homo sapiens
  misc_feature (11)..(12): n is a, c, g, or t
  misc_feature (14)..(16): n is a, c, g, or t
  misc_feature (18)..(19): n is a, c, g, or t
agcctactcanncnnncnntagccatggagtaaatggcatgccatttactcaacccaccatggccccctttgagcccctggcttctggcatcctgttgttgctgtggctgatagcccccagcagggcctgcacctgtgtcccaccccacccacagacggccttctgcaattccgacctcgtcatcagggccaagttcgtggggacaccagaagtcaaccagaccaccttataccagcgttatgagatcaagatgaccaagatgtataaagggttccaagccttaggggatgccgctgacatccggttcgtctacacccccgccatgtaaatggcatgccatttactccatggcgtcagcgaagggttgtagtagcccgtaggggcctacaacgttggggcctttgcgtagttgtatatggcctagaatttttcggtcggtaagcattaggaatgccattgcg

SEQ ID NO: 454610 - DNA, 363 bp, Homo sapiens
gcggccgcctactactactaaattcacggccgctcgacccaagacctacactgttggctgtgagatatgcacagtgtttccctgtttatccatcccctgcaaactgcagagtggcactcattgcttgtggacggaccagctcctccaaggctctgaaaagggcttccagtcccgtcaccttgcctgcctgcctcgggagccagggctgtgcacctggcagtccctgcggtcccagatagcctgaatcctgcccggagtggaagctgaagcctgcacagtgtccaccctgttcccactcccatctttcttccggacaatgaaataaagagttaccacccagcaccagcagacactgtttctgtg

SEQ ID NO: 454611 - DNA, 781 bp, Homo sapiens
  misc_feature (11)..(12): n is a, c, g, or t
  misc_feature (14)..(16): n is a, c, g, or t
  misc_feature (18)..(19): n is a, c, g, or t
agcctactcanncnnncnntagccatggagtaaatggcatgccatttactcaacccaccatggccccctttgagcccctggcttctggcatcctgttgttgctgtggctgatagcccccagcagggcctgcacctgtgtcccaccccacccacagacggccttctgcaattccgacctcgtcatcagggccaagttcgtggggacaccagaagtcaaccagaccaccttataccagcgttatgagatcaagatgaccaagatgtataaagggttccaagccttaggggatgccgctgacatccggttcgtctacacccccgccatggagagtgtctgcggatacttccacaggtcccacaaccgcagcgaggagtttctcattgctggaaaactgcaggatggactcttgcacatcactacctgcagttttgtggctccctggaacagcctgagcttagctcagcgccggggcttcaccaagacctacactgttggctgtgaggaatgcacagtgtttccctgtttatccatcccctgcaaactgcagagtggcactcattgcttgtggacggaccagctcctccaaggctctgaaaagggcttccagtcccgtcaccttgcctgcctgcctcgggagccagggctgtgcacctggcagtccctgcggtcccagatagcctgaatcctgcccggagtggaagctgaagcctgcacagtgtccaccctgttcccactcccatctttcttccggacaatgaaataaagagttaccacccagca

SEQ ID NO: 454612 - DNA, 812 bp, Homo sapiens
gagctgggctgcagcttgggtgctggccaccaggcccgtgcactcccgtgccagatgcctgtctactcagcttggcctgcggaacccaccatggccccctttgagcccctggcttctggcatcctgttgttgctgtggctgatagcccccagcagggcctgcacctgtgtcccaccccacccacagacggccttctgcaattccgacctcgtcatcagggccaagttcgtggggacaccagaagtcaaccagaccaccttataccagcgttatgagatcaagatgaccaagatgtataaagggttccaagccttaggggatgccgctgacatccggttcgtctacacccccgccatggagagtgtctgcggatacttccacaggtcccacaaccgcagcgaggagtttctcattgctggaaaactgcaggatggactcttgcacatcactacctgcagttttgtggctccctggaacagcctgagcttagctcagcgccggggcttcaccaagacctacactgttggctgtgaggaatgcacagtgtttccctgtttatccatcccctgcaaactgcagagtggcactcattgcttgtggacggaccagctcctccaaggctctgaaaagggcttccagtcccgtcaccttgcctgcctgcctcgggagccagggctgtgcacctggcagtccctgcggtcccagatagcctgaatcctgcccggagtggaagctgaagcctgcacagtgtccaccctgttcccactcccatctttcttccggacaatgaaataaagagttaccacccagca

SEQ ID NO: 454613 - DNA, 1465 bp, Homo sapiens
tcggcccgccccttggcttctgcactgatggtgggtggatgagtaatgcatccaggaagcctggaggcctgtggtttccgcacccgctgccacccccgcccctagcgtggacatttatcctctagcgctcaggccctgccgccatcgccgcagatccagcgcccagagagacaccagagaacccaccatggccccctttgagcccctggcttctggcatcctgttgttgctgtggctgatagcccccagcagggcctgcacctgtgtcccaccccacccacagacggccttctgcaattccgacctcgtcatcagggccaagttcgtggggacaccagaagtcaaccagaccaccttataccagcgttatgagatcaagatgaccaagatgtataaagggttccaagccttaggggatgccgctgacatccggttcgtctacacccccgccatggagagtgtctgcggatacttccacaggtcccacaaccgcagcgaggagtttctcattgctggaaaactgcaggatggactcttgcacatcactacctgcagttttgtggctccctggaacagcctgagcttagctcagcgccggggcttcaccaagacctacactgttggctgtgaggaatgcacagtgtttccctgtttatccatcccctgcaaactgcagagtggcactcattgcttgtggacggaccagctcctccaaggctctgaaaagggcttccagtcccgtcaccttgcctgcctgcctcgggagccagggctgtgcacctggcagtccctgcggtcccagatagcctgaatcctgcccggagtggaagctgaagcctgcacagtgtccaccctgttcccactcccatctttcttccggacaatgaaataaagagttaccacccagcaaaaaaaacgcaaaaggaacaaaacaaaaaaaaactgtgtgagagggggaccacggagccccgagaaacgctttcagaacccaatgcgcgaggggaggggggcccccagcaggctcacgcggtcacccagggcgacaaccagcgtggttccaccaaagggaacacacgcggcaacaggaccacagagggcagtggcatattctacaccagatcaaaaaacacgcccggagggacaaccgccagaagcaggacttcgggacgacaaacacccggagatgtgcgacatacctgagaggaggacacacaccgcgggggatcacttatcgcacacgcgggggcgacccacagacggagcggcactcgacgagaccactacaaaaatataacacggccccgcgacccacggggggggtagcacccacgaagaacacacacgcgacacacagaacgaaggaaacgacgaaaacgcaagagactgccacagccagccaacagcacagcaacacaccagccagcgacagcgccacaagagaaacgcgacaccacaccggcaaaag

SEQ ID NO: 454614 - DNA, 938 bp, Homo sapiens
tcggcccgccccttggcttctgcactgatggtgggtggatgagtaatgcatccaggaagcctggaggcctgtggtttccgcacccgctgccacccccgcccctagcgtggacatttatcctctagcgctcaggccctgccgccatcgccgcagatccagcgcccagagagacaccagagaacccaccatggccccctttgagcccctggcttctggcatcctgttgttgctgtggctgatagcccccagcagggcctgcacctgtgtcccaccccacccacagacggccttctgcaattccgacctcgtcatcagggccaagttcgtggggacaccagaagtcaaccagaccaccttataccagcgttatgagatcaagatgaccaagatgtataaagggttccaagccttaggggatgccgctgacatccggttcgtctacacccccgccatggagagtgtctgcggatacttccacaggtcccacaaccgcagcgaggagtttctcattgctggaaaactgcaggatggactcttgcacatcactacctgcagttttgtggctccctggaacagcctgagcttagctcagcgccggggcttcaccaagacctacactgttggctgtgaggaatgcacagtgtttccctgtttatccatcccctgcaaactgcagagtggcactcattgcttgtggacggaccagctcctccaaggctctgaaaagggcttccagtcccgtcaccttgcctgcctgcctcgggagccagggctgtgcacctggcagtccctgcggtcccagatagcctgaatcctgcccggagtggaagctgaagcctgcacagtgtccaccctgttcccactcccatctttcttccggacaatgaaataaagagttaccacccagcacaacccaataaaactgatgttactagcca

SEQ ID NO: 454615 - DNA, 1566 bp, Homo sapiens
tcggcccgccccttggcttctgcactgatggtgggtggatgagtaatgcatccaggaagcctggaggcctgtggtttccgcacccgctgccacccccgcccctagcgtggacatttatcctctagcgctcaggccctgccgccatcgccgcagatccagcgcccagagagacaccagagaacccaccatggccccctttgagcccctggcttctggcatcctgttgttgctgtggctgatagcccccagcagggcctgcacctgtgtcccaccccacccacagacggccttctgcaattccgacctcgtcatcagggccaagttcgtggggacaccagaagtcaaccagaccaccttataccagcgttatgagatcaagatgaccaagatgtataaagggttccaagccttaggggatgccgctgacatccggttcgtctacacccccgccatggagagtgtctgcggatacttccacaggtcccacaaccgcagcgaggagtttctcattgctggaaaactgcaggatggactcttgcacatcactacctgcagttttgtggctccctggaacagcctgagcttagctcagcgccggggcttcaccaagacctacactgttggctgtgaggaatgcacagtgtttccctgtttatccatcccctgcaaactgcagagtggcactcattgcttgtggacggaccagctcctccaaggctctgaaaagggcttccagtcccgtcaccttgcctgcctgcctcgggagccagggctgtgcacctggcagtccctgcggtcccagatagcctgaatcctgcccggagtggaagctgaagcctgcacagtgtccaccctgttcccactcccatctttcttccggacaatgaaataaagagttaccacccagcaaaaaaaaaaaaaaaaaaaaaaaaaaaaaaaaaaaaaaaaaaaaaaaaaaaaaaaaaaaaaaaaaaaaaaaaaaaaaaaaaaaaaaaaaaaaaaaaaaaaaaaaacaaaaaagacttaaaataaaaaaaaactaaaaaaaccaaaccaaaattaaggctaattggaaaaattggcccaatagaggaaacatttaccaataaaaagcccgttgtttaacaaggtccaaattggtaaaaccttgaagaaaccaaatttaagggctttaaaaaaaatacccctttgtcaaatttgtaaaaatagcaaaaaggcccgaaatggacggtctttccaaaaaattgcgcattttaaaaagcaaagggaatctcaaggggaaatattggggaaaaattccctttaaaagttcggaaaatccagaaaatttttaacccaataggccaaaattcgaaaaaaaccttaaaaaatcaaaaaaatttaacaaaaaaggcataaattattaacaaaattgggaaaaaaggttccctttataaaaaaaactggtttcttaaaaagtaaaagggtgataaaaacgcgtttattctgggtaaatgccccataattcggaacacaaagccctaaaaaaaagttttattgaggaaaaagagaggcctaaaagataaa

SEQ ID NO: 454616 - DNA, 628 bp, Homo sapiens
  misc_feature (20)..(21): n is a, c, g, or t
agcatgatacgactcgagtnngtaccctcatcagggccaagttcgtggggacaccagaagtcaaccagaccaccttataccagcgttatgagatcaagatgaccaagatgtataaagggttccaagccttaggggatgccgctgacatccggttcgtctacacccccgccatggagagtgtctgcggatacttccacaggtcccacaaccgcagcgaggagtttctcattgctggaaaactgcaggatggactcttgcacatcactacctgcagttttgtggctccctggaacagcctgagcttagctcagcgccggggcttcaccaagacctacactgttggctgtgaggaatgcacagtgtttccctgtttatccatcccctgcaaactgcagagtggcactcattgcttgtggacggaccagctcctccaaggctctgaaaagggcttccagtcccgtcaccttgcctgcctgcctcgggagccagggctgtgcacctggcagtccctgcggtcccagatagcctgaatcctgcccggagtggaagctgaagcctgcacagtgtccaccctgttcccactcccatctttcttccggacaatgaaataaagagttaccacccagca

SEQ ID NO: 454617 - DNA, 1078 bp, Homo sapiens
tcggcccgccccttggcttctgcactgatggtgggtggatgagtaatgcatccaggaagcctggaggcctgtggtttccgcacccgctgccacccccgcccctagcgtggacatttatcctctagcgctcaggccctgccgccatcgccgcagatccagcgcccagagagacaccagagaacccaccatggccccctttgagcccctggcttctggcatcctgttgttgctgtggctgatagcccccagcagggcctgcacctgtgtcccaccccacccacagacggccttctgcaattccgacctcgtcatcagggccaagttcgtggggacaccagaagtcaaccagaccaccttataccagcgttatgagatcaagatgaccaagatgtataaagggttccaagccttaggggatgccgctgacatccggttcgtctacacccccgccatggagagtgtctgcggatacttccacaggtcccacaaccgcagcgaggagtttctcattgctggaaaactgcaggatggactcttgcacatcactacctgcagttttgtggctccctggaacagcctgagcttagctcagcgccggggcttcaccaagacctacactgttggctgtgaggaatgcacagacccagtgacatttccctcaatgggaggggctgtcctggggtatgtacttaggtggggtgagagcaagtctccccagcggctcagtgttgaaagctgaggagaggaagttctgctccacgggggaggcagggagaagccctcagagatgtttccctcctcccttccaggtgtttccctgtttatccatcccctgcaaactgcagagtggcactcattgcttgtggacggaccagctcctccaaggctctgaaaagggcttccagtcccgtcaccttgcctgcctgcctcgggagccagggctgtgcacctggcagtccctgcggtcccagatagcctgaatcctgcccggagtggaagctgaagcctgcacagtgtccaccctgttcccactcccatctttcttccggacaatgaaataaagagttaccacccagca

SEQ ID NO: 454618 - DNA, 1512 bp, Homo sapiens
tcggcccgccccttggcttctgcactgatggtgggtggatgagtaatgcatccaggaagcctggaggcctgtggtttccgcacccgctgccacccccgcccctagcgtggacatttatcctctagcgctcaggccctgccgccatcgccgcagatccagcgcccagagagacaccagagaacccaccatggccccctttgagcccctggcttctggcatcctgttgttgctgtggctgatagcccccagcagggcctgcacctgtgtcccaccccacccacagacggccttctgcaattccgacctcgtcatcagggccaagttcgtggggacaccagaagtcaaccagaccaccttataccagcgttatgagatcaagatgaccaagatgtataaagggttccaagccttaggggatgccgctgacatccggttcgtctacacccccgccatggagagtgtctgcggatacttccacaggtcccacaaccgcagcgaggagtttctcattgctggaaaactgcaggatggactcttgcacatcactacctgcagttttgtggctccctggaacagcctgagcttagctcagcgccggggcttcaccaagacctacactgttggctgtgaggaatgcacagtgtttccctgtttatccatcccctgcaaactgcagagtggcactcattgcttgtggacggaccagctcctccaaggcttgtgcacctggcagtccctgcggtcccagatagcctgaatcctgcccggagtggaagctgaagcctgcacagtgtccaccctgttcccactcccatctttcttccggacaatgaaataaagagttaccacccagcaaaaaaaaaaaaaaaaaaaaaaaaaaaaaaaaaaaaaaaaaaaaaaaaaaaaaaaaaaaaaaaaaaaaaaaaaaaaaaaaaaaaaaaaaaaaaaaaaaaaaaaaacaaaaaagacttaaaataaaaaaaaactaaaaaaaccaaaccaaaattaaggctaattggaaaaattggcccaatagaggaaacatttaccaataaaaagcccgttgtttaacaaggtccaaattggtaaaaccttgaagaaaccaaatttaagggctttaaaaaaaatacccctttgtcaaatttgtaaaaatagcaaaaaggcccgaaatggacggtctttccaaaaaattgcgcattttaaaaagcaaagggaatctcaaggggaaatattggggaaaaattccctttaaaagttcggaaaatccagaaaatttttaacccaataggccaaaattcgaaaaaaaccttaaaaaatcaaaaaaatttaacaaaaaaggcataaattattaacaaaattgggaaaaaaggttccctttataaaaaaaactggtttcttaaaaagtaaaagggtgataaaaacgcgtttattctgggtaaatgccccataattcggaacacaaagccctaaaaaaaagttttattgaggaaaaagagaggcctaaaagataaa

SEQ ID NO: 454619 - DNA, 1120 bp, Homo sapiens
tcggcccgccccttggcttctgcactgatggtgggtggatgagtaatgcatccaggaagcctggaggcctgtggtttccgcacccgctgccacccccgcccctagcgtggacatttatcctctagcgctcaggccctgccgccatcgccgcagatccagcgcccagagagacaccagagaacccaccatggccccctttgagcccctggcttctggcatcctgttgttgctgtggctgatagcccccagcagggcctgcacctgtgtcccaccccacccacagacggccttctgcaattccgacctcgtcatcagggccaagttcgtggggacaccagaagtcaaccagaccaccttataccagcgttatgagatcaagatgaccaagatgtataaagggttccaagccttaggggatgccgctgacatccggttcgtctacacccccgccatggagagtgtctgcggatacttccacaggtcccacaaccgcagcgaggagtttctcattgctggtgaggcaccgtccccgcgccctgtgccacaccaaccagtccctggggcgcggcctagcaaccacgagggggcgaggctctgatgggaatggtcccactggaaatggggaccaccccaatttcagtctatcagaaggccgggcctttggcagcttggcagctcagccaatcacaagctgcttgtcggtccccgccccgcctttctccttaggaaaactgcaggatggactcttgcacatcactacctgcagttttgtggctccctggaacagcctgagcttagctcagcgccggggcttcaccaagacctacactgttggctgtgaggaatgcacagtgtttccctgtttatccatcccctgcaaactgcagagtggcactcattgcttgtggacggaccagctcctccaaggctctgaaaagggcttccagtcccgtcaccttgcctgcctgcctcgggagccagggctgtgcacctggcagtccctgcggtcccagatagcctgaatcctgcccggagtggaagctgaagcctgcacagtgtccaccctgttcccactcccatctttcttccggacaatgaaataaagagttaccacccagca

SEQ ID NO: 454620 - DNA, 967 bp, Homo sapiens
tcggcccgccccttggcttctgcactgatggtgggtggatgagtaatgcatccaggaagcctggaggcctgtggtttccgcacccgctgccacccccgcccctagcgtggacatttatcctctagcgctcaggccctgccgccatcgccgcagatccagcgcccagagagacaccagagaacccaccatggccccctttgagcccctggcttctggcatcctgttgttgctgtggctgatagcccccagcagggcctgcacctgtgtcccaccccacccacagacggccttctgcaattccgacctcgtcatcagggccaagttcgtggggacaccagaagtcaaccagaccaccttataccagcgttatgagatcaagatgaccaagatgtataaagggttccaagccttaggggatgccgctgacatccggttcgtctacacccccgccatggagagtgtctgcggatacttccacaggtcccacaaccgcagcgaggagtttctcattgctggaaaactgcaggatggactcttgcacatcactacctgcagttttgtggctccctggaacagcctgagcttagctcagcgccggggcttcaccaagacctacactgttggctgtgaggaatgcacagtgagtgcctggaccctgacctccaacgggagatccttcccggggccattccctaaatcgtgggcttgtttcttgctccctctggctattctgtgtccctgtggctgctccccaaccctaagggctgtccctgatctctcttgctatttccccaagcccgagactgctcccttacaaattctggctgctccctttccctgtgtccaataccgtgtgatcacctgtccctccctggtccctctaattctcccttgtgactattctgtaatcccactccccgttcctgagcccccgggattgtttcttggttccccagaatgttctcca

SEQ ID NO: 454621 - DNA, 697 bp, Homo sapiens
tcggcccgccccttggcttctgcactgatggtgggtggatgagtaatgcatccaggaagcctggaggcctgtggtttccgcacccgctgccacccccgcccctagcgtggacatttatcctctagcgctcaggccctgccgccatcgccgcagatccagcgcccagagagacaccagagaacccaccatggccccctttgagcccctggcttctggcatcctgttgttgctgtggctgatagcccccagcagggcctgcacctgtgtcccaccccacccacagacggccttctgcaattccgacctcgtcatcagggccaagttcgtggggacaccagaagtcaaccagaccaccttataccagcgttatgagatcaagatgaccaagatgtataaagggttccaagccttaggggatgccgctgacatccggttcgtctacacccccgccatggagagtgtctgcggatacttccacaggtcccacaaccgcagcgaggagtttctcattgctggaaaactgcaggatggactcttgcacatcactacctgcagttttgtggctccctggaacagcctgagcttagctcagcgccggggcttcaccaagacctacactgttggctgtgaggaatgcacacctgttcccactcccatctttcttccggacaatgaaataaagagttaccacccagca

SEQ ID NO: 454622 - DNA, 525 bp, Homo sapiens
acgtccatgtatgtcatatgtgtgactgtccttttctcttgttggagcttggagtagtgatggggttgctctgatatgtcgcacagtcaggcatgatgatgcacggccacggcaggagtttctcatggtcggaaaactgcaggatggactcttgcacatcactacctgcagttttgtggctccctggaacagcctgagcttagctcagcgccggggcttcaccaagacctacactgttggctgtgaggaatgcacagtgtttccctgtttatccatcccctgcaaactgcagagtggcactcattgcttgtggacggaccagctcctccaaggctctgaaaagggcttccagtcccgtcaccttgcctgcctgcctcgggagccagggctgtgcacctggcagtccctgcggtcccagatagcctgaatcctgcccggagtggaagctgaagcctgcacagtgtccaccctgttcccactcccatctttcttccggacaatgaaataaagagttaccacccagca

SEQ ID NO: 454623 - DNA, 701 bp, Homo sapiens
tccagcgcccagagagacaccagagaacccaccatggccccctttgagcccctggcttctggcatcctgttgttgctgtggctgatagcccccagcagggcctgcacctgtgtcccaccccacccacagacggccttctgcaattccgacctcgtcatcagggccaagttcgtggggacaccagaagtcaaccagaccaccttataccagcgttatgagatcaagatgaccaagatgtataaagggttccaagccttaggggatgccgctgacatccggttcgtctacacccccgccatggagagtgtctgcggatacttccacaggtcccacaaccgcagcgaggagtttctcattgctgggaacagcctgagcttagctcagcgccggggcttcaccaagacctacactgttggctgtgaggaatgcacagtgtttccctgtttatccatcccctgcaaactgcagagtggcactcattgcttgtggacggaccagctcctccaaggctctgaaaagggcttccagtcccgtcaccttgcctgcctgcctcgggagccagggctgtgcacctggcagtccctgcggtcccagatagcctgaatcctgcccggagtggaagctgaagcctgcacagtgtccaccctgttcccactcccatctttcttccggacaatgaaataaagagttaccacccagca

SEQ ID NO: 454624 - DNA, 909 bp, Homo sapiens
tcggcccgccccttggcttctgcactgatggtgggtggatgagtaatgcatccaggaagcctggaggcctgtggtttccgcacccgctgccacccccgcccctagcgtggacatttatcctctagcgctcaggccctgccgccatcgccgcagatccagcgcccagagagacaccagagaacccaccatggccccctttgagcccctggcttctggcatcctgttgttgctgtggctgatagcccccagcagggcctgcacctgtgtcccaccccacccacagacggccttctgcaattccgacctcgtcatcagggccaagttcgtggggacaccagaagtcaaccagaccaccttataccagcgttatgagatcaagatgaccaagatgtataaagggttccaagccttaggggatgccgctgacatccggttcgtctacacccccgccatggagagtgtctgcggatacttccacaggtcccacaaccgcagcgaggagtttctcattgctggaaaactgcaggatggactcttgcacatcactacctgcagttttgtggctccctggaacagcctgagcttagctcagcgccggggcttcaccaagacctacactgttggctgtgaggaatgcacagtgtttccctgtttatccatcccctgcaaactgcagagtggcactcattgcttgtggacggaccagctcctccaaggctctgaaaagggcttccagtcccgtcaccttgcctgcctgcctcgggagccagggctgtgcacctggcagtccctgcggtcccagatagcctgaatcctgcccggagtggaagctgaagcctgcacagtgtccaccctgttcccactcccatctttcttccggacaatgaaataaagagttaccacccagca

SEQ ID NO: 454625 - DNA, 626 bp, Homo sapiens
tccagcgcccagagagacaccagagtcatcagggccaagttcgtggggacaccagaagtcaaccagaccaccttataccagcgttatgagatcaagatgaccaagatgtataaagggttccaagccttaggggatgccgctgacatccggttcgtctacacccccgccatggagagtgtctgcggatacttccacaggtcccacaaccgcagcgaggagtttctcattgctggaaaactgcaggatggactcttgcacatcactacctgcagttttgtggctccctggaacagcctgagcttagctcagcgccggggcttcaccaagacctacactgttggctgtgaggaatgcacagtgtttccctgtttatccatcccctgcaaactgcagagtggcactcattgcttgtggacggaccagctcctccaaggctctgaaaagggcttccagtcccgtcaccttgcctgcctgcctcgggagccagggctgtgcacctggcagtccctgcggtcccagatagcctgaatcctgcccggagtggaagctgaagcctgcacagtgtccaccctgttcccactcccatctttcttccggacaatgaaataaagagttaccacccagca

SEQ ID NO: 454626 - DNA, 486 bp, Homo sapiens
agccaccattccaggacactgatttactggcttactgttacctttcaggacccagtgacatttccctcaatgggaggggctgtcctggggtatgtacttaggtggggtgagagcaagtctccccagcggctcagtgttgaaagctgaggagaggaagttctgctccacgggggaggcagggagaagccctcagagatgtttccctcctcccttccaggtgtttccctgtttatccatcccctgcaaactgcagagtggcactcattgcttgtggacggaccagctcctccaaggctctgaaaagggcttccagtcccgtcaccttgcctgcctgcctcgggagccagggctgtgcacctggcagtccctgcggtcccagatagcctgaatcctgcccggagtggaagctgaagcctgcacagtgtccaccctgttcccactcccatctttcttccggacaatgaaataaagagttaccacccagca

SEQ ID NO: 454627 - DNA, 431 bp, Homo sapiens
  misc_feature (7)..(7): n is a, c, g, or t
  misc_feature (231)..(231): n is a, c, g, or t
  misc_feature (249)..(249): n is a, c, g, or t
  misc_feature (264)..(264): n is a, c, g, or t
  misc_feature (360)..(360): n is a, c, g, or t
  misc_feature (380)..(380): n is a, c, g, or t
  misc_feature (412)..(412): n is a, c, g, or t
ggaaccnaccaatccctctcccccaggccccaggacctgcagggcaatggctgggtgagactgtccacagggcctgcacctgtgtcccaccccacccacagacggccttctgcaattccgacctcgtcatcagggccaagttcgtggggacaccagaagtcaaccagaccaccttataccagcgttatgagatcaagatgaccaagagtggaatgtcagcaggaccccatncgccattccctgtgtctnttacacgctgtattngtgtattcaccgggggcattatttttcatttgttaatgttcatttcccacccctggttccagcctcgattttggtttttatttttgaggcccccanttccaccaccccagttttcnggggggcacaatgttttgttgcatgttccccnagggaggccaccttgggga

SEQ ID NO: 454628 - DNA, 759 bp, Homo sapiens
caatcgagctcgcaccctgccatttactcaacccaccatggccccctttgagcccctggcttctggcatcctgttgttgctgtggctgatagcccccagcagggcctgcacctgtgtcccaccccacccacagacggccttctgcaattccgacctcgtcatcagggccaagttcgtggggacaccagaagtcaaccagaccaccttataccagcgttatgagatcaagatgaccaagatgtataaagggttccaagccttaggggatgccgctgacatccggttcgtctacacccccgccatggagagtgtctgcggatacttccacaggtcccacaaccgcagcgaggagtttctcattgctggaaaactgcaggatggactcttgcacatcactacctgcagttttgtggctccctggaacagcctgagcttagctcagcgccggggcttcaccaagacctacactgttggctgtgaggaatgcacagtgtttccctgtttatccatcccctgcaaactgcagagtggcactcattgcttgtggacggaccagctcctccaaggctctgaaaagggcttccagtcccgtcaccttgcctgcctgcctcgggagccagggctgtgcacctggcagtccctgcggtcccagatagcctgaatcctgcccggagtggaagctgaagcctgcacagtgtccaccctgttcccactcccatctttcttccggacaatgaaataaagagttaccacccagca

SEQ ID NO: 454629 - DNA, 940 bp, Homo sapiens
tcggcccgccccttggcttctgcactgatggtgggtggatgagtaatgcatccaggaagcctggaggcctgtggtttccgcacccgctgccacccccgcccctagcgtggacatttatcctctagcgctcaggccctgccgccatcgccgcagatccagcgcccagagagacaccagagaacccaccatggccccctttgagcccctggcttctggcatcctgttgttgctgtggctgatagcccccagcagggcctgcacctgtgtcccaccccacccacagacggccttctgcaattccgacctcgtcatcagggccaagttcgtggggacaccagaagtcaaccagaccaccttataccagcgttatgagatcaagatgaccaagatgtataaagggttccaagccttaggggatgccgctgacatccggttcgtctacacccccgccatggagagtgtctgcggatacttccacaggtcccacaaccgcagcgaggagtttctcattgctggaaaactgcaggatggactcttgcacatcactacctgcagttttgtggctccctggaacagcctgagcttagctcagcgccggggcttcaccaagacctacactgttggctgtgaggaatgcacagtgtttccctgtttatccatcccctgcaaactgcagagtggcactcattgcttgtggacggaccagctcctccaaggctctgaaaagggcttccagtcccgtcaccttgcctgcctgcctcgggagccagggctgtgcacctggcagtccctgcggtcccagatagcctgaatcctgcccggagtggaagctgaagcctgcacagtgtccaccctgttcccactcccatctttcttccggacaatgaaataaagagttaccacccagcagaagaaaaaagagagaaaaaaagaagaaaaa

SEQ ID NO: 454630 - DNA, 964 bp, Homo sapiens
tcggcccgccccttggcttctgcactgatggtgggtggatgagtaatgcatccaggaagcctggaggcctgtggtttccgcacccgctgccacccccgcccctagcgtggacatttatcctctagcgctcaggccctgccgccatcgccgcagatccagcgcccagagagacaccagagaacccaccatggccccctttgagcccctggcttctggcatcctgttgttgctgtggctgatagcccccagcagggcctgcacctgtgtcccaccccacccacagacggccttctgcaattccgacctcgtcatcagggccaagttcgtggggacaccagaagtcaaccagaccaccttataccagcgttatgagatcaagatgaccaagatgtataaagggttccaagccttaggggatgccgctgacatccggttcgtctacacccccgccatggagagtgtctgcggatacttccacaggtcccacaaccgcagcgaggagtttctcattgctggaaaactgcaggatggactcttgcacatcactacctgcagttttgtggctccctggaacagcctgagcttagctcagcgccggggcttcaccaagacctacactgttggctgtgaggaatgcacagtgtttccctgtttatccatcccctgcaaactgcagagtggcactcattgcttgtggacggaccagctcctccaaggctctgaaaagggcttccagtcccgtcaccttgcctgcctgcctcgggagccagggctgtgcacctggcagtccctgcggtcccagatagcctgaatcctgcccggagtggaagctgaagcctgcacagtgtccaccctgttcccactcccatctttcttccggacaatgaaataaagagttaccacccagcaaaacagcaaagaccccaaaagagcaaagacacaaaaagagcaaagaccccaaaag

SEQ ID NO: 454631 - DNA, 643 bp, Homo sapiens
agctcggtaccccttcgacggtgttctgcaattccgacctcgtcatcagggccaagttcgtggggacaccagaagtcaaccagaccaccttataccagcgttatgagatcaagatgaccaagatgtataaagggttccaagccttaggggatgccgctgacatccggttcgtctacacccccgccatggagagtgtctgcggatacttccacaggtcccacaaccgcagcgaggagtttctcattgctggaaaactgcaggatggactcttgcacatcactacctgcagttttgtggctccctggaacagcctgagcttagctcagcgccggggcttcaccaagacctacactgttggctgtgaggaatgcacagtgtttccctgtttatccatcccctgcaaactgcagagtggcactcattgcttgtggacggaccagctcctccaaggctctgaaaagggcttccagtcccgtcaccttgcctgcctgcctcgggagccagggctgtgcacctggcagtccctgcggtcccagatagcctgaatcctgcccggagtggaagctgaagcctgcacagtgtccaccctgttcccactcccatctttcttccggacaatgaaataaagagttaccacccagca

SEQ ID NO: 454632 - DNA, 654 bp, Homo sapiens
cagctcggtacagtgtactccaaaaacagacgggcttctcgtaattccggacgtcatcagggccaagttcgtggggacaccagaagtcaaccagaccaccttataccagcgttatgagatcaagatgaccaagatgtataaagggttccaagccttaggggatgccgctgacatccggttcgtctacacccccgccatggagagtgtctgcggatacttccacaggtcccacaaccgcagcgaggagtttctcattgctggaaaactgcaggatggactcttgcacatcactacctgcagttttgtggctccctggaacagcctgagcttagctcagcgccggggcttcaccaagacctacactgttggctgtgaggaatgcacagtgtttccctgtttatccatcccctgcaaactgcagagtggcactcattgcttgtggacggaccagctcctccaaggctctgaaaagggcttccagtcccgtcaccttgcctgcctgcctcgggagccagggctgtgcacctggcagtccctgcggtcccagatagcctgaatcctgcccggagtggaagctgaagcctgcacagtgtccaccctgttcccactcccatctttcttccggacaatgaaataaagagttaccacccagca

SEQ ID NO: 454633 - DNA, 950 bp, Homo sapiens
tcggcccgccccttggcttctgcactgatggtgggtggatgagtaatgcatccaggaagcctggaggcctgtggtttccgcacccgctgccacccccgcccctagcgtggacatttatcctctagcgctcaggccctgccgccatcgccgcagatccagcgcccagagagacaccagagaacccaccatggccccctttgagcccctggcttctggcatcctgttgttgctgtggctgatagcccccagcagggcctgcacctgtgtcccaccccacccacagacggccttctgcaattccgacctcgtcatcagggccaagttcgtggggacaccagaagtcaaccagaccaccttataccagcgttatgagatcaagatgaccaagatgtataaagggttccaagccttaggggatgccgctgacatccggttcgtctacacccccgccatggagagtgtctgcggatacttccacaggtcccacaaccgcagcgaggagtttctcattgctggaaaactgcaggatggactcttgcacatcactacctgcagttttgtggctccctggaacagcctgagcttagctcagcgccggggcttcaccaagacctacactgttggctgtgaggaatgcacagacccagtgacatttccctcaatgggaggggctgtcctggggtgtttccctgtttatccatcccctgcaaactgcagagtggcactcattgcttgtggacggaccagctcctccaaggctctgaaaagggcttccagtcccgtcaccttgcctgcctgcctcgggagccagggctgtgcacctggcagtccctgcggtcccagatagcctgaatcctgcccggagtggaagctgaagcctgcacagtgtccaccctgttcccactcccatctttcttccggacaatgaaataaagagttaccacccagca

SEQ ID NO: 454634 - DNA, 1107 bp, Homo sapiens
tcggcccgccccttggcttctgcactgatggtgggtggatgagtaatgcatccaggaagcctggaggcctgtggtttccgcacccgctgccacccccgcccctagcgtggacatttatcctctagcgctcaggccctgccgccatcgccgcagatccagcgcccagagagacaccagagaacccaccatggccccctttgagcccctggcttctggcatcctgttgttgctgtggctgatagcccccagcagggcctgcacctgtgtcccaccccacccacagacggccttctgcaattccgacctcgtcatcagggccaagttcgtggggacaccagaagtcaaccagaccaccttataccagcgttatgagatcaagatgaccaagatgtataaagggttccaagccttaggggatgccgctgacatccggttcgtctacacccccgccatggagagtgtctgcggatacttccacaggtcccacaaccgcagcgaggagtttctcattgctggaaaactgcaggatggactcttgcacatcactacctgcagttttgtggctccctggaacagcctgagcttagctcagcgccggggcttcaccaagacctacactgttggctgtgaggaatgcacagacccagtgacatttccctcaatgggaggggctgtcctggggtatgtacttaggtggggtgagagcaagtctccccagcggctcagtgttgaaagctgaggagaggaagttctgctccacgggggaggcagggagaagccctcagagatgtttccctcctcccttccaggtgtttccctgtttatccatcccctgcaaactgcagagtggcactcattgcttgtggacggaccagctcctccaaggctctgaaaagggcttccagtcccgtcaccttgcctgcctgcctcgggagccagggctgtgcacctggcagtccctgcggtcccagatagcctgaatcctgcccggagtggaagctgaagcctgcacagtgtccaccctgttcccactcccatctttcttccggacaatgaaataaagagttaccacccagcacaacccaataaaactgatgttactagcca

SEQ ID NO: 454635 - DNA, 874 bp, Homo sapiens
tcggcccgccccttggcttctgcactgatggtgggtggatgagtaatgcatccaggaagcctggaggcctgtggtttccgcacccgctgccacccccgcccctagcgtggacatttatcctctagcgctcaggccctgccgccatcgccgcagatccagcgcccagagagacaccagagaacccaccatggccccctttgagcccctggcttctggcatcctgttgttgctgtggctgatagcccccagcagggcctgcacctgtgtcccaccccacccacagacggccttctgcaattccgacctcgtcatcagggccaagttcgtggggacaccagaagtcaaccagaccaccttataccagcgttatgagatcaagatgaccaagatgtataaagggttccaagccttaggggatgccgctgacatccggttcgtctacacccccgccatggagagtgtctgcggatacttccacaggaaaactgcaggatggactcttgcacatcactacctgcagttttgtggctccctggaacagcctgagcttagctcagcgccggggcttcaccaagacctacactgttggctgtgaggaatgcacagtgtttccctgtttatccatcccctgcaaactgcagagtggcactcattgcttgtggacggaccagctcctccaaggctctgaaaagggcttccagtcccgtcaccttgcctgcctgcctcgggagccagggctgtgcacctggcagtccctgcggtcccagatagcctgaatcctgcccggagtggaagctgaagcctgcacagtgtccaccctgttcccactcccatctttcttccggacaatgaaataaagagttaccacccagca

SEQ ID NO: 454636 - DNA, 784 bp, Homo sapiens
tcggcccgccccttggcttctgcactgatggtgggtggatgagtaatgcatccaggaagcctggaggcctgtggtttccgcacccgctgccacccccgcccctagcgtggacatttatcctctagcgctcaggccctgccgccatcgccgcagatccagcgcccagagagacaccagagaacccaccatggccccctttgagcccctggcttctggcatcctgttgttgctgtggctgatagcccccagcagggcctgcacctgtgtcccaccccacccacagacggccttctgcaattccgacctcgtcatcagggccaagttcgtggggacaccagaagtcaaccagaccaccttataccagcgttatgagatcaagatgaccaagatgtataaagggttccaagccttaggggatgccgctgacatccggttcgtctacacccccgccatggagagtgtctgcggatacttccacaggtcccacaaccgcagcgaggagtttctcattgctggtgtttccctgtttatccatcccctgcaaactgcagagtggcactcattgcttgtggacggaccagctcctccaaggctctgaaaagggcttccagtcccgtcaccttgcctgcctgcctcgggagccagggctgtgcacctggcagtccctgcggtcccagatagcctgaatcctgcccggagtggaagctgaagcctgcacagtgtccaccctgttcccactcccatctttcttccggacaatgaaataaagagttaccacccagca

SEQ ID NO: 454637 - DNA, 1084 bp, Homo sapiens
tcggcccgccccttggcttctgcactgatggtgggtggatgagtaatgcatccaggaagcctggaggcctgtggtttccgcacccgctgccacccccgcccctagcgtggacatttatcctctagcgctcaggccctgccgccatcgccgcagatccagcgcccagagagacaccagagaacccaccatggccccctttgagcccctggcttctggcatcctgttgttgctgtggctgatagcccccagcagggcctgcacctgtgtcccaccccacccacagacggccttctgcaattccgacctcgtcatcagggccaagttcgtggggacaccagaagtcaaccagaccaccttataccagcgttatgagatcaagatgaccaagatgtataaagggttccaagccttaggggatgccgctgacatccggttcgtctacacccccgccatggagagtgtctgcggatacttccacaggtcccacaaccgcagcgaggagtttctcattgctggtgaggcaccgtccccgcgccctgtgccacaccaaccagtccctggggcgcggcctagcaaccacgagggggcgaggctctgatgggaatggtcccactggaaatggggaccaccccaatttcagtctatcagaaggccgggcctttggcagcttggcagctcagccaatcacaagctgcttgtcggtccccgccccgcctttctccttaggaaaactgcaggatggactcttgcacatcactacctgcagttttgtggctccctggaacagcctgagcttagctcagcgccggggcttcaccaagacctacactgttggctgtgaggaatgcacaagtggcactcattgcttgtggacggaccagctcctccaaggctctgaaaagggcttccagtcccgtcaccttgcctgcctgcctcgggagccagggctgtgcacctggcagtccctgcggtcccagatagcctgaatcctgcccggagtggaagctgaagcctgcacagtgtccaccctgttcccactcccatctttcttccggacaatgaaataaagagttaccacccagca

SEQ ID NO: 454638 - DNA, 672 bp, Homo sapiens
  misc_feature (465)..(465): n is a, c, g, or t
  misc_feature (470)..(470): n is a, c, g, or t
  misc_feature (476)..(476): n is a, c, g, or t
  misc_feature (478)..(478): n is a, c, g, or t
  misc_feature (487)..(487): n is a, c, g, or t
  misc_feature (508)..(508): n is a, c, g, or t
  misc_feature (515)..(515): n is a, c, g, or t
  misc_feature (554)..(554): n is a, c, g, or t
  misc_feature (632)..(633): n is a, c, g, or t
  misc_feature (642)..(642): n is a, c, g, or t
tcggcccgccccttggcttctgcactgatggtgggtggatgagtaatgcatccaggaagcctggaggcctgtggtttccgcacccgctgccacccccgcccctagcgtggacatttatcctctagcgctcaggccctgccgccatcgccgcagatccagcgcccagagagacaccagagaacccaccatggccccctttgagcccctggcttctggcatcctgttgttgctgtggctgatagcccccagcagggcctgcacctgtgtcccaccccacccacagacggccttctgcaattccgacctcgtcatcagggccaagttcgtggggacaccagaagtcaaccagaccaccttataccagcgttatgagatcaagatgaccaagatgtataaagggttccaagccttaggggatgccgctgacatccggttcgtctacacccccgccatgtttgggggaanaaaantttaananaagggtacnacaaccacaacgaggaggtantcaaggncggaaacctcgtcagagatggactacttgcatagctctnacctgcagtctcttggcgctgcgctgagagctcccctgtgtttacgcgtcgagccccggggcttcacgctagatcaanncactggtgnctattcgacgggtaccgagctagattagta

SEQ ID NO: 454639 - DNA, 1437 bp, Homo sapiens
ctggtaaccgctcctgcctctagacttgcacatgtgtgaaaggaagaatttacaaagctattcgcagcattgtttttaatagcagaagactgaaaataccttcagatgtccatcaaaaaaggactggatgaataaattacagggcatcatcaaatggaaaaccatgcagcagtgaaaaagtctgggatgatctataagatacattggtaagcagaaaggaaaaggcaaggcacagaagaacagggcttatagcatgctaactttttcagtcaaaaaggaaagcaaagcaaaaactaaaatcaatatttgttattagcttcttttgtaataacaaatacattttgaagcaggtaaaagaaactaaaaatttaattacttgtgagggagcggtgggactacgcagatagtgggtagggccgggagcaagacttttcatagtacctttttatgtattttattttgattcatatgaatgtactatcttttaaaaaaataaaaatatttccaagttgtaattcccaatcaccatagtaatttgcagcactggaaatgtttttaaaatgaaagggctacagctgatagtgtgttacccagctgaacttgaagactcctctttggaagatacacgcccatgaacaaactcccaagtgacttgttcacaagtattcagaacagtgcttatgttaagaaaaaactgcaaatgatgaaaatgttcaacaggtacacaggtgtgcaagggtttgcctattcagatggatcacattagattatatggctattacacctcaactacttcaacatacagcaatccctatgtgaaaacactgtgatatgtacgcagataagcaatgttcagacaagaatccagaaggatacggacaatttgatatttgcaaagttctaattgaataaaactgcttgagaatttcctttttttaattacaaatttgaggagtgaaatgatctagttgagaaagaagcaaaaatatatattttttaaaatgccaaaatatgaactgaatatgagagctacataaaagcctattcaatgagaggcaagcaacattcaagaacattaggccaaaggcctgggtgtgaatgtggggaatgtttgtcaagggcgaggccaaatagacagaggagggaggagaaacccaaagggactctagtgccgtgatctgagcaacctccaaaaacatatcccaggaaatgtaactggatgagaccaggagacaaaaatgggtggaaaataaataagctgtggacaacagcagctctttcaacccaaacgttagcaaccctcatatatactccagtgtcaaaacataccttatgtctttaaaaaggtacaaaagggatgaaaagcagatctgtgcttcatctcactgagcagtttttccaaagcatccctccctggagaaatgtgaagtcagtttc

SEQ ID NO: 454640 - DNA, 2503 bp, Homo sapiens
cacagtgatccctgcgcgcgtctcctgctcgggtcagtgcgccgcgctgcgctgggcgccatggcgctccccggagcccgggctcgcggctgggcggcagcagccagagcggcccagaggcgccgccgcgtggagaacgcaggagggtccccgagtcctgagcctgcgggccggcgcgcggcgctttacgtacactggccttactgcgagaagcgctgcagttactgcaacttcaacaagtacatccctcgccgcctggaggaggctgccatgcagaagtgtctggtgaccgaagctcagacgctgctgcggctcagcggggtgcaacgggtggagtctgtgttctttggtggggggacccccagtctagccagtccccacacggtggctgctgtcctggaggctgtggcacaggcagcccacctgcctgcagacttggaagtcacattggaggctaatcctacttcagctccgggctccagactggcagagttcggggcagcaggggttaacaggttgtctataggcctccagtccctagatgacactgagctccggctgttgggacggacgcactcggcctgcgatgctctgcggacgctggcagaggcccggcgcctctttcccgggcgcgtgtctgtagacttgatgctggggctgccggcacagcaggtggggccgtggcttgggcagctgcaggaactgctgcaccactgtgatgaccacctctccctctaccagctgtccctggagcggggcaccgcactcttcgcccaggtgcagcggggtgcccttccagcccctgacccggagctcgcagctgagatgtaccagaggggccgggctgtccttcgggaggctggcttccaccagtatgaggtctccaactttgcccggaatggggcgctcagtacccacaattggacttactggcagtgtggtcagtaccttggcgttgggcctggggcccatggacgatttatgccccagggggctggaggccacacccgggaggctcggatccagacactggagcctgacaactggatgaaggaggtgatgctgtttggccatggcacccggaagcgtgtccccctgggcaggctggagctgctggaggaagttttggccctggggctacgcaccgatgtggggatcactcaccagcactggcagcagtttgagccccagctgaccctgtgggatgtgtttggagcgaacaaggaggtgcaggagctgctggagcggggcctactgcagctggatcacaggggtcttcggtgttcctgggagggtctggctgtgctggactctctcttgctgaccctcctgcctcagctccaagaagcctggcagcagagaaccccctcccctgtgccaggaggatgacaaaaatgttcctgtgttccagggtaatgccaggtgggttttgagagctgggtcggtactgcagacatctcttctccgttgtcgggtgccgtctctgctccttgtggttattgctcagccctggcatccccaggggaatggcagcagtgaggtagatgggaggacatttctggtcagggaactggcatcccattcagcatctcaggactcacaggccaacatgtgttccatggctgggaattgcctaccacccacatcagcttctgtttacctttttggcatcaaataatgaacagtgtttggaaatctttctacaggcaattacctccccaagagaagccttccttattttggagtaaggtcctaagatagctggatgaatcaggaaaaccatgtcccctctaggtattattaatataagcaggaagggatctactataggaatgaagtatttataaaccactgaaagggatagagaagtgaacattggagaaagccagtagcaactgtgagaaatcagcaacttgcaggaggcacagaaaactcctgctgatggtctcagcttccagcagcacaaaagcagatgatgtactggaaaatgctcagaagatgctacaaaacctcatgcctactgtctgccactgctggagaaggaatcatggtttctagaagtgcctctcattagtggactttaaagcaaatcctggctggcaggaaattctgaggaatatagctcttaggcttccagcctctaccatgcaggagagaacacagaaggactgatgtatgttggtggatccatgtatgtgtccagcacagcggcctgctggactctgagaactgggaaagatcagagcaagccttgcctcttatcttcgggaaaccagaatatgtttggggtggtaggagccacacagactcttctgagccccctcactcacttccttccccctgtgcctttcctttgagagtgaaggtgggtggagttgaccagagaaaggggagagaattcgggaaagacccaaagtgtttgtaattcttctttgtccttttacctacagaaatggtcacatggttctatttaaatagcctaataaacacatctggagcctgt

SEQ ID NO: 454641 - DNA, 1120 bp, Homo sapiens
  misc_feature (905)..(905): n is a, c, g, or t
  misc_feature (925)..(925): n is a, c, g, or t
  misc_feature (941)..(941): n is a, c, g, or t
  misc_feature (943)..(943): n is a, c, g, or t
  misc_feature (971)..(971): n is a, c, g, or t
  misc_feature (978)..(978): n is a, c, g, or t
  misc_feature (995)..(996): n is a, c, g, or t
  misc_feature (999)..(999): n is a, c, g, or t
  misc_feature (1008)..(1009): n is a, c, g, or t
  misc_feature (1011)..(1011): n is a, c, g, or t
  misc_feature (1014)..(1014): n is a, c, g, or t
  misc_feature (1037)..(1037): n is a, c, g, or t
  misc_feature (1046)..(1046): n is a, c, g, or t
  misc_feature (1108)..(1108): n is a, c, g, or t
cacagtgatccctgcgcgcgtctcctgctcgggtcagtgcgccgcgctgcgctgggcgccatggcgctccccggagcccgggctcgcggctgggcggcagcagccagagcggcccagaggcgccgccgcgtggagaacgcaggagggtccccgagtcctgagcctgcgggccggcgcgcggcgctttacgtacactggccttactgcgagaagcgctgcagttactgcaacttcaacaagtacatccctcgccgcctggaggaggctgccatgcagaagtgtctggtgaccgaagctcagacgctgctgcggctcagcggggtgcaacgggtggagtctgtgttctttggtggggggacccccagtctagccagtccccacacggtggctgctgtcctggaggctgtggcacaggcagcccacctgcctgcagacttggaagtcacattggaggctaatcctacttcagctccgggctccagactggcagagttcggggcagcaggggttaacaggttgtctataggcctccagtccctagatgacactgagctccggctgttgggacggacgcactcggcctgcgatgctctgcggacgctggcagaggcccggcgcctctttcccgggcgcgtgtctgtagacttgatgctggggctgccggcacagcaggtggggccgtggcttgggcagctgcaggaactgctgcaccactgtgatgaccacctctccctctaccagctgtccctggagcggggcaccgcactcttcgcccaggtgcagcggggtgcccttccagcccctgacccggagctcgcagctgagatgtaccagaggggccgggctgtccttcgggaggctggcttccaccagtatgaggtctccaactttgcccggaatgggcncgcaggacccacaagggganggagggcaaggggggnangaccggggcggggggcgggggccagggnacagggnggcccaaaggggggganncanaacccgganngnggngcaaaaagggaacggaaaagggngaaaaaggnggggggggcaggcaccccaacgggcccgggcaacggaacgcggaaaaaggggccgcgcgacnccagggggggag

SEQ ID NO: 454642 - DNA, 438 bp, Homo sapiens
ctctagagcggccgcctactactactaaattcgcggccgcgtcgacgaggaatatagctcttaggcttccagcctctaccatgcaggagagaacacagaaggactgatgtatgttggtggatccatgtatgtgtccagcacagcggcctgctggactctgagaactgggaaagatcagagcaagccttgcctcttatcttcgggaaaccagaatatgtttggggtggtaggagccacacagactcttctgagccccctcactcacttccttccccctgtgcctttcctttgagagtgaaggtgggtggagttgaccagagaaaggggagagaattcgggaaagacccaaagtgtttgtaattcttctttgtccttttacctacagaaatggtcacatggttctatttaaatagcctaataaacacatctggagcctgt

SEQ ID NO: 454643 - DNA, 2689 bp, Homo sapiens
cacagtgatccctgcgcgcgtctcctgctcgggtcagtgcgccgcgctgcgctgggcgccatggcgctccccggagcccgggctcgcggctgggcggcagcagccagagcggcccagaggcgccgccgcgtggagaacgcaggagggtccccgagtcctgagcctgcgggccggcgcgcggcgctttacgtacactggccttactgcgagaagcgctgcagttactgcaacttcaacaagtacatccctcgccgcctggaggaggctgccatgcagaagtgtctggtgaccgaagctcagacgctgctgcggctcagcggggtgcaacgggtggagtctgtgttctttggtggggggacccccagtctagccagtccccacacggtggctgctgtcctggaggctgtggcacaggcagcccacctgcctgcagacttggaagtcacattggaggctaatcctacttcagctccgggctccagactggcagagttcggggcagcaggggttaacaggttgtctataggcctccagtccctagatgacactgagctccggctgttgggacggacgcactcggcctgcgatgctctgcggacgctggcagaggcccggcgcctctttcccgggcgcgtgtctgtagacttgatgctggggctgccggcacagcaggtggggccgtggcttgggcagctgcaggaactgctgcaccactgtgatgaccacctctccctctaccagctgtccctggagcggggcaccgcactcttcgcccaggtgcagcggggtgcccttccagcccctgacccggagctcgcagctgagatgtaccagaggggccgggctgtccttcgggaggctggcttccaccagtatgaggtctccaactttgcccggaatgtaagttctggggctgatggctggaggtggaggatgggcagactgcagtgtgaccagggcgttgtgaccttctgaagagaaggatcctggccgagatggtgggacattctaacctggggccccttacctgagtctaaaaatgaggcctgccctcttcactctgcactatttcctccctccccgcagggggcgctcagtacccacaattggacttactggcagtgtggtcagtaccttggcgttgggcctggggcccatggacgatttatgccccagggggctggaggccacacccgggaggctcggatccagacactggagcctgacaactggatgaaggaggtgatgctgtttggccatggcacccggaagcgtgtccccctgggcaggctggagctgctggaggaagttttggccctggggctacgcaccgatgtggggatcactcaccagcactggcagcagtttgagccccagctgaccctgtgggatgtgtttggagcgaacaaggaggtgcaggagctgctggagcggggcctactgcagctggatcacaggggtcttcggtgttcctgggagggtctggctgtgctggactctctcttgctgaccctcctgcctcagctccaagaagcctggcagcagagaaccccctcccctgtgccaggaggatgacaaaaatgttcctgtgttccagggtaatgccaggtgggttttgagagctgggtcggtactgcagacatctcttctccgttgtcgggtgccgtctctgctccttgtggttattgctcagccctggcatccccaggggaatggcagcagtgaggtagatgggaggacatttctggtcagggaactggcatcccattcagcatctcaggactcacaggccaacatgtgttccatggctgggaattgcctaccacccacatcagcttctgtttacctttttggcatcaaataatgaacagtgtttggaaatctttctacaggcaattacctccccaagagaagccttccttattttggagtaaggtcctaagatagctggatgaatcaggaaaaccatgtcccctctaggtattattaatataagcaggaagggatctactataggaatgaagtatttataaaccactgaaagggatagagaagtgaacattggagaaagccagtagcaactgtgagaaatcagcaacttgcaggaggcacagaaaactcctgctgatggtctcagcttccagcagcacaaaagcagatgatgtactggaaaatgctcagaagatgctacaaaacctcatgcctactgtctgccactgctggagaaggaatcatggtttctagaagtgcctctcattagtggactttaaagcaaatcctggctggcaggaaattctgaggaatatagctcttaggcttccagcctctaccatgcaggagagaacacagaaggactgatgtatgttggtggatccatgtatgtgtccagcacagcggcctgctggactctgagaactgggaaagatcagagcaagccttgcctcttatcttcgggaaaccagaatatgtttggggtggtaggagccacacagactcttctgagccccctcactcacttccttccccctgtgcctttcctttgagagtgaaggtgggtggagttgaccagagaaaggggagagaattcgggaaagacccaaagtgtttgtaattcttctttgtccttttacctacagaaatggtcacatggttctatttaaatagcctaataaacacatctggagcctgt

SEQ ID NO: 454644 - DNA, 2600 bp, Homo sapiens
cacagtgatccctgcgcgcgtctcctgctcgggtcagtgcgccgcgctgcgctgggcgccatggcgctccccggagcccgggctcgcggctgggcggcagcagccagagcggcccagaggcgccgccgcgtggagaacgcaggagggtccccgagtcctgagcctgcgggccggcgcgcggcgctttacgtacactggccttactgcgagaagcgctgcagttactgcaacttcaacaagtacatccctcgccgcctggaggaggctgccatgcagaagtgtctggtgaccgaagctcagacgctgctgcggctcagcggggtgcaacgggtggagtctgtgttctttggtggggggacccccagtctagccagtccccacacggtggctgctgtcctggaggctgtggcacaggcagcccacctgcctgcagacttggaagtcacattggaggctaatcctacttcagctccgggctccagactggcagagttcggggcagcaggggttaacaggttgtctataggcctccagtccctagatgacactgagctccggctgttgggacggacgcactcggcctgcgatgctctgcggacgctggcagaggcccggcgcctctttcccgggcgcgtgtctgtagacttgatgctggggctgccggcacagcaggtggggccgtggcttgggcagctgcaggaactgctgcaccactgtgatgaccacctctccctctaccagctgtccctggagcggggcaccgcactcttcgcccaggtgcagcggggtgcccttccagcccctgacccggagctcgcagctgagatgtaccagaggggccgggctgtccttcgggaggctggcttccaccagtatgaggtctccaactttgcccggaatggggcgctcagtacccacaattggacttactggcagtgtggtcagtaccttggcgttgggcctggggcccatggacgatttatgccccagggggctggaggccacacccgggaggctcggatccagacactggagcctgacaactggatgaaggaggtgatgctgtttggccatggcacccggaagcgtgtccccctgggcaggctggagctgctggaggaagttttggccctggggctacgcaccgatgtggggatcactcaccagcactggcagcagtttgagccccagctgaccctgtgggatgtgtttggagcgaacaaggaggtgcaggagctgctggagcggggcctactgcagctggatcacaggtgtgttggggggtgccgggcagagggggctgaggcataccagggagccctgactacagctctccacagacccaggagaagtgagaaagactgactggggtcttcggtgttcctgggagggtctggctgtgctggactctctcttgctgaccctcctgcctcagctccaagaagcctggcagcagagaaccccctcccctgtgccaggaggatgacaaaaatgttcctgtgttccagggtaatgccaggtgggttttgagagctgggtcggtactgcagacatctcttctccgttgtcgggtgccgtctctgctccttgtggttattgctcagccctggcatccccaggggaatggcagcagtgaggtagatgggaggacatttctggtcagggaactggcatcccattcagcatctcaggactcacaggccaacatgtgttccatggctgggaattgcctaccacccacatcagcttctgtttacctttttggcatcaaataatgaacagtgtttggaaatctttctacaggcaattacctccccaagagaagccttccttattttggagtaaggtcctaagatagctggatgaatcaggaaaaccatgtcccctctaggtattattaatataagcaggaagggatctactataggaatgaagtatttataaaccactgaaagggatagagaagtgaacattggagaaagccagtagcaactgtgagaaatcagcaacttgcaggaggcacagaaaactcctgctgatggtctcagcttccagcagcacaaaagcagatgatgtactggaaaatgctcagaagatgctacaaaacctcatgcctactgtctgccactgctggagaaggaatcatggtttctagaagtgcctctcattagtggactttaaagcaaatcctggctggcaggaaattctgaggaatatagctcttaggcttccagcctctaccatgcaggagagaacacagaaggactgatgtatgttggtggatccatgtatgtgtccagcacagcggcctgctggactctgagaactgggaaagatcagagcaagccttgcctcttatcttcgggaaaccagaatatgtttggggtggtaggagccacacagactcttctgagccccctcactcacttccttccccctgtgcctttcctttgagagtgaaggtgggtggagttgaccagagaaaggggagagaattcgggaaagacccaaagtgtttgtaattcttctttgtccttttacctacagaaatggtcacatggttctatttaaatagcctaataaacacatctggagcctgt

SEQ ID NO: 454645 - DNA, 2298 bp, Homo sapiens
cacagtgatccctgcgcgcgtctcctgctcgggtcagtgcgccgcgctgcgctgggcgccatggcgctccccggagcccgggctcgcggctgggcggcagcagccagagcggcccagaggcgccgccgcgtggagaacgcaggagggtccccgagtcctgagcctgcgggccggcgcgcggcgctttacgtacactggccttactgcgagaagcgctgcagttactgcaacttcaacaagtacatccctcgccgcctggaggaggctgccatgcagaagtgtctggtgaccgaagctcagacgctgctgcggctcagcggggtgcaacgtccctagatgacactgagctccggctgttgggacggacgcactcggcctgcgatgctctgcggacgctggcagaggcccggcgcctctttcccgggcgcgtgtctgtagacttgatgctggggctgccggcacagcaggtggggccgtggcttgggcagctgcaggaactgctgcaccactgtgatgaccacctctccctctaccagctgtccctggagcggggcaccgcactcttcgcccaggtgcagcggggtgcccttccagcccctgacccggagctcgcagctgagatgtaccagaggggccgggctgtccttcgggaggctggcttccaccagtatgaggtctccaactttgcccggaatggggcgctcagtacccacaattggacttactggcagtgtggtcagtaccttggcgttgggcctggggcccatggacgatttatgccccagggggctggaggccacacccgggaggctcggatccagacactggagcctgacaactggatgaaggaggtgatgctgtttggccatggcacccggaagcgtgtccccctgggcaggctggagctgctggaggaagttttggccctggggctacgcaccgatgtggggatcactcaccagcactggcagcagtttgagccccagctgaccctgtgggatgtgtttggagcgaacaaggaggtgcaggagctgctggagcggggcctactgcagctggatcacaggggtcttcggtgttcctgggagggtctggctgtgctggactctctcttgctgaccctcctgcctcagctccaagaagcctggcagcagagaaccccctcccctgtgccaggaggatgacaaaaatgttcctgtgttccagggtaatgccaggtgggttttgagagctgggtcggtactgcagacatctcttctccgttgtcgggtgccgtctctgctccttgtggttattgctcagccctggcatccccaggggaatggcagcagtgaggtagatgggaggacatttctggtcagggaactggcatcccattcagcatctcaggactcacaggccaacatgtgttccatggctgggaattgcctaccacccacatcagcttctgtttacctttttggcatcaaataatgaacagtgtttggaaatctttctacaggcaattacctccccaagagaagccttccttattttggagtaaggtcctaagatagctggatgaatcaggaaaaccatgtcccctctaggtattattaatataagcaggaagggatctactataggaatgaagtatttataaaccactgaaagggatagagaagtgaacattggagaaagccagtagcaactgtgagaaatcagcaacttgcaggaggcacagaaaactcctgctgatggtctcagcttccagcagcacaaaagcagatgatgtactggaaaatgctcagaagatgctacaaaacctcatgcctactgtctgccactgctggagaaggaatcatggtttctagaagtgcctctcattagtggactttaaagcaaatcctggctggcaggaaattctgaggaatatagctcttaggcttccagcctctaccatgcaggagagaacacagaaggactgatgtatgttggtggatccatgtatgtgtccagcacagcggcctgctggactctgagaactgggaaagatcagagcaagccttgcctcttatcttcgggaaaccagaatatgtttggggtggtaggagccacacagactcttctgagccccctcactcacttccttccccctgtgcctttcctttgagagtgaaggtgggtggagttgaccagagaaaggggagagaattcgggaaagacccaaagtgtttgtaattcttctttgtccttttacctacagaaatggtcacatggttctatttaaatagcctaataaacacatctggagcctgt

SEQ ID NO: 454646 - DNA, 1945 bp, Homo sapiens
tggttgctctagagtatcccctatggcgcctaggtgcagcggggtgcccttccagcccctgacccggagctcgcagctgagatgtaccagaggggccgggctgtccttcgggaggctggcttccaccagtatgaggtctccaactttgcccggaatgtaagttctggggctgatggctggaggtggaggatgggcagactgcagtgtgaccagggcgttgtgaccttctgaagagaaggatcctggccgagatggtgggacattctaacctggggccccttacctgagtctaaaaatgaggcctgccctcttcactctgcactatttcctccctccccgcagggggcgctcagtacccacaattggacttactggcagtgtggtcagtaccttggcgttgggcctggggcccatggacgatttatgccccagggggctggaggccacacccgggaggctcggatccagacactggagcctgacaactggatgaaggaggtgatgctgtttggccatggcacccggaagcgtgtccccctgggcaggctggagctgctggaggaagttttggccctggggctacgcaccgatgtggggatcactcaccagcactggcagcagtttgagccccagctgaccctgtgggatgtgtttggagcgaacaaggaggtgcaggagctgctggagcggggcctactgcagctggatcacaggggtcttcggtgttcctgggagggtctggctgtgctggactctctcttgctgaccctcctgcctcagctccaagaagcctggcagcagagaaccccctcccctgtgccaggaggatgacaaaaatgttcctgtgttccagggtaatgccaggtgggttttgagagctgggtcggtactgcagacatctcttctccgttgtcgggtgccgtctctgctccttgtggttattgctcagccctggcatccccaggggaatggcagcagtgaggtagatgggaggacatttctggtcagggaactggcatcccattcagcatctcaggactcacaggccaacatgtgttccatggctgggaattgcctaccacccacatcagcttctgtttacctttttggcatcaaataatgaacagtgtttggaaatctttctacaggcaattacctccccaagagaagccttccttattttggagtaaggtcctaagatagctggatgaatcaggaaaaccatgtcccctctaggtattattaatataagcaggaagggatctactataggaatgaagtatttataaaccactgaaagggatagagaagtgaacattggagaaagccagtagcaactgtgagaaatcagcaacttgcaggaggcacagaaaactcctgctgatggtctcagcttccagcagcacaaaagcagatgatgtactggaaaatgctcagaagatgctacaaaacctcatgcctactgtctgccactgctggagaaggaatcatggtttctagaagtgcctctcattagtggactttaaagcaaatcctggctggcaggaaattctgaggaatatagctcttaggcttccagcctctaccatgcaggagagaacacagaaggactgatgtatgttggtggatccatgtatgtgtccagcacagcggcctgctggactctgagaactgggaaagatcagagcaagccttgcctcttatcttcgggaaaccagaatatgtttggggtggtaggagccacacagactcttctgagccccctcactcacttccttccccctgtgcctttcctttgagagtgaaggtgggtggagttgaccagagaaaggggagagaattcgggaaagacccaaagtgtttgtaattcttctttgtccttttacctacagaaatggtcacatggttctatttaaatagcctaataaacacatctggagcctgt

SEQ ID NO: 454647 - DNA, 1749 bp, Homo sapiens
ctcaattttctgagctctgtgaagcaatagatagataaagggtttccacttgtttttagggagcactgaaacctctcataggaagcacagtagataattatcaagcaaatccagagctgctctggataaagcagagccataaagccctggctagagctggctgagaggggagggaagagaggaggcatagaggaaggcctggcttggctggaagctgggttccagtctcagtggaataggagtgaagctgccctcctccctgctggcccattggcctggttctgctttcatgcatgtcagctgctgagatctccatgctgaactggaccctcccccacctctcaccataccccaactatgtggcccagagtagccaggccagctccccacctctgaccctctggcttccccagcactggcagcagtttgagccccagctgaccctgtgggatgtgtttggagcgaacaaggaggtgcaggagctgctggagcggggcctactgcagctggatcacaggggtcttcggtgttcctgggagggtctggctgtgctggactctctcttgctgaccctcctgcctcagctccaagaagcctggcagcagagaaccccctcccctgtgccaggaggatgacaaaaatgttcctgtgttccagggtaatgccaggtgggttttgagagctgggtcggtactgcagacatctcttctccgttgtcgggtgccgtctctgctccttgtggttattgctcagccctggcatccccaggggaatggcagcagtgaggtagatgggaggacatttctggtcagggaactggcatcccattcagcatctcaggactcacaggccaacatgtgttccatggctgggaattgcctaccacccacatcagcttctgtttacctttttggcatcaaataatgaacagtgtttggaaatctttctacaggcaattacctccccaagagaagccttccttattttggagtaaggtcctaagatagctggatgaatcaggaaaaccatgtcccctctaggtattattaatataagcaggaagggatctactataggaatgaagtatttataaaccactgaaagggatagagaagtgaacattggagaaagccagtagcaactgtgagaaatcagcaacttgcaggaggcacagaaaactcctgctgatggtctcagcttccagcagcacaaaagcagatgatgtactggaaaatgctcagaagatgctacaaaacctcatgcctactgtctgccactgctggagaaggaatcatggtttctagaagtgcctctcattagtggactttaaagcaaatcctggctggcaggaaattctgaggaatatagctcttaggcttccagcctctaccatgcaggagagaacacagaaggactgatgtatgttggtggatccatgtatgtgtccagcacagcggcctgctggactctgagaactgggaaagatcagagcaagccttgcctcttatcttcgggaaaccagaatatgtttggggtggtaggagccacacagactcttctgagccccctcactcacttccttccccctgtgcctttcctttgagagtgaaggtgggtggagttgaccagagaaaggggagagaattcgggaaagacccaaagtgtttgtaattcttctttgtccttttacctacagaaatggtcacatggttctatttaaatagcctaataaacacatctggagcctgt

SEQ ID NO: 454648 - DNA, 971 bp, Homo sapiens
caaaagcagatgatgtactggaaaatgctcagaagatgctacaaaacctcatgcctactgtctgccactgctggagaaggaatcatggtttctagaattgcctaccacccacatcagcttctgtttacctttttggcatcaaataatgaacagtgtttggaaatctttctacaggcaattacctccccaagagaagccttccttattttggagtaaggtcctaagatagctggatgaatcaggaaaaccatgtcccctctaggtattattaatataagcaggaagggatctactataggaatgaagtatttataaaccactgaaagggatagagaagtgaacattggagaaagccagtagcaactgtgagaaatcagcaacttgcaggaggcacagaaaactcctgctgatggtctcagcttccagcagcacaaaagcagatgatgtactggaaaatgctcagaagatgctacaaaacctcatgcctactgtctgccactgctggagaaggaatcatggtttctagaagtgcctctcattagtggactttaaagcaaatcctggctggcaggaaattctgaggaatatagctcttaggcttccagcctctaccatgcaggagagaacacagaaggactgatgtatgttggtggatccatgtatgtgtccagcacagcggcctgctggactctgagaactgggaaagatcagagcaagccttgcctcttatcttcgggaaaccagaatatgtttggggtggtaggagccacacagactcttctgagccccctcactcacttccttccccctgtgcctttcctttgagagtgaaggtgggtggagttgaccagagaaaggggagagaattcgggaaagacccaaagtgtttgtaattcttctttgtccttttacctacagaaatggtcacatggttctatttaaatagcctaataaacacatctggagcctgt

SEQ ID NO: 454649 - DNA, 1617 bp, Homo sapiens
cacagtgatccctgcgcgcgtctcctgctcgggtcagtgcgccgcgctgcgctgggcgccatggcgctccccggagcccgggctcgcggctgggcggcagcagccagagcggcccagaggcgccgccgcgtggagaacgcaggagggtccccgagtcctgagcctgcgggccggcgcgcggcgctttacgtacactggccttactgcgagaagcgctgcagttactgcaacttcaacaagtacatccctcgccgcctggaggaggctgccatgcagaagtgtctggtgaccgaagctcagacgctgctgcggctcagcggggtgcaacgggtggagtctgtgttctttggtggggggacccccagtctagccagtccccacacggtggctgctgtcctggaggctgtggcacaggcagcccacctgcctgcagacttggaagtcacattggaggctaatcctacttcagctccgggctccagactggcagagttcggggcagcaggggttaacaggttgtctataggcctccagtccctagatgacactgagctccggctgttgggacggacgcactcggcctgcgatgctctgcggacgctggcagaggcccggcgcctctttcccgggcgcgtgtctgtagacttgatgctggggctgccggcacagcaggtggggccgtggcttgggcagctgcaggaactgctgcaccactgtgatgaccacctctccctctaccagctgtccctggagcggggcaccgcactcttcgcccaggtgcagcggggtgcccttccagcccctgacccggagctcgcagctgagatgtaccagaggggccgggctgtccttcgggaggctggcttccaccagtatgaggtctccaactttgcccggaatgtaagttctggggctgatggctggaggtggaggatgggcagactgcagtgtgaccagggcgttgtgaccttctgaagagaaggatcctggccgagatggtgggacattctaacctggggccccttacctgagtctaaaaatgaggcctgccctcttcactctgcactatttcctccctccccgcagggggcgctcagtacccacaattggacttactggcagtgtggtcagtaccttggcgttgggcctggtgagtcccgtgaactacagaaagggtgactcaggagaggaatgtcgtggctgtgtgaacttgggccacattaacctctccaagcctctattttctcatatgtaaaatgtggcaaaaaataatacctccctatagaactgttgagcatgaattataaggggcttaatgttgcaccttgcactagggttctcagcctttagtgtgtatgagaatctcctggagggcttgttaaaacccaagctgctgggccccaccctcagaattcccaattggacagggctagaggagagcccaagaatttatatgtcttggcattttgggatagatgattaaaaaaaaaagaaaaagaaaaaagggcctggtgtcatgtgcctctaatctgagctacttgggaagctgaggtggaaagatcgtttgaccccaggcgtccaagaccagcctgggcagtatagtgagacaccacctca

SEQ ID NO: 454650 - DNA, 1012 bp, Homo sapiens
  misc_feature (923)..(923): n is a, c, g, or t
  misc_feature (929)..(929): n is a, c, g, or t
  misc_feature (944)..(944): n is a, c, g, or t
  misc_feature (994)..(994): n is a, c, g, or t
cacagtgatccctgcgcgcgtctcctgctcgggtcagtgcgccgcgctgcgctgggcgccatggcgctccccggagcccgggctcgcggctgggcggcagcagccagagcggcccagaggcgccgccgcgtggagaacgcaggagggtccccgagtcctgagcctgcgggccggcgcgcggcgctttacgtacactggccttactgcgagaagcgctgcagttactgcaacttcaacaagtacatccctcgccgcctggaggaggctgccatgcagaagtgtctggtgaccgaagctcagacgctgctgcggctcagcggggtgcaacgggtggagtctgtgttctttggtggggggacccccagtctagccagtccccacacggtggctgctgtcctggaggctgtggcacaggcagcccacctgcctgcagacttggaagtcacattggaggctaatcctacttcagctccgggctccagactggcagagttcggggcagcaggggttaacaggttgtctataggcctccagtccctagatgacactgagctccggctgttgggacggacgcactcggcctgcgatgctctgcggacgctggcagaggcccggcgcctctttcccgggcgcgtgtctgtagacttgatgctggggctgccggcacagcaggtggggccgtggcttgggcagctgcaggaactgctgcaccactgtgatgaccacctctccctctaccagctgtccctggagcggggcaccgcactcttcgcccaggtgcagcggggtgcccttccagcccctgacccggagctcgcagctgagatgtaccagaggggccgggctgtccttcgggaggctggcttccaccagtatgaggtctccaactttgcccggaatgggcgctcataccacattgactnctggcntgtgtcatacttgcnttggctgggcatggacattatgcccagggctggagcacaccggaggtggncaaaatggactgaactga

SEQ ID NO: 454651 - DNA, 2447 bp, Homo sapiens
cacagtgatccctgcgcgcgtctcctgctcgggtcagtgcgccgcgctgcgctgggcgccatggcgctccccggagcccgggctcgcggctgggcggcagcagccagagcggcccagaggcgccgccgcgtggagaacgcaggagggtccccgagtcctgagcctgcgggccggcgcgcggcgctttacgtacactggccttactgcgagaagcgctgcagttactgcaacttcaacaagtacatccctcgccgcctggaggaggctgccatgcagaagtgtctggtgaccgaagctcagacgctgctgcggctcagcggggtgcaacgggtggagtctgtgttctttggtggggggacccccagtctagccagtccccacacggtggctgctgtcctggaggctgtggcacaggcagcccacctgcctgcagacttggaagtcacattggaggctaatcctacttcagctccgggctccagactggcagagttcggggcagcaggggttaacaggttgtctataggcctccagtccctagatgacactgagctccggctgttgggacggacgcactcggcctgcgatgctctgcggacgctggcagaggcccggcgcctctttcccgggcgcgtgtctgtagacttgatgctggggctgccggcacagcaggtggggccgtggcttgggcagctgcaggaactgctgcaccactgtgatgaccacctctccctctaccagctgtccctggagcggggcaccgcactcttcgcccaggtgcagcggggtgcccttccagcccctgacccggagctcgcagctgagatgtaccagaggggccgggctgtccttcgggaggctggcttccaccagtatgaggtctccaactttgcccggaatggggcgctcagtacccacaattggacttactggcagtgtggtcagtaccttggcgttgggcctggggcccatggacgatttatgccccagggggctggaggccacacccgggaggctcggatccagacactggagcctgacaactggatgaaggaggctggaggaagttttggccctggggctacgcaccgatgtggggatcactcaccagcactggcagcagtttgagccccagctgaccctgtgggatgtgtttggagcgaacaaggaggtgcaggagctgctggagcggggcctactgcagctggatcacaggggtcttcggtgttcctgggagggtctggctgtgctggactctctcttgctgaccctcctgcctcagctccaagaagcctggcagcagagaaccccctcccctgtgccaggaggatgacaaaaatgttcctgtgttccagggtaatgccaggtgggttttgagagctgggtcggtactgcagacatctcttctccgttgtcgggtgccgtctctgctccttgtggttattgctcagccctggcatccccaggggaatggcagcagtgaggtagatgggaggacatttctggtcagggaactggcatcccattcagcatctcaggactcacaggccaacatgtgttccatggctgggaattgcctaccacccacatcagcttctgtttacctttttggcatcaaataatgaacagtgtttggaaatctttctacaggcaattacctccccaagagaagccttccttattttggagtaaggtcctaagatagctggatgaatcaggaaaaccatgtcccctctaggtattattaatataagcaggaagggatctactataggaatgaagtatttataaaccactgaaagggatagagaagtgaacattggagaaagccagtagcaactgtgagaaatcagcaacttgcaggaggcacagaaaactcctgctgatggtctcagcttccagcagcacaaaagcagatgatgtactggaaaatgctcagaagatgctacaaaacctcatgcctactgtctgccactgctggagaaggaatcatggtttctagaagtgcctctcattagtggactttaaagcaaatcctggctggcaggaaattctgaggaatatagctcttaggcttccagcctctaccatgcaggagagaacacagaaggactgatgtatgttggtggatccatgtatgtgtccagcacagcggcctgctggactctgagaactgggaaagatcagagcaagccttgcctcttatcttcgggaaaccagaatatgtttggggtggtaggagccacacagactcttctgagccccctcactcacttccttccccctgtgcctttcctttgagagtgaaggtgggtggagttgaccagagaaaggggagagaattcgggaaagacccaaagtgtttgtaattcttctttgtccttttacctacagaaatggtcacatggttctatttaaatagcctaataaacacatctggagcctgt

SEQ ID NO: 454652 - DNA, 2318 bp, Homo sapiens
ataggctaggtacgaggcgggtgttgaatcggccgaggactgcaacttcaacaagtacatccctcgccgcctggaggaggctgccatgcagaagtgtctggtgaccgaagctcagacgctgctgcggctcagcggggtgcaacgggtggagtctgtgttctttggtggggggacccccagtctagccagtccccacacggtggctgctgtcctggaggctgtggcacaggcagcccacctgcctgcagacttggaagtcacattggaggctaatcctacttcagctccgggctccagactggcagagttcggggcagcaggggttaacaggttgtctataggcctccagtccctagatgacactgagctccggctgttgggacggacgcactcggcctgcgatgctctgcggacgctggcagaggcccggcgcctctttcccgggcgcgtgtctgtagacttgatgctggggctgccggcacagcaggtggggccgtggcttgggcagctgcaggaactgctgcaccactgtgatgaccacctctccctctaccagctgtccctggagcggggcaccgcactcttcgcccaggtgcagcggggtgcccttccagcccctgacccggagctcgcagctgagatgtaccagaggggccgggctgtccttcgggaggctggcttccaccagtatgaggtctccaactttgcccggaatggggcgctcagtacccacaattggacttactggcagtgtggtcagtaccttggcgttgggcctggggcccatggacgatttatgccccagggggctggaggccacacccgggaggctcggatccagacactggagcctgacaactggatgaaggaggtgatgctgtttggccatggcacccggaagcgtgtccccctgggcaggctggagctgctggaggaagttttggccctggggctacgcaccgatgtggggatcactcaccagcactggcagcagtttgagccccagctgaccctgtgggatgtgtttggagcgaacaaggaggtgcaggagctgctggagcggggcctactgcagctggatcacaggggtcttcggtgttcctgggagggtctggctgtgctggactctctcttgctgaccctcctgcctcagctccaagaagcctggcagcagagaaccccctcccctgtgccaggaggatgacaaaaatgttcctgtgttccagggtaatgccaggtgggttttgagagctgggtcggtactgcagacatctcttctccgttgtcgggtgccgtctctgctccttgtggttattgctcagccctggcatccccaggggaatggcagcagtgaggtagatgggaggacatttctggtcagggaactggcatcccattcagcatctcaggactcacaggccaacatgtgttccatggctgggaattgcctaccacccacatcagcttctgtttacctttttggcatcaaataatgaacagtgtttggaaatctttctacaggcaattacctccccaagagaagccttccttattttggagtaaggtcctaagatagctggatgaatcaggaaaaccatgtcccctctaggtattattaatataagcaggaagggatctactataggaatgaagtatttataaaccactgaaagggatagagaagtgaacattggagaaagccagtagcaactgtgagaaatcagcaacttgcaggaggcacagaaaactcctgctgatggtctcagcttccagcagcacaaaagcagatgatgtactggaaaatgctcagaagatgctacaaaacctcatgcctactgtctgccactgctggagaaggaatcatggtttctagaagtgcctctcattagtggactttaaagcaaatcctggctggcaggaaattctgaggaatatagctcttaggcttccagcctctaccatgcaggagagaacacagaaggactgatgtatgttggtggatccatgtatgtgtccagcacagcggcctgctggactctgagaactgggaaagatcagagcaagccttgcctcttatcttcgggaaaccagaatatgtttggggtggtaggagccacacagactcttctgagccccctcactcacttccttccccctgtgcctttcctttgagagtgaaggtgggtggagttgaccagagaaaggggagagaattcgggaaagacccaaagtgtttgtaattcttctttgtccttttacctacagaaatggtcacatggttctatttaaatagcctaataaacacatctggagcctgt

SEQ ID NO: 454653 - DNA, 2125 bp, Homo sapiens
cacagtgatccctgcgcgcgtctcctgctcgggtcagtgcgccgcgctgcgctgggcgccatggcgctccccggagcccgggctcgcggctgggcggcagcagccagagcggcccagaggcgccgccgcgtggagaacgcaggagggtccccgagtcctgagcctgcgggccggcgcgcggcgctttacgtacactggccttactgcgagaagcgctgcagttactgcaacttcaacaagtacatccctcgccgcctggaggaggctgccatgcagaagtgtctggtgaccgaagctcagacgctgctgcggctcagcggggtgcaacgggtggagtctgtgttctttggtggggggacccccagtctagccagtccccacacggtggctgctgtcctggaggctgtggcacaggcagcccacctgcctgcagacttggaagtcacattggaggctaatcctacttcagctccgggctccagactggcagagttcggggcagcaggggttaacaggttgtctataggcctccagtccctagatgacactgagctccggctgttgggacggacgcactcggcctgcgatgctctgcggacgctggcagaggcccggcgcctctttcccgggcgcgtgtctgtagacttgatgctggggctgccggcacagcaggtggggccgtggcttgggcagctgcaggaactgctgcaccactgtgatgaccacctctccctctaccagctgtccctggagcggggcaccgcactcttcgcccaggtgcagcggggtgcccttccagcccctgacccggagctcgcagctgaggatgtgtttggagcgaacaaggaggtgcaggagctgctggagcggggcctactgcagctggatcacaggggtcttcggtgttcctgggagggtctggctgtgctggactctctcttgctgaccctcctgcctcagctccaagaagcctggcagcagagaaccccctcccctgtgccaggaggatgacaaaaatgttcctgtgttccagggtaatgccaggtgggttttgagagctgggtcggtactgcagacatctcttctccgttgtcgggtgccgtctctgctccttgtggttattgctcagccctggcatccccaggggaatggcagcagtgaggtagatgggaggacatttctggtcagggaactggcatcccattcagcatctcaggactcacaggccaacatgtgttccatggctgggaattgcctaccacccacatcagcttctgtttacctttttggcatcaaataatgaacagtgtttggaaatctttctacaggcaattacctccccaagagaagccttccttattttggagtaaggtcctaagatagctggatgaatcaggaaaaccatgtcccctctaggtattattaatataagcaggaagggatctactataggaatgaagtatttataaaccactgaaagggatagagaagtgaacattggagaaagccagtagcaactgtgagaaatcagcaacttgcaggaggcacagaaaactcctgctgatggtctcagcttccagcagcacaaaagcagatgatgtactggaaaatgctcagaagatgctacaaaacctcatgcctactgtctgccactgctggagaaggaatcatggtttctagaagtgcctctcattagtggactttaaagcaaatcctggctggcaggaaattctgaggaatatagctcttaggcttccagcctctaccatgcaggagagaacacagaaggactgatgtatgttggtggatccatgtatgtgtccagcacagcggcctgctggactctgagaactgggaaagatcagagcaagccttgcctcttatcttcgggaaaccagaatatgtttggggtggtaggagccacacagactcttctgagccccctcactcacttccttccccctgtgcctttcctttgagagtgaaggtgggtggagttgaccagagaaaggggagagaattcgggaaagacccaaagtgtttgtaattcttctttgtccttttacctacagaaatggtcacatggttctatttaaatagcctaataaacacatctggagcctgt

SEQ ID NO: 454654 - DNA, 1846 bp, Homo sapiens
ctcaattttctgagctctgtgaagcaatagatagataaagggtttccacttgtttttagggagcactgaaacctctcataggaagcacagtagataattatcaagcaaatccagagctgctctggataaagcagagccataaagccctggctagagctggctgagaggggagggaagagaggaggcatagaggaaggcctggcttggctggaagctgggttccagtctcagtggaataggagtgaagctgccctcctccctgctggcccattggcctggttctgctttcatgcatgtcagctgctgagatctccatgctgaactggaccctcccccacctctcaccataccccaactatgtggcccagagtagccaggccagctccccacctctgaccctctggcttccccagcactggcagcagtttgagccccagctgaccctgtgggatgtgtttggagcgaacaaggaggtgcaggagctgctggagcggggcctactgcagctggatcacaggtgtgttggggggtgccgggcagagggggctgaggcataccagggagccctgactacagctctccacagacccaggagaagtgagaaagactgactggggtcttcggtgttcctgggagggtctggctgtgctggactctctcttgctgaccctcctgcctcagctccaagaagcctggcagcagagaaccccctcccctgtgccaggaggatgacaaaaatgttcctgtgttccagggtaatgccaggtgggttttgagagctgggtcggtactgcagacatctcttctccgttgtcgggtgccgtctctgctccttgtggttattgctcagccctggcatccccaggggaatggcagcagtgaggtagatgggaggacatttctggtcagggaactggcatcccattcagcatctcaggactcacaggccaacatgtgttccatggctgggaattgcctaccacccacatcagcttctgtttacctttttggcatcaaataatgaacagtgtttggaaatctttctacaggcaattacctccccaagagaagccttccttattttggagtaaggtcctaagatagctggatgaatcaggaaaaccatgtcccctctaggtattattaatataagcaggaagggatctactataggaatgaagtatttataaaccactgaaagggatagagaagtgaacattggagaaagccagtagcaactgtgagaaatcagcaacttgcaggaggcacagaaaactcctgctgatggtctcagcttccagcagcacaaaagcagatgatgtactggaaaatgctcagaagatgctacaaaacctcatgcctactgtctgccactgctggagaaggaatcatggtttctagaagtgcctctcattagtggactttaaagcaaatcctggctggcaggaaattctgaggaatatagctcttaggcttccagcctctaccatgcaggagagaacacagaaggactgatgtatgttggtggatccatgtatgtgtccagcacagcggcctgctggactctgagaactgggaaagatcagagcaagccttgcctcttatcttcgggaaaccagaatatgtttggggtggtaggagccacacagactcttctgagccccctcactcacttccttccccctgtgcctttcctttgagagtgaaggtgggtggagttgaccagagaaaggggagagaattcgggaaagacccaaagtgtttgtaattcttctttgtccttttacctacagaaatggtcacatggttctatttaaatagcctaataaacacatctggagcctgt

SEQ ID NO: 454655 - DNA, 2116 bp, Homo sapiens
  misc_feature (1886)..(1886): n is a, c, g, or t
tttttttcaaattgtggacatcaaaaatgcagcctcatcattttcaaatgcctgtttaaggaaacatgtttattcagttttaaagcttcataacttgtagccttagagtttgcatctttcctggcatttctccgcactgtggtgtcaaggaaagagcatggctttcatgtcagacacatctgcaatcagatcctggctcagtcaacatgcattattagctcagtgtggctgtgtcagcttacttggctgctcttagccacaggttcttcctcttctaaacctcaggagattggtgaattcagtgaaaaaatgcatgtcaggccaccagcacagcatatggcaaatgacaccctcactaaacagtgatttttccttccctcttattctgcttgatagaattaaattatctttaaggtctgtgagtaatgtctgtttgtgtaattaagataggagtatttttataagattgtaatgacatgaaagaaactttccccattcccatagtgtctttaatttgctttaaaacacttgaattagtgaaaaagccagttatttattcgaatactataattttctcaaagaatgatcaccattttaagattaattccaatgttctttttcatatctaaataatgttggcatactactgacaagagaaacaagacaaatgtgagagatgtctgcgtttctcctattaataatattacaattggatgttagggtgcaggttaaatagcttttctttaattatattacaattgaatgttagggggcaagataaatagattttctctcaggttgataccctcctttaagtgaatgtgattaactgttgtttcatgttaatgagcattaagtcaagccagtaaaactgatctatttatagagcaaggagaaaatgtgtcatgaaatttggaacttaacagagatgtaatttgcttttttgcacagatgttgatgagtgtgcagaaaacataaacctctgtgagaacggacagtgccttaatgtcccgggtgcatatcgctgcgagtgtgagatgggcttcactccagcctcagacagcagatcctgccaaggtgggtcaccaggattccaactcattttcaagttggatcaaccacagtaaatgaaaccacaacaagggctggaacaagctccacctggaagcagaatacatagcacatgctgcactataaaagtcattcgtttaagcgtggattattttgccgaatgaataatgatgatggcggctttcatctcttatgaagttttcctggccaagagccagtagttggaagtttggatcattcttttttcttttttaaccatttcttctcttctttctcttttttatcactaaatgaatgacatgtggagaaactattcagcttttaaagtatgctccattacttgtctcaactaccactatttattgtgtttatcaaaatcataaaaagctcatttttggcatttaccttcgtggttgagactgctgtctgtatgtctgggaatggaagtcctcttcagggattcagcaagggctgtacttttgcttaatactagtggttccttattctaagtgatgacatcatccacctttcctagaaatgggtctttgtgcctagtatgatatctttccaagaaaaagaatttggattttctattaaattagaaactcaattcacattatatatagtttgagccatcattgtgttatgaatagggactatatgaaaatataaatgaagaaaggagagattgaaaataatttatacaccatagggcttcagtagaatttatgattcacagaaaacctttaaaaaaactcagtttgggccaggcgtggtggctcacgcctatattcccagctctttgggaggccgangcaggtggatcacctgaggttgggagttcaagaccagcctgaacaacatggagaaactccatctctactaaaaatacaaaattagctgggtatggtggctcatgcctgtaatcccagctactcaggaggcagaggcaggaaaattgcttgaaccctggaggcggaggttgcggtgagccaagattgcgccattgcactacagactggacaacaagagcgaaactcagtct

SEQ ID NO: 454656 - DNA, 10433 bp, Homo sapiens
atggggagaagacggaggctgtgtctccagctctacttcctgtggctgggctgtgtggtgctctgggcgcagggcacggccggccagcctcagcctcctccgcccaagccgccccggccccagccgccgccgcaacaggttcggtccgctacagcaggctctgaaggcgggtttctagcgcccgagtatcgcgaggagggtgccgcagtggccagccgcgtccgccggcgaggacagcaggacgtgctccgagggcccaacgtgtgcggctccagattccactcctactgctgccctggatggaagacgctccctggaggaaaccagtgcattgtcccgatttgtagaaatagttgtggagatggattttgttcccgtcctaacatgtgtacttgttccagtgggcaaatatcatcaacctgtggatcaaaatcaattcagcagtgcagtgtgagatgcatgaatggtgggacctgtgcagatgaccactgccagtgccagaaaggatatattggaacttattgtggacaacctgtctgtgaaaatggatgtcagaatggtggacgttgcatcggacccaaccgctgtgcttgtgtttatgggttcactggtccacagtgtgaaagagattacaggacaggcccgtgtttcactcaggtcaacaaccagatgtgccaagggcagctgacaggcattgtctgcacgaagactctgtgctgtgccaccattggacgggcgtggggccatccctgtgagatgtgtccagcccagcctcagccctgccgacggggtttcatccccaacatccgcactggagcttgccaagatgttgatgaatgccaggctatcccagggatatgccaaggaggaaactgtatcaatacagtgggctcttttgaatgcagatgccctgctggtcacaaacagagtgaaactactcagaaatgtgaagacattgatgagtgcagcatcattcctgggatatgtgaaactggtgaatgttccaacaccgtgggaagctatttttgtgtttgtccacgtggatatgtaacctcaacagatggctctcgatgcatcgatcagagaacaggcatgtgtttctcgggcctggtgaatggccgctgtgcacaagagctcccggggagaatgacgaaaatgcagtgctgctgtgagcctggccgctgctggggcatcggaaccattcctgaagcctgtcctgtcagaggttctgaggaatatcgcagactttgcatggatggacttccaatgggaggaattccagggagtgctggttccagacctggaggcactgggggaaatggctttgccccaagtggcaatggcaatggctatggcccaggagggacaggcttcatccccatccctggaggcaatggcttttctcctggcgttgggggagccggtgtgggggccgggggacagggacctatcatcactggactaacaattctgaaccagacaatagatatctgtaagcatcatgctaacctttgtttaaatggacgctgtataccaactgtctcaagctaccgatgtgaatgcaacatgggttataagcaggatgcaaatggagattgtatagatgttgatgaatgcacatcaaatccctgcactaatggagattgtgttaacacacctggttcctattattgtaaatgtcatgctggattccagaggactcctaccaagcaagcatgcattgatattgatgagtgcatccagaatggggttctttgtaaaaacggtcgatgcgtgaactcagatggaagtttccagtgcatttgcaatgccggctttgaattaactacagatggaaaaaactgtgttgatcatgatgaatgtacaactaccaacatgtgtttgaatggaatgtgcatcaatgaagatggcagcttcaagtgcatctgcaaaccaggatttgtcttggctccaaatgggcgttactgtactgatgttgatgaatgccagaccccaggaatctgcatgaatgggcactgcatcaacagtgaagggtccttccgctgtgactgtcccccaggcctggctgtgggcatggatggacgtgtgtgtgttgatactcacatgcgcagtacctgctatggaggaatcaagaaaggagtgtgtgtgcgtcctttccccggtgcagtgaccaagtccgaatgctgctgtgccaatccagactatggttttggagaaccctgccagccatgccctgcaaaaaattcagctgaattccacggcctttgtagtagtggagtaggtatcactgtggatggaagagatatcaatgaatgtgctttggatcctgatatatgtgccaatgggatttgtgaaaacttacgtggtagttaccgttgtaattgcaacagtggctatgaaccagatgcctctggaagaaactgtattgacattgatgaatgtttagtaaacagactgctttgtgataacggattgtgccgaaacacgccaggaagttacagctgtacgtgcccaccagggtatgtgttcaggactgagacagagacctgtgaagatataaatgaatgtgaaagcaacccatgtgtcaatggggcctgcagaaacaaccttggatctttcaattgtgaatgttcgcccggcagcaaactcagctccacaggattgatctgtattgacagcctgaaggggacctgttggctcaacatccaggacagccgctgtgaggtgaatattaatggagccactctgaaatctgaatgctgtgccaccctcggagccgcctgggggagcccctgtgagcggtgtgaactagatacagcttgcccaagagggcttgccaggattaaaggtgttacgtgtgaagatgttaatgagtgtgaggtgttccctggcgtttgtccaaatggacgctgtgtcaacagtaagggatcttttcattgcgagtgccctgaaggccttacgttggatgggactggccgtgtatgtttggatattcgcatggagcagtgttacttgaagtgggatgaagatgaatgcatccaccccgttcctggaaagttccgcatggatgcctgctgctgtgctgtcggggcggcttggggcaccgagtgtgaggagtgccccaaacctggcaccaaggaatacgagacactgtgcccccgcggggctggctttgctaaccgaggggatgttcttactgggcggccattttacaaagacatcaatgaatgcaaagcatttcctgggatgtgcacttatgggaagtgcagaaatacaatcggaagcttcaaatgccgttgcaatagtggctttgctctagacatggaggaaagaaactgcacggacatcgacgagtgcaggatttctcctgacctctgtggcagtggaatctgcgtcaatacaccgggcagctttgagtgcgagtgcttcgaaggctatgaaagtggcttcatgatgatgaagaactgcatggacattgacgaatgtgaacgtaaccctctcctttgtaggggtggcacctgtgtgaacactgagggcagctttcagtgtgactgcccactgggacacgagctgtcaccatcccgtgaggactgtgtggatattaatgaatgctccctgagtgacaatctctgcagaaatggaaaatgtgtgaacatgattggaacctatcagtgctcttgcaatcctggatatcaggctacgccagaccgccagggctgtacagatattgatgaatgtatgataatgaacggaggctgtgacacccagtgcacaaattcagagggaagctacgaatgcagctgcagtgagggttatgccctgatgccagatgggagatcgtgtgcagacattgatgaatgtgaaaacaatcctgatatctgtgatggcggccagtgtaccaacattcctggagagtatcgctgcctctgctatgatggcttcatggcttccatggacatgaaaacatgcattgatgtcaatgaatgtgacctaaattcaaatatctgcatgtttggggaatgtgagaacacaaagggatccttcatttgccactgtcagctgggttactcagtgaagaaggggaccacaggatgtacagatgtggatgagtgtgaaattggtgctcataactgcgacatgcatgcctcatgtctgaatatcccaggaagcttcaagtgtagctgcagagaaggctggattggaaacggcatcaagtgtattgatctggacgaatgttctaatggaacccaccagtgtagcatcaatgctcagtgtgtaaataccccgggctcataccgctgtgcctgctccgaaggtttcactggtgatggctttacctgctcagatgttgatgagtgtgcagaaaacataaacctctgtgagaacggacagtgccttaatgtcccgggtgcatatcgctgcgagtgtgagatgggcttcactccagcctcagacagcagatcctgccaagatattgatgaatgctccttccaaaacatttgtgtctctggaacatgtaataacctgcctggaatgtttcattgcatctgcgatgatggttatgaattggacagaacaggagggaactgtacagatattgatgagtgtgcagatcctataaactgtgtcaatggcctatgtgtcaacacgcctggtcgctatgagtgtaactgcccacccgattttcagttgaacccaactggtgtgggttgtgttgacaaccgtgtgggcaactgctacctgaagtttggacctcgaggagatgggagtctgtcttgcaacaccgagatcggggtgggcgtcagtcgctcttcatgctgctgctctctgggaaaggcctggggaaacccctgtgagacatgcccccctgtcaatagcactgaatattacaccctgtgtcccggaggtgaaggcttcagacctaaccccatcacaatcattttagaagacattgacgaatgccaggagttaccaggtctctgccagggtggaaactgcatcaacacttttgggagcttccagtgtgagtgcccacaaggctactacctcagcgaggatacccgcatctgtgaggatattgatgagtgttttgcacatcctggtgtgtgtgggcctgggacctgctataacaccctgggaaattacacctgcatttgcccacctgagtacatgcaggtcaatggaggccacaactgcatggacatgagaaaaagcttttgctaccgaagctataatggaaccacttgtgagaatgagttgcctttcaatgtgacaaaaaggatgtgctgctgcacatataatgtgggcaaagcttggaacaaaccttgtgaaccatgcccaactccaggaacagctgactttaaaaccatatgtggaaatattcctggattcacctttgacattcacacaggaaaagctgttgacattgatgaatgtaaagagattccaggcatttgtgcaaatggtgtgtgcattaaccagattggcagtttccgctgtgaatgccctacaggattcagttacaatgacctgctgttggtttgtgaagatatagatgagtgcagcaatggtgataatctctgccagcggaatgcagactgcatcaatagtcctggtagttaccgctgtgaatgtgccgcgggtttcaaactttcacccaatggggcctgtgtagatcgcaatgaatgtttagaaattcctaacgtttgcagtcatggcttgtgtgttgatctgcaaggaagttaccagtgcatctgccacaatggctttaaggcttctcaggaccagaccatgtgcatggatgttgatgagtgcgagcggcatccatgtggaaatggaacttgtaaaaacaccgttggatcctataactgtctgtgctacccagggtttgaactcactcataataatgattgcctggacatagatgagtgcagttccttttttggtcaggtgtgcagaaatggacgttgttttaatgaaattggttctttcaagtgtctatgtaacgaaggttatgaacttaccccagatggcaaaaactgtatagacactaatgagtgtgtcgcccttcccggctcttgctctcctggtacctgtcagaatttggagggatccttcagatgcatctgtcccccagggtatgaagtaaaaagcgagaactgcattgatataaatgaatgtgatgaagatcccaacatttgtctttttggttcctgtactaatactccagggggcttccagtgcctctgcccccctggctttgtactatctgataatggacggagatgctttgatactcgccagagcttctgcttcacaaattttgaaaatggaaagtgttctgtacccaaagctttcaacaccacaaaagcaaaatgctgctgtagtaagatgccaggagagggctggggggacccctgtgagctgtgccccaaagacgatgaagttgcatttcaggatttgtgtccatatggccatggaactgtccctagtcttcatgatacacgtgaagatgtcaatgagtgtcttgagagcccaggcatttgttcaaatggtcaatgtatcaacaccgacggatcttttcgctgtgaatgtccaatgggctacaaccttgactacactggagtacgctgtgtggatactgatgagtgttcaatcggcaatccgtgtggaaatggtacatgcaccaatgttattgggagttttgaatgcaattgcaatgaaggctttgagccagggcccatgatgaattgtgaagatatcaacgaatgtgcccagaacccactgctgtgtgctttacgctgcatgaacacttttgggtcctatgaatgcacgtgcccgattggctatgccctcagggaagatcaaaagatgtgcaaagatctggatgaatgtgctgaagggttacacgactgtgaatctaggggcatgatgtgtaagaatctaatcggcaccttcatgtgcatctgccctcctggaatggcccgaaggcccgatggagaaggctgtgtagatgaaaatgaatgcaggaccaagccaggaatctgtgaaaatggacgttgtgttaacattattggaagctatagatgtgagtgtaatgaaggattccagtcaagttcttcaggcactgaatgccttgacaatcgacagggtctctgctttgcagaggtactgcagacaatatgtcaaatggcatccagtagtcgcaatctcgtcactaagtcagaatgctgctgtgatggtgggcgaggctggggccaccagtgcgagctttgcccacttcctggaactgcccagtacaaaaagatatgtcctcatggcccaggatatacaactgatggaagagatattgatgaatgtaaggtaatgccaaacctctgcaccaatggtcagtgcatcaataccatgggctcattccgatgcttctgcaaggttggctacaccacagacatcagtggaacctcttgtatagaccttgatgaatgctcccagtccccgaaaccatgcaactacatctgcaagaacactgaggggagttatcagtgttcatgtccgagggggtatgtcctgcaagaggatggaaagacatgcaaagaccttgatgaatgtcaaacaaagcagcataactgccagttcctctgtgtcaacaccctgggggggtttacctgtaaatgtccacctggtttcacacagcatcacactgcttgtatcgacaacaacgaatgtgggtctcaaccttcgctttgtggagcaaagggaatctgtcaaaacactccaggcagtttcagctgtgaatgccaaagagggttctctcttgatgccaccggactgaactgtgaagatgttgatgaatgtgatgggaaccacaggtgccaacacggctgccagaacatcctgggtggctacagatgtggctgcccccaaggctacatccagcactaccagtggaatcagtgtgtcgatgagaatgaatgctccaatcccaatgcctgtggctctgcttcctgctacaacaccctggggagttacaagtgcgcctgcccctcggggttctccttcgaccagttctccagtgcctgccacgacgtgaatgagtgctcgtcctccaagaacccctgcaattacggctgctctaacacggaggggggctacctctgtggctgcccccctgggtattacagagtgggacaaggccactgtgtctcaggaatgggatttaacaaggggcagtacctgtcactggatacagaggtcgatgaggaaaatgctctgtccccagaagcatgctacgagtgcaaaatcaacggctattctaagaaagacagcaggcagaagagaagtattcatgaacctgatcccactgctgttgaacagatcagcctagagagtgtcgacatggacagccccgtcaacatgaagttcaacctctcccacctcggctctaaggagcacatcctggaactaaggcccgccatccagcccctcaacaaccacatccgttatgtcatctctcaagggaacgatgacagcgtcttccgcatccaccaaaggaatgggctcagctacttgcacacggccaagaagaagctcatgcccggcacatacacactggaaatcactagcatccctctctacaagaagaaggagcttaagaaactggaagagagcaatgaggatgactacctcctaggggagcttggggaggctctcagaatgaggctgcagattcagctctattaacccttcacagacttgggcccaggctcaaatcctagcacagccagtctgcagaagcatttgaaaagtcaaggactaattttaaagaggaaaaataataataactcttgtttctttcctccctgtcttagactttgaatgttgaccctcacagggagggataatttagactctggtatggccaaagatttgagcacaaaggcaaccgtggttactgtattttttatataacttcattttaaaatatattaaaagaaacctaaatgttcaagatatcagcatatggcactaaatgcacaaaaataatgtgagctttttttttttttcctgttagcagtctgtaacactttgggtattttgctatagttgctaattaaaaaaatatagatgtttatttatttttaatgcagtaatatatggagaaatgaacaaactatgtaaacaaaaagggaaactcacttgtttttctttagatttataaatttgagctattttttttagaggtgctttttaaaaatccaatagatacaagagatgtttcctttggttttctgccagtcatccagctgatacacacctgatgattttaaagaaagccacacagagctgaatgggcagtgtaatcaataatttaaaagacatgaatgtcattagatcctttataacgtagatcgaagccaaagcagctcatttgtgacaacatttcatatcaccagacacaccaggcaacagaagttgaagcacaaccactgtagcaaaataccttgactgcttgtgagaccattagcattgcaggccaaaccgtactgtatttccttctcataacctcaaggaaccatatgtgctacccacaacacctcattcttacccagggtgcgctgcgtcctcatggtactgtaggcagctgaagaaccgccgttcccttgaaagggaacacctggcattctgtggtgtttcgtgctgtcttaaataatggtgcatttattatgttcaagttatttcaggattgccatatgtgcaaacaaatcatgcaatgcagccaaggaatatatgttgttgttgttgttttaaacccattttttttttagaattttcattaatactgtagttatacaccatatgcctcattttatcatagcctattgtgtatgaaagatgtttgtacaatgaattgatgtttagtttgctttagtcatttaaaaagatattgtaccaggatgtgctattaagagcacgtatccattattcttctcaacccaagaacctgtttcctggaccagtgaccaaacctcatatgtgaaatggccaaagcacatgcaggctcctggttgttcctctcaaacctgtgctgaccaaagattagtaaccagttatacccagtattttgaggttttattgtttttttaataactaaaaaagaaaaaaggaacagtgtaaatttgtaatcaagagtttgtgaggaaaaacttatggtttttggttttgtttgtttttgtaggtctgtgtatcaaatatgacacttttcttgcaataaagcttattttggggtatttttctgactgaaaattttatgagaccacaacgcctgttgtatttgcgggaggggctgggggctttgtctatgggaacctgtattgaagtaataatagagagccagacacacaggaaaataaaggaatgctggcaaatctgtgaag

SEQ ID NO: 454657 - DNA, 8358 bp, Homo sapiens
atggggagaagacggaggctgtgtctccagctctacttcctgtggctgggctgtgtggtgctctgggcgcagggcacggccggccagcctcagcctcctccgcccaagccgccccggccccagccgccgccgcaacaggttcggtccgctacagcaggctctgaaggcgggtttctagcgcccgagtatcgcgaggagggtgccgcagtggccagccgcgtccgccggcgaggacagcaggacgtgctccgagggcccaacgtgtgcggctccagattccactcctactgctgccctggatggaagacgctccctggaggaaaccagtgcattgtcccgatttgtagaaatagttgtggagatggattttgttcccgtcctaacatgtgtacttgttccagtgggcaaatatcatcaacctgtggatcaaaatcaattcagcagtgcagtgtgagatgcatgaatggtgggacctgtgcagatgaccactgccagtgccagaaaggatatattggaacttattgtggacaacctgtctgtgaaaatggatgtcagaatggtggacgttgcatcggacccaaccgctgtgcttgtgtttatgggttcactggtccacagtgtgaaagagattacaggacaggcccgtgtttcactcaggtcaacaaccagatgtgccaagggcagctgacaggcattgtctgcacgaagactctgtgctgtgccaccattggacgggcgtggggccatccctgtgagatgtgtccagcccagcctcagccctgccgacggggtttcatccccaacatccgcactggagcttgccaagatgttgatgaatgccaggctatcccagggatatgccaaggaggaaactgtatcaatacagtgggctcttttgaatgcagatgccctgctggtcacaaacagagtgaaactactcagaaatgtgaagacattgatgagtgcagcatcattcctgggatatgtgaaactggtgaatgttccaacaccgtgggaagctatttttgtgtttgtccacgtggatatgtaacctcaacagatggctctcgatgcatcgatcagagaacaggcatgtgtttctcgggcctggtgaatggccgctgtgcacaagagctcccggggagaatgacgaaaatgcagtgctgctgtgagcctggccgctgctggggcatcggaaccattcctgaagcctgtcctgtcagaggttctgaggaatatcgcagactttgcatggatggacttccaatgggaggaattccagggagtgctggttccagacctggaggcactgggggaaatggctttgccccaagtggcaatggcaatggctatggcccaggagggacaggcttcatccccatccctggaggcaatggcttttctcctggcgttgggggagccggtgtgggggccgggggacagggacctatcatcactggactaacaattctgaaccagacaatagatatctgtaagcatcatgctaacctttgtttaaatggacgctgtataccaactgtctcaagctaccgatgtgaatgcaacatgggttataagcaggatgcaaatggagattgtatagatgttgatgaatgcacatcaaatccctgcactaatggagattgtgttaacacacctggttcctattattgtaaatgtcatgctggattccagaggactcctaccaagcaagcatgcattgatattgatgagtgcatccagaatggggttctttgtaaaaacggtcgatgcgtgaactcagatggaagtttccagtgcatttgcaatgccggctttgaattaactacagatggaaaaaactgtgttgatcatgatgaatgtacaactaccaacatgtgtttgaatggaatgtgcatcaatgaagatggcagcttcaagtgcatctgcaaaccaggatttgtcttggctccaaatgggcgttactgtactgatgttgatgaatgccagaccccaggaatctgcatgaatgggcactgcatcaacagtgaagggtccttccgctgtgactgtcccccaggcctggctgtgggcatggatggacgtgtgtgtgttgatactcacatgcgcagtacctgctatggaggaatcaagaaaggagtgtgtgtgcgtcctttccccggtgcagtgaccaagtccgaatgctgctgtgccaatccagactatggttttggagaaccctgccagccatgccctgcaaaaaattcagctgaattccacggcctttgtagtagtggagtaggtatcactgtggatggaagagatatcaatgaatgtgctttggatcctgatatatgtgccaatgggatttgtgaaaacttacgtggtagttaccgttgtaattgcaacagtggctatgaaccagatgcctctggaagaaactgtattgacattgatgaatgtttagtaaacagactgctttgtgataacggattgtgccgaaacacgccaggaagttacagctgtacgtgcccaccagggtatgtgttcaggactgagacagagacctgtgaagatataaatgaatgtgaaagcaacccatgtgtcaatggggcctgcagaaacaaccttggatctttcaattgtgaatgttcgcccggcagcaaactcagctccacaggattgatctgtattgacagcctgaaggggacctgttggctcaacatccaggacagccgctgtgaggtgaatattaatggagccactctgaaatctgaatgctgtgccaccctcggagccgcctgggggagcccctgtgagcggtgtgaactagatacagcttgcccaagagggcttgccaggattaaaggtgttacgtgtgaagatgttaatgagtgtgaggtgttccctggcgtttgtccaaatggacgctgtgtcaacagtaagggatcttttcattgcgagtgccctgaaggccttacgttggatgggactggccgtgtatgtttggatattcgcatggagcagtgttacttgaagtgggatgaagatgaatgcatccaccccgttcctggaaagttccgcatggatgcctgctgctgtgctgtcggggcggcttggggcaccgagtgtgaggagtgccccaaacctggcaccaaggaatacgagacactgtgcccccgcggggctggctttgctaaccgaggggatgttcttactgggcggccattttacaaagacatcaatgaatgcaaagcatttcctgggatgtgcacttatgggaagtgcagaaatacaatcggaagcttcaaatgccgttgcaatagtggctttgctctagacatggaggaaagaaactgcacggacatcgacgagtgcaggatttctcctgacctctgtggcagtggaatctgcgtcaatacaccgggcagctttgagtgcgagtgcttcgaaggctatgaaagtggcttcatgatgatgaagaactgcatggacattgacgaatgtgaacgtaaccctctcctttgtaggggtggcacctgtgtgaacactgagggcagctttcagtgtgactgcccactgggacacgagctgtcaccatcccgtgaggactgtgtggatattaatgaatgctccctgagtgacaatctctgcagaaatggaaaatgtgtgaacatgattggaacctatcagtgctcttgcaatcctggatatcaggctacgccagaccgccagggctgtacagatattgatgaatgtatgataatgaacggaggctgtgacacccagtgcacaaattcagagggaagctacgaatgcagctgcagtgagggttatgccctgatgccagatgggagatcgtgtgcagacattgatgaatgtgaaaacaatcctgatatctgtgatggcggccagtgtaccaacattcctggagagtatcgctgcctctgctatgatggcttcatggcttccatggacatgaaaacatgcattgatgtcaatgaatgtgacctaaattcaaatatctgcatgtttggggaatgtgagaacacaaagggatccttcatttgccactgtcagctgggttactcagtgaagaaggggaccacaggatgtacagatgtggatgagtgtgaaattggtgctcataactgcgacatgcatgcctcatgtctgaatatcccaggaagcttcaagtgtagctgcagagaaggctggattggaaacggcatcaagtgtattgatctggacgaatgttctaatggaacccaccagtgtagcatcaatgctcagtgtgtaaataccccgggctcataccgctgtgcctgctccgaaggtttcactggtgatggctttacctgctcagatgttgatgagtgtgcagaaaacataaacctctgtgagaacggacagtgccttaatgtcccgggtgcatatcgctgcgagtgtgagatgggcttcactccagcctcagacagcagatcctgccaagatattgatgaatgctccttccaaaacatttgtgtctctggaacatgtaataacctgcctggaatgtttcattgcatctgcgatgatggttatgaattggacagaacaggagggaactgtacagatattgatgagtgtgcagatcctataaactgtgtcaatggcctatgtgtcaacacgcctggtcgctatgagtgtaactgcccacccgattttcagttgaacccaactggtgtgggttgtgttgacaaccgtgtgggcaactgctacctgaagtttggacctcgaggagatgggagtctgtcttgcaacaccgagatcggggtgggcgtcagtcgctcttcatgctgctgctctctgggaaaggcctggggaaacccctgtgagacatgcccccctgtcaatagcactgaatattacaccctgtgtcccggaggtgaaggcttcagacctaaccccatcacaatcattttagaagacattgacgaatgccaggagttaccaggtctctgccagggtggaaactgcatcaacacttttgggagcttccagtgtgagtgcccacaaggctactacctcagcgaggatacccgcatctgtgaggatattgatgagtgttttgcacatcctggtgtgtgtgggcctgggacctgctataacaccctgggaaattacacctgcatttgcccacctgagtacatgcaggtcaatggaggccacaactgcatggacatgagaaaaagcttttgctaccgaagctataatggaaccacttgtgagaatgagttgcctttcaatgtgacaaaaaggatgtgctgctgcacatataatgtgggcaaagcttggaacaaaccttgtgaaccatgcccaactccaggaacagctgactttaaaaccatatgtggaaatattcctggattcacctttgacattcacacaggaaaagctgttgacattgatgaatgtaaagagattccaggcatttgtgcaaatggtgtgtgcattaaccagattggcagtttccgctgtgaatgccctacaggattcagttacaatgacctgctgttggtttgtgaagatatagatgagtgcagcaatggtgataatctctgccagcggaatgcagactgcatcaatagtcctggtagttaccgctgtgaatgtgccgcgggtttcaaactttcacccaatggggcctgtgtagatcgcaatgaatgtttagaaattcctaacgtttgcagtcatggcttgtgtgttgatctgcaaggaagttaccagtgcatctgccacaatggctttaaggcttctcaggaccagaccatgtgcatggatgttgatgagtgcgagcggcatccatgtggaaatggaacttgtaaaaacaccgttggatcctataactgtctgtgctacccagggtttgaactcactcataataatgattgcctggacatagatgagtgcagttccttttttggtcaggtgtgcagaaatggacgttgttttaatgaaattggttctttcaagtgtctatgtaacgaaggttatgaacttaccccagatggcaaaaactgtatagacactaatgagtgtgtcgcccttcccggctcttgctctcctggtacctgtcagaatttggagggatccttcagatgcatctgtcccccagggtatgaagtaaaaagcgagaactgcattgatataaatgaatgtgatgaagatcccaacatttgtctttttggttcctgtactaatactccagggggcttccagtgcctctgcccccctggctttgtactatctgataatggacggagatgctttgatactcgccagagcttctgcttcacaaattttgaaaatggaaaatgctctgtccccagaagcatgctacgagtgcaaaatcaacggctattctaagaaagacagcaggcagaagagaagtattcatgaacctgatcccactgctgttgaacagatcagcctagagagtgtcgacatggacagccccgtcaacatgaagttcaacctctcccacctcggctctaaggagcacatcctggaactaaggcccgccatccagcccctcaacaaccacatccgttatgtcatctctcaagggaacgatgacagcgtcttccgcatccaccaaaggaatgggctcagctacttgcacacggccaagaagaagctcatgcccggcacatacacactggaaatcactagcatccctctctacaagaagaaggagcttaagaaactggaagagagcaatgaggatgactacctcctaggggagcttggggaggctctcagaatgaggctgcagattcagctctattaacccttcacagacttgggcccaggctcaaatcctagcacagccagtctgcagaagcatttgaaaagtcaaggactaattttaaagaggaaaaataataataactcttgtttctttcctccctgtcttagactttgaatgttgaccctcacagggagggataatttagactctggtatggccaaagatttgagcacaaaggcaaccgtggttactgtattttttatataacttcattttaaaatatattaaaagaaacctaaatgttcaagatatcagcatatggcactaaatgcacaaaaataatgtgagctttttttttttttcctgttagcagtctgtaacactttgggtattttgctatagttgctaattaaaaaaatatagatgtttatttatttttaatgcagtaatatatggagaaatgaacaaactatgtaaacaaaaagggaaactcacttgtttttctttagatttataaatttgagctattttttttagaggtgctttttaaaaatccaatagatacaagagatgtttcctttggttttctgccagtcatccagctgatacacacctgatgattttaaagaaagccacacagagctgaatgggcagtgtaatcaataatttaaaagacatgaatgtcattagatcctttataacgtagatcgaagccaaagcagctcatttgtgacaacatttcatatcaccagacacaccaggcaacagaagttgaagcacaaccactgtagcaaaataccttgactgcttgtgagaccattagcattgcaggccaaaccgtactgtatttccttctcataacctcaaggaaccatatgtgctacccacaacacctcattcttacccagggtgcgctgcgtcctcatggtactgtaggcagctgaagaaccgccgttcccttgaaagggaacacctggcattctgtggtgtttcgtgctgtcttaaataatggtgcatttattatgttcaagttatttcaggattgccatatgtgcaaacaaatcatgcaatgcagccaaggaatatatgttgttgttgttgttttaaacccattttttttttagaattttcattaatactgtagttatacaccatatgcctcattttatcatagcctattgtgtatgaaagatgtttgtacaatgaattgatgtttagtttgctttagtcatttaaaaagatattgtaccaggatgtgctattaagagcacgtatccattattcttctcaacccaagaacctgtttcctggaccagtgaccaaacctcatatgtgaaatggccaaagcacatgcaggctcctggttgttcctctcaaacctgtgctgaccaaagattagtaaccagttatacccagtattttgaggttttattgtttttttaataactaaaaaagaaaaaaggaacagtgtaaatttgtaatcaagagtttgtgaggaaaaacttatggtttttggttttgtttgtttttgtaggtctgtgtatcaaatatgacacttttcttgcaataaagcttattttggggta

SEQ ID NO: 454658 - DNA, 6646 bp, Homo sapiens
gctcggtaccccatgccctcatccagtggcacgccctcatcaagtggaccacagagaccacctgcttggcgcgccgtcgcttttccgagagggtggctgactccggggtgctggggctggggctgccgcccccgccgctgttgctgtactcctcgccccactggatgagggcatgcatgccctcatccagtgggagatcgtgtgcagacattgatgaatgtgaaaacaatcctgatatctgtgatggcggccagtgtaccaacattcctggagagtatcgctgcctctgctatgatggcttcatggcttccatggacatgaaaacatgcattgatgtcaatgaatgtgacctaaattcaaatatctgcatgtttggggaatgtgagaacacaaagggatccttcatttgccactgtcagctgggttactcagtgaagaaggggaccacaggatgtacagatgtggatgagtgtgaaattggtgctcataactgcgacatgcatgcctcatgtctgaatatcccaggaagcttcaagtgtagctgcagagaaggctggattggaaacggcatcaagtgtattgatctggacgaatgttctaatggaacccaccagtgtagcatcaatgctcagtgtgtaaataccccgggctcataccgctgtgcctgctccgaaggtttcactggtgatggctttacctgctcagatgttgatgagtgtgcagaaaacataaacctctgtgagaacggacagtgccttaatgtcccgggtgcatatcgctgcgagtgtgagatgggcttcactccagcctcagacagcagatcctgccaagatattgatgaatgctccttccaaaacatttgtgtctctggaacatgtaataacctgcctggaatgtttcattgcatctgcgatgatggttatgaattggacagaacaggagggaactgtacagatattgatgagtgtgcagatcctataaactgtgtcaatggcctatgtgtcaacacgcctggtcgctatgagtgtaactgcccacccgattttcagttgaacccaactggtgtgggttgtgttgacaaccgtgtgggcaactgctacctgaagtttggacctcgaggagatgggagtctgtcttgcaacaccgagatcggggtgggcgtcagtcgctcttcatgctgctgctctctgggaaaggcctggggaaacccctgtgagacatgcccccctgtcaatagcactgaatattacaccctgtgtcccggaggtgaaggcttcagacctaaccccatcacaatcattttagaagacattgacgaatgccaggagttaccaggtctctgccagggtggaaactgcatcaacacttttgggagcttccagtgtgagtgcccacaaggctactacctcagcgaggatacccgcatctgtgaggatattgatgagtgttttgcacatcctggtgtgtgtgggcctgggacctgctataacaccctgggaaattacacctgcatttgcccacctgagtacatgcaggtcaatggaggccacaactgcatggacatgagaaaaagcttttgctaccgaagctataatggaaccacttgtgagaatgagttgcctttcaatgtgacaaaaaggatgtgctgctgcacatataatgtgggcaaagcttggaacaaaccttgtgaaccatgcccaactccaggaacagctgactttaaaaccatatgtggaaatattcctggattcacctttgacattcacacaggaaaagctgttgacattgatgaatgtaaagagattccaggcatttgtgcaaatggtgtgtgcattaaccagattggcagtttccgctgtgaatgccctacaggattcagttacaatgacctgctgttggtttgtgaagatatagatgagtgcagcaatggtgataatctctgccagcggaatgcagactgcatcaatagtcctggtagttaccgctgtgaatgtgccgcgggtttcaaactttcacccaatggggcctgtgtagatcgcaatgaatgtttagaaattcctaacgtttgcagtcatggcttgtgtgttgatctgcaaggaagttaccagtgcatctgccacaatggctttaaggcttctcaggaccagaccatgtgcatggatgttgatgagtgcgagcggcatccatgtggaaatggaacttgtaaaaacaccgttggatcctataactgtctgtgctacccagggtttgaactcactcataataatgattgcctggacatagatgagtgcagttccttttttggtcaggtgtgcagaaatggacgttgttttaatgaaattggttctttcaagtgtctatgtaacgaaggttatgaacttaccccagatggcaaaaactgtatagacactaatgagtgtgtcgcccttcccggctcttgctctcctggtacctgtcagaatttggagggatccttcagatgcatctgtcccccagggtatgaagtaaaaagcgagaactgcattgatataaatgaatgtgatgaagatcccaacatttgtctttttggttcctgtactaatactccagggggcttccagtgcctctgcccccctggctttgtactatctgataatggacggagatgctttgatactcgccagagcttctgcttcacaaattttgaaaatggaaagtgttctgtacccaaagctttcaacaccacaaaagcaaaatgctgctgtagtaagatgccaggagagggctggggggacccctgtgagctgtgccccaaagacgatgaagttgcatttcaggatttgtgtccatatggccatggaactgtccctagtcttcatgatacacgtgaagatgtcaatgagtgtcttgagagcccaggcatttgttcaaatggtcaatgtatcaacaccgacggatcttttcgctgtgaatgtccaatgggctacaaccttgactacactggagtacgctgtgtggatactgatgagtgttcaatcggcaatccgtgtggaaatggtacatgcaccaatgttattgggagttttgaatgcaattgcaatgaaggctttgagccagggcccatgatgaattgtgaagatatcaacgaatgtgcccagaacccactgctgtgtgctttacgctgcatgaacacttttgggtcctatgaatgcacgtgcccgattggctatgccctcagggaagatcaaaagatgtgcaaagatctggatgaatgtgctgaagggttacacgactgtgaatctaggggcatgatgtgtaagaatctaatcggcaccttcatgtgcatctgccctcctggaatggcccgaaggcccgatggagaaggctgtgtagatgaaaatgaatgcaggaccaagccaggaatctgtgaaaatggacgttgtgttaacattattggaagctatagatgtgagtgtaatgaaggattccagtcaagttcttcaggcactgaatgccttgacaatcgacagggtctctgctttgcagaggtactgcagacaatatgtcaaatggcatccagtagtcgcaatctcgtcactaagtcagaatgctgctgtgatggtgggcgaggctggggccaccagtgcgagctttgcccacttcctggaactgcccagtacaaaaagatatgtcctcatggcccaggatatacaactgatggaagagatattgatgaatgtaaggtaatgccaaacctctgcaccaatggtcagtgcatcaataccatgggctcattccgatgcttctgcaaggttggctacaccacagacatcagtggaacctcttgtatagaccttgatgaatgctcccagtccccgaaaccatgcaactacatctgcaagaacactgaggggagttatcagtgttcatgtccgagggggtatgtcctgcaagaggatggaaagacatgcaaagaccttgatgaatgtcaaacaaagcagcataactgccagttcctctgtgtcaacaccctgggggggtttacctgtaaatgtccacctggtttcacacagcatcacactgcttgtatcgacaacaacgaatgtgggtctcaaccttcgctttgtggagcaaagggaatctgtcaaaacactccaggcagtttcagctgtgaatgccaaagagggttctctcttgatgccaccggactgaactgtgaagatgttgatgaatgtgatgggaaccacaggtgccaacacggctgccagaacatcctgggtggctacagatgtggctgcccccaaggctacatccagcactaccagtggaatcagtgtgtcgatgagaatgaatgctccaatcccaatgcctgtggctctgcttcctgctacaacaccctggggagttacaagtgcgcctgcccctcggggttctccttcgaccagttctccagtgcctgccacgacgtgaatgagtgctcgtcctccaagaacccctgcaattacggctgctctaacacggaggggggctacctctgtggctgcccccctgggtattacagagtgggacaaggccactgtgtctcaggaatgggatttaacaaggggcagtacctgtcactggatacagaggtcgatgaggaaaatgctctgtccccagaagcatgctacgagtgcaaaatcaacggctattctaagaaagacagcaggcagaagagaagtattcatgaacctgatcccactgctgttgaacagatcagcctagagagtgtcgacatggacagccccgtcaacatgaagttcaacctctcccacctcggctctaaggagcacatcctggaactaaggcccgccatccagcccctcaacaaccacatccgttatgtcatctctcaagggaacgatgacagcgtcttccgcatccaccaaaggaatgggctcagctacttgcacacggccaagaagaagctcatgcccggcacatacacactggaaatcactagcatccctctctacaagaagaaggagcttaagaaactggaagagagcaatgaggatgactacctcctaggggagcttggggaggctctcagaatgaggctgcagattcagctctattaacccttcacagacttgggcccaggctcaaatcctagcacagccagtctgcagaagcatttgaaaagtcaaggactaattttaaagaggaaaaataataataactcttgtttctttcctccctgtcttagactttgaatgttgaccctcacagggagggataatttagactctggtatggccaaagatttgagcacaaaggcaaccgtggttactgtattttttatataacttcattttaaaatatattaaaagaaacctaaatgttcaagatatcagcatatggcactaaatgcacaaaaataatgtgagctttttttttttttcctgttagcagtctgtaacactttgggtattttgctatagttgctaattaaaaaaatatagatgtttatttatttttaatgcagtaatatatggagaaatgaacaaactatgtaaacaaaaagggaaactcacttgtttttctttagatttataaatttgagctattttttttagaggtgctttttaaaaatccaatagatacaagagatgtttcctttggttttctgccagtcatccagctgatacacacctgatgattttaaagaaagccacacagagctgaatgggcagtgtaatcaataatttaaaagacatgaatgtcattagatcctttataacgtagatcgaagccaaagcagctcatttgtgacaacatttcatatcaccagacacaccaggcaacagaagttgaagcacaaccactgtagcaaaataccttgactgcttgtgagaccattagcattgcaggccaaaccgtactgtatttccttctcataacctcaaggaaccatatgtgctacccacaacacctcattcttacccagggtgcgctgcgtcctcatggtactgtaggcagctgaagaaccgccgttcccttgaaagggaacacctggcattctgtggtgtttcgtgctgtcttaaataatggtgcatttattatgttcaagttatttcaggattgccatatgtgcaaacaaatcatgcaatgcagccaaggaatatatgttgttgttgttgttttaaacccattttttttttagaattttcattaatactgtagttatacaccatatgcctcattttatcatagcctattgtgtatgaaagatgtttgtacaatgaattgatgtttagtttgctttagtcatttaaaaagatattgtaccaggatgtgctattaagagcacgtatccattattcttctcaacccaagaacctgtttcctggaccagtgaccaaacctcatatgtgaaatggccaaagcacatgcaggctcctggttgttcctctcaaacctgtgctgaccaaagattagtaaccagttatacccagtattttgaggttttattgtttttttaataactaaaaaagaaaaaaggaacagtgtaaatttgtaatcaagagtttgtgaggaaaaacttatggtttttggttttgtttgtttttgtaggtctgtgtatcaaatatgacacttttcttgcaataaagcttattttggggta

SEQ ID NO: 454659 - DNA, 6892 bp, Homo sapiens
tttttttcaaattgtggacatcaaaaatgcagcctcatcattttcaaatgcctgtttaaggaaacatgtttattcagttttaaagcttcataacttgtagccttagagtttgcatctttcctggcatttctccgcactgtggtgtcaaggaaagagcatggctttcatgtcagacacatctgcaatcagatcctggctcagtcaacatgcattattagctcagtgtggctgtgtcagcttacttggctgctcttagccacaggttcttcctcttctaaacctcaggagattggtgaattcagtgaaaaaatgcatgtcaggccaccagcacagcatatggcaaatgacaccctcactaaacagtgatttttccttccctcttattctgcttgatagaattaaattatctttaaggtctgtgagtaatgtctgtttgtgtaattaagataggagtatttttataagattgtaatgacatgaaagaaactttccccattcccatagtgtctttaatttgctttaaaacacttgaattagtgaaaaagccagttatttattcgaatactataattttctcaaagaatgatcaccattttaagattaattccaatgttctttttcatatctaaataatgttggcatactactgacaagagaaacaagacaaatgtgagagatgtctgcgtttctcctattaataatattacaattggatgttagggtgcaggttaaatagcttttctttaattatattacaattgaatgttagggggcaagataaatagattttctctcaggttgataccctcctttaagtgaatgtgattaactgttgtttcatgttaatgagcattaagtcaagccagtaaaactgatctatttatagagcaaggagaaaatgtgtcatgaaatttggaacttaacagagatgtaatttgcttttttgcacagatgttgatgagtgtgcagaaaacataaacctctgtgagaacggacagtgccttaatgtcccgggtgcatatcgctgcgagtgtgagatgggcttcactccagcctcagacagcagatcctgccaagatattgatgaatgctccttccaaaacatttgtgtctctggaacatgtaataacctgcctggaatgtttcattgcatctgcgatgatggttatgaattggacagaacaggagggaactgtacagatattgatgagtgtgcagatcctataaactgtgtcaatggcctatgtgtcaacacgcctggtcgctatgagtgtaactgcccacccgattttcagttgaacccaactggtgtgggttgtgttgacaaccgtgtgggcaactgctacctgaagtttggacctcgaggagatgggagtctgtcttgcaacaccgagatcggggtgggcgtcagtcgctcttcatgctgctgctctctgggaaaggcctggggaaacccctgtgagacatgcccccctgtcaatagcactgaatattacaccctgtgtcccggaggtgaaggcttcagacctaaccccatcacaatcattttagaagacattgacgaatgccaggagttaccaggtctctgccagggtggaaactgcatcaacacttttgggagcttccagtgtgagtgcccacaaggctactacctcagcgaggatacccgcatctgtgaggatattgatgagtgttttgcacatcctggtgtgtgtgggcctgggacctgctataacaccctgggaaattacacctgcatttgcccacctgagtacatgcaggtcaatggaggccacaactgcatggacatgagaaaaagcttttgctaccgaagctataatggaaccacttgtgagaatgagttgcctttcaatgtgacaaaaaggatgtgctgctgcacatataatgtgggcaaagcttggaacaaaccttgtgaaccatgcccaactccaggaacagctgactttaaaaccatatgtggaaatattcctggattcacctttgacattcacacaggaaaagctgttgacattgatgaatgtaaagagattccaggcatttgtgcaaatggtgtgtgcattaaccagattggcagtttccgctgtgaatgccctacaggattcagttacaatgacctgctgttggtttgtgaagatatagatgagtgcagcaatggtgataatctctgccagcggaatgcagactgcatcaatagtcctggtagttaccgctgtgaatgtgccgcgggtttcaaactttcacccaatggggcctgtgtagatcgcaatgaatgtttagaaattcctaacgtttgcagtcatggcttgtgtgttgatctgcaaggaagttaccagtgcatctgccacaatggctttaaggcttctcaggaccagaccatgtgcatggatgttgatgagtgcgagcggcatccatgtggaaatggaacttgtaaaaacaccgttggatcctataactgtctgtgctacccagggtttgaactcactcataataatgattgcctggacatagatgagtgcagttccttttttggtcaggtgtgcagaaatggacgttgttttaatgaaattggttctttcaagtgtctatgtaacgaaggttatgaacttaccccagatggcaaaaactgtatagacactaatgagtgtgtcgcccttcccggctcttgctctcctggtacctgtcagaatttggagggatccttcagatgcatctgtcccccagggtatgaagtaaaaagcgagaactgcattgatataaatgaatgtgatgaagatcccaacatttgtctttttggttcctgtactaatactccagggggcttccagtgcctctgcccccctggctttgtactatctgataatggacggagatgctttgatactcgccagagcttctgcttcacaaattttgaaaatggaaagtgttctgtacccaaagctttcaacaccacaaaagcaaaatgctgctgtagtaagatgccaggagagggctggggggacccctgtgagctgtgccccaaagacgatgaagttgcatttcaggatttgtgtccatatggccatggaactgtccctagtcttcatgatacacgtgaagatgtcaatgagtgtcttgagagcccaggcatttgttcaaatggtcaatgtatcaacaccgacggatcttttcgctgtgaatgtccaatgggctacaaccttgactacactggagtacgctgtgtggatactgatgagtgttcaatcggcaatccgtgtggaaatggtacatgcaccaatgttattgggagttttgaatgcaattgcaatgaaggctttgagccagggcccatgatgaattgtgaagatatcaacgaatgtgcccagaacccactgctgtgtgctttacgctgcatgaacacttttgggtcctatgaatgcacgtgcccgattggctatgccctcagggaagatcaaaagatgtgcaaagatctggatgaatgtgctgaagggttacacgactgtgaatctaggggcatgatgtgtaagaatctaatcggcaccttcatgtgcatctgccctcctggaatggcccgaaggcccgatggagaaggctgtgtagatgaaaatgaatgcaggaccaagccaggaatctgtgaaaatggacgttgtgttaacattattggaagctatagatgtgagtgtaatgaaggattccagtcaagttcttcaggcactgaatgccttgacaatcgacagggtctctgctttgcagaggtactgcagacaatatgtcaaatggcatccagtagtcgcaatctcgtcactaagtcagaatgctgctgtgatggtgggcgaggctggggccaccagtgcgagctttgcccacttcctggaactgcccagtacaaaaagatatgtcctcatggcccaggatatacaactgatggaagagatattgatgaatgtaaggtaatgccaaacctctgcaccaatggtcagtgcatcaataccatgggctcattccgatgcttctgcaaggttggctacaccacagacatcagtggaacctcttgtatagaccttgatgaatgctcccagtccccgaaaccatgcaactacatctgcaagaacactgaggggagttatcagtgttcatgtccgagggggtatgtcctgcaagaggatggaaagacatgcaaagaccttgatgaatgtcaaacaaagcagcataactgccagttcctctgtgtcaacaccctgggggggtttacctgtaaatgtccacctggtttcacacagcatcacactgcttgtatcgacaacaacgaatgtgggtctcaaccttcgctttgtggagcaaagggaatctgtcaaaacactccaggcagtttcagctgtgaatgccaaagagggttctctcttgatgccaccggactgaactgtgaagatgttgatgaatgtgatgggaaccacaggtgccaacacggctgccagaacatcctgggtggctacagatgtggctgcccccaaggctacatccagcactaccagtggaatcagtgtgtcgatgagaatgaatgctccaatcccaatgcctgtggctctgcttcctgctacaacaccctggggagttacaagtgcgcctgcccctcggggttctccttcgaccagttctccagtgcctgccacgacgtgaatgagtgctcgtcctccaagaacccctgcaattacggctgctctaacacggaggggggctacctctgtggctgcccccctgggtattacagagtgggacaaggccactgtgtctcaggaatgggatttaacaaggggcagtacctgtcactggatacagaggtcgatgaggaaaatgctctgtccccagaagcatgctacgagtgcaaaatcaacggctattctaagaaagacagcaggcagaagagaagtattcatgaacctgatcccactgctgttgaacagatcagcctagagagtgtcgacatggacagccccgtcaacatgaagttcaacctctcccacctcggctctaaggagcacatcctggaactaaggcccgccatccagcccctcaacaaccacatccgttatgtcatctctcaagggaacgatgacagcgtcttccgcatccaccaaaggaatgggctcagctacttgcacacggccaagaagaagctcatgcccggcacatacacactggaaatcactagcatccctctctacaagaagaaggagcttaagaaactggaagagagcaatgaggatgactacctcctaggggagcttggggaggctctcagaatgaggctgcagattcagctctattaacccttcacagacttgggcccaggctcaaatcctagcacagccagtctgcagaagcatttgaaaagtcaaggactaattttaaagaggaaaaataataataactcttgtttctttcctccctgtcttagactttgaatgttgaccctcacagggagggataatttagactctggtatggccaaagatttgagcacaaaggcaaccgtggttactgtattttttatataacttcattttaaaatatattaaaagaaacctaaatgttcaagatatcagcatatggcactaaatgcacaaaaataatgtgagctttttttttttttcctgttagcagtctgtaacactttgggtattttgctatagttgctaattaaaaaaatatagatgtttatttatttttaatgcagtaatatatggagaaatgaacaaactatgtaaacaaaaagggaaactcacttgtttttctttagatttataaatttgagctattttttttagaggtgctttttaaaaatccaatagatacaagagatgtttcctttggttttctgccagtcatccagctgatacacacctgatgattttaaagaaagccacacagagctgaatgggcagtgtaatcaataatttaaaagacatgaatgtcattagatcctttataacgtagatcgaagccaaagcagctcatttgtgacaacatttcatatcaccagacacaccaggcaacagaagttgaagcacaaccactgtagcaaaataccttgactgcttgtgagaccattagcattgcaggccaaaccgtactgtatttccttctcataacctcaaggaaccatatgtgctacccacaacacctcattcttacccagggtgcgctgcgtcctcatggtactgtaggcagctgaagaaccgccgttcccttgaaagggaacacctggcattctgtggtgtttcgtgctgtcttaaataatggtgcatttattatgttcaagttatttcaggattgccatatgtgcaaacaaatcatgcaatgcagccaaggaatatatgttgttgttgttgttttaaacccattttttttttagaattttcattaatactgtagttatacaccatatgcctcattttatcatagcctattgtgtatgaaagatgtttgtacaatgaattgatgtttagtttgctttagtcatttaaaaagatattgtaccaggatgtgctattaagagcacgtatccattattcttctcaacccaagaacctgtttcctggaccagtgaccaaacctcatatgtgaaatggccaaagcacatgcaggctcctggttgttcctctcaaacctgtgctgaccaaagattagtaaccagttatacccagtattttgaggttttattgtttttttaataactaaaaaagaaaaaaggaacagtgtaaatttgtaatcaagagtttgtgaggaaaaacttatggtttttggttttgtttgtttttgtaggtctgtgtatcaaatatgacacttttcttgcaataaagcttattttggggta

SEQ ID NO: 454660 - DNA, 10234 bp, Homo sapiens
atggggagaagacggaggctgtgtctccagctctacttcctgtggctgggctgtgtggtgctctgggcgcagggcacggccggccagcctcagcctcctccgcccaagccgccccggccccagccgccgccgcaacaggttcggtccgctacagcaggctctgaaggcgggtttctagcgcccgagtatcgcgaggagggtgccgcagtggccagccgcgtccgccggcgaggacagcaggacgtgctccgagggcccaacgtgtgcggctccagattccactcctactgctgccctggatggaagacgctccctggaggaaaccagtgcattgtcccgatttgtagaaatagttgtggagatggattttgttcccgtcctaacatgtgtacttgttccagtgggcaaatatcatcaacctgtggatcaaaatcaattcagcagtgcagtgtgagatgcatgaatggtgggacctgtgcagatgaccactgccagtgccagaaaggatatattggaacttattgtggacaacctgtctgtgaaaatggatgtcagaatggtggacgttgcatcggacccaaccgctgtgcttgtgtttatgggttcactggtccacagtgtgaaagagattacaggacaggcccgtgtttcactcaggtcaacaaccagatgtgccaagggcagctgacaggcattgtctgcacgaagactctgtgctgtgccaccattggacgggcgtggggccatccctgtgagatgtgtccagcccagcctcagccctgccgacggggtttcatccccaacatccgcactggagcttgccaagatgttgatgaatgccaggctatcccagggatatgccaaggaggaaactgtatcaatacagtgggctcttttgaatgcagatgccctgctggtcacaaacagagtgaaactactcagaaatgtgaagacattgatgagtgcagcatcattcctgggatatgtgaaactggtgaatgttccaacaccgtgggaagctatttttgtgtttgtccacgtggatatgtaacctcaacagatggctctcgatgcatcgatcagagaacaggcatgtgtttctcgggcctggtgaatggccgctgtgcacaagagctcccggggagaatgacgaaaatgcagtgctgctgtgagcctggccgctgctggggcatcggaaccattcctgaagcctgtcctgtcagaggttctgaggaatatcgcagactttgcatggatggacttccaatgggaggaattccagggagtgctggttccagacctggaggcactgggggaaatggctttgccccaagtggcaatggcaatggctatggcccaggagggacaggcttcatccccatccctggaggcaatggcttttctcctggcgttgggggagccggtgtgggggccgggggacagggacctatcatcactggactaacaattctgaaccagacaatagatatctgtaagcatcatgctaacctttgtttaaatggacgctgtataccaactgtctcaagctaccgatgtgaatgcaacatgggttataagcaggatgcaaatggagattgtatagatgttgatgaatgcacatcaaatccctgcactaatggagattgtgttaacacacctggttcctattattgtaaatgtcatgctggattccagaggactcctaccaagcaagcatgcattgatattgatgagtgcatccagaatggggttctttgtaaaaacggtcgatgcgtgaactcagatggaagtttccagtgcatttgcaatgccggctttgaattaactacagatggaaaaaactgtgttgatcatgatgaatgtacaactaccaacatgtgtttgaatggaatgtgcatcaatgaagatggcagcttcaagtgcatctgcaaaccaggatttgtcttggctccaaatgggcgttactgtactgatgttgatgaatgccagaccccaggaatctgcatgaatgggcactgcatcaacagtgaagggtccttccgctgtgactgtcccccaggcctggctgtgggcatggatggacgtgtgtgtgttgatactcacatgcgcagtacctgctatggaggaatcaagaaaggagtgtgtgtgcgtcctttccccggtgcagtgaccaagtccgaatgctgctgtgccaatccagactatggttttggagaaccctgccagccatgccctgcaaaaaattcagctgaattccacggcctttgtagtagtggagtaggtatcactgtggatggaagagatatcaatgaatgtgctttggatcctgatatatgtgccaatgggatttgtgaaaacttacgtggtagttaccgttgtaattgcaacagtggctatgaaccagatgcctctggaagaaactgtattgacattgatgaatgtttagtaaacagactgctttgtgataacggattgtgccgaaacacgccaggaagttacagctgtacgtgcccaccagggtatgtgttcaggactgagacagagacctgtgaagatataaatgaatgtgaaagcaacccatgtgtcaatggggcctgcagaaacaaccttggatctttcaattgtgaatgttcgcccggcagcaaactcagctccacaggattgatctgtattgacagcctgaaggggacctgttggctcaacatccaggacagccgctgtgaggtgaatattaatggagccactctgaaatctgaatgctgtgccaccctcggagccgcctgggggagcccctgtgagcggtgtgaactagatacagcttgcccaagagggcttgccaggattaaaggtgttacgtgtgaagatgttaatgagtgtgaggtgttccctggcgtttgtccaaatggacgctgtgtcaacagtaagggatcttttcattgcgagtgccctgaaggccttacgttggatgggactggccgtgtatgtttggatattcgcatggagcagtgttacttgaagtgggatgaagatgaatgcatccaccccgttcctggaaagttccgcatggatgcctgctgctgtgctgtcggggcggcttggggcaccgagtgtgaggagtgccccaaacctggcaccaaggaatacgagacactgtgcccccgcggggctggctttgctaaccgaggggatgttcttactgggcggccattttacaaagacatcaatgaatgcaaagcatttcctgggatgtgcacttatgggaagtgcagaaatacaatcggaagcttcaaatgccgttgcaatagtggctttgctctagacatggaggaaagaaactgcacggacatcgacgagtgcaggatttctcctgacctctgtggcagtggaatctgcgtcaatacaccgggcagctttgagtgcgagtgcttcgaaggctatgaaagtggcttcatgatgatgaagaactgcatggacattgacgaatgtgaacgtaaccctctcctttgtaggggtggcacctgtgtgaacactgagggcagctttcagtgtgactgcccactgggacacgagctgtcaccatcccgtgaggactgtgtggatattaatgaatgctccctgagtgacaatctctgcagaaatggaaaatgtgtgaacatgattggaacctatcagtgctcttgcaatcctggatatcaggctacgccagaccgccagggctgtacagatattgatgaatgtatgataatgaacggaggctgtgacacccagtgcacaaattcagagggaagctacgaatgcagctgcagtgagggttatgccctgatgccagatgggagatcgtgtgcagacattgatgaatgtgaaaacaatcctgatatctgtgatggcggccagtgtaccaacattcctggagagtatcgctgcctctgctatgatggcttcatggcttccatggacatgaaaacatgcattgatgtcaatgaatgtgacctaaattcaaatatctgcatgtttggggaatgtgagaacacaaagggatccttcatttgccactgtcagctgggttactcagtgaagaaggggaccacaggatgtacagatgtggatgagtgtgaaattggtgctcataactgcgacatgcatgcctcatgtctgaatatcccaggaagcttcaagtgtagctgcagagaaggctggattggaaacggcatcaagtgtattgatctggacgaatgttctaatggaacccaccagtgtagcatcaatgctcagtgtgtaaataccccgggctcataccgctgtgcctgctccgaaggtttcactggtgatggctttacctgctcagatgttgatgagtgtgcagaaaacataaacctctgtgagaacggacagtgccttaatgtcccgggtgcatatcgctgcgagtgtgagatgggcttcactccagcctcagacagcagatcctgccaagatattgatgaatgctccttccaaaacatttgtgtctctggaacatgtaataacctgcctggaatgtttcattgcatctgcgatgatggttatgaattggacagaacaggagggaactgtacagatattgatgagtgtgcagatcctataaactgtgtcaatggcctatgtgtcaacacgcctggtcgctatgagtgtaactgcccacccgattttcagttgaacccaactggtgtgggttgtgttgacaaccgtgtgggcaactgctacctgaagtttggacctcgaggagatgggagtctgtcttgcaacaccgagatcggggtgggcgtcagtcgctcttcatgctgctgctctctgggaaaggcctggggaaacccctgtgagacatgcccccctgtcaatagcactgaatattacaccctgtgtcccggaggtgaaggcttcagacctaaccccatcacaatcattttagaagacattgacgaatgccaggagttaccaggtctctgccagggtggaaactgcatcaacacttttgggagcttccagtgtgagtgcccacaaggctactacctcagcgaggatacccgcatctgtgaggatattgatgagtgttttgcacatcctggtgtgtgtgggcctgggacctgctataacaccctgggaaattacacctgcatttgcccacctgagtacatgcaggtcaatggaggccacaactgcatggacatgagaaaaagcttttgctaccgaagctataatggaaccacttgtgagaatgagttgcctttcaatgtgacaaaaaggatgtgctgctgcacatataatgtgggcaaagcttggaacaaaccttgtgaaccatgcccaactccaggaacagctgactttaaaaccatatgtggaaatattcctggattcacctttgacattcacacaggaaaagctgttgacattgatgaatgtaaagagattccaggcatttgtgcaaatggtgtgtgcattaaccagattggcagtttccgctgtgaatgccctacaggattcagttacaatgacctgctgttggtttgtgaagatatagatgagtgcagcaatggtgataatctctgccagcggaatgcagactgcatcaatagtcctggtagttaccgctgtgaatgtgccgcgggtttcaaactttcacccaatggggcctgtgtagatcgcaatgaatgtttagaaattcctaacgtttgcagtcatggcttgtgtgttgatctgcaaggaagttaccagtgcatctgccacaatggctttaaggcttctcaggaccagaccatgtgcatggatgttgatgagtgcgagcggcatccatgtggaaatggaacttgtaaaaacaccgttggatcctataactgtctgtgctacccagggtttgaactcactcataataatgattgcctggacatagatgagtgcagttccttttttggtcaggtgtgcagaaatggacgttgttttaatgaaattggttctttcaagtgtctatgtaacgaaggttatgaacttaccccagatggcaaaaactgtatagacactaatgagtgtgtcgcccttcccggctcttgctctcctggtacctgtcagaatttggagggatccttcagatgcatctgtcccccagggtatgaagtaaaaagcgagaactgcattgatataaatgaatgtgatgaagatcccaacatttgtctttttggttcctgtactaatactccagggggcttccagtgcctctgcccccctggctttgtactatctgataatggacggagatgctttgatactcgccagagcttctgcttcacaaattttgaaaatggaaagtgttctgtacccaaagctttcaacaccacaaaagcaaaatgctgctgtagtaagatgccaggagagggctggggggacccctgtgagctgtgccccaaagacgatgaagttgcatttcaggatttgtgtccatatggccatggaactgtccctagtcttcatgatacacgtgaagatgtcaatgagtgtcttgagagcccaggcatttgttcaaatggtcaatgtatcaacaccgacggatcttttcgctgtgaatgtccaatgggctacaaccttgactacactggagtacgctgtgtggatactgatgagtgttcaatcggcaatccgtgtggaaatggtacatgcaccaatgttattgggagttttgaatgcaattgcaatgaaggctttgagccagggcccatgatgaattgtgaagatatcaacgaatgtgcccagaacccactgctgtgtgctttacgctgcatgaacacttttgggtcctatgaatgcacgtgcccgattggctatgccctcagggaagatcaaaagatgtgcaaagatctggatgaatgtgctgaagggttacacgactgtgaatctaggggcatgatgtgtaagaatctaatcggcaccttcatgtgcatctgccctcctggaatggcccgaaggcccgatggagaaggctgtgtagatgaaaatgaatgcaggaccaagccaggaatctgtgaaaatggacgttgtgttaacattattggaagctatagatgtgagtgtaatgaaggattccagtcaagttcttcaggcactgaatgccttgacaatcgacagggtctctgctttgcagaggtactgcagacaatatgtcaaatggcatccagtagtcgcaatctcgtcactaagtcagaatgctgctgtgatggtgggcgaggctggggccaccagtgcgagctttgcccacttcctggaactgcccagtacaaaaagatatgtcctcatggcccaggatatacaactgatggaagagatattgatgaatgtaaggtaatgccaaacctctgcaccaatggtcagtgcatcaataccatgggctcattccgatgcttctgcaaggttggctacaccacagacatcagtggaacctcttgtatagaccttgatgaatgctcccagtccccgaaaccatgcaactacatctgcaagaacactgaggggagttatcagtgttcatgtccgagggggtatgtcctgcaagaggatggaaagacatgcaaagaccttgatgaatgtcaaacaaagcagcataactgccagttcctctgtgtcaacaccctgggggggtttacctgtaaatgtccacctggtttcacacagcatcacactgcttgtatcgacaacaacgaatgtgggtctcaaccttcgctttgtggagcaaagggaatctgtcaaaacactccaggcagtttcagctgtgaatgccaaagagggttctctcttgatgccaccggactgaactgtgaagatgttgatgaatgtgatgggaaccacaggtgccaacacggctgccagaacatcctgggtggctacagatgtggctgcccccaaggctacatccagcactaccagtggaatcagtgtgtcgatgagaatgaatgctccaatcccaatgcctgtggctctgcttcctgctacaacaccctggggagttacaagtgcgcctgcccctcggggttctccttcgaccagttctccagtgcctgccacgacgtgaatgagtgctcgtcctccaagaacccctgcaattacggctgctctaacacggaggggggctacctctgtggctgcccccctgggtattacagagtgggacaaggccactgtgtctcaggaatgggatttaacaaggggcagtacctgtcactggatacagaggtcgatgaggaaaatgctctgtccccagaagcatgctacgagtgcaaaatcaacggctattctaagaaagacagcaggcagaagagaagtattcatgaacctgatcccactgctgttgaacagatcagcctagagagtgtcgacatggacagccccgtcaacatgaagttcaacctctcccacctcggctctaaggagcacatcctggaactaaggcccgccatccagcccctcaacaaccacatccgttatgtcatctctcaagggaacgatgacagcgtcttccgcatccaccaaaggaatgggctcagctacttgcacacggccaagaagaagctcatgcccggcacatacacactggaaatcactagcatccctctctacaagaagaaggagcttaagaaactggaagagagcaatgaggatgactacctcctaggggagcttggggaggctctcagaatgaggctgcagattcagctctattaacccttcacagacttgggcccaggctcaaatcctagcacagccagtctgcagaagcatttgaaaagtcaaggactaattttaaagaggaaaaataataataactcttgtttctttcctccctgtcttagactttgaatgttgaccctcacagggagggataatttagactctggtatggccaaagatttgagcacaaaggcaaccgtggttactgtattttttatataacttcattttaaaatatattaaaagaaacctaaatgttcaagatatcagcatatggcactaaatgcacaaaaataatgtgagctttttttttttttcctgttagcagtctgtaacactttgggtattttgctatagttgctaattaaaaaaatatagatgtttatttatttttaatgcagtaatatatggagaaatgaacaaactatgtaaacaaaaagggaaactcacttgtttttctttagatttataaatttgagctattttttttagaggtgctttttaaaaatccaatagatacaagagatgtttcctttggttttctgccagtcatccagctgatacacacctgatgattttaaagaaagccacacagagctgaatgggcagtgtaatcaataatttaaaagacatgaatgtcattagatcctttataacgtagatcgaagccaaagcagctcatttgtgacaacatttcatatcaccagacacaccaggcaacagaagttgaagcacaaccactgtagcaaaataccttgactgcttgtgagaccattagcattgcaggccaaaccgtactgtatttccttctcataacctcaaggaaccatatgtgctacccagctgaagaaccgccgttcccttgaaagggaacacctggcattctgtggtgtttcgtgctgtcttaaataatggtgcatttattatgttcaagttatttcaggattgccatatgtgcaaacaaatcatgcaatgcagccaaggaatatatgttgttgttgttgttttaaacccattttttttttagaattttcattaatactgtagttatacaccatatgcctcattttatcatagcctattgtgtatgaaagatgtttgtacaatgaattgatgtttagtttgctttagtcatttaaaaagatattgtaccaggatgtgctattaagagcacgtatccattattcttctcaacccaagaacctgtttcctggaccagtgaccaaacctcatatgtgaaatggccaaagcacatgcaggctcctggttgttcctctcaaacctgtgctgaccaaagattagtaaccagttatacccagtattttgaggttttattgtttttttaataactaaaaaagaaaaaaggaacagtgtaaatttgtaatcaagagtttgtgaggaaaaacttatggtttttggttttgtttgtttttgtaggtctgtgtatcaaatatgacacttttcttgcaataaagcttattttggggta

SEQ ID NO: 454661 - DNA, 10366 bp, Homo sapiens
atggggagaagacggaggctgtgtctccagctctacttcctgtggctgggctgtgtggtgctctgggcgcagggcacggccggccagcctcagcctcctccgcccaagccgccccggccccagccgccgccgcaacaggttcggtccgctacagcaggctctgaaggcgggtttctagcgcccgagtatcgcgaggagggtgccgcagtggccagccgcgtccgccggcgaggacagcaggacgtgctccgagggcccaacgtgtgcggctccagattccactcctactgctgccctggatggaagacgctccctggaggaaaccagtgcattgtcccgatttgtagaaatagttgtggagatggattttgttcccgtcctaacatgtgtacttgttccagtgggcaaatatcatcaacctgtggatcaaaatcaattcagcagtgcagtgtgagatgcatgaatggtgggacctgtgcagatgaccactgccagtgccagaaaggatatattggaacttattgtggacaacctgtctgtgaaaatggatgtcagaatggtggacgttgcatcggacccaaccgctgtgcttgtgtttatgggttcactggtccacagtgtgaaagagattacaggacaggcccgtgtttcactcaggtcaacaaccagatgtgccaagggcagctgacaggcattgtctgcacgaagactctgtgctgtgccaccattggacgggcgtggggccatccctgtgagatgtgtccagcccagcctcagccctgccgacggggtttcatccccaacatccgcactggagcttgccaagatgttgatgaatgccaggctatcccagggatatgccaaggaggaaactgtatcaatacagtgggctcttttgaatgcagatgccctgctggtcacaaacagagtgaaactactcagaaatgtgaagacattgatgagtgcagcatcattcctgggatatgtgaaactggtgaatgttccaacaccgtgggaagctatttttgtgtttgtccacgtggatatgtaacctcaacagatggctctcgatgcatcgatcagagaacaggcatgtgtttctcgggcctggtgaatggccgctgtgcacaagagctcccggggagaatgacgaaaatgcagtgctgctgtgagcctggccgctgctggggcatcggaaccattcctgaagcctgtcctgtcagaggttctgaggaatatcgcagactttgcatggatggacttccaatgggaggaattccagggagtgctggttccagacctggaggcactgggggaaatggctttgccccaagtggcaatggcaatggctatggcccaggagggacaggcttcatccccatccctggaggcaatggcttttctcctggcgttgggggagccggtgtgggggccgggggacagggacctatcatcactggactaacaattctgaaccagacaatagatatctgtaagcatcatgctaacctttgtttaaatggacgctgtataccaactgtctcaagctaccgatgtgaatgcaacatgggttataagcaggatgcaaatggagattgtatagatgttgatgaatgcacatcaaatccctgcactaatggagattgtgttaacacacctggttcctattattgtaaatgtcatgctggattccagaggactcctaccaagcaagcatgcattgatattgatgagtgcatccagaatggggttctttgtaaaaacggtcgatgcgtgaactcagatggaagtttccagtgcatttgcaatgccggctttgaattaactacagatggaaaaaactgtgttgatcatgatgaatgtacaactaccaacatgtgtttgaatggaatgtgcatcaatgaagatggcagcttcaagtgcatctgcaaaccaggatttgtcttggctccaaatgggcgttactgtactgatgttgatgaatgccagaccccaggaatctgcatgaatgggcactgcatcaacagtgaagggtccttccgctgtgactgtcccccaggcctggctgtgggcatggatggacgtgtgtgtgttgatactcacatgcgcagtacctgctatggaggaatcaagaaaggagtgtgtgtgcgtcctttccccggtgcagtgaccaagtccgaatgctgctgtgccaatccagactatggttttggagaaccctgccagccatgccctgcaaaaaattcagctgaattccacggcctttgtagtagtggagtaggtatcactgtggatggaagagatatcaatgaatgtgctttggatcctgatatatgtgccaatgggatttgtgaaaacttacgtggtagttaccgttgtaattgcaacagtggctatgaaccagatgcctctggaagaaactgtattgacattgatgaatgtttagtaaacagactgctttgtgataacggattgtgccgaaacacgccaggaagttacagctgtacgtgcccaccagggtatgtgttcaggactgagacagagacctgtgaagatataaatgaatgtgaaagcaacccatgtgtcaatggggcctgcagaaacaaccttggatctttcaattgtgaatgttcgcccggcagcaaactcagctccacaggattgatctgtattgacagcctgaaggggacctgttggctcaacatccaggacagccgctgtgaggtgaatattaatggagccactctgaaatctgaatgctgtgccaccctcggagccgcctgggggagcccctgtgagcggtgtgaactagatacagcttgcccaagagggcttgccaggattaaaggtgttacgtgtgaagatgttaatgagtgtgaggtgttccctggcgtttgtccaaatggacgctgtgtcaacagtaagggatcttttcattgcgagtgccctgaaggccttacgttggatgggactggccgtgtatgtttggatattcgcatggagcagtgttacttgaagtgggatgaagatgaatgcatccaccccgttcctggaaagttccgcatggatgcctgctgctgtgctgtcggggcggcttggggcaccgagtgtgaggagtgccccaaacctggcaccaaggaatacgagacactgtgcccccgcggggctggctttgctaaccgaggggatgttcttactgggcggccattttacaaagacatcaatgaatgcaaagcatttcctgggatgtgcacttatgggaagtgcagaaatacaatcggaagcttcaaatgccgttgcaatagtggctttgctctagacatggaggaaagaaactgcacggacatcgacgagtgcaggatttctcctgacctctgtggcagtggaatctgcgtcaatacaccgggcagctttgagtgcgagtgcttcgaaggctatgaaagtggcttcatgatgatgaagaactgcatggacattgacgaatgtgaacgtaaccctctcctttgtaggggtggcacctgtgtgaacactgagggcagctttcagtgtgactgcccactgggacacgagctgtcaccatcccgtgaggactgtgtggatattaatgaatgctccctgagtgacaatctctgcagaaatggaaaatgtgtgaacatgattggaacctatcagtgctcttgcaatcctggatatcaggctacgccagaccgccagggctgtacagatattgatgaatgtatgataatgaacggaggctgtgacacccagtgcacaaattcagagggaagctacgaatgcagctgcagtgagggttatgccctgatgccagatgggagatcgtgtgcagacattgatgaatgtgaaaacaatcctgatatctgtgatggcggccagtgtaccaacattcctggagagtatcgctgcctctgctatgatggcttcatggcttccatggacatgaaaacatgcattgatgtcaatgaatgtgacctaaattcaaatatctgcatgtttggggaatgtgagaacacaaagggatccttcatttgccactgtcagctgggttactcagtgaagaaggggaccacaggatgtacagatgtggatgagtgtgaaattggtgctcataactgcgacatgcatgcctcatgtctgaatatcccaggaagcttcaagtgtagctgcagagaaggctggattggaaacggcatcaagtgtattgatctggacgaatgttctaatggaacccaccagtgtagcatcaatgctcagtgtgtaaataccccgggctcataccgctgtgcctgctccgaaggtttcactggtgatggctttacctgctcagatgttgatgagtgtgcagaaaacataaacctctgtgagaacggacagtgccttaatgtcccgggtgcatatcgctgcgagtgtgagatgggcttcactccagcctcagacagcagatcctgccaagatattgatgaatgctccttccaaaacatttgtgtctctggaacatgtaataacctgcctggaatgtttcattgcatctgcgatgatggttatgaattggacagaacaggagggaactgtacagatattgatgagtgtgcagatcctataaactgtgtcaatggcctatgtgtcaacacgcctggtcgctatgagtgtaactgcccacccgattttcagttgaacccaactggtgtgggttgtgttgacaaccgtgtgggcaactgctacctgaagtttggacctcgaggagatgggagtctgtcttgcaacaccgagatcggggtgggcgtcagtcgctcttcatgctgctgctctctgggaaaggcctggggaaacccctgtgagacatgcccccctgtcaatagcactgaatattacaccctgtgtcccggaggtgaaggcttcagacctaaccccatcacaatcattttagaagacattgacgaatgccaggagttaccaggtctctgccagggtggaaactgcatcaacacttttgggagcttccagtgtgagtgcccacaaggctactacctcagcgaggatacccgcatctgtgaggatattgatgagtgttttgcacatcctggtgtgtgtgggcctgggacctgctataacaccctgggaaattacacctgcatttgcccacctgagtacatgcaggtcaatggaggccacaactgcatggacatgagaaaaagcttttgctaccgaagctataatggaaccacttgtgagaatgagttgcctttcaatgtgacaaaaaggatgtgctgctgcacatataatgtgggcaaagcttggaacaaaccttgtgaaccatgcccaactccaggaacagctgactttaaaaccatatgtggaaatattcctggattcacctttgacattcacacaggaaaagctgttgacattgatgaatgtaaagagattccaggcatttgtgcaaatggtgtgtgcattaaccagattggcagtttccgctgtgaatgccctacaggattcagttacaatgacctgctgttggtttgtgaagatatagatgagtgcagcaatggtgataatctctgccagcggaatgcagactgcatcaatagtcctggtagttaccgctgtgaatgtgccgcgggtttcaaactttcacccaatggggcctgtgtagatcgcaatgaatgtttagaaattcctaacgtttgcagtcatggcttgtgtgttgatctgcaaggaagttaccagtgcatctgccacaatggctttaaggcttctcaggaccagaccatgtgcatggatgttgatgagtgcgagcggcatccatgtggaaatggaacttgtaaaaacaccgttggatcctataactgtctgtgctacccagggtttgaactcactcataataatgattgcctggacatagatgagtgcagttccttttttggtcaggtgtgcagaaatggacgttgttttaatgaaattggttctttcaagtgtctatgtaacgaaggttatgaacttaccccagatggcaaaaactgtatagacactaatgagtgtgtcgcccttcccggctcttgctctcctggtacctgtcagaatttggagggatccttcagatgcatctgtcccccagggtatgaagtaaaaagcgagaactgcattgatataaatgaatgtgatgaagatcccaacatttgtctttttggttcctgtactaatactccagggggcttccagtgcctctgcccccctggctttgtactatctgataatggacggagatgctttgatactcgccagagcttctgcttcacaaattttgaaaatggaaagtgttctgtacccaaagctttcaacaccacaaaagcaaaatgctgctgtagtaagatgccaggagagggctggggggacccctgtgagctgtgccccaaagacgatgaagttgcatttcaggatttgtgtccatatggccatggaactgtccctagtcttcatgatacacgtgaagatgtcaatgagtgtcttgagagcccaggcatttgttcaaatggtcaatgtatcaacaccgacggatcttttcgctgtgaatgtccaatgggctacaaccttgactacactggagtacgctgtgtggatactgatgagtgttcaatcggcaatccgtgtggaaatggtacatgcaccaatgttattgggagttttgaatgcaattgcaatgaaggctttgagccagggcccatgatgaattgtgaagatatcaacgaatgtgcccagaacccactgctgtgtgctttacgctgcatgaacacttttgggtcctatgaatgcacgtgcccgattggctatgccctcagggaagatcaaaagatgtgcaaagatctggatgaatgtgctgaagggttacacgactgtgaatctaggggcatgatgtgtaagaatctaatcggcaccttcatgtgcatctgccctcctggaatggcccgaaggcccgatggagaaggctgtgtagatgaaaatgaatgcaggaccaagccaggaatctgtgaaaatggacgttgtgttaacattattggaagctatagatgtgagtgtaatgaaggattccagtcaagttcttcaggcactgaatgccttgacaatcgacagggtctctgctttgcagaggtactgcagacaatatgtcaaatggcatccagtagtcgcaatctcgtcactaagtcagaatgctgctgtgatggtgggcgaggctggggccaccagtgcgagctttgcccacttcctggaactgcccagtacaaaaagatatgtcctcatggcccaggatatacaactgatggaagagatattgatgaatgtaaggtaatgccaaacctctgcaccaatggtcagtgcatcaataccatgggctcattccgatgcttctgcaaggttggctacaccacagacatcagtggaacctcttgtatagaccttgatgaatgctcccagtccccgaaaccatgcaactacatctgcaagaacactgaggggagttatcagtgttcatgtccgagggggtatgtcctgcaagaggatggaaagacatgcaaagaccttgatgaatgtcaaacaaagcagcataactgccagttcctctgtgtcaacaccctgggggggtttacctgtaaatgtccacctggtttcacacagcatcacactgcttgtatcgacaacaacgaatgtgggtctcaaccttcgctttgtggagcaaagggaatctgtcaaaacactccaggcagtttcagctgtgaatgccaaagagggttctctcttgatgccaccggactgaactgtgaagatgttgatgaatgtgatgggaaccacaggtgccaacacggctgccagaacatcctgggtggctacagatgtggctgcccccaaggctacatccagcactaccagtggaatcagtgtgtcgatgagaatgaatgctccaatcccaatgcctgtggctctgcttcctgctacaacaccctggggagttacaagtgcgcctgcccctcggggttctccttcgaccagttctccagtgcctgccacgacgtgaatgagtgctcgtcctccaagaacccctgcaattacggctgctctaacacggaggggggctacctctgtggctgcccccctgggtattacagagtgggacaaggccactgtgtctcaggaatgggatttaacaaggggcagtacctgtcactggatacagaggtcgatgaggaaaatgctctgtccccagaagcatgctacgagtgcaaaatcaacggctattctaagaaagacagcaggcagaagagaagtattcatgaacctgatcccactgctgttgaacagatcagcctagagagtgtcgacatggacagccccgtcaacatgaagttcaacctctcccacctcggctctaaggagcacatcctggaactaaggcccgccatccagcccctcaacaaccacatccgttatgtcatctctcaagggaacgatgacagcgtcttccgcatccaccaaaggaatgggctcagctacttgcacacggccaagaagaagctcatgcccggcacatacacactggaaatcactagcatccctctctacaagaagaaggagcttaagaaactggaagagagcaatgaggatgactacctcctaggggagcttggggaggctctcagaatgaggctgcagattcagctctattaacccttcacagacttgggcccaggctcaaatcctagcacagccagtctgcagaagcatttgaaaagtcaaggactaattttaaagaggaaaaataataataactcttgtttctttcctccctgtcttagactttgaatgttgaccctcacagggagggataatttagactctggtatggccaaagatttgagcacaaaggcaaccgtggttactgtattttttatataacttcattttaaaatatattaaaagaaacctaaatgttcaagatatcagcatatggcactaaatgcacaaaaataatgtgagctttttttttttttcctgttagcagtctgtaacactttgggtattttgctatagttgctaattaaaaaaatatagatgtttatttatttttaatgcagtaatatatggagaaatgaacaaactatgtaaacaaaaagggaaactcacttgtttttctttagatttataaatttgagctattttttttagaggtgctttttaaaaatccaatagatacaagagatgtttcctttggttttctgccagtcatccagctgatacacacctgatgattttaaagaaagccacacagagctgaatgggcagtgtaatcaataatttaaaagacatgaatgtcattagatcctttataacgtagatcgaagccaaagcagctcatttgtgacaacatttcatatcaccagacacaccaggcaacagaagttgaagcacaaccactgtagcaaaataccttgactgcttgtgagaccattagcattgcaggccaaaccgtactgtatttccttctcataacctcaaggaaccatatgtgctacccacaacacctcattcttacccagggtgcgctgcgtcctcatggtactgtaggcagctgaagaaccgccgttcccttgaaagggaacacctggcattctgtggtgtttcgtgctgtcttaaataatggtgcatttattatgttcaagttatttcaggattgccatatgtgcaaacaaatcatgcaatgcagccaaggaatatatgttgttgttgttgttttaaacccattttttttttagaattttcattaatactgtagttatacaccatatgcctcattttatcatagcctattgtgtatgaaagatgtttgtacaatgaattgatgtttagtttgctttagtcatttaaaaagatattgtaccaggatgtgctattaagagcacgtatccattattcttctcaacccaagaacctgtttcctggaccagtgaccaaacagattagtaaccagttatacccagtattttgaggttttattgtttttttaataactaaaaaagaaaaaaggaacagtgtaaatttgtaatcaagagtttgtgaggaaaaacttatggtttttggttttgtttgtttttgtaggtctgtgtatcaaatatgacacttttcttgcaataaagcttattttggggtatttttctgactgaaaattttatgagaccacaacgcctgttgtatttgcgggaggggctgggggctttgtctatgggaacctgtattgaagtaataatagagagccagacacacaggaaaataaaggaatgctggcaaatctgtgaag

SEQ ID NO: 454662 - DNA, 5510 bp, Homo sapiens
  misc_feature (5280)..(5280): n is a, c, g, or t
atggggagaagacggaggctgtgtctccagctctacttcctgtggctgggctgtgtggtgctctgggcgcagggcacggccggccagcctcagcctcctccgcccaagccgccccggccccagccgccgccgcaacaggttcggtccgctacagcaggctctgaaggcgggtttctagcgcccgagtatcgcgaggagggtgccgcagtggccagccgcgtccgccggcgaggacagcaggacgtgctccgagggcccaacgtgtgcggctccagattccactcctactgctgccctggatggaagacgctccctggaggaaaccagtgcattgtcccgatttgtagaaatagttgtggagatggattttgttcccgtcctaacatgtgtacttgttccagtgggcaaatatcatcaacctgtggatcaaaatcaattcagcagtgcagtgtgagatgcatgaatggtgggacctgtgcagatgaccactgccagtgccagaaaggatatattggaacttattgtggacaacctgtctgtgaaaatggatgtcagaatggtggacgttgcatcggacccaaccgctgtgcttgtgtttatgggttcactggtccacagtgtgaaagagattacaggacaggcccgtgtttcactcaggtcaacaaccagatgtgccaagggcagctgacaggcattgtctgcacgaagactctgtgctgtgccaccattggacgggcgtggggccatccctgtgagatgtgtccagcccagcctcagccctgccgacggggtttcatccccaacatccgcactggagcttgccaagatgttgatgaatgccaggctatcccagggatatgccaaggaggaaactgtatcaatacagtgggctcttttgaatgcagatgccctgctggtcacaaacagagtgaaactactcagaaatgtgaagacattgatgagtgcagcatcattcctgggatatgtgaaactggtgaatgttccaacaccgtgggaagctatttttgtgtttgtccacgtggatatgtaacctcaacagatggctctcgatgcatcgatcagagaacaggcatgtgtttctcgggcctggtgaatggccgctgtgcacaagagctcccggggagaatgacgaaaatgcagtgctgctgtgagcctggccgctgctggggcatcggaaccattcctgaagcctgtcctgtcagaggttctgaggaatatcgcagactttgcatggatggacttccaatgggaggaattccagggagtgctggttccagacctggaggcactgggggaaatggctttgccccaagtggcaatggcaatggctatggcccaggagggacaggcttcatccccatccctggaggcaatggcttttctcctggcgttgggggagccggtgtgggggccgggggacagggacctatcatcactggactaacaattctgaaccagacaatagatatctgtaagcatcatgctaacctttgtttaaatggacgctgtataccaactgtctcaagctaccgatgtgaatgcaacatgggttataagcaggatgcaaatggagattgtatagatgttgatgaatgcacatcaaatccctgcactaatggagattgtgttaacacacctggttcctattattgtaaatgtcatgctggattccagaggactcctaccaagcaagcatgcattgatattgatgagtgcatccagaatggggttctttgtaaaaacggtcgatgcgtgaactcagatggaagtttccagtgcatttgcaatgccggctttgaattaactacagatggaaaaaactgtgttgatcatgatgaatgtacaactaccaacatgtgtttgaatggaatgtgcatcaatgaagatggcagcttcaagtgcatctgcaaaccaggatttgtcttggctccaaatgggcgttactgtactgatgttgatgaatgccagaccccaggaatctgcatgaatgggcactgcatcaacagtgaagggtccttccgctgtgactgtcccccaggcctggctgtgggcatggatggacgtgtgtgtgttgatactcacatgcgcagtacctgctatggaggaatcaagaaaggagtgtgtgtgcgtcctttccccggtgcagtgaccaagtccgaatgctgctgtgccaatccagactatggttttggagaaccctgccagccatgccctgcaaaaaattcagctgaattccacggcctttgtagtagtggagtaggtatcactgtggatggaagagatatcaatgaatgtgctttggatcctgatatatgtgccaatgggatttgtgaaaacttacgtggtagttaccgttgtaattgcaacagtggctatgaaccagatgcctctggaagaaactgtattgacattgatgaatgtttagtaaacagactgctttgtgataacggattgtgccgaaacacgccaggaagttacagctgtacgtgcccaccagggtatgtgttcaggactgagacagagacctgtgaagatataaatgaatgtgaaagcaacccatgtgtcaatggggcctgcagaaacaaccttggatctttcaattgtgaatgttcgcccggcagcaaactcagctccacaggattgatctgtattgacagcctgaaggggacctgttggctcaacatccaggacagccgctgtgaggtgaatattaatggagccactctgaaatctgaatgctgtgccaccctcggagccgcctgggggagcccctgtgagcggtgtgaactagatacagcttgcccaagagggcttgccaggattaaaggtgttacgtgtgaagatgttaatgagtgtgaggtgttccctggcgtttgtccaaatggacgctgtgtcaacagtaagggatcttttcattgcgagtgccctgaaggccttacgttggatgggactggccgtgtatgtttggatattcgcatggagcagtgttacttgaagtgggatgaagatgaatgcatccaccccgttcctggaaagttccgcatggatgcctgctgctgtgctgtcggggcggcttggggcaccgagtgtgaggagtgccccaaacctggcaccaaggaatacgagacactgtgcccccgcggggctggctttgctaaccgaggggatgttcttactgggcggccattttacaaagacatcaatgaatgcaaagcatttcctgggatgtgcacttatgggaagtgcagaaatacaatcggaagcttcaaatgccgttgcaatagtggctttgctctagacatggaggaaagaaactgcacggacatcgacgagtgcaggatttctcctgacctctgtggcagtggaatctgcgtcaatacaccgggcagctttgagtgcgagtgcttcgaaggctatgaaagtggcttcatgatgatgaagaactgcatggacattgacgaatgtgaacgtaaccctctcctttgtaggggtggcacctgtgtgaacactgagggcagctttcagtgtgactgcccactgggacacgagctgtcaccatcccgtgaggactgtgtggatattaatgaatgctccctgagtgacaatctctgcagaaatggaaaatgtgtgaacatgattggaacctatcagtgctcttgcaatcctggatatcaggctacgccagaccgccagggctgtacagatattgatgaatgtatgataatgaacggaggctgtgacacccagtgcacaaattcagagggaagctacgaatgcagctgcagtgagggttatgccctgatgccagatgggagatcgtgtgcagacattgatgaatgtgaaaacaatcctgatatctgtgatggcggccagtgtaccaacattcctggagagtatcgctgcctctgctatgatggcttcatggcttccatggacatgaaaacatgcattgatgtcaatgaatgtgacctaaattcaaatatctgcatgtttggggaatgtgagaacacaaagggatccttcatttgccactgtcagctgggttactcagtgaagaaggggaccacaggatgtacagatgtggatgagtgtgaaattggtgctcataactgcgacatgcatgcctcatgtctgaatatcccaggaagcttcaagtgtagctgcagagaaggctggattggaaacggcatcaagtgtattgatctggacgaatgttctaatggaacccaccagtgtagcatcaatgctcagtgtgtaaataccccgggctcataccgctgtgcctgctccgaaggtttcactggtgatggctttacctgctcagatgttgatgagtgtgcagaaaacataaacctctgtgagaacggacagtgccttaatgtcccgggtgcatatcgctgcgagtgtgagatgggcttcactccagcctcagacagcagatcctgccaaggtgggtcaccaggattccaactcattttcaagttggatcaaccacagtaaatgaaaccacaacaagggctggaacaagctccacctggaagcagaatacatagcacatgctgcactataaaagtcattcgtttaagcgtggattattttgccgaatgaataatgatgatggcggctttcatctcttatgaagttttcctggccaagagccagtagttggaagtttggatcattcttttttcttttttaaccatttcttctcttctttctcttttttatcactaaatgaatgacatgtggagaaactattcagcttttaaagtatgctccattacttgtctcaactaccactatttattgtgtttatcaaaatcataaaaagctcatttttggcatttaccttcgtggttgagactgctgtctgtatgtctgggaatggaagtcctcttcagggattcagcaagggctgtacttttgcttaatactagtggttccttattctaagtgatgacatcatccacctttcctagaaatgggtctttgtgcctagtatgatatctttccaagaaaaagaatttggattttctattaaattagaaactcaattcacattatatatagtttgagccatcattgtgttatgaatagggactatatgaaaatataaatgaagaaaggagagattgaaaataatttatacaccatagggcttcagtagaatttatgattcacagaaaacctttaaaaaaactcagtttgggccaggcgtggtggctcacgcctatattcccagctctttgggaggccgangcaggtggatcacctgaggttgggagttcaagaccagcctgaacaacatggagaaactccatctctactaaaaatacaaaattagctgggtatggtggctcatgcctgtaatcccagctactcaggaggcagaggcaggaaaattgcttgaaccctggaggcggaggttgcggtgagccaagattgcgccattgcactacagactggacaacaagagcgaaactcagtct

SEQ ID NO: 454663 - DNA, 5234 bp, Homo sapiens
atggggagaagacggaggctgtgtctccagctctacttcctgtggctgggctgtgtggtgctctgggcgcagggcacggccggccagcctcagcctcctccgcccaagccgccccggccccagccgccgccgcaacaggttcggtccgctacagcaggctctgaaggcgggtttctagcgcccgagtatcgcgaggagggtgccgcagtggccagccgcgtccgccggcgaggacagcaggacgtgctccgagggcccaacgtgtgcggctccagattccactcctactgctgccctggatggaagacgctccctggaggaaaccagtgcattgtcccgatttgtagaaatagttgtggagatggattttgttcccgtcctaacatgtgtacttgttccagtgggcaaatatcatcaacctgtggatcaaaatcaattcagcagtgcagtgtgagatgcatgaatggtgggacctgtgcagatgaccactgccagtgccagaaaggatatattggaacttattgtggacaacctgtctgtgaaaatggatgtcagaatggtggacgttgcatcggacccaaccgctgtgcttgtgtttatgggttcactggtccacagtgtgaaagagattacaggacaggcccgtgtttcactcaggtcaacaaccagatgtgccaagggcagctgacaggcattgtctgcacgaagactctgtgctgtgccaccattggacgggcgtggggccatccctgtgagatgtgtccagcccagcctcagccctgccgacggggtttcatccccaacatccgcactggagcttgccaagatgttgatgaatgccaggctatcccagggatatgccaaggaggaaactgtatcaatacagtgggctcttttgaatgcagatgccctgctggtcacaaacagagtgaaactactcagaaatgtgaagacattgatgagtgcagcatcattcctgggatatgtgaaactggtgaatgttccaacaccgtgggaagctatttttgtgtttgtccacgtggatatgtaacctcaacagatggctctcgatgcatcgatcagagaacaggcatgtgtttctcgggcctggtgaatggccgctgtgcacaagagctcccggggagaatgacgaaaatgcagtgctgctgtgagcctggccgctgctggggcatcggaaccattcctgaagcctgtcctgtcagaggttctgaggaatatcgcagactttgcatggatggacttccaatgggaggaattccagggagtgctggttccagacctggaggcactgggggaaatggctttgccccaagtggcaatggcaatggctatggcccaggagggacaggcttcatccccatccctggaggcaatggcttttctcctggcgttgggggagccggtgtgggggccgggggacagggacctatcatcactggactaacaattctgaaccagacaatagatatctgtaagcatcatgctaacctttgtttaaatggacgctgtataccaactgtctcaagctaccgatgtgaatgcaacatgggttataagcaggatgcaaatggagattgtatagatgttgatgaatgcacatcaaatccctgcactaatggagattgtgttaacacacctggttcctattattgtaaatgtcatgctggattccagaggactcctaccaagcaagcatgcattgatattgatgagtgcatccagaatggggttctttgtaaaaacggtcgatgcgtgaactcagatggaagtttccagtgcatttgcaatgccggctttgaattaactacagatggaaaaaactgtgttgatcatgatgaatgtacaactaccaacatgtgtttgaatggaatgtgcatcaatgaagatggcagcttcaagtgcatctgcaaaccaggatttgtcttggctccaaatgggcgttactgtactgatgttgatgaatgccagaccccaggaatctgcatgaatgggcactgcatcaacagtgaagggtccttccgctgtgactgtcccccaggcctggctgtgggcatggatggacgtgtgtgtgttgatactcacatgcgcagtacctgctatggaggaatcaagaaaggagtgtgtgtgcgtcctttccccggtgcagtgaccaagtccgaatgctgctgtgccaatccagactatggttttggagaaccctgccagccatgccctgcaaaaaattcagctgaattccacggcctttgtagtagtggagtaggtatcactgtggatggaagagatatcaatgaatgtgctttggatcctgatatatgtgccaatgggatttgtgaaaacttacgtggtagttaccgttgtaattgcaacagtggctatgaaccagatgcctctggaagaaactgtattgacattgatgaatgtttagtaaacagactgctttgtgataacggattgtgccgaaacacgccaggaagttacagctgtacgtgcccaccagggtatgtgttcaggactgagacagagacctgtgaagatataaatgaatgtgaaagcaacccatgtgtcaatggggcctgcagaaacaaccttggatctttcaattgtgaatgttcgcccggcagcaaactcagctccacaggattgatctgtattgacagcctgaaggggacctgttggctcaacatccaggacagccgctgtgaggtgaatattaatggagccactctgaaatctgaatgctgtgccaccctcggagccgcctgggggagcccctgtgagcggtgtgaactagatacagcttgcccaagagggcttgccaggattaaaggtgttacgtgtgaagatgttaatgagtgtgaggtgttccctggcgtttgtccaaatggacgctgtgtcaacagtaagggatcttttcattgcgagtgccctgaaggccttacgttggatgggactggccgtgtatgtttggatattcgcatggagcagtgttacttgaagtgggatgaagatgaatgcatccaccccgttcctggaaagttccgcatggatgcctgctgctgtgctgtcggggcggcttggggcaccgagtgtgaggagtgccccaaacctggcaccaaggaatacgagacactgtgcccccgcggggctggctttgctaaccgaggggatgttcttactgggcggccattttacaaagacatcaatgaatgcaaagcatttcctgggatgtgcacttatgggaagtgcagaaatacaatcggaagcttcaaatgccgttgcaatagtggctttgctctagacatggaggaaagaaactgcacggacatcgacgagtgcaggatttctcctgacctctgtggcagtggaatctgcgtcaatacaccgggcagctttgagtgcgagtgcttcgaaggctatgaaagtggcttcatgatgatgaagaactgcatggacattgacgaatgtgaacgtaaccctctcctttgtaggggtggcacctgtgtgaacactgagggcagctttcagtgtgactgcccactgggacacgagctgtcaccatcccgtgaggactgtgtggatattaatgaatgctccctgagtgacaatctctgcagaaatggaaaatgtgtgaacatgattggaacctatcagtgctcttgcaatcctggatatcaggctacgccagaccgccagggctgtacagatattgatgaatgtatgataatgaacggaggctgtgacacccagtgcacaaattcagagggaagctacgaatgcagctgcagtgagggttatgccctgatgccagatgggagatcgtgtgcagacattgatgaatgtgaaaacaatcctgatatctgtgatggcggccagtgtaccaacattcctggagagtatcgctgcctctgctatgatggcttcatggcttccatggacatgaaaacatgcattgatgtcaatgaatgtgacctaaattcaaatatctgcatgtttggggaatgtgagaacacaaagggatccttcatttgccactgtcagctgggttactcagtgaagaaggggaccacaggatgtacagatgtggatgagtgtgaaattggtgctcataactgcgacatgcatgcctcatgtctgaatatcccaggaagcttcaagtgtagctgcagagaaggctggattggaaacggcatcaagtgtattgatctggacgaatgttctaatggaacccaccagtgtagcatcaatgctcagtgtgtaaataccccgggctcataccgctgtgcctgctccgaaggtttcactggtgatggctttacctgctcagatgttgatgagtgtgcagaaaacataaacctctgtgagaacggacagtgccttaatgtcccgggtgcatatcgctgcgagtgtgagatgggcttcactccagcctcagacagcagatcctgccaaggtgggtcaccaggattccaactcattttcaagttggatcaaccacagtaaatgaaaccacaacaagggctggaacaagctccacctggaagcagaatacatagcacatgctgcactataaaagtcattcgtttaagcgtggattattttgccgaatgaataatgatgatggcggctttcatctcttatgaagttttcctggccaagagccagtagttggaagtttggatcattcttttttcttttttaaccatttcttctcttctttctcttttttatcactaaatgaatgacatgtggagaaactattcagcttttaaagtatgctccattacttgtctcaactaccactatttattgtgtttatcaaaatcataaaaagctcattttgggaaaaaaaaaaaaaaaaaaaaaaaaaaaaatttgtgtggggcgcggccccttgggcacgctcagagaagaggttttttagaacccattcgtgtcgtggggcgcgcggcgcggcccagttgggtattagtgtgaccgcgtgggtcaaagcggggggttccagagaggaaaccgcgggcgccaaaagagacaagagcggggcgggggggtcttctccccccccaatttataaaacaacaaggcgcgccccggggggggggggaaaaaccccaccacagaagaccacaagtgatctctttctgtcaggagaaccaacaaatctcccccaagagtggggaggctccaagagggggcaacacagggggggcccacat

SEQ ID NO: 454664 - DNA, 1246 bp, Homo sapiens
atggggagaagacggaggctgtgtctccagctctacttcctgtggctgggctgtgtggtgctctgggcgcagggcacggccggccagcctcagcctcctccgcccaagccgccccggccccagccgccgccgcaacaggttcggtccgctacagcaggctctgaaggcgggtttctagcgcccgagtatcgcgaggagggtgccgcagtggccagccgcgtccgccggcgaggacagcaggacgtgctccgagggcccaacgtgtgcggctccagattccactcctactgctgccctggatggaagacgctccctggaggaaaccagtgcattgtcccgatttgtagaaatagttgtggagatggattttgttcccgtcctaacatgtgtacttgttccagtgggcaaatatcatcaacctgtggatcaaaatcaattcagcagtgcagtgtgagatgcatgaatggtgggacctgtgcagatgaccactgccagtgccagaaaggatatattggaacttattgtggacaacctgtctgtgaaaatggatgtcagaatggtggacgttgcatcggacccaaccgctgtgcttgtgtttatgggttcactggtccacagtgtgaaagagattacaggacaggcccgtgtttcactcaggtcaacaaccagatgtgccaagggcagctgacaggcattgtctgcacgaagactctgtgctgtgccaccattggacgggcgtggggccatccctgtgagatgtgtccagcccagcctcagccctgccgacggggtttcatccccaacatccgcactggagcttgccaagatgttgatgaatgccaggctatcccagggatatgccaaggaggaaactgtatcaatacagtgggctcttttgaatgcagatgccctgctggtcacaaacagagtgaaactactcagaaatgtgaagacattgatgagtgcagcatcattcctgggatatgtgaaactggtgaatgttccaacaccgtgggaagctatttttgtgtttgtccacgtggatatgtaacctcaacagatggctctcgatgcatcgatttgttcaggatccccccgacctgctgccgtgaactcgattctctttctcctatttgttaagaagttatgtactttatttctgttgcttcagtggctatcctagctgttttaagatgcatatttaaaattacctgtatgtttgcctatatataaataataaaagaat

SEQ ID NO: 454665 - DNA, 204 bp, Homo sapiens
atgtaaaatatgtaactttaaatgtatttgaaagggcactaagaaaaatttggatacaccccttaggatgagtatattgagcctgtcatttgctgaatgcttgctcattgtctcagccacttggacacaggtatcaaacctcttatttttctattgttttgtagctgaatattacaccctgtgtcccggaggtgaaggcttcag

SEQ ID NO: 454666 - DNA, 581 bp, Homo sapiens
attatagggttagtagtacagaaattgagggttgagtagttacattctaaatgagcatgagagccagcgaatatgattctgattaaaaaaaaaacaaaaaaccttttaccaaacacttgcttaacagtgtgatttacatgaagtatgtaagtttttgtctgaatatacttaaatatatttacttaaatttaagatgtgaactttaacctgtgtaatttatacaagttgcagtttaattaacataatgtactataatttaacataagatcctttattggcagcatcactgcactactatattgtgcttggagactggctatataatgagcttcttgctatttttgtatgcagctgtctgtgaaaatggatgtcagaatggtggacgttgcatcggacccaaccgctgtgcttgtgtttatgggttcactggtccacagtgtgaaagaggtaagaagagaaatgagactttactttctgaagaagtctattttattgtaaaaatgtataattttttgctattcaatgaagattctgctaatgaaattatatttttactcttctttgattatgtctctaagttg

SEQ ID NO: 454667 - DNA, 362 bp, Homo sapiens
gcatatttgggatattttctttatttctaagttttgcataaatggggatttagagaatcacctatgctttgttcagtcatctaagtaatataaattcattgaaaaaatagatttattaattaatagatattcttgcctactctagatattgatgagtgttttgcacatcctggtgtgtgtgggcctgggacctgctataacaccctgggaaattacacctgcatttgcccacctgagtacatgcaggtcaatggaggccacaactgcatgggtaggtaaagaactctgagattaattagagcacagttgttgacttcacacataaagcacttacgtctcagaattattgtttggaagtttgg

SEQ ID NO: 454668 - DNA, 10286 bp, Homo sapiens
atggggagaagacggaggctgtgtctccagctctacttcctgtggctgggctgtgtggtgctctgggcgcagggcacggccggccagcctcagcctcctccgcccaagccgccccggccccagccgccgccgcaacaggttcggtccgctacagcaggctctgaaggcgggtttctagcgcccgagtatcgcgaggagggtgccgcagtggccagccgcgtccgccggcgaggacagcaggacgtgctccgagggcccaacgtgtgcggctccagattccactcctactgctgccctggatggaagacgctccctggaggaaaccagtgcattgtcccgatttgtagaaatagttgtggagatggattttgttcccgtcctaacatgtgtacttgttccagtgggcaaatatcatcaacctgtggatcaaaatcaattcagcagtgcagtgtgagatgcatgaatggtgggacctgtgcagatgaccactgccagtgccagaaaggatatattggaacttattgtggacaacctgtctgtgaaaatggatgtcagaatggtggacgttgcatcggacccaaccgctgtgcttgtgtttatgggttcactggtccacagtgtgaaagagattacaggacaggcccgtgtttcactcaggtcaacaaccagatgtgccaagggcagctgacaggcattgtctgcacgaagactctgtgctgtgccaccattggacgggcgtggggccatccctgtgagatgtgtccagcccagcctcagccctgccgacggggtttcatccccaacatccgcactggagcttgccaagatgttgatgaatgccaggctatcccagggatatgccaaggaggaaactgtatcaatacagtgggctcttttgaatgcagatgccctgctggtcacaaacagagtgaaactactcagaaatgtgaagacattgatgagtgcagcatcattcctgggatatgtgaaactggtgaatgttccaacaccgtgggaagctatttttgtgtttgtccacgtggatatgtaacctcaacagatggctctcgatgcatcgatcagagaacaggcatgtgtttctcgggcctggtgaatggccgctgtgcacaagagctcccggggagaatgacgaaaatgcagtgctgctgtgagcctggccgctgctggggcatcggaaccattcctgaagcctgtcctgtcagaggttctgaggaatatcgcagactttgcatggatggacttccaatgggaggaattccagggagtgctggttccagacctggaggcactgggggaaatggctttgccccaagtggcaatggcaatggctatggcccaggagggacaggcttcatccccatccctggaggcaatggcttttctcctggcgttgggggagccggtgtgggggccgggggacagggacctatcatcactggactaacaattctgaaccagacaatagatatctgtaagcatcatgctaacctttgtttaaatggacgctgtataccaactgtctcaagctaccgatgtgaatgcaacatgggttataagcaggatgcaaatggagattgtatagatgttgatgaatgcacatcaaatccctgcactaatggagattgtgttaacacacctggttcctattattgtaaatgtcatgctggattccagaggactcctaccaagcaagcatgcattgatattgatgagtgcatccagaatggggttctttgtaaaaacggtcgatgcgtgaactcagatggaagtttccagtgcatttgcaatgccggctttgaattaactacagatggaaaaaactgtgttgatcatgatgaatgtacaactaccaacatgtgtttgaatggaatgtgcatcaatgaagatggcagcttcaagtgcatctgcaaaccaggatttgtcttggctccaaatgggcgttactgtactgatgttgatgaatgccagaccccaggaatctgcatgaatgggcactgcatcaacagtgaagggtccttccgctgtgactgtcccccaggcctggctgtgggcatggatggacgtgtgtgtgttgatactcacatgcgcagtacctgctatggaggaatcaagaaaggagtgtgtgtgcgtcctttccccggtgcagtgaccaagtccgaatgctgctgtgccaatccagactatggttttggagaaccctgccagccatgccctgcaaaaaattcagctgaattccacggcctttgtagtagtggagtaggtatcactgtggatggaagagatatcaatgaatgtgctttggatcctgatatatgtgccaatgggatttgtgaaaacttacgtggtagttaccgttgtaattgcaacagtggctatgaaccagatgcctctggaagaaactgtattgacattgatgaatgtttagtaaacagactgctttgtgataacggattgtgccgaaacacgccaggaagttacagctgtacgtgcccaccagggtatgtgttcaggactgagacagagacctgtgaagatataaatgaatgtgaaagcaacccatgtgtcaatggggcctgcagaaacaaccttggatctttcaattgtgaatgttcgcccggcagcaaactcagctccacaggattgatctgtattgacagcctgaaggggacctgttggctcaacatccaggacagccgctgtgaggtgaatattaatggagccactctgaaatctgaatgctgtgccaccctcggagccgcctgggggagcccctgtgagcggtgtgaactagatacagcttgcccaagagggcttgccaggattaaaggtgttacgtgtgaagatgttaatgagtgtgaggtgttccctggcgtttgtccaaatggacgctgtgtcaacagtaagggatcttttcattgcgagtgccctgaaggccttacgttggatgggactggccgtgtatgtttggatattcgcatggagcagtgttacttgaagtgggatgaagatgaatgcatccaccccgttcctggaaagttccgcatggatgcctgctgctgtgctgtcggggcggcttggggcaccgagtgtgaggagtgccccaaacctggcaccaaggaatacgagacactgtgcccccgcggggctggctttgctaaccgaggggatgttcttactgggcggccattttacaaagacatcaatgaatgcaaagcatttcctgggatgtgcacttatgggaagtgcagaaatacaatcggaagcttcaaatgccgttgcaatagtggctttgctctagacatggaggaaagaaactgcacggacatcgacgagtgcaggatttctcctgacctctgtggcagtggaatctgcgtcaatacaccgggcagctttgagtgcgagtgcttcgaaggctatgaaagtggcttcatgatgatgaagaactgcatggacattgacgaatgtgaacgtaaccctctcctttgtaggggtggcacctgtgtgaacactgagggcagctttcagtgtgactgcccactgggacacgagctgtcaccatcccgtgaggactgtgtggatattaatgaatgctccctgagtgacaatctctgcagaaatggaaaatgtgtgaacatgattggaacctatcagtgctcttgcaatcctggatatcaggctacgccagaccgccagggctgtacagatattgatgaatgtatgataatgaacggaggctgtgacacccagtgcacaaattcagagggaagctacgaatgcagctgcagtgagggttatgccctgatgccagatgggagatcgtgtgcagacattgatgaatgtgaaaacaatcctgatatctgtgatggcggccagtgtaccaacattcctggagagtatcgctgcctctgctatgatggcttcatggcttccatggacatgaaaacatgcattgatgtcaatgaatgtgacctaaattcaaatatctgcatgtttggggaatgtgagaacacaaagggatccttcatttgccactgtcagctgggttactcagtgaagaaggggaccacaggatgtacagatgtggatgagtgtgaaattggtgctcataactgcgacatgcatgcctcatgtctgaatatcccaggaagcttcaagtgtagctgcagagaaggctggattggaaacggcatcaagtgtattgatctggacgaatgttctaatggaacccaccagtgtagcatcaatgctcagtgtgtaaataccccgggctcataccgctgtgcctgctccgaaggtttcactggtgatggctttacctgctcagatgttgatgagtgtgcagaaaacataaacctctgtgagaacggacagtgccttaatgtcccgggtgcatatcgctgcgagtgtgagatgggcttcactccagcctcagacagcagatcctgccaagatattgatgaatgctccttccaaaacatttgtgtctctggaacatgtaataacctgcctggaatgtttcattgcatctgcgatgatggttatgaattggacagaacaggagggaactgtacagatattgatgagtgtgcagatcctataaactgtgtcaatggcctatgtgtcaacacgcctggtcgctatgagtgtaactgcccacccgattttcagttgaacccaactggtgtgggttgtgttgacaaccgtgtgggcaactgctacctgaagtttggacctcgaggagatgggagtctgtcttgcaacaccgagatcggggtgggcgtcagtcgctcttcatgctgctgctctctgggaaaggcctggggaaacccctgtgagacatgcccccctgtcaatagcactgaatattacaccctgtgtcccggaggtgaaggcttcagacctaaccccatcacaatcattttagaagacattgacgaatgccaggagttaccaggtctctgccagggtggaaactgcatcaacacttttgggagcttccagtgtgagtgcccacaaggctactacctcagcgaggatacccgcatctgtgaggatattgatgagtgttttgcacatcctggtgtgtgtgggcctgggacctgctataacaccctgggaaattacacctgcatttgcccacctgagtacatgcaggtcaatggaggccacaactgcatggacatgagaaaaagcttttgctaccgaagctataatggaaccacttgtgagaatgagttgcctttcaatgtgacaaaaaggatgtgctgctgcacatataatgtgggcaaagcttggaacaaaccttgtgaaccatgcccaactccaggaacagctgactttaaaaccatatgtggaaatattcctggattcacctttgacattcacacaggaaaagctgttgacattgatgaatgtaaagagattccaggcatttgtgcaaatggtgtgtgcattaaccagattggcagtttccgctgtgaatgccctacaggattcagttacaatgacctgctgttggtttgtgaagatatagatgagtgcagcaatggtgataatctctgccagcggaatgcagactgcatcaatagtcctggtagttaccgctgtgaatgtgccgcgggtttcaaactttcacccaatggggcctgtgtagatcgcaatgaatgtttagaaattcctaacgtttgcagtcatggcttgtgtgttgatctgcaaggaagttaccagtgcatctgccacaatggctttaaggcttctcaggaccagaccatgtgcatggatgttgatgagtgcgagcggcatccatgtggaaatggaacttgtaaaaacaccgttggatcctataactgtctgtgctacccagggtttgaactcactcataataatgattgcctggacatagatgagtgcagttccttttttggtcaggtgtgcagaaatggacgttgttttaatgaaattggttctttcaagtgtctatgtaacgaaggttatgaacttaccccagatggcaaaaactgtatagacactaatgagtgtgtcgcccttcccggctcttgctctcctggtacctgtcagaatttggagggatccttcagatgcatctgtcccccagggtatgaagtaaaaagcgagaactgcattgatataaatgaatgtgatgaagatcccaacatttgtctttttggttcctgtactaatactccagggggcttccagtgcctctgcccccctggctttgtactatctgataatggacggagatgctttgatactcgccagagcttctgcttcacaaattttgaaaatggaaagtgttctgtacccaaagctttcaacaccacaaaagcaaaatgctgctgtagtaagatgccaggagagggctggggggacccctgtgagctgtgccccaaagacgatgaagttgcatttcaggatttgtgtccatatggccatggaactgtccctagtcttcatgatacacgtgaagatgtcaatgagtgtcttgagagcccaggcatttgttcaaatggtcaatgtatcaacaccgacggatcttttcgctgtgaatgtccaatgggctacaaccttgactacactggagtacgctgtgtggatactgatgagtgttcaatcggcaatccgtgtggaaatggtacatgcaccaatgttattgggagttttgaatgcaattgcaatgaaggctttgagccagggcccatgatgaattgtgaagatatcaacgaatgtgcccagaacccactgctgtgtgctttacgctgcatgaacacttttgggtcctatgaatgcacgtgcccgattggctatgccctcagggaagatcaaaagatgtgcaaagatctggatgaatgtgctgaagggttacacgactgtgaatctaggggcatgatgtgtaagaatctaatcggcaccttcatgtgcatctgccctcctggaatggcccgaaggcccgatggagaaggctgtgtagatgaaaatgaatgcaggaccaagccaggaatctgtgaaaatggacgttgtgttaacattattggaagctatagatgtgagtgtaatgaaggattccagtcaagttcttcaggcactgaatgccttgacaatcgacagggtctctgctttgcagaggtactgcagacaatatgtcaaatggcatccagtagtcgcaatctcgtcactaagtcagaatgctgctgtgatggtgggcgaggctggggccaccagtgcgagctttgcccacttcctggaactgcccagtacaaaaagatatgtcctcatggcccaggatatacaactgatggaagagatattgatgaatgtaaggtaatgccaaacctctgcaccaatggtcagtgcatcaataccatgggctcattccgatgcttctgcaaggttggctacaccacagacatcagtggaacctcttgtatagaccttgatgaatgctcccagtccccgaaaccatgcaactacatctgcaagaacactgaggggagttatcagtgttcatgtccgagggggtatgtcctgcaagaggatggaaagacatgcaaagaccttgatgaatgtcaaacaaagcagcataactgccagttcctctgtgtcaacaccctgggggggtttacctgtaaatgtccacctggtttcacacagcatcacactgcttgtatcgacaacaacgaatgtgggtctcaaccttcgctttgtggagcaaagggaatctgtcaaaacactccaggcagtttcagctgtgaatgccaaagagggttctctcttgatgccaccggactgaactgtgaagatgttgatgaatgtgatgggaaccacaggtgccaacacggctgccagaacatcctgggtggctacagatgtggctgcccccaaggctacatccagcactaccagtggaatcagtgtgtcgatgagaatgaatgctccaatcccaatgcctgtggctctgcttcctgctacaacaccctggggagttacaagtgcgcctgcccctcggggttctccttcgaccagttctccagtgcctgccacgacgtgaatgagtgctcgtcctccaagaacccctgcaattacggctgctctaacacggaggggggctacctctgtggctgcccccctgggtattacagagtgggacaaggccactgtgtctcaggaatgggatttaacaaggggcagtacctgtcactggatacagaggtcgatgaggaaaatgctctgtccccagaagcatgctacgagtgcaaaatcaacggctattctaagaaagacagcaggcagaagagaagtattcatgaacctgatcccactgctgttgaacagatcagcctagagagtgtcgacatggacagccccgtcaacatgaagttcaacctctcccacctcggctctaaggagcacatcctggaactaaggcccgccatccagcccctcaacaaccacatccgttatgtcatctctcaagggaacgatgacagcgtcttccgcatccaccaaaggaatgggctcagctacttgcacacggccaagaagaagctcatgcccggcacatacacactggaaatcactagcatccctctctacaagaagaaggagcttaagaaactggaagagagcaatgaggatgactacctcctaggggagcttggggaggctctcagaatgaggctgcagattcagctctattaacccttcacagacttgggcccaggctcaaatcctagcacagccagtctgcagaagcatttgaaaagtcaaggactaattttaaagaggaaaaataataataactcttgtttctttcctccctgtcttagactttgaatgttgaccctcacagggagggataatttagactctggtatggccaaagatttgagcacaaaggcaaccgtggttactgtattttttatataacttcattttaaaatatattaaaagaaacctaaatgttcaagatatcagcatatggcactaaatgcacaaaaataatgtgagctttttttttttttcctgttagcagtctgtaacactttgggtattttgctatagttgctaattaaaaaaatatagatgtttatttatttttaatgcagtaatatatggagaaatgaacaaactatgtaaacaaaaagggaaactcacttgtttttctttagatttataaatttgagctattttttttagaggtgctttttaaaaatccaatagatacaagagatgtttcctttggttttctgccagtcatccagctgatacacacctgatgattttaaagaaagccacacagagctgaatgggcagtgtaatcaataatttaaaagacatgaatgtcattagatcctttataacgtagatcgaagccaaagcagctcatttgtgacaacatttcatatcaccagacacaccaggcaacagaagttgaagcacaaccactgtagcaaaataccttgactgcttgtgagaccattagcattgcaggccaaaccgtactgtatttccttctcataacctcaaggaaccatatgtgctacccacaacacctcattcttacccagggtgcgctgcgtcctcatggtactgtaggcagctgaagaaccgccgttcccttgaaagggaacacctggcattctgtggtgtttcgtgctgtcttaaataatggtgcatttattatgttcaagttatttcaggattgccatatgtgcaaacaaatcatgcaatgcagccaaggaatatatgttgttgttgttgttttaaacccattttttttttagaattttcattaatactgtagttatacaccatatgcctcattttatcatagcctattgtgtatgaaagatgtttgtacaatgaattgatgtttagtttgctttagtcatttaaaaagatattgtaccaggatgtgctattaagagcacgtatccattattcttctcaacccaagaacctgtttcctggaccagtgaccaaacctcatatgtgaaatggccaaagcacatgcaggctcctggttgttcctctcaaacctgtgctgaccaaagattagtaaccagttatacccagtattttgaggttttattgtttttttaataactaaaaaagaaaaaaggaacagtgtaaatttgtaatcaagagtttgtgaggaaaaacttatggtttttggttttgtttgtttttgtaggtctgtgtatcaaatatgacacttttcttgcaataaagcttattttggggta

SEQ ID NO: 454669 - DNA, 8245 bp, Homo sapiens
atggggagaagacggaggctgtgtctccagctctacttcctgtggctgggctgtgtggtgctctgggcgcagggcacggccggccagcctcagcctcctccgcccaagccgccccggccccagccgccgccgcaacaggttcggtccgctacagcaggctctgaaggcgggtttctagcgcccgagtatcgcgaggagggtgccgcagtggccagccgcgtccgccggcgaggacagcaggacgtgctccgagggcccaacgtgtgcggctccagattccactcctactgctgccctggatggaagacgctccctggaggaaaccagtgcattgtcccgatttgtagaaatagttgtggagatggattttgttcccgtcctaacatgtgtacttgttccagtgggcaaatatcatcaacctgtggatcaaaatcaattcagcagtgcagtgtgagatgcatgaatggtgggacctgtgcagatgaccactgccagtgccagaaaggatatattggaacttattgtggacaacctgtctgtgaaaatggatgtcagaatggtggacgttgcatcggacccaaccgctgtgcttgtgtttatgggttcactggtccacagtgtgaaagagattacaggacaggcccgtgtttcactcaggtcaacaaccagatgtgccaagggcagctgacaggcattgtctgcacgaagactctgtgctgtgccaccattggacgggcgtggggccatccctgtgagatgtgtccagcccagcctcagccctgccgacggggtttcatccccaacatccgcactggagcttgccaagatgttgatgaatgccaggctatcccagggatatgccaaggaggaaactgtatcaatacagtgggctcttttgaatgcagatgccctgctggtcacaaacagagtgaaactactcagaaatgtgaagacattgatgagtgcagcatcattcctgggatatgtgaaactggtgaatgttccaacaccgtgggaagctatttttgtgtttgtccacgtggatatgtaacctcaacagatggctctcgatgcatcgatcagagaacaggcatgtgtttctcgggcctggtgaatggccgctgtgcacaagagctcccggggagaatgacgaaaatgcagtgctgctgtgagcctggccgctgctggggcatcggaaccattcctgaagcctgtcctgtcagaggttctgaggaatatcgcagactttgcatggatggacttccaatgggaggaattccagggagtgctggttccagacctggaggcactgggggaaatggctttgccccaagtggcaatggcaatggctatggcccaggagggacaggcttcatccccatccctggaggcaatggcttttctcctggcgttgggggagccggtgtgggggccgggggacagggacctatcatcactggactaacaattctgaaccagacaatagatatctgtaagcatcatgctaacctttgtttaaatggacgctgtataccaactgtctcaagctaccgatgtgaatgcaacatgggttataagcaggatgcaaatggagattgtatagatgttgatgaatgcacatcaaatccctgcactaatggagattgtgttaacacacctggttcctattattgtaaatgtcatgctggattccagaggactcctaccaagcaagcatgcattgatattgatgagtgcatccagaatggggttctttgtaaaaacggtcgatgcgtgaactcagatggaagtttccagtgcatttgcaatgccggctttgaattaactacagatggaaaaaactgtgttgatcatgatgaatgtacaactaccaacatgtgtttgaatggaatgtgcatcaatgaagatggcagcttcaagtgcatctgcaaaccaggatttgtcttggctccaaatgggcgttactgtactgatgttgatgaatgccagaccccaggaatctgcatgaatgggcactgcatcaacagtgaagggtccttccgctgtgactgtcccccaggcctggctgtgggcatggatggacgtgtgtgtgttgatactcacatgcgcagtacctgctatggaggaatcaagaaaggagtgtgtgtgcgtcctttccccggtgcagtgaccaagtccgaatgctgctgtgccaatccagactatggttttggagaaccctgccagccatgccctgcaaaaaattcagctgaattccacggcctttgtagtagtggagtaggtatcactgtggatggaagagatatcaatgaatgtgctttggatcctgatatatgtgccaatgggatttgtgaaaacttacgtggtagttaccgttgtaattgcaacagtggctatgaaccagatgcctctggaagaaactgtattgacattgatgaatgtttagtaaacagactgctttgtgataacggattgtgccgaaacacgccaggaagttacagctgtacgtgcccaccagggtatgtgttcaggactgagacagagacctgtgaagatataaatgaatgtgaaagcaacccatgtgtcaatggggcctgcagaaacaaccttggatctttcaattgtgaatgttcgcccggcagcaaactcagctccacaggattgatctgtattgacagcctgaaggggacctgttggctcaacatccaggacagccgctgtgaggtgaatattaatggagccactctgaaatctgaatgctgtgccaccctcggagccgcctgggggagcccctgtgagcggtgtgaactagatacagcttgcccaagagggcttgccaggattaaaggtgttacgtgtgaagatgttaatgagtgtgaggtgttccctggcgtttgtccaaatggacgctgtgtcaacagtaagggatcttttcattgcgagtgccctgaaggccttacgttggatgggactggccgtgtatgtttggatattcgcatggagcagtgttacttgaagtgggatgaagatgaatgcatccaccccgttcctggaaagttccgcatggatgcctgctgctgtgctgtcggggcggcttggggcaccgagtgtgaggagtgccccaaacctggcaccaaggaatacgagacactgtgcccccgcggggctggctttgctaaccgaggggatgttcttactgggcggccattttacaaagacatcaatgaatgcaaagcatttcctgggatgtgcacttatgggaagtgcagaaatacaatcggaagcttcaaatgccgttgcaatagtggctttgctctagacatggaggaaagaaactgcacggacatcgacgagtgcaggatttctcctgacctctgtggcagtggaatctgcgtcaatacaccgggcagctttgagtgcgagtgcttcgaaggctatgaaagtggcttcatgatgatgaagaactgcatggacattgacgaatgtgaacgtaaccctctcctttgtaggggtggcacctgtgtgaacactgagggcagctttcagtgtgactgcccactgggacacgagctgtcaccatcccgtgaggactgtgtggatattaatgaatgctccctgagtgacaatctctgcagaaatggaaaatgtgtgaacatgattggaacctatcagtgctcttgcaatcctggatatcaggctacgccagaccgccagggctgtacagatattgatgaatgtatgataatgaacggaggctgtgacacccagtgcacaaattcagagggaagctacgaatgcagctgcagtgagggttatgccctgatgccagatgggagatcgtgtgcagacattgatgaatgtgaaaacaatcctgatatctgtgatggcggccagtgtaccaacattcctggagagtatcgctgcctctgctatgatggcttcatggcttccatggacatgaaaacatgcattgatgtcaatgaatgtgacctaaattcaaatatctgcatgtttggggaatgtgagaacacaaagggatccttcatttgccactgtcagctgggttactcagtgaagaaggggaccacaggatgtacagatgtggatgagtgtgaaattggtgctcataactgcgacatgcatgcctcatgtctgaatatcccaggaagcttcaagtgtagctgcagagaaggctggattggaaacggcatcaagtgtattgatctggacgaatgttctaatggaacccaccagtgtagcatcaatgctcagtgtgtaaataccccgggctcataccgctgtgcctgctccgaaggtttcactggtgatggctttacctgctcagatgttgatgagtgtgcagaaaacataaacctctgtgagaacggacagtgccttaatgtcccgggtgcatatcgctgcgagtgtgagatgggcttcactccagcctcagacagcagatcctgccaagatattgatgaatgctccttccaaaacatttgtgtctctggaacatgtaataacctgcctggaatgtttcattgcatctgcgatgatggttatgaattggacagaacaggagggaactgtacagatattgatgagtgtgcagatcctataaactgtgtcaatggcctatgtgtcaacacgcctggtcgctatgagtgtaactgcccacccgattttcagttgaacccaactggtgtgggttgtgttgacaaccgtgtgggcaactgctacctgaagtttggacctcgaggagatgggagtctgtcttgcaacaccgagatcggggtgggcgtcagtcgctcttcatgctgctgctctctgggaaaggcctggggaaacccctgtgagacatgcccccctgtcaatagcactgaatattacaccctgtgtcccggaggtgaaggcttcagacctaaccccatcacaatcattttagaagacattgacgaatgccaggagttaccaggtctctgccagggtggaaactgcatcaacacttttgggagcttccagtgtgagtgcccacaaggctactacctcagcgaggatacccgcatctgtgaggatattgatgagtgttttgcacatcctggtgtgtgtgggcctgggacctgctataacaccctgggaaattacacctgcatttgcccacctgagtacatgcaggtcaatggaggccacaactgcatggacatgagaaaaagcttttgctaccgaagctataatggaaccacttgtgagaatgagttgcctttcaatgtgacaaaaaggatgtgctgctgcacatataatgtgggcaaagcttggaacaaaccttgtgaaccatgcccaactccaggaacagctgactttaaaaccatatgtggaaatattcctggattcacctttgacattcacacaggaaaagctgttgacattgatgaatgtaaagagattccaggcatttgtgcaaatggtgtgtgcattaaccagattggcagtttccgctgtgaatgccctacaggattcagttacaatgacctgctgttggtttgtgaagatatagatgagtgcagcaatggtgataatctctgccagcggaatgcagactgcatcaatagtcctggtagttaccgctgtgaatgtgccgcgggtttcaaactttcacccaatggggcctgtgtagatcgcaatgaatgtttagaaattcctaacgtttgcagtcatggcttgtgtgttgatctgcaaggaagttaccagtgcatctgccacaatggctttaaggcttctcaggaccagaccatgtgcatggatgttgatgagtgcgagcggcatccatgtggaaatggaacttgtaaaaacaccgttggatctacagatgtggctgcccccaaggctacatccagcactaccagtggaatcagtgtgtcgatgagaatgaatgctccaatcccaatgcctgtggctctgcttcctgctacaacaccctggggagttacaagtgcgcctgcccctcggggttctccttcgaccagttctccagtgcctgccacgacgtgaatgagtgctcgtcctccaagaacccctgcaattacggctgctctaacacggaggggggctacctctgtggctgcccccctgggtattacagagtgggacaaggccactgtgtctcaggaatgggatttaacaaggggcagtacctgtcactggatacagaggtcgatgaggaaaatgctctgtccccagaagcatgctacgagtgcaaaatcaacggctattctaagaaagacagcaggcagaagagaagtattcatgaacctgatcccactgctgttgaacagatcagcctagagagtgtcgacatggacagccccgtcaacatgaagttcaacctctcccacctcggctctaaggagcacatcctggaactaaggcccgccatccagcccctcaacaaccacatccgttatgtcatctctcaagggaacgatgacagcgtcttccgcatccaccaaaggaatgggctcagctacttgcacacggccaagaagaagctcatgcccggcacatacacactggaaatcactagcatccctctctacaagaagaaggagcttaagaaactggaagagagcaatgaggatgactacctcctaggggagcttggggaggctctcagaatgaggctgcagattcagctctattaacccttcacagacttgggcccaggctcaaatcctagcacagccagtctgcagaagcatttgaaaagtcaaggactaattttaaagaggaaaaataataataactcttgtttctttcctccctgtcttagactttgaatgttgaccctcacagggagggataatttagactctggtatggccaaagatttgagcacaaaggcaaccgtggttactgtattttttatataacttcattttaaaatatattaaaagaaacctaaatgttcaagatatcagcatatggcactaaatgcacaaaaataatgtgagctttttttttttttcctgttagcagtctgtaacactttgggtattttgctatagttgctaattaaaaaaatatagatgtttatttatttttaatgcagtaatatatggagaaatgaacaaactatgtaaacaaaaagggaaactcacttgtttttctttagatttataaatttgagctattttttttagaggtgctttttaaaaatccaatagatacaagagatgtttcctttggttttctgccagtcatccagctgatacacacctgatgattttaaagaaagccacacagagctgaatgggcagtgtaatcaataatttaaaagacatgaatgtcattagatcctttataacgtagatcgaagccaaagcagctcatttgtgacaacatttcatatcaccagacacaccaggcaacagaagttgaagcacaaccactgtagcaaaataccttgactgcttgtgagaccattagcattgcaggccaaaccgtactgtatttccttctcataacctcaaggaaccatatgtgctacccacaacacctcattcttacccagggtgcgctgcgtcctcatggtactgtaggcagctgaagaaccgccgttcccttgaaagggaacacctggcattctgtggtgtttcgtgctgtcttaaataatggtgcatttattatgttcaagttatttcaggattgccatatgtgcaaacaaatcatgcaatgcagccaaggaatatatgttgttgttgttgttttaaacccattttttttttagaattttcattaatactgtagttatacaccatatgcctcattttatcatagcctattgtgtatgaaagatgtttgtacaatgaattgatgtttagtttgctttagtcatttaaaaagatattgtaccaggatgtgctattaagagcacgtatccattattcttctcaacccaagaacctgtttcctggaccagtgaccaaacctcatatgtgaaatggccaaagcacatgcaggctcctggttgttcctctcaaacctgtgctgaccaaagattagtaaccagttatacccagtattttgaggttttattgtttttttaataactaaaaaagaaaaaaggaacagtgtaaatttgtaatcaagagtttgtgaggaaaaacttatggtttttggttttgtttgtttttgtaggtctgtgtatcaaatatgacacttttcttgcaataaagcttattttggggta

SEQ ID NO: 454670 - DNA, 6482 bp, Homo sapiens
cgtgggttccttgcagaaggagcacctgttgaagtatgagtaccagcctttcgctgggaagatcaaagacatgcttggactgaagacagtaagaggatcgccgtggtcggggaaggaagggagaagttgggagcagtcttcctctgggatagtggctcttctgtgggcgagattacaggacacaacaaagtcatcaacagcgtggacatcaagcagagccggccataccggctggccacgggaagcgatgataactgcgcggcattctgcaaggaacccacgccaggatgtacagatgtggatgagtgtgaaattggtgctcataactgcgacatgcatgcctcatgtctgaatatcccaggaagcttcaagtgtagctgcagagaaggctggattggaaacggcatcaagtgtattgatctggacgaatgttctaatggaacccaccagtgtagcatcaatgctcagtgtgtaaataccccgggctcataccgctgtgcctgctccgaaggtttcactggtgatggctttacctgctcagatgttgatgagtgtgcagaaaacataaacctctgtgagaacggacagtgccttaatgtcccgggtgcatatcgctgcgagtgtgagatgggcttcactccagcctcagacagcagatcctgccaagatattgatgaatgctccttccaaaacatttgtgtctctggaacatgtaataacctgcctggaatgtttcattgcatctgcgatgatggttatgaattggacagaacaggagggaactgtacagatattgatgagtgtgcagatcctataaactgtgtcaatggcctatgtgtcaacacgcctggtcgctatgagtgtaactgcccacccgattttcagttgaacccaactggtgtgggttgtgttgacaaccgtgtgggcaactgctacctgaagtttggacctcgaggagatgggagtctgtcttgcaacaccgagatcggggtgggcgtcagtcgctcttcatgctgctgctctctgggaaaggcctggggaaacccctgtgagacatgcccccctgtcaatagcactgaatattacaccctgtgtcccggaggtgaaggcttcagacctaaccccatcacaatcattttagaagacattgacgaatgccaggagttaccaggtctctgccagggtggaaactgcatcaacacttttgggagcttccagtgtgagtgcccacaaggctactacctcagcgaggatacccgcatctgtgaggatattgatgagtgttttgcacatcctggtgtgtgtgggcctgggacctgctataacaccctgggaaattacacctgcatttgcccacctgagtacatgcaggtcaatggaggccacaactgcatggacatgagaaaaagcttttgctaccgaagctataatggaaccacttgtgagaatgagttgcctttcaatgtgacaaaaaggatgtgctgctgcacatataatgtgggcaaagcttggaacaaaccttgtgaaccatgcccaactccaggaacagctgactttaaaaccatatgtggaaatattcctggattcacctttgacattcacacaggaaaagctgttgacattgatgaatgtaaagagattccaggcatttgtgcaaatggtgtgtgcattaaccagattggcagtttccgctgtgaatgccctacaggattcagttacaatgacctgctgttggtttgtgaagatatagatgagtgcagcaatggtgataatctctgccagcggaatgcagactgcatcaatagtcctggtagttaccgctgtgaatgtgccgcgggtttcaaactttcacccaatggggcctgtgtagatcgcaatgaatgtttagaaattcctaacgtttgcagtcatggcttgtgtgttgatctgcaaggaagttaccagtgcatctgccacaatggctttaaggcttctcaggaccagaccatgtgcatggatgttgatgagtgcgagcggcatccatgtggaaatggaacttgtaaaaacaccgttggatcctataactgtctgtgctacccagggtttgaactcactcataataatgattgcctggacatagatgagtgcagttccttttttggtcaggtgtgcagaaatggacgttgttttaatgaaattggttctttcaagtgtctatgtaacgaaggttatgaacttaccccagatggcaaaaactgtatagacactaatgagtgtgtcgcccttcccggctcttgctctcctggtacctgtcagaatttggagggatccttcagatgcatctgtcccccagggtatgaagtaaaaagcgagaactgcattgatataaatgaatgtgatgaagatcccaacatttgtctttttggttcctgtactaatactccagggggcttccagtgcctctgcccccctggctttgtactatctgataatggacggagatgctttgatactcgccagagcttctgcttcacaaattttgaaaatggaaagtgttctgtacccaaagctttcaacaccacaaaagcaaaatgctgctgtagtaagatgccaggagagggctggggggacccctgtgagctgtgccccaaagacgatgaagttgcatttcaggatttgtgtccatatggccatggaactgtccctagtcttcatgatacacgtgaagatgtcaatgagtgtcttgagagcccaggcatttgttcaaatggtcaatgtatcaacaccgacggatcttttcgctgtgaatgtccaatgggctacaaccttgactacactggagtacgctgtgtggatactgatgagtgttcaatcggcaatccgtgtggaaatggtacatgcaccaatgttattgggagttttgaatgcaattgcaatgaaggctttgagccagggcccatgatgaattgtgaagatatcaacgaatgtgcccagaacccactgctgtgtgctttacgctgcatgaacacttttgggtcctatgaatgcacgtgcccgattggctatgccctcagggaagatcaaaagatgtgcaaagatctggatgaatgtgctgaagggttacacgactgtgaatctaggggcatgatgtgtaagaatctaatcggcaccttcatgtgcatctgccctcctggaatggcccgaaggcccgatggagaaggctgtgtagatgaaaatgaatgcaggaccaagccaggaatctgtgaaaatggacgttgtgttaacattattggaagctatagatgtgagtgtaatgaaggattccagtcaagttcttcaggcactgaatgccttgacaatcgacagggtctctgctttgcagaggtactgcagacaatatgtcaaatggcatccagtagtcgcaatctcgtcactaagtcagaatgctgctgtgatggtgggcgaggctggggccaccagtgcgagctttgcccacttcctggaactgcccagtacaaaaagatatgtcctcatggcccaggatatacaactgatggaagagatattgatgaatgtaaggtaatgccaaacctctgcaccaatggtcagtgcatcaataccatgggctcattccgatgcttctgcaaggttggctacaccacagacatcagtggaacctcttgtatagaccttgatgaatgctcccagtccccgaaaccatgcaactacatctgcaagaacactgaggggagttatcagtgttcatgtccgagggggtatgtcctgcaagaggatggaaagacatgcaaagaccttgatgaatgtcaaacaaagcagcataactgccagttcctctgtgtcaacaccctgggggggtttacctgtaaatgtccacctggtttcacacagcatcacactgcttgtatcgacaacaacgaatgtgggtctcaaccttcgctttgtggagcaaagggaatctgtcaaaacactccaggcagtttcagctgtgaatgccaaagagggttctctcttgatgccaccggactgaactgtgaagatgttgatgaatgtgatgggaaccacaggtgccaacacggctgccagaacatcctgggtggctacagatgtggctgcccccaaggctacatccagcactaccagtggaatcagtgtgtcgatgagaatgaatgctccaatcccaatgcctgtggctctgcttcctgctacaacaccctggggagttacaagtgcgcctgcccctcggggttctccttcgaccagttctccagtgcctgccacgacgtgaatgagtgctcgtcctccaagaacccctgcaattacggctgctctaacacggaggggggctacctctgtggctgcccccctgggtattacagagtgggacaaggccactgtgtctcaggaatgggatttaacaaggggcagtacctgtcactggatacagaggtcgatgaggaaaatgctctgtccccagaagcatgctacgagtgcaaaatcaacggctattctaagaaagacagcaggcagaagagaagtattcatgaacctgatcccactgctgttgaacagatcagcctagagagtgtcgacatggacagccccgtcaacatgaagttcaacctctcccacctcggctctaaggagcacatcctggaactaaggcccgccatccagcccctcaacaaccacatccgttatgtcatctctcaagggaacgatgacagcgtcttccgcatccaccaaaggaatgggctcagctacttgcacacggccaagaagaagctcatgcccggcacatacacactggaaatcactagcatccctctctacaagaagaaggagcttaagaaactggaagagagcaatgaggatgactacctcctaggggagcttggggaggctctcagaatgaggctgcagattcagctctattaacccttcacagacttgggcccaggctcaaatcctagcacagccagtctgcagaagcatttgaaaagtcaaggactaattttaaagaggaaaaataataataactcttgtttctttcctccctgtcttagactttgaatgttgaccctcacagggagggataatttagactctggtatggccaaagatttgagcacaaaggcaaccgtggttactgtattttttatataacttcattttaaaatatattaaaagaaacctaaatgttcaagatatcagcatatggcactaaatgcacaaaaataatgtgagctttttttttttttcctgttagcagtctgtaacactttgggtattttgctatagttgctaattaaaaaaatatagatgtttatttatttttaatgcagtaatatatggagaaatgaacaaactatgtaaacaaaaagggaaactcacttgtttttctttagatttataaatttgagctattttttttagaggtgctttttaaaaatccaatagatacaagagatgtttcctttggttttctgccagtcatccagctgatacacacctgatgattttaaagaaagccacacagagctgaatgggcagtgtaatcaataatttaaaagacatgaatgtcattagatcctttataacgtagatcgaagccaaagcagctcatttgtgacaacatttcatatcaccagacacaccaggcaacagaagttgaagcacaaccactgtagcaaaataccttgactgcttgtgagaccattagcattgcaggccaaaccgtactgtatttccttctcataacctcaaggaaccatatgtgctacccacaacacctcattcttacccagggtgcgctgcgtcctcatggtactgtaggcagctgaagaaccgccgttcccttgaaagggaacacctggcattctgtggtgtttcgtgctgtcttaaataatggtgcatttattatgttcaagttatttcaggattgccatatgtgcaaacaaatcatgcaatgcagccaaggaatatatgttgttgttgttgttttaaacccattttttttttagaattttcattaatactgtagttatacaccatatgcctcattttatcatagcctattgtgtatgaaagatgtttgtacaatgaattgatgtttagtttgctttagtcatttaaaaagatattgtaccaggatgtgctattaagagcacgtatccattattcttctcaacccaagaacctgtttcctggaccagtgaccaaacctcatatgtgaaatggccaaagcacatgcaggctcctggttgttcctctcaaacctgtgctgaccaaagattagtaaccagttatacccagtattttgaggttttattgtttttttaataactaaaaaagaaaaaaggaacagtgtaaatttgtaatcaagagtttgtgaggaaaaacttatggtttttggttttgtttgtttttgtaggtctgtgtatcaaatatgacacttttcttgcaataaagcttattttggggta

SEQ ID NO: 454671 - DNA, 4870 bp, Homo sapiens
agtctcgagatctagaggataaaccgaggcctggcgattccgcaaatggggtctacattaaccccatgggcaattcccgctgcgaatgccccacagtacatagtcgcagtgacccgctggtgcattgcgaagatatagatgagtgcagcaatggtgataatctctgccagcggaatgcagactgcatcaatagtcctggtagttaccgctgtgaatgtgccgcgggtttcaaactttcacccaatggggcctgtgtagatcgcaatgaatgtttagaaattcctaacgtttgcagtcatggcttgtgtgttgatctgcaaggaagttaccagtgcatctgccacaatggctttaaggcttctcaggaccagaccatgtgcatggatgttgatgagtgcgagcggcatccatgtggaaatggaacttgtaaaaacaccgttggatcctataactgtctgtgctacccagggtttgaactcactcataataatgattgcctggacatagatgagtgcagttccttttttggtcaggtgtgcagaaatggacgttgttttaatgaaattggttctttcaagtgtctatgtaacgaaggttatgaacttaccccagatggcaaaaactgtatagacactaatgagtgtgtcgcccttcccggctcttgctctcctggtacctgtcagaatttggagggatccttcagatgcatctgtcccccagggtatgaagtaaaaagcgagaactgcattgatataaatgaatgtgatgaagatcccaacatttgtctttttggttcctgtactaatactccagggggcttccagtgcctctgcccccctggctttgtactatctgataatggacggagatgctttgatactcgccagagcttctgcttcacaaattttgaaaatggaaagtgttctgtacccaaagctttcaacaccacaaaagcaaaatgctgctgtagtaagatgccaggagagggctggggggacccctgtgagctgtgccccaaagacgatgaagttgcatttcaggatttgtgtccatatggccatggaactgtccctagtcttcatgatacacgtgaagatgtcaatgagtgtcttgagagcccaggcatttgttcaaatggtcaatgtatcaacaccgacggatcttttcgctgtgaatgtccaatgggctacaaccttgactacactggagtacgctgtgtggatactgatgagtgttcaatcggcaatccgtgtggaaatggtacatgcaccaatgttattgggagttttgaatgcaattgcaatgaaggctttgagccagggcccatgatgaattgtgaagatatcaacgaatgtgcccagaacccactgctgtgtgctttacgctgcatgaacacttttgggtcctatgaatgcacgtgcccgattggctatgccctcagggaagatcaaaagatgtgcaaagatctggatgaatgtgctgaagggttacacgactgtgaatctaggggcatgatgtgtaagaatctaatcggcaccttcatgtgcatctgccctcctggaatggcccgaaggcccgatggagaaggctgtgtagatgaaaatgaatgcaggaccaagccaggaatctgtgaaaatggacgttgtgttaacattattggaagctatagatgtgagtgtaatgaaggattccagtcaagttcttcaggcactgaatgccttgacaatcgacagggtctctgctttgcagaggtactgcagacaatatgtcaaatggcatccagtagtcgcaatctcgtcactaagtcagaatgctgctgtgatggtgggcgaggctggggccaccagtgcgagctttgcccacttcctggaactgcccagtacaaaaagatatgtcctcatggcccaggatatacaactgatggaagagatattgatgaatgtaaggtaatgccaaacctctgcaccaatggtcagtgcatcaataccatgggctcattccgatgcttctgcaaggttggctacaccacagacatcagtggaacctcttgtatagaccttgatgaatgctcccagtccccgaaaccatgcaactacatctgcaagaacactgaggggagttatcagtgttcatgtccgagggggtatgtcctgcaagaggatggaaagacatgcaaagaccttgatgaatgtcaaacaaagcagcataactgccagttcctctgtgtcaacaccctgggggggtttacctgtaaatgtccacctggtttcacacagcatcacactgcttgtatcgacaacaacgaatgtgggtctcaaccttcgctttgtggagcaaagggaatctgtcaaaacactccaggcagtttcagctgtgaatgccaaagagggttctctcttgatgccaccggactgaactgtgaagatgttgatgaatgtgatgggaaccacaggtgccaacacggctgccagaacatcctgggtggctacagatgtggctgcccccaaggctacatccagcactaccagtggaatcagtgtgtcgatgagaatgaatgctccaatcccaatgcctgtggctctgcttcctgctacaacaccctggggagttacaagtgcgcctgcccctcggggttctccttcgaccagttctccagtgcctgccacgacgtgaatgagtgctcgtcctccaagaacccctgcaattacggctgctctaacacggaggggggctacctctgtggctgcccccctgggtattacagagtgggacaaggccactgtgtctcaggaatgggatttaacaaggggcagtacctgtcactggatacagaggtcgatgaggaaaatgctctgtccccagaagcatgctacgagtgcaaaatcaacggctattctaagaaagacagcaggcagaagagaagtattcatgaacctgatcccactgctgttgaacagatcagcctagagagtgtcgacatggacagccccgtcaacatgaagttcaacctctcccacctcggctctaaggagcacatcctggaactaaggcccgccatccagcccctcaacaaccacatccgttatgtcatctctcaagggaacgatgacagcgtcttccgcatccaccaaaggaatgggctcagctacttgcacacggccaagaagaagctcatgcccggcacatacacactggaaatcactagcatccctctctacaagaagaaggagcttaagaaactggaagagagcaatgaggatgactacctcctaggggagcttggggaggctctcagaatgaggctgcagattcagctctattaacccttcacagacttgggcccaggctcaaatcctagcacagccagtctgcagaagcatttgaaaagtcaaggactaattttaaagaggaaaaataataataactcttgtttctttcctccctgtcttagactttgaatgttgaccctcacagggagggataatttagactctggtatggccaaagatttgagcacaaaggcaaccgtggttactgtattttttatataacttcattttaaaatatattaaaagaaacctaaatgttcaagatatcagcatatggcactaaatgcacaaaaataatgtgagctttttttttttttcctgttagcagtctgtaacactttgggtattttgctatagttgctaattaaaaaaatatagatgtttatttatttttaatgcagtaatatatggagaaatgaacaaactatgtaaacaaaaagggaaactcacttgtttttctttagatttataaatttgagctattttttttagaggtgctttttaaaaatccaatagatacaagagatgtttcctttggttttctgccagtcatccagctgatacacacctgatgattttaaagaaagccacacagagctgaatgggcagtgtaatcaataatttaaaagacatgaatgtcattagatcctttataacgtagatcgaagccaaagcagctcatttgtgacaacatttcatatcaccagacacaccaggcaacagaagttgaagcacaaccactgtagcaaaataccttgactgcttgtgagaccattagcattgcaggccaaaccgtactgtatttccttctcataacctcaaggaaccatatgtgctacccacaacacctcattcttacccagggtgcgctgcgtcctcatggtactgtaggcagctgaagaaccgccgttcccttgaaagggaacacctggcattctgtggtgtttcgtgctgtcttaaataatggtgcatttattatgttcaagttatttcaggattgccatatgtgcaaacaaatcatgcaatgcagccaaggaatatatgttgttgttgttgttttaaacccattttttttttagaattttcattaatactgtagttatacaccatatgcctcattttatcatagcctattgtgtatgaaagatgtttgtacaatgaattgatgtttagtttgctttagtcatttaaaaagatattgtaccaggatgtgctattaagagcacgtatccattattcttctcaacccaagaacctgtttcctggaccagtgaccaaacctcatatgtgaaatggccaaagcacatgcaggctcctggttgttcctctcaaacctgtgctgaccaaagattagtaaccagttatacccagtattttgaggttttattgtttttttaataactaaaaaagaaaaaaggaacagtgtaaatttgtaatcaagagtttgtgaggaaaaacttatggtttttggttttgtttgtttttgtaggtctgtgtatcaaatatgacacttttcttgcaataaagcttattttggggta

SEQ ID NO: 454672 - DNA, 10141 bp, Homo sapiens
atggggagaagacggaggctgtgtctccagctctacttcctgtggctgggctgtgtggtgctctgggcgcagggcacggccggccagcctcagcctcctccgcccaagccgccccggccccagccgccgccgcaacaggttcggtccgctacagcaggctctgaaggcgggtttctagcgcccgagtatcgcgaggagggtgccgcagtggccagccgcgtccgccggcgaggacagcaggacgtgctccgagggcccaacgtgtgcggctccagattccactcctactgctgccctggatggaagacgctccctggaggaaaccagtgcattgtcccgatttgtagaaatagttgtggagatggattttgttcccgtcctaacatgtgtacttgttccagtgggcaaatatcatcaacctgtggatcaaaatcaattcagcagtgcagtgtgagatgcatgaatggtgggacctgtgcagatgaccactgccagtgccagaaaggatatattggaacttattgtggacaacctgtctgtgaaaatggatgtcagaatggtggacgttgcatcggacccaaccgctgtgcttgtgtttatgggttcactggtccacagtgtgaaagagattacaggacaggcccgtgtttcactcaggtcaacaaccagatgtgccaagggcagctgacaggcattgtctgcacgaagactctgtgctgtgccaccattggacgggcgtggggccatccctgtgagatgtgtccagcccagcctcagccctgccgacggggtttcatccccaacatccgcactggagcttgccaagatgttgatgaatgccaggctatcccagggatatgccaaggaggaaactgtatcaatacagtgggctcttttgaatgcagatgccctgctggtcacaaacagagtgaaactactcagaaatgtgaagacattgatgagtgcagcatcattcctgggatatgtgaaactggtgaatgttccaacaccgtgggaagctatttttgtgtttgtccacgtggatatgtaacctcaacagatggctctcgatgcatcgatcagagaacaggcatgtgtttctcgggcctggtgaatggccgctgtgcacaagagctcccggggagaatgacgaaaatgcagtgctgctgtgagcctggccgctgctggggcatcggaaccattcctgaagcctgtcctgtcagaggttctgaggaatatcgcagactttgcatggatggacttccaatgggaggaattccagggagtgctggttccagacctggaggcactgggggaaatggctttgccccaagtggcaatggcaatggctatggcccaggagggacaggcttcatccccatccctggaggcaatggcttttctcctggcgttgggggagccggtgtgggggccgggggacagggacctatcatcactggactaacaattctgaaccagacaatagatatctgtaagcatcatgctaacctttgtttaaatggacgctgtataccaactgtctcaagctaccgatgtgaatgcaacatgggttataagcaggatgcaaatggagattgtatagatgttgatgaatgcacatcaaatccctgcactaatggagattgtgttaacacacctggttcctattattgtaaatgtcatgctggattccagaggactcctaccaagcaagcatgcattgatattgatgagtgcatccagaatggggttctttgtaaaaacggtcgatgcgtgaactcagatggaagtttccagtgcatttgcaatgccggctttgaattaactacagatggaaaaaactgtgttgatcatgatgaatgtacaactaccaacatgtgtttgaatggaatgtgcatcaatgaagatggcagcttcaagtgcatctgcaaaccaggatttgtcttggctccaaatgggcgttactgtactgatgttgatgaatgccagaccccaggaatctgcatgaatgggcactgcatcaacagtgaagggtccttccgctgtgactgtcccccaggcctggctgtgggcatggatggacgtgtgtgtgttgatactcacatgcgcagtacctgctatggaggaatcaagaaaggagtgtgtgtgcgtcctttccccggtgcagtgaccaagtccgaatgctgctgtgccaatccagactatggttttggagaaccctgccagccatgccctgcaaaaaattcagctgaattccacggcctttgtagtagtggagtaggtatcactgtggatggaagagatatcaatgaatgtgctttggatcctgatatatgtgccaatgggatttgtgaaaacttacgtggtagttaccgttgtaattgcaacagtggctatgaaccagatgcctctggaagaaactgtattgacattgatgaatgtttagtaaacagactgctttgtgataacggattgtgccgaaacacgccaggaagttacagctgtacgtgcccaccagggtatgtgttcaggactgagacagagacctgtgaagatataaatgaatgtgaaagcaacccatgtgtcaatggggcctgcagaaacaaccttggatctttcaattgtgaatgttcgcccggcagcaaactcagctccacaggattgatctgtattgacagcctgaaggggacctgttggctcaacatccaggacagccgctgtgaggtgaatattaatggagccactctgaaatctgaatgctgtgccaccctcggagccgcctgggggagcccctgtgagcggtgtgaactagatacagcttgcccaagagggcttgccaggattaaaggtgttacgtgtgaagatgttaatgagtgtgaggtgttccctggcgtttgtccaaatggacgctgtgtcaacagtaagggatcttttcattgcgagtgccctgaaggccttacgttggatgggactggccgtgtatgtttggatattcgcatggagcagtgttacttgaagtgggatgaagatgaatgcatccaccccgttcctggaaagttccgcatggatgcctgctgctgtgctgtcggggcggcttggggcaccgagtgtgaggagtgccccaaacctggcaccaaggaatacgagacactgtgcccccgcggggctggctttgctaaccgaggggatgttcttactgggcggccattttacaaagacatcaatgaatgcaaagcatttcctgggatgtgcacttatgggaagtgcagaaatacaatcggaagcttcaaatgccgttgcaatagtggctttgctctagacatggaggaaagaaactgcacggacatcgacgagtgcaggatttctcctgacctctgtggcagtggaatctgcgtcaatacaccgggcagctttgagtgcgagtgcttcgaaggctatgaaagtggcttcatgatgatgaagaactgcatggacattgacgaatgtgaacgtaaccctctcctttgtaggggtggcacctgtgtgaacactgagggcagctttcagtgtgactgcccactgggacacgagctgtcaccatcccgtgaggactgtgtggatattaatgaatgctccctgagtgacaatctctgcagaaatggaaaatgtgtgaacatgattggaacctatcagtgctcttgcaatcctggatatcaggctacgccagaccgccagggctgtacagatattgatgaatgtatgataatgaacggaggctgtgacacccagtgcacaaattcagagggaagctacgaatgcagctgcagtgagggttatgccctgatgccagatgggagatcgtgtgcagacattgatgaatgtgaaaacaatcctgatatctgtgatggcggccagtgtaccaacattcctggagagtatcgctgcctctgctatgatggcttcatggcttccatggacatgaaaacatgcattgatgtcaatgaatgtgacctaaattcaaatatctgcatgtttggggaatgtgagaacacaaagggatccttcatttgccactgtcagctgggttactcagtgaagaaggggaccacaggatgtacagatgtggatgagtgtgaaattggtgctcataactgcgacatgcatgcctcatgtctgaatatcccaggaagcttcaagtgtagctgcagagaaggctggattggaaacggcatcaagtgtattgatctggacgaatgttctaatggaacccaccagtgtagcatcaatgctcagtgtgtaaataccccgggctcataccgctgtgcctgctccgaaggtttcactggtgatggctttacctgctcagatgttgatgagtgtgcagaaaacataaacctctgtgagaacggacagtgccttaatgtcccgggtgcatatcgctgcgagtgtgagatgggcttcactccagcctcagacagcagatcctgccaagatattgatgaatgctccttccaaaacatttgtgtctctggaacatgtaataacctgcctggaatgtttcattgcatctgcgatgatggttatgaattggacagaacaggagggaactgtacagatattgatgagtgtgcagatcctataaactgtgtcaatggcctatgtgtcaacacgcctggtcgctatgagtgtaactgcccacccgattttcagttgaacccaactggtgtgggttgtgttgacaaccgtgtgggcaactgctacctgaagtttggacctcgaggagatgggagtctgtcttgcaacaccgagatcggggtgggcgtcagtcgctcttcatgctgctgctctctgggaaaggcctggggaaacccctgtgagacatgcccccctgtcaatagcactgaatattacaccctgtgtcccggaggtgaaggcttcagacctaaccccatcacaatcattttagaagacattgacgaatgccaggagttaccaggtctctgccagggtggaaactgcatcaacacttttgggagcttccagtgtgagtgcccacaaggctactacctcagcgaggatacccgcatctgtgaggatattgatgagtgttttgcacatcctggtgtgtgtgggcctgggacctgctataacaccctgggaaattacacctgcatttgcccacctgagtacatgcaggtcaatggaggccacaactgcatggacatgagaaaaagcttttgctaccgaagctataatggaaccacttgtgagaatgagttgcctttcaatgtgacaaaaaggatgtgctgctgcacatataatgtgggcaaagcttggaacaaaccttgtgaaccatgcccaactccaggaacagctgactttaaaaccatatgtggaaatattcctggattcacctttgacattcacacaggaaaagctgttgacattgatgaatgtaaagagattccaggcatttgtgcaaatggtgtgtgcattaaccagattggcagtttccgctgtgaatgccctacaggattcagttacaatgacctgctgttggtttgtgaagatatagatgagtgcagcaatggtgataatctctgccagcggaatgcagactgcatcaatagtcctggtagttaccgctgtgaatgtgccgcgggtttcaaactttcacccaatggggcctgtgtagatcgcaatgaatgtttagaaattcctaacgtttgcagtcatggcttgtgtgttgatctgcaaggaagttaccagtgcatctgccacaatggctttaaggcttctcaggaccagaccatgtgcatggatgttgatgagtgcgagcggcatccatgtggaaatggaacttgtaaaaacaccgttggatcctataactgtctgtgctacccagggtttgaactcactcataataatgattgcctggacatagatgagtgcagttccttttttggtcaggtgtgcagaaatggacgttgttttaatgaaattggttctttcaagtgtctatgtaacgaaggttatgaacttaccccagatggcaaaaactgtatagacactaatgagtgtgtcgcccttcccggctcttgctctcctggtacctgtcagaatttggagggatccttcagatgcatctgtcccccagggtatgaagtaaaaagcgagaactgcattgatataaatgaatgtgatgaagatcccaacatttgtctttttggttcctgtactaatactccagggggcttccagtgcctctgcccccctggctttgtactatctgataatggacggagatgctttgatactcgccagagcttctgcttcacaaattttgaaaatggaaagtgttctgtacccaaagctttcaacaccacaaaagcaaaatgctgctgtagtaagatgccaggagagggctggggggacccctgtgagctgtgccccaaagacgatgaagttgcatttcaggatttgtgtccatatggccatggaactgtccctagtcttcatgatacacgtgaagatgtcaatgagtgtcttgagagcccaggcatttgttcaaatggtcaatgtatcaacaccgacggatcttttcgctgtgaatgtccaatgggctacaaccttgactacactggagtacgctgtgtggatactgatgagtgttcaatcggcaatccgtgtggaaatggtacatgcaccaatgttattgggagttttgaatgcaattgcaatgaaggctttgagccagggcccatgatgaattgtgaagatatcaacgaatgtgcccagaacccactgctgtgtgctttacgctgcatgaacacttttgggtcctatgaatgcacgtgcccgattggctatgccctcagggaagatcaaaagatgtgcaaagatctggatgaatgtgctgaagggttacacgactgtgaatctaggggcatgatgtgtaagaatctaatcggcaccttcatgtgcatctgccctcctggaatggcccgaaggcccgatggagaaggctgtgtagatgaaaatgaatgcaggaccaagccaggaatctgtgaaaatggacgttgtgttaacattattggaagctatagatgtgagtgtaatgaaggattccagtcaagttcttcaggcactgaatgccttgacaatcgacagggtctctgctttgcagaggtactgcagacaatatgtcaaatggcatccagtagtcgcaatctcgtcactaagtcagaatgctgctgtgatggtgggcgaggctggggccaccagtgcgagctttgcccacttcctggaactgcccagtacaaaaagatatgtcctcatggcccaggatatacaactgatggaagagatattgatgaatgtaaggtaatgccaaacctctgcaccaatggtcagtgcatcaataccatgggctcattccgatgcttctgcaaggttggctacaccacagacatcagtggaacctcttgtatagaccttgatgaatgctcccagtccccgaaaccatgcaactacatctgcaagaacactgaggggagttatcagtgttcatgtccgagggggtatgtcctgcaagaggatggaaagacatgcaaagaccttgatgaatgtcaaacaaagcagcataactgccagttcctctgtgtcaacaccctgggggggtttacctgtaaatgtccacctggtttcacacagcatcacactgcttgtatcgacaacaacgaatgtgggtctcaaccttcgctttgtggagcaaagggaatctgtcaaaacactccaggcagtttcagctgtgaatgccaaagagggttctctcttgatgccaccggactgaactgtgaagatgttgatgaatgtgatgggaaccacaggtgccaacacggctgccagaacatcctgggtggctacagatgtggctgcccccaaggctacatccagcactaccagtggaatcagtgtgtcgatgagaatgaatgctccaatcccaatgcctgtggctctgcttcctgctacaacaccctggggagttacaagtgcgcctgcccctcggggttctccttcgaccagttctccagtgcctgccacgacgtgaatgagtgctcgtcctccaagaacccctgcaattacggctgctctaacacggaggggggctacctctgtggctgcccccctgggtattacagagtgggacaaggccactgtgtctcaggaatgggatttaacaaggggcagtacctgtcactggatacagaggtcgatgaggaaaatgctctgtccccagaagcatgctacgagtgcaaaatcaacggctattctaagaaagacagcaggcagaagagaagtattcatgaacctgatcccactgctgttgaacagatcagcctagagagtgtcgacatggacagccccgtcaacatgaagttcaacctctcccacctcggctctaaggagcacatcctggaactaaggcccgccatccagcccctcaacaaccacatccgttatgtcatctctcaagggaacgatgacagcgtcttccgcatccaccaaaggaatgggctcagctacttgcacacggccaagaagaagctcatgcccggcacatacacactggaaatcactagcatccctctctacaagaagaaggagcttaagaaactggaagagagcaatgaggatgactacctcctaggggagcttggggaggctctcagaatgaggctgcagattcagctctattaacccttcacagacttgggcccaggctcaaatcctagcacagccagtctgcagaagcatttgaaaagtcaaggactaattttaaagaggaaaaataataataactcttgtttctttcctccctgtcttagactttgaatgttgaccctcacagggagggataatttagactctggtatggccaaagatttgagcacaaaggcaaccgtggttactgtattttttatataacttcattttaaaatatattaaaagaaacctaaatgttcaagatatcagcatatggcactaaatgcacaaaaataatgtgagctttttttttttttcctgttagcagtctgtaacactttgggtattttgctatagttgctaattaaaaaaatatagatgtttatttatttttaatgcagtaatatatggagaaatgaacaaactatgtaaacaaaaagggaaactcacttgtttttctttagatttataaatttgagctattttttttagaggtgctttttaaaaatccaatagatacaagagatgtttcctttggttttctgccagtcatccagctgatacacacctgatgattttaaagaaagccacacagagctgaatgggcagtgtaatcaataatttaaaagacatgaatgtcattagatcctttataacgtagatcgaagccaaagcagctcatttgtgacaacatttcatatcaccagacacaccaggcaacagaagttgaagcacaaccactgtagcaaaataccttgactgcttgtgagaccattagcattgcaggccaaaccgtactgtatttccttctcataacctcaaggaaccatatgtgctacccacaacacctcattcttacccagggtgcgctgcgtcctcatggtactgtaggcagctgaagaaccgccgttcccttgaaagggaacacctggcattctgtggtgtttcgtgctgtcttaaataatggtgcatttattatgttcaagttatttcaggattgccatatgtgcaaacaaatcatgcaatgcagccaaggaatatatgttgttgttgttgttttaaacccattttttttttagaattttcattaatactgtagttatacaccatatgcctcattttatcatagcctattgtgtatgaaagatgtttgtacaatgaattgatgtttagtttgctttagtcatttaaaaagatattgtaccaggatgtgctattaagagcacgtatccattattcttctcaacccaagaacctgtttcctggaccagtgaccaaacctcatatgtgaaatggccaaagcacatgcaggctcctggttgttcctctcaaacctgtgctgaccaatgttttttgatttttttttttcttttttttttttttttttttttttttt

SEQ ID NO: 454673 - DNA, 8289 bp, Homo sapiens
atggggagaagacggaggctgtgtctccagctctacttcctgtggctgggctgtgtggtgctctgggcgcagggcacggccggccagcctcagcctcctccgcccaagccgccccggccccagccgccgccgcaacaggttcggtccgctacagcaggctctgaaggcgggtttctagcgcccgagtatcgcgaggagggtgccgcagtggccagccgcgtccgccggcgaggacagcaggacgtgctccgagggcccaacgtgtgcggctccagattccactcctactgctgccctggatggaagacgctccctggaggaaaccagtgcattgtcccgatttgtagaaatagttgtggagatggattttgttcccgtcctaacatgtgtacttgttccagtgggcaaatatcatcaacctgtggatcaaaatcaattcagcagtgcagtgtgagatgcatgaatggtgggacctgtgcagatgaccactgccagtgccagaaaggatatattggaacttattgtggacaacctgtctgtgaaaatggatgtcagaatggtggacgttgcatcggacccaaccgctgtgcttgtgtttatgggttcactggtccacagtgtgaaagagattacaggacaggcccgtgtttcactcaggtcaacaaccagatgtgccaagggcagctgacaggcattgtctgcacgaagactctgtgctgtgccaccattggacgggcgtggggccatccctgtgagatgtgtccagcccagcctcagccctgccgacggggtttcatccccaacatccgcactggagcttgccaagatgttgatgaatgccaggctatcccagggatatgccaaggaggaaactgtatcaatacagtgggctcttttgaatgcagatgccctgctggtcacaaacagagtgaaactactcagaaatgtgaagacattgatgagtgcagcatcattcctgggatatgtgaaactggtgaatgttccaacaccgtgggaagctatttttgtgtttgtccacgtggatatgtaacctcaacagatggctctcgatgcatcgatcagagaacaggcatgtgtttctcgggcctggtgaatggccgctgtgcacaagagctcccggggagaatgacgaaaatgcagtgctgctgtgagcctggccgctgctggggcatcggaaccattcctgaagcctgtcctgtcagaggttctgaggaatatcgcagactttgcatggatggacttccaatgggaggaattccagggagtgctggttccagacctggaggcactgggggaaatggctttgccccaagtggcaatggcaatggctatggcccaggagggacaggcttcatccccatccctggaggcaatggcttttctcctggcgttgggggagccggtgtgggggccgggggacagggacctatcatcactggactaacaattctgaaccagacaatagatatctgtaagcatcatgctaacctttgtttaaatggacgctgtataccaactgtctcaagctaccgatgtgaatgcaacatgggttataagcaggatgcaaatggagattgtatagatgttgatgaatgcacatcaaatccctgcactaatggagattgtgttaacacacctggttcctattattgtaaatgtcatgctggattccagaggactcctaccaagcaagcatgcattgatattgatgagtgcatccagaatggggttctttgtaaaaacggtcgatgcgtgaactcagatggaagtttccagtgcatttgcaatgccggctttgaattaactacagatggaaaaaactgtgttgatcatgatgaatgtacaactaccaacatgtgtttgaatggaatgtgcatcaatgaagatggcagcttcaagtgcatctgcaaaccaggatttgtcttggctccaaatgggcgttactgtactgatgttgatgaatgccagaccccaggaatctgcatgaatgggcactgcatcaacagtgaagggtccttccgctgtgactgtcccccaggcctggctgtgggcatggatggacgtgtgtgtgttgatactcacatgcgcagtacctgctatggaggaatcaagaaaggagtgtgtgtgcgtcctttccccggtgcagtgaccaagtccgaatgctgctgtgccaatccagactatggttttggagaaccctgccagccatgccctgcaaaaaattcagctgaattccacggcctttgtagtagtggagtaggtatcactgtggatggaagagatatcaatgaatgtgctttggatcctgatatatgtgccaatgggatttgtgaaaacttacgtggtagttaccgttgtaattgcaacagtggctatgaaccagatgcctctggaagaaactgtattgacattgatgaatgtttagtaaacagactgctttgtgataacggattgtgccgaaacacgccaggaagttacagctgtacgtgcccaccagggtatgtgttcaggactgagacagagacctgtgaagatataaatgaatgtgaaagcaacccatgtgtcaatggggcctgcagaaacaaccttggatctttcaattgtgaatgttcgcccggcagcaaactcagctccacaggattgatctgtattgacagcctgaaggggacctgttggctcaacatccaggacagccgctgtgaggtgaatattaatggagccactctgaaatctgaatgctgtgccaccctcggagccgcctgggggagcccctgtgagcggtgtgaactagatacagcttgcccaagagggcttgccaggattaaaggtgttacgtgtgaagatgttaatgagtgtgaggtgttccctggcgtttgtccaaatggacgctgtgtcaacagtaagggatcttttcattgcgagtgccctgaaggccttacgttggatgggactggccgtgtatgtttggatattcgcatggagcagtgttacttgaagtgggatgaagatgaatgcatccaccccgttcctggaaagttccgcatggatgcctgctgctgtgctgtcggggcggcttggggcaccgagtgtgaggagtgccccaaacctggcaccaaggaatacgagacactgtgcccccgcggggctggctttgctaaccgaggggatgttcttactgggcggccattttacaaagacatcaatgaatgcaaagcatttcctgggatgtgcacttatgggaagtgcagaaatacaatcggaagcttcaaatgccgttgcaatagtggctttgctctagacatggaggaaagaaactgcacggacatcgacgagtgcaggatttctcctgacctctgtggcagtggaatctgcgtcaatacaccgggcagctttgagtgcgagtgcttcgaaggctatgaaagtggcttcatgatgatgaagaactgcatggacattgacgaatgtgaacgtaaccctctcctttgtaggggtggcacctgtgtgaacactgagggcagctttcagtgtgactgcccactgggacacgagctgtcaccatcccgtgaggactgtgtggatattaatgaatgctccctgagtgacaatctctgcagaaatggaaaatgtgtgaacatgattggaacctatcagtgctcttgcaatcctggatatcaggctacgccagaccgccagggctgtacagatattgatgaatgtatgataatgaacggaggctgtgacacccagtgcacaaattcagagggaagctacgaatgcagctgcagtgagggttatgccctgatgccagatgggagatcgtgtgcagacattgatgaatgtgaaaacaatcctgatatctgtgatggcggccagtgtaccaacattcctggagagtatcgctgcctctgctatgatggcttcatggcttccatggacatgaaaacatgcattgatgtcaatgaatgtgacctaaattcaaatatctgcatgtttggggaatgtgagaacacaaagggatccttcatttgccactgtcagctgggttactcagtgaagaaggggaccacaggatgtacagatgtggatgagtgtgaaattggtgctcataactgcgacatgcatgcctcatgtctgaatatcccaggaagcttcaagtgtagctgcagagaaggctggattggaaacggcatcaagtgtattgatctggacgaatgttctaatggaacccaccagtgtagcatcaatgctcagtgtgtaaataccccgggctcataccgctgtgcctgctccgaaggtttcactggtgatggctttacctgctcagatgttgatgagtgtgcagaaaacataaacctctgtgagaacggacagtgccttaatgtcccgggtgcatatcgctgcgagtgtgagatgggcttcactccagcctcagacagcagatcctgccaagatattgatgaatgctccttccaaaacatttgtgtctctggaacatgtaataacctgcctggaatgtttcattgcatctgcgatgatggttatgaattggacagaacaggagggaactgtacagatattgatgagtgtgcagatcctataaactgtgtcaatggcctatgtgtcaacacgcctggtcgctatgagtgtaactgcccacccgattttcagttgaacccaactggtgtgggttgtgttgacaaccgtgtgggcaactgctacctgaagtttggacctcgaggagatgggagtctgtcttgcaacaccgagatcggggtgggcgtcagtcgctcttcatgctgctgctctctgggaaaggcctggggaaacccctgtgagacatgcccccctgtcaatagcactgaatattacaccctgtgtcccggaggtgaaggcttcagacctaaccccatcacaatcattttagaagacattgacgaatgccaggagttaccaggtctctgccagggtggaaactgcatcaacacttttgggagcttccagtgtgagtgcccacaaggctactacctcagcgaggatacccgcatctgtgaggatattgatgagtgttttgcacatcctggtgtgtgtgggcctgggacctgctataacaccctgggaaattacacctgcatttgcccacctgagtacatgcaggtcaatggaggccacaactgcatggacatgagaaaaagcttttgctaccgaagctataatggaaccacttgtgagaatgagttgcctttcaatgtgacaaaaaggatgtgctgctgcacatataatgtgggcaaagcttggaacaaaccttgtgaaccatgcccaactccaggaacagctgactttaaaaccatatgtggaaatattcctggattcacctttgacattcacacaggaaaagctgttgacattgatgaatgtaaagagattccaggcatttgtgcaaatggtgtgtgcattaaccagattggcagtttccgctgtgaatgccctacaggattcagttacaatgacctgctgttggtttgtgaagatatagatgagtgcagcaatggtgataatctctgccagcggaatgcagactgcatcaatagtcctggtagttaccgctgtgaatgtgccgcgggtttcaaactttcacccaatggggcctgtgtagatcgcaatgaatgtttagaaattcctaacgtttgcagtcatggcttgtgtgttgatctgcaaggaagttaccagtgcatctgccacaatggctttaaggcttctcaggaccagaccatgtgcatggatgttgatgagtgcgagcggcatccatgtggaaatggaacttgtaaaaacaccgttggatcctataactgtctgtgctacccagggtttgaactcactcataataatgattgcctggacatagatgagtgcagttccttttttggtcaggtgtgcagaaatggacgttgttttaatgaaattggttctttcaagtgtctatgtaacgaaggttatgaacttaccccagatggcaaaaactgtatagacactaatgagtgtgtcgcccttcccggctcttgctctcctggtacctgtcagaatttggagggatccttcagatgcatctgtcccccagggtatgaagtaaaaagcgagaactgcattgatataaatgaatgtgatgaagatcccaacatttgtctttttggttcctgtactaatactccagggggcttccagtgcctctgcccccctggctttgtactatctgataatggacggagatgctttgatactcgccagagcttctgcttcacaaattttgaaaatggaaagtgttctgtacccaaagctttcaacaccacaaaagcaaaatgctgctgtagtaagatgccaggagagggctggggggacccctgtgagctgtgccccaaagacgatgaagttgcatttcaggatttgtgtccatatggccatggaactgtccctagtcttcatgatacacgtgaagatgtcaatgagtgtcttgagagcccaggcatttgttcaaatggtcaatgtatcaacaccgacggatcttttcgctgtgaatgtccaatgggctacaaccttgactacactggagtacgctgtgtggatactgatgagtgttcaatcggcaatccgtgtggaaatggtacatgcaccaatgttattgggagttttgaatgcaattgcaatgaaggctttgagccagggcccatgatgaattgtgaagatatcaacgaatgtgcccagaacccactgctgtgtgctttacgctgcatgaacacttttgggtcctatgaatgcacgtgcccgattggctatgccctcagggaagatcaaaagatgtgcaaagatctggatgaatgtgctgaagggttacacgactgtgaatctaggggcatgatgtgtaagaatctaatcggcaccttcatgtgcatctgccctcctggaatggcccgaaggcccgatggagaaggctgtgtagatgaaaatgaatgcaggaccaagccaggaatctgtgaaaatggacgttgtgttaacattattggaagctatagatgtgagtgtaatgaaggattccagtcaagttcttcaggcactgaatgccttgacaatcgacagggtctctgctttgcagaggtactgcagacaatatgtcaaatggcatccagtagtcgcaatctcgtcactaagtcagaatgctgctgtgatggtgggcgaggctggggccaccagtgcgagctttgcccacttcctggaactgcccagtacaaaaagatatgtcctcatggcccaggatatacaactgatggaagagatattgatgaatgtaaggtaatgccaaacctctgcaccaatggtcagtgcatcaataccatgggctcattccgatgcttctgcaaggttggctacaccacagacatcagtggaacctcttgtatagaccttgatgaatgctcccagtccccgaaaccatgcaactacatctgcaagaacactgaggggagttatcagtgttcatgtccgagggggtatgtcctgcaagaggatggaaagacatgcaaagaccttgatgaatgtcaaacaaagcagcataactgccagttcctctgtgtcaacaccctgggggggtttacctgtaaatgtccacctggtttcacacagcatcacactgcttgtatcgacaacaacgaatgtgggtctcaaccttcgctttgtggagcaaagggaatctgtcaaaacactccaggcagtttcagctgtgaatgccaaagagggttctctcttgatgccaccggactgaactgtgaagatgttgatgaatgtgatgggaaccacaggtgccaacacggctgccagaacatcctgggtggctacagatgtggctgcccccaaggctacatccagcactaccagtggaatcagtgtgtcgatgagaatgaatgctccaatcccaatgcctgtggctctgcttcctgctacaacaccctggggagttacaagtgcgcctgcccctcggggttctccttcgaccagttctccagtgcctgccacgacgtgaatgagtgctcgtcctccaagaacccctgcaattacggctgctctaacacggaggggggctacctctgtggctgcccccctgggtattacagagtgggacaagggtaaggcggccttcagcctcagcacatagaggaatacatggttcctgctctgccgttgggtgagggcatggggtatcgagctctggtgctgcgtcct

SEQ ID NO: 454674 - DNA, 2716 bp, Homo sapiens
atggggagaagacggaggctgtgtctccagctctacttcctgtggctgggctgtgtggtgctctgggcgcagggcacggccggccagcctcagcctcctccgcccaagccgccccggccccagccgccgccgcaacaggttcggtccgctacagcaggctctgaaggcgggtttctagcgcccgagtatcgcgaggagggtgccgcagtggccagccgcgtccgccggcgaggacagcaggacgtgctccgagggcccaacgtgtgcggctccagattccactcctactgctgccctggatggaagacgctccctggaggaaaccagtgcattgtcccgatttgtagaaatagttgtggagatggattttgttcccgtcctaacatgtgtacttgttccagtgggcaaatatcatcaacctgtggatcaaaatcaattcagcagtgcagtgtgagatgcatgaatggtgggacctgtgcagatgaccactgccagtgccagaaaggatatattggaacttattgtggacaacctgtctgtgaaaatggatgtcagaatggtggacgttgcatcggacccaaccgctgtgcttgtgtttatgggttcactggtccacagtgtgaaagagattacaggacaggcccgtgtttcactcaggtcaacaaccagatgtgccaagggcagctgacaggcattgtctgcacgaagactctgtgctgtgccaccattggacgggcgtggggccatccctgtgagatgtgtccagcccagcctcagccctgccgacggggtttcatccccaacatccgcactggagcttgccaagatgttgatgaatgccaggctatcccagggatatgccaaggaggaaactgtatcaatacagtgggctcttttgaatgcagatgccctgctggtcacaaacagagtgaaactactcagaaatgtgaagacattgatgagtgcagcatcattcctgggatatgtgaaactggtgaatgttccaacaccgtgggaagctatttttgtgtttgtccacgtggatatgtaacctcaacagatggctctcgatgcatcgatcagagaacaggcatgtgtttctcgggcctggtgaatggccgctgtgcacaagagctcccggggagaatgacgaaaatgcagtgctgctgtgagcctggccgctgctggggcatcggaaccattcctgaagcctgtcctgtcagaggttctgaggaatatcgcagactttgcatggatggacttccaatgggaggaattccagggagtgctggttccagacctggaggcactgggggaaatggctttgccccaagtggcaatggcaatggctatggcccaggagggacaggcttcatccccatccctggaggcaatggcttttctcctggcgttgggggagccggtgtgggggccgggggacagggacctatcatcactggactaacaattctgaaccagacaatagatatctgtaagcatcatgctaacctttgtttaaatggacgctgtataccaactgtctcaagctaccgatgtgaatgcaacatgggttataagcaggatgcaaatggagattgtatagatgttgatgaatgcacatcaaatccctgcactaatggagattgtgttaacacacctggttcctattattgtaaatgtcatgctggattccagaggactcctaccaagcaagcatgcattgatattgatgagtgcatccagaatggggttctttgtaaaaacggtcgatgcgtgaactcagatggaagtttccagtgcatttgcaatgccggctttgaattaactacagatggaaaaaactgtgttgatcatgatgaatgtacaactaccaacatgtgtttgaatggaatgtgcatcaatgaagatggcagcttcaagtgcatctgcaaaccaggatttgtcttggctccaaatgggcgttactgtactgatgttgatgaatgccagaccccaggaatctgcatgaatgggcactgcatcaacagtgaagggtccttccgctgtgactgtcccccaggcctggctgtgggcatggatggacgtgtgtgtgttgatactcacatgcgcagtacctgctatggaggaatcaagaaaggagtgtgtgtgcgtcctttccccggtgcagtgaccaagtccgaatgctgctgtgccaatccagactatggttttggagaaccctgccagccatgccctgcaaaaaattcagctgaattccacggcctttgtagtagtggagtaggtatcactgtggatggaagagatatcaatgaatgtgctttggatcctgatatatgtgccaatgggatttgtgaaaacttacgtggtagttaccgttgtaattgcaacagtggctatgaaccagatgcctctggaagaaactgtattgacattgatgaatgtttagtaaacagactgctttgtgataacggattgtgccgaaacacgccaggaagttacagctgtacgtgcccaccagggtatgtgttcaggactgagacagagacctgtgaaggtaagagctgtcttcatcgccttatttgtgcatagtgagtacctggagttgtataaacatcaattacagtgatgaagcaatgtagtgaaaagaatattgtttgaatattttattttataatctcatttagctaatctgccagtttttgaaatagtaaggacc

SEQ ID NO: 454675 - DNA, 1319 bp, Homo sapiens
atggggagaagacggaggctgtgtctccagctctacttcctgtggctgggctgtgtggtgctctgggcgcagggcacggccggccagcctcagcctcctccgcccaagccgccccggccccagccgccgccgcaacaggttcggtccgctacagcaggctctgaaggcgggtttctagcgcccgagtatcgcgaggagggtgccgcagtggccagccgcgtccgccggcgaggacagcaggacgtgctccgagggcccaacgtgtgcggctccagattccactcctactgctgccctggatggaagacgctccctggaggaaaccagtgcattgtcccgatttgtagaaatagttgtggagatggattttgttcccgtcctaacatgtgtacttgttccagtgggcaaatatcatcaacctgtggatcaaaatcaattcagcagtgcagtgtgagatgcatgaatggtgggacctgtgcagatgaccactgccagtgccagaaaggatatattggaacttattgtggacaacctgtctgtgaaaatggatgtcagaatggtggacgttgcatcggacccaaccgctgtgcttgtgtttatgggttcactggtccacagtgtgaaagagattacaggacaggcccgtgtttcactcaggtcaacaaccagatgtgccaagggcagctgacaggcattgtctgcacgaagactctgtgctgtgccaccattggacgggcgtggggccatccctgtgagatgtgtccagcccagcctcagccctgccgacggggtttcatccccaacatccgcactggagcttgccaagatgttgatgaatgccaggctatcccagggatatgccaaggaggaaactgtatcaatacagtgggctcttttgaatgcagatgccctgctggtcacaaacagagtgaaactactcagaaatgtgaaggtgagtctctctactttgggaagcatgcctaattgtgactttaatgcaagaaaaacaggacttcatttgaaattttgaagactactggtcacaattaaaactctttatctactatgaaagcataggtttaagcctagagtagttctgtgtttgtgtattgtagccttagtgggtttgatttgaaaagagtcaatgagcatttgcatctagtttgttatctcagttgtgttgcattgagaatgggagtaatccagccatttatgtttcttcttaataaagtaggtttccatttcacttataaagttatatcaaaaacgaaaattgagatagaaataagaagtccaagtgaaatacagtatcatgtgta

SEQ ID NO: 454676 - DNA, 4142 bp, Homo sapiens
tgataggtgggggcgactgggccaggcgccggggcaggaagggaggcggccgccgtgccattcttaaaggcgcccgagtgtaggcgacaggccgctgacggccggaaggaaaatgagtgagtctttggttgtttgtgatgttgccgaagatttagtggaaaagctgagaaagtttcgttttcgcaaagaaacgaacaacgctgctattataatgaagattgacaaggataaacgcctggtggtactggatgaggagcttgagggcatttcaccagatgaacttaaagatgaactacctgaacgacaacctcgcttcattgtgtatagttataaatatcaacatgatgatggaagagtttcatatcctctgtgctttattttctccagtcctgttggatgtaagcctgaacaacagatgatgtatgctggaagtaagaataagctagtccagacagctgaactaaccaaggtatttgaaataagaaataccgaagacctaactgaagaatggttacgtgagaaacttggattttttcactaatgtgaacttctgtgtttctaaagtatttatgtattaacctgaccatactggaatcagacataaatacttatttatgcctaaaaatgcactgttacttacagtttgtttcctgcagtaaagaaaaattcttcatttgtgcaaaatttgaacaaagaggaaatcatcttcatagtaatgaaactttgtaaagtgtttccttatattggtaattgttaggtggactacttttctccagggactttttgcactcttgtgactaatttctataacttatggttcggaatttgttactatttacagacaccattggaaagtggatatattagattgtgagagacaacagttgcctccttttgacaaatactggatattagcagtttatttatgaaaatagcgtattatcacttgtcaaatcattgaaattcatttggggtcaaagacttgagtgacccagtattgagccatgaataatttagtgtaacctgtattacaagtacattgatgaattctgtatcttctttggtttcctgtatctttttaatcaagtctagaaactatgttcatcagtcactcatttttaaggtcgggagttagattttatgatagaattatgactgttagcttttctccttatagcatcttagtcttagaaattggtgggttgtaataatcaagggcttcattccttttatgtcatttctagacagttttgaatctaggttaataacactttatttataaagcacctcaatgtcctgtgaacactaattattttaaatgtgttaatactgtgcctttgatttgttagctttaaagttagtttaagacttttacactgccagtattccacatttggtgaaattaatacttttttaaagggtccaaataaaataattttctaatgtgtatatctgaaatttgtaataaaatcaacttcatattttaaaaattccaactatctgcttgcattggtgaatatatggcagtcgagagttataattttgggtatacttgtggttagttttgtgccataggaaaaaattatcttaaaactttggccatagttaataacattaacacttcaatagcaatcacatcttatatcctaaatgtcagaagatattctgaactggatgcctgaatagttaactaaaccagtcttgttagatgatggtactcttggcataaagcgaggattctgatatttggcatacttgtaaaaacaaatacataagtaaccattgaacattaatttgataataggtctagagactctaaaaactaaccaaacttggtgagtgtattcttatattaagaatatcttagtcatctcaaaactagcaaaatttaaattttggcatgttttccattcatatgttctttgcattttatttttgaggtttctgtgagaagtaaagatagttggaatttttgcgatattgaatagaacatcttctgttcccaacactgtttggcttcactaatttagaagtcaggaagcaatagaaagttggagatgaggaagtgctagagtaggtgtttgttttggttcttggagggaaaagattctttattccaatttccagagagaagagaaaactcacccaggaagtttaaaaattctttaaacaggtattttgatattggagaataacatgcatataattctgtaggaatgcacatgtaatccaagtgagtggagagtgtttttaatgtttttgaatgaaggaaatgaggttttgtttcacctgttttgcagcagtaagagaaactagtgctgcaagaatgtattttttaatgaagttccttattttgtcttgcatgttttagttttgcttatttttaaatttggaggtcctccataatgtcagataatattgacctgccatacgttagcactcttagttccgctactgtctttaacaggagcaaagagctgtgataaaccatgcttttttgagcttgtctgactcctaattaataacatgtttttggcaagacaacagattgaggttagaggatcagtaggacatttttattccatctgtcctatggggaaatttacaaatcccgtgctctaaaatgttctcaaacatttatatagatttccctttcatcttactaaattttgcattgttcttttcaagtatgtttcgtatttactgtctttttttctgccatttcccaaataataactccagatttcataattccagtttttacattccgttatctttctggtacaaccattcccattcagccttaaatctgagtcctttttagcagcaacttttttcctgggatcctccttcgtggtcttctaagtcagtgttagttttgaaatttttggccctgcataagttctgcatagcatctaatgtcaaaatagaaccaactggtaatcacagtattatttagtgtggtttccatgacaacaaaaatacatacgaagaaaacttctcaggttactatgctgaaattccaaaatgtctgagttttgaatagtgatcactttgttctggtattgacgcaattatattaggaaaaaagttggttgactgtttttgtttaattgacttctaaaatgttcaaattgtctagttctaaaagtttactaaatgcctagtgcagttaaacatactcttgtttaagtgtgtgttgctaaattttttactgtcattactaaataatctgtgtggcaaaatgtgtgtcagcacttttccctccttttttatctcctattttcaggagtcaaatgtagccataaactgtatccttgtctgacactttagctaaaaatttccagttaggggagtttattgccaaattaaatttggctgttccccccaacccatatagatattaaggaaggtgtacttaaaaaatgtttggactgcttttaaaacctgagcaatgtcattaatccatatgtggactagtgatgaatagatattttcataagagtttaaatgctgatatttggtggaagtagagagtaactcatattctatcaattcaagtattcttactatggttgctttccctatttgttcaatagactgataatactggaatttatagagtttgagccattacaacttttgtgaggatgtgtttcaaacatttctggacaaatcttattttgtatttctggaagaatgtagtaatcttctagaccgcttaaaaccaatgctcccaagctgaatattcttgagaaatttgtttttattatgccatttgacatttcaaatcagtgctcatatacagtaaacttgtgatagaaattgtattttattgctttttggattataattcatataaatataattacttgaatattgtttgagatcattaacatgccagggcagttcccactgatttagatggtccaagataatctcattcaggaggcttgaaacattaatggtttagtcttgtgaattttaacagttctctgtcatcgtttaacaaaaccaacaactgacacaactccttaagctgtggtttcagtctctgctagttcatattgcatgtttattttggacagtcttttgttaagcatggtgcttgtactggtttaaataaaatgttaacattaaaa

SEQ ID NO: 454677 - DNA, 1489 bp, Homo sapiens
tgataggtgggggcgactgggccaggcgccggggcaggaagggaggcggccgccgtgccattcttaaaggcgcccgagtgtaggcgacaggccgctgacggccggaaggaaaatgagtgagtctttggttgtttgtgatgttgccgaagatttagtggaaaagctgagaaagtttcgttttcgcaaagaaacgaacaacgctgctattataatgaagattgacaaggataaacgcctggtggtactggatgaggagcttgagggcatttcaccagatgaacttaaagatgaactacctgaacgacaacctcgcttcattgtgtatagttataaatatcaacatgatgatggaagagtttcatatcctctgtgctttattttctccagtcctgttggatgtaagcctgaacaacagatgatgtatgctggaagtaagaataagctagtccagacagctgaactaaccaaggtatttgaaataagaaataccgaagacctaactgaagaatggttacgtgagaaacttggattttttcactaatgtgaacttctgtgtttctaaagtatttatgtattaacctgaccatactggaatcagacataaatacttatttatgcctaaaaatgcactgttacttacagtttgtttcctgcagtaaagaaaaattcttcatttgtgcaaaatttgaacaaagaggaaatcatcttcatagtaatgaaactttgtaaagtgtttccttatattggtaattgttaggtggactacttttctccagggactttttgcactcttgtgactaatttctataacttatggttcggaatttgttactatttacagacaccattggaaagtggatatattagattgtgagagacaacagttgcctccttttgacaaatactggatattagcagtttatttatgaaaatagcgtattatcacttgtcaaatcattgaaattcatttggggtcaaagacttgagtgacccagtattgagccatgaataatttagtgtaacctgtattacaagtacattgatgaattctgtatcttctttggtttcctgtatctttttaatcaagtctagaaactatgttcatcagtcactcatttttaaggtcgggagttagattttatgatagaattatgactgttagcttttctccttatagcatcttagtcttagaaattggtgggttgtaataatcaagggcttcattccttttatgtcatttctagacagttttgaatctaggttaataacactttatttataaagcacctcaatgtcctgtgaacactaattattttaaatgtgttaatactgtgcctttgatttgttagctttaaagttagtttaagacttttacactgccagtattccacatttggtgaaattaatacttttttaaagggtccaaataaaataattttctaatgtgtatatctgaaatttgtaataaaatcaacttcatattttaaaa

SEQ ID NO: 454678 - DNA, 970 bp, Homo sapiens
tgataggtgggggcgactgggccaggcgccggggcaggaagggaggcggccgccgtgccattcttaaaggcgcccgagtgtaggcgacaggccgctgacggccggaaggaaaatgagtgagtctttggttgtttgtgatgttgccgaagatttagtggaaaagctgagaaagtttcgttttcgcaaagaaacgaacaacgctgctattataagtaagctaaaagtgattgcctcaaagttacatggtcttaatttgtttttaatcttgtagctacattgaatgaactgaaccgttggaaagcaatgttacttcctctgtttcatttccccaccaccacctttagatcactttaaaaaataagtaacagctaattctaatgtcacagaacagaggtggattgtcccacctcccccatagtccttttatcagctgcctgtacagctctggagaaggcggtcgtcttggtccttgggtaatgaggattcccatctgcagtgacccatccaacccatccttcttgggggactaaaaatagcctggccattcatcctcaaatagaaacctttgcctacacctaaaatgacaaagttcagcattgtgtacatagtgactttgggcattattccagttgtagatttgaactctggtttcaggaagagtacttttaagtggcactggcactatcttctgaaaatggaaaaagtgatttgcatattgctcctcccactgtgagctatatctgacattatgcagatttcccttgtattcataggcagtatttaatatgtaggtagtgatttagaaagatgaggaaaggatgagggggtgaaaatgtaaaactctagagaccatgcttaacagagatgcatctggcagatgtgatttaatcagaggtcatgacaacttgtcatgaattctgatttcattataaataaatactgcaatgtcgacatatggttcttaaaagtg

SEQ ID NO: 454679 - DNA, 4358 bp, Homo sapiens
tgataggtgggggcgactgggccaggcgccggggcaggaagggaggcggccgccgtgccattcttaaaggcgcccgagtgtaggcgacaggccgctgacggccggaaggaaaatgagtgagtctttggttgtttgtgatgttgccgaagatttagtggaaaagctgagaaagtttcgttttcgcaaagaaacgaacaacgctgctattataatgaagattgacaaggataaacgcctggtggtactggatgaggagcttgagggcatttcaccagatgaacttaaagatgaactacctgaacgacaacctcgcttcattgtgtatagttataaatatcaacatgatgatggaagagtttcatatcctctgtgctttattttctccagtcctgttggatgtaagcctgaacaacagatgatgtatgctggaagtaagaataagctagtccagacagctgaactaaccaaggtatttgaaataagaaataccgaagacctaactgaagaatggttacgtgagaaacttggattttttcactaatgtgaacttctgtgtttctaaagtatttatgtattaacctgaccatactggaatcagacataaatacttatttatgcctaaaaatgcactgttacttacagtttgtttcctgcagtaaagaaaaattcttcatttgtgcaaaatttgaacaaagaggaaatcatcttcatagtaatgaaactttgtaaagtgtttccttatattggtaattgttaggtggactacttttctccagggactttttgcactcttgtgactaatttctataacttatggttcggaatttgttactatttacagacaccattggaaagtggatatattagattgtgagagacaacagttgcctccttttgacaaatactggatattagcagtttatttatgaaaatagcgtattatcacttgtcaaatcattgaaattcatttggggtcaaagacttgagtgacccagtattgagccatgaataatttagtgtaacctgtattacaagtacattgatgaattctgtatcttctttggtttcctgtatctttttaatcaagtctagaaactatgttcatcagtcactcatttttaaggtcgggagttagattttatgatagaattatgactgttagcttttctccttatagcatcttagtcttagaaattggtgggttgtaataatcaagggcttcattccttttatgtcatttctagacagttttgaatctaggttaataacactttatttataaagcacctcaatgtcctgtgaacactaattattttaaatgtgttaatactgtgcctttgatttgttagctttaaagttagtttaagacttttacactgccagtattccacatttggtgaaattaatacttttttaaagggtccaaataaaataattttctaatgtgtatatctgaaatttgtaataaaatcaacttcatattttaaaaattccaactatctgcttgcattggtgaatatatggcagtcgagagttataattttgggtatacttgtggttagttttgtgccataggaaaaaattatcttaaaactttggccatagttaataacattaacacttcaatagcaatcacatcttatatcctaaatgtcagaagatattctgaactggatgcctgaatagttaactaaaccagtcttgttagatgatggtactcttggcataaagcgaggattctgatatttggcatacttgtaaaaacaaatacataagtaaccattgaacattaatttgataataggtctagagactctaaaaactaaccaaacttggtgagtgtattcttatattaagaatatcttagtcatctcaaaactagcaaaatttaaattttggcatgttttccattcatatgttctttgcattttatttttgaggtttctgtgagaagtaaagatagttggaatttttgcgatattgaatagaacatcttctgttcccaacactgtttggcttcactaatttagaagtcaggaagcaatagaaagttggagatgaggaagtgctagagtaggtgtttgttttggttcttggagggaaaagattctttattccaatttccagagagaagagaaaactcacccaggaagtttaaaaattctttaaacaggtattttgatattggagaataacatgcatataattctgtaggaatgcacatgtaatccaagtgagtggagagtgtttttaatgtttttgaatgaaggaaatgaggttttgtttcacctgttttgcagcagtaagagaaactagtgctgcaagaatgtattttttaatgaagttccttattttgtcttgcatgttttagttttgcttatttttaaatttggaggtcctccataatgtcagataatattgacctgccatacgttagcactcttagttccgctactgtctttaacaggagcaaagagctgtgataaaccatgcttttttgagcttgtctgactcctaattaataacatgtttttggcaagacaacagattgaggttagaggatcagtaggacatttttattccatctgtcctatggggaaatttacaaatcccgtgctctaaaatgttctcaaacatttatatagatttccctttcatcttactaaattttgcattgttcttttcaagtatgtttcgtatttactgtctttttttctgccatttcccaaataataactccagatttcataattccagtttttacattccgttatctttctggtacaaccattcccattcagccttaaatctgagtcctttttagcagcaacttttttcctgggatcctccttcgtggtcttctaagtcagtgttagttttgaaatttttggccctgcataagttctgcatagcatctaatgtcaaaatagaaccaactggtaatcacagtattatttagtgtggtttccatgacaacaaaaatacatacgaagaaaacttctcaggttactatgctgaaattccaaaatgtctgagttttgaatagtgatcactttgttctggtattgacgcaattatattaggaaaaaagttggttgactgtttttgtttaattgacttctaaaatgttcaaattgtctagttctaaaagtttactaaatgcctagtgcagttaaacatactcttgtttaagtgtgtgttgctaaattttttactgtcattactaaataatctgtgtggcaaaatgtgtgtcagcacttttccctccttttttatctcctattttcaggagtcaaatgtagccataaactgtatccttgtctgacactttagctaaaaatttccagttaggggagtttattgccaaattaaatttggctgttccccccaacccatatagatattaaggaaggtgtacttaaaaaatgtttggactgcttttaaaacctgagcaatgtcattaatccatatgtggactagtgatgaatagatattttcataagagtttaaatgctgatatttggtggaagtagagagtaactcatattctatcaattcaagtattcttactatggttgctttccctatttgttcaatagactgataatactggaatttatagagtttgagccattacaacttttgtgaggatgtgtttcaaacatttctggacaaatcttattttgtatttctggaagaatgtagtaatcttctagaccgcttaaaaccaatgctcccaagctgaatattcttgagaaatttgtttttattatgccatttgacatttcaaatcagtgctcatatacagtaaacttgtgatagaaattgtattttattgctttttggattataattcatataaatataattacttgaatattgtttgagatcattaacatgccagggcagttcccactgatttagatggtccaagataatctcattcaggaggcttgaaacattaatggtttagtcttgtgaattttaacagttctctgtcatcgtttaacaaaaccaacaactgacacaactccttaagctgtggtttcagtctctgctagttcatattgcatgtttattttggacagtcttttgttaagcatggtgcttgtactggtttaaataaaatgttaacattaaaaaaaaacaaaaaaacacaaaacaaacaaaaaccccgggggcaccttatttccggggcggcgaaaaaaggcgtatagaaattggaccatgtgccaaagcgtttcctcggaccccgttttctcgtctcccagggtgaaaaatgccacggacccccaaataggaaccggaaaaatctcataacccggtcctgatatacacaaaaaaaccaacagatacga

SEQ ID NO: 454680 - DNA, 4208 bp, Homo sapiens
tggggaggccccacgccaggtccttctggttggagggcttcagcttctgagctttctgatgacattgcacattattatgtgtgtggtttttgagacattcattagccaaagagaaagttaaaatataccttacatatatgagatgaacaaatttgtaggattaagcaatgtagatccaaagagtgagtctttggttgtttgtgatgttgccgaagatttagtggaaaagctgagaaagtttcgttttcgcaaagaaacgaacaacgctgctattataatgaagattgacaaggataaacgcctggtggtactggatgaggagcttgagggcatttcaccagatgaacttaaagatgaactacctgaacgacaacctcgcttcattgtgtatagttataaatatcaacatgatgatggaagagtttcatatcctctgtgctttattttctccagtcctgttggatgtaagcctgaacaacagatgatgtatgctggaagtaagaataagctagtccagacagctgaactaaccaaggtatttgaaataagaaataccgaagacctaactgaagaatggttacgtgagaaacttggattttttcactaatgtgaacttctgtgtttctaaagtatttatgtattaacctgaccatactggaatcagacataaatacttatttatgcctaaaaatgcactgttacttacagtttgtttcctgcagtaaagaaaaattcttcatttgtgcaaaatttgaacaaagaggaaatcatcttcatagtaatgaaactttgtaaagtgtttccttatattggtaattgttaggtggactacttttctccagggactttttgcactcttgtgactaatttctataacttatggttcggaatttgttactatttacagacaccattggaaagtggatatattagattgtgagagacaacagttgcctccttttgacaaatactggatattagcagtttatttatgaaaatagcgtattatcacttgtcaaatcattgaaattcatttggggtcaaagacttgagtgacccagtattgagccatgaataatttagtgtaacctgtattacaagtacattgatgaattctgtatcttctttggtttcctgtatctttttaatcaagtctagaaactatgttcatcagtcactcatttttaaggtcgggagttagattttatgatagaattatgactgttagcttttctccttatagcatcttagtcttagaaattggtgggttgtaataatcaagggcttcattccttttatgtcatttctagacagttttgaatctaggttaataacactttatttataaagcacctcaatgtcctgtgaacactaattattttaaatgtgttaatactgtgcctttgatttgttagctttaaagttagtttaagacttttacactgccagtattccacatttggtgaaattaatacttttttaaagggtccaaataaaataattttctaatgtgtatatctgaaatttgtaataaaatcaacttcatattttaaaaattccaactatctgcttgcattggtgaatatatggcagtcgagagttataattttgggtatacttgtggttagttttgtgccataggaaaaaattatcttaaaactttggccatagttaataacattaacacttcaatagcaatcacatcttatatcctaaatgtcagaagatattctgaactggatgcctgaatagttaactaaaccagtcttgttagatgatggtactcttggcataaagcgaggattctgatatttggcatacttgtaaaaacaaatacataagtaaccattgaacattaatttgataataggtctagagactctaaaaactaaccaaacttggtgagtgtattcttatattaagaatatcttagtcatctcaaaactagcaaaatttaaattttggcatgttttccattcatatgttctttgcattttatttttgaggtttctgtgagaagtaaagatagttggaatttttgcgatattgaatagaacatcttctgttcccaacactgtttggcttcactaatttagaagtcaggaagcaatagaaagttggagatgaggaagtgctagagtaggtgtttgttttggttcttggagggaaaagattctttattccaatttccagagagaagagaaaactcacccaggaagtttaaaaattctttaaacaggtattttgatattggagaataacatgcatataattctgtaggaatgcacatgtaatccaagtgagtggagagtgtttttaatgtttttgaatgaaggaaatgaggttttgtttcacctgttttgcagcagtaagagaaactagtgctgcaagaatgtattttttaatgaagttccttattttgtcttgcatgttttagttttgcttatttttaaatttggaggtcctccataatgtcagataatattgacctgccatacgttagcactcttagttccgctactgtctttaacaggagcaaagagctgtgataaaccatgcttttttgagcttgtctgactcctaattaataacatgtttttggcaagacaacagattgaggttagaggatcagtaggacatttttattccatctgtcctatggggaaatttacaaatcccgtgctctaaaatgttctcaaacatttatatagatttccctttcatcttactaaattttgcattgttcttttcaagtatgtttcgtatttactgtctttttttctgccatttcccaaataataactccagatttcataattccagtttttacattccgttatctttctggtacaaccattcccattcagccttaaatctgagtcctttttagcagcaacttttttcctgggatcctccttcgtggtcttctaagtcagtgttagttttgaaatttttggccctgcataagttctgcatagcatctaatgtcaaaatagaaccaactggtaatcacagtattatttagtgtggtttccatgacaacaaaaatacatacgaagaaaacttctcaggttactatgctgaaattccaaaatgtctgagttttgaatagtgatcactttgttctggtattgacgcaattatattaggaaaaaagttggttgactgtttttgtttaattgacttctaaaatgttcaaattgtctagttctaaaagtttactaaatgcctagtgcagttaaacatactcttgtttaagtgtgtgttgctaaattttttactgtcattactaaataatctgtgtggcaaaatgtgtgtcagcacttttccctccttttttatctcctattttcaggagtcaaatgtagccataaactgtatccttgtctgacactttagctaaaaatttccagttaggggagtttattgccaaattaaatttggctgttccccccaacccatatagatattaaggaaggtgtacttaaaaaatgtttggactgcttttaaaacctgagcaatgtcattaatccatatgtggactagtgatgaatagatattttcataagagtttaaatgctgatatttggtggaagtagagagtaactcatattctatcaattcaagtattcttactatggttgctttccctatttgttcaatagactgataatactggaatttatagagtttgagccattacaacttttgtgaggatgtgtttcaaacatttctggacaaatcttattttgtatttctggaagaatgtagtaatcttctagaccgcttaaaaccaatgctcccaagctgaatattcttgagaaatttgtttttattatgccatttgacatttcaaatcagtgctcatatacagtaaacttgtgatagaaattgtattttattgctttttggattataattcatataaatataattacttgaatattgtttgagatcattaacatgccagggcagttcccactgatttagatggtccaagataatctcattcaggaggcttgaaacattaatggtttagtcttgtgaattttaacagttctctgtcatcgtttaacaaaaccaacaactgacacaactccttaagctgtggtttcagtctctgctagttcatattgcatgtttattttggacagtcttttgttaagcatggtgcttgtactggtttaaataaaatgttaacattaaaa

SEQ ID NO: 454681 - DNA, 4223 bp, Homo sapiens
tgataggtgggggcgactgggccaggcgccggggcaggaagggaggcggccgccgtgccattcttaaaggcgcccgagtgtaggcgacaggccgctgacggccggaaggaaaatgagtgagtctttggttgtttgtgatgttgccgaagatttagtggaaaagctgagaaagtttcgttttcgcaaagaaacgaacaacgctgctattataatgaagattgacaaggataaacgcctggtggtactggatgaggagcttgagggcatttcaccagatgaacttaaagatgaactacctgaacgacaacctcgatccttttcttagtgctttaaaagatttattttctttagtggtcagacctgtttgtgagctcatttgttaaacatctaaaacttcattgtgtatagttataaatatcaacatgatgatggaagagtttcatatcctctgtgctttattttctccagtcctgttggatgtaagcctgaacaacagatgatgtatgctggaagtaagaataagctagtccagacagctgaactaaccaaggtatttgaaataagaaataccgaagacctaactgaagaatggttacgtgagaaacttggattttttcactaatgtgaacttctgtgtttctaaagtatttatgtattaacctgaccatactggaatcagacataaatacttatttatgcctaaaaatgcactgttacttacagtttgtttcctgcagtaaagaaaaattcttcatttgtgcaaaatttgaacaaagaggaaatcatcttcatagtaatgaaactttgtaaagtgtttccttatattggtaattgttaggtggactacttttctccagggactttttgcactcttgtgactaatttctataacttatggttcggaatttgttactatttacagacaccattggaaagtggatatattagattgtgagagacaacagttgcctccttttgacaaatactggatattagcagtttatttatgaaaatagcgtattatcacttgtcaaatcattgaaattcatttggggtcaaagacttgagtgacccagtattgagccatgaataatttagtgtaacctgtattacaagtacattgatgaattctgtatcttctttggtttcctgtatctttttaatcaagtctagaaactatgttcatcagtcactcatttttaaggtcgggagttagattttatgatagaattatgactgttagcttttctccttatagcatcttagtcttagaaattggtgggttgtaataatcaagggcttcattccttttatgtcatttctagacagttttgaatctaggttaataacactttatttataaagcacctcaatgtcctgtgaacactaattattttaaatgtgttaatactgtgcctttgatttgttagctttaaagttagtttaagacttttacactgccagtattccacatttggtgaaattaatacttttttaaagggtccaaataaaataattttctaatgtgtatatctgaaatttgtaataaaatcaacttcatattttaaaaattccaactatctgcttgcattggtgaatatatggcagtcgagagttataattttgggtatacttgtggttagttttgtgccataggaaaaaattatcttaaaactttggccatagttaataacattaacacttcaatagcaatcacatcttatatcctaaatgtcagaagatattctgaactggatgcctgaatagttaactaaaccagtcttgttagatgatggtactcttggcataaagcgaggattctgatatttggcatacttgtaaaaacaaatacataagtaaccattgaacattaatttgataataggtctagagactctaaaaactaaccaaacttggtgagtgtattcttatattaagaatatcttagtcatctcaaaactagcaaaatttaaattttggcatgttttccattcatatgttctttgcattttatttttgaggtttctgtgagaagtaaagatagttggaatttttgcgatattgaatagaacatcttctgttcccaacactgtttggcttcactaatttagaagtcaggaagcaatagaaagttggagatgaggaagtgctagagtaggtgtttgttttggttcttggagggaaaagattctttattccaatttccagagagaagagaaaactcacccaggaagtttaaaaattctttaaacaggtattttgatattggagaataacatgcatataattctgtaggaatgcacatgtaatccaagtgagtggagagtgtttttaatgtttttgaatgaaggaaatgaggttttgtttcacctgttttgcagcagtaagagaaactagtgctgcaagaatgtattttttaatgaagttccttattttgtcttgcatgttttagttttgcttatttttaaatttggaggtcctccataatgtcagataatattgacctgccatacgttagcactcttagttccgctactgtctttaacaggagcaaagagctgtgataaaccatgcttttttgagcttgtctgactcctaattaataacatgtttttggcaagacaacagattgaggttagaggatcagtaggacatttttattccatctgtcctatggggaaatttacaaatcccgtgctctaaaatgttctcaaacatttatatagatttccctttcatcttactaaattttgcattgttcttttcaagtatgtttcgtatttactgtctttttttctgccatttcccaaataataactccagatttcataattccagtttttacattccgttatctttctggtacaaccattcccattcagccttaaatctgagtcctttttagcagcaacttttttcctgggatcctccttcgtggtcttctaagtcagtgttagttttgaaatttttggccctgcataagttctgcatagcatctaatgtcaaaatagaaccaactggtaatcacagtattatttagtgtggtttccatgacaacaaaaatacatacgaagaaaacttctcaggttactatgctgaaattccaaaatgtctgagttttgaatagtgatcactttgttctggtattgacgcaattatattaggaaaaaagttggttgactgtttttgtttaattgacttctaaaatgttcaaattgtctagttctaaaagtttactaaatgcctagtgcagttaaacatactcttgtttaagtgtgtgttgctaaattttttactgtcattactaaataatctgtgtggcaaaatgtgtgtcagcacttttccctccttttttatctcctattttcaggagtcaaatgtagccataaactgtatccttgtctgacactttagctaaaaatttccagttaggggagtttattgccaaattaaatttggctgttccccccaacccatatagatattaaggaaggtgtacttaaaaaatgtttggactgcttttaaaacctgagcaatgtcattaatccatatgtggactagtgatgaatagatattttcataagagtttaaatgctgatatttggtggaagtagagagtaactcatattctatcaattcaagtattcttactatggttgctttccctatttgttcaatagactgataatactggaatttatagagtttgagccattacaacttttgtgaggatgtgtttcaaacatttctggacaaatcttattttgtatttctggaagaatgtagtaatcttctagaccgcttaaaaccaatgctcccaagctgaatattcttgagaaatttgtttttattatgccatttgacatttcaaatcagtgctcatatacagtaaacttgtgatagaaattgtattttattgctttttggattataattcatataaatataattacttgaatattgtttgagatcattaacatgccagggcagttcccactgatttagatggtccaagataatctcattcaggaggcttgaaacattaatggtttagtcttgtgaattttaacagttctctgtcatcgtttaacaaaaccaacaactgacacaactccttaagctgtggtttcagtctctgctagttcatattgcatgtttattttggacagtcttttgttaagcatggtgcttgtactggtttaaataaaatgttaacattaaaa

SEQ ID NO: 454682 - DNA, 4116 bp, Homo sapiens
tgataggtgggggcgactgggccaggcgccggggcaggaagggaggcggccgccgtgccattcttaaaggcgcccgagtgtaggcgacaggccgctgacggccggaaggaaaatgagtgagtctttggttgtttgtgatgttgccgaagatttagtggaaaagctgagaaagtttcgttttcgcaaagaaacgaacaacgctgctattataatgaagattgacaaggataaacgcctggtggtactggatgaggagcttgagggcatttcaccagatgaacttaaagatgaactacctgaacgacaacctcgaacatgatgatggaagagtttcatatcctctgtgctttattttctccagtcctgttggatgtaagcctgaacaacagatgatgtatgctggaagtaagaataagctagtccagacagctgaactaaccaaggtatttgaaataagaaataccgaagacctaactgaagaatggttacgtgagaaacttggattttttcactaatgtgaacttctgtgtttctaaagtatttatgtattaacctgaccatactggaatcagacataaatacttatttatgcctaaaaatgcactgttacttacagtttgtttcctgcagtaaagaaaaattcttcatttgtgcaaaatttgaacaaagaggaaatcatcttcatagtaatgaaactttgtaaagtgtttccttatattggtaattgttaggtggactacttttctccagggactttttgcactcttgtgactaatttctataacttatggttcggaatttgttactatttacagacaccattggaaagtggatatattagattgtgagagacaacagttgcctccttttgacaaatactggatattagcagtttatttatgaaaatagcgtattatcacttgtcaaatcattgaaattcatttggggtcaaagacttgagtgacccagtattgagccatgaataatttagtgtaacctgtattacaagtacattgatgaattctgtatcttctttggtttcctgtatctttttaatcaagtctagaaactatgttcatcagtcactcatttttaaggtcgggagttagattttatgatagaattatgactgttagcttttctccttatagcatcttagtcttagaaattggtgggttgtaataatcaagggcttcattccttttatgtcatttctagacagttttgaatctaggttaataacactttatttataaagcacctcaatgtcctgtgaacactaattattttaaatgtgttaatactgtgcctttgatttgttagctttaaagttagtttaagacttttacactgccagtattccacatttggtgaaattaatacttttttaaagggtccaaataaaataattttctaatgtgtatatctgaaatttgtaataaaatcaacttcatattttaaaaattccaactatctgcttgcattggtgaatatatggcagtcgagagttataattttgggtatacttgtggttagttttgtgccataggaaaaaattatcttaaaactttggccatagttaataacattaacacttcaatagcaatcacatcttatatcctaaatgtcagaagatattctgaactggatgcctgaatagttaactaaaccagtcttgttagatgatggtactcttggcataaagcgaggattctgatatttggcatacttgtaaaaacaaatacataagtaaccattgaacattaatttgataataggtctagagactctaaaaactaaccaaacttggtgagtgtattcttatattaagaatatcttagtcatctcaaaactagcaaaatttaaattttggcatgttttccattcatatgttctttgcattttatttttgaggtttctgtgagaagtaaagatagttggaatttttgcgatattgaatagaacatcttctgttcccaacactgtttggcttcactaatttagaagtcaggaagcaatagaaagttggagatgaggaagtgctagagtaggtgtttgttttggttcttggagggaaaagattctttattccaatttccagagagaagagaaaactcacccaggaagtttaaaaattctttaaacaggtattttgatattggagaataacatgcatataattctgtaggaatgcacatgtaatccaagtgagtggagagtgtttttaatgtttttgaatgaaggaaatgaggttttgtttcacctgttttgcagcagtaagagaaactagtgctgcaagaatgtattttttaatgaagttccttattttgtcttgcatgttttagttttgcttatttttaaatttggaggtcctccataatgtcagataatattgacctgccatacgttagcactcttagttccgctactgtctttaacaggagcaaagagctgtgataaaccatgcttttttgagcttgtctgactcctaattaataacatgtttttggcaagacaacagattgaggttagaggatcagtaggacatttttattccatctgtcctatggggaaatttacaaatcccgtgctctaaaatgttctcaaacatttatatagatttccctttcatcttactaaattttgcattgttcttttcaagtatgtttcgtatttactgtctttttttctgccatttcccaaataataactccagatttcataattccagtttttacattccgttatctttctggtacaaccattcccattcagccttaaatctgagtcctttttagcagcaacttttttcctgggatcctccttcgtggtcttctaagtcagtgttagttttgaaatttttggccctgcataagttctgcatagcatctaatgtcaaaatagaaccaactggtaatcacagtattatttagtgtggtttccatgacaacaaaaatacatacgaagaaaacttctcaggttactatgctgaaattccaaaatgtctgagttttgaatagtgatcactttgttctggtattgacgcaattatattaggaaaaaagttggttgactgtttttgtttaattgacttctaaaatgttcaaattgtctagttctaaaagtttactaaatgcctagtgcagttaaacatactcttgtttaagtgtgtgttgctaaattttttactgtcattactaaataatctgtgtggcaaaatgtgtgtcagcacttttccctccttttttatctcctattttcaggagtcaaatgtagccataaactgtatccttgtctgacactttagctaaaaatttccagttaggggagtttattgccaaattaaatttggctgttccccccaacccatatagatattaaggaaggtgtacttaaaaaatgtttggactgcttttaaaacctgagcaatgtcattaatccatatgtggactagtgatgaatagatattttcataagagtttaaatgctgatatttggtggaagtagagagtaactcatattctatcaattcaagtattcttactatggttgctttccctatttgttcaatagactgataatactggaatttatagagtttgagccattacaacttttgtgaggatgtgtttcaaacatttctggacaaatcttattttgtatttctggaagaatgtagtaatcttctagaccgcttaaaaccaatgctcccaagctgaatattcttgagaaatttgtttttattatgccatttgacatttcaaatcagtgctcatatacagtaaacttgtgatagaaattgtattttattgctttttggattataattcatataaatataattacttgaatattgtttgagatcattaacatgccagggcagttcccactgatttagatggtccaagataatctcattcaggaggcttgaaacattaatggtttagtcttgtgaattttaacagttctctgtcatcgtttaacaaaaccaacaactgacacaactccttaagctgtggtttcagtctctgctagttcatattgcatgtttattttggacagtcttttgttaagcatggtgcttgtactggtttaaataaaatgttaacattaaaa

SEQ ID NO: 454683 - DNA, 3241 bp, Homo sapiens
caatgtcctgtgaacactaattattttaaatgtgttaatactgtgcctttgatttgttagctttaaagttagtttaagacttttacactgccagtattgagccatgaataatttagtgtaacctgtattacaagtacattgatgaattctgtatcttctttggtttcctgtatctttttaatcaagtctagaaactatgttcatcagtcactcatttttaaggtcgggagttagattttatgatagaattatgactgttagcttttctccttatagcatcttagtcttagaaattggtgggttgtaataatcaagggcttcattccttttatgtcatttctagacagttttgaatctaggttaataacactttatttataaagcacctcaatgtcctgtgaacactaattattttaaatgtgttaatactgtgcctttgatttgttagctttaaagttagtttaagacttttacactgccagtattccacatttggtgaaattaatacttttttaaagggtccaaataaaataattttctaatgtgtatatctgaaatttgtaataaaatcaacttcatattttaaaaattccaactatctgcttgcattggtgaatatatggcagtcgagagttataattttgggtatacttgtggttagttttgtgccataggaaaaaattatcttaaaactttggccatagttaataacattaacacttcaatagcaatcacatcttatatcctaaatgtcagaagatattctgaactggatgcctgaatagttaactaaaccagtcttgttagatgatggtactcttggcataaagcgaggattctgatatttggcatacttgtaaaaacaaatacataagtaaccattgaacattaatttgataataggtctagagactctaaaaactaaccaaacttggtgagtgtattcttatattaagaatatcttagtcatctcaaaactagcaaaatttaaattttggcatgttttccattcatatgttctttgcattttatttttgaggtttctgtgagaagtaaagatagttggaatttttgcgatattgaatagaacatcttctgttcccaacactgtttggcttcactaatttagaagtcaggaagcaatagaaagttggagatgaggaagtgctagagtaggtgtttgttttggttcttggagggaaaagattctttattccaatttccagagagaagagaaaactcacccaggaagtttaaaaattctttaaacaggtattttgatattggagaataacatgcatataattctgtaggaatgcacatgtaatccaagtgagtggagagtgtttttaatgtttttgaatgaaggaaatgaggttttgtttcacctgttttgcagcagtaagagaaactagtgctgcaagaatgtattttttaatgaagttccttattttgtcttgcatgttttagttttgcttatttttaaatttggaggtcctccataatgtcagataatattgacctgccatacgttagcactcttagttccgctactgtctttaacaggagcaaagagctgtgataaaccatgcttttttgagcttgtctgactcctaattaataacatgtttttggcaagacaacagattgaggttagaggatcagtaggacatttttattccatctgtcctatggggaaatttacaaatcccgtgctctaaaatgttctcaaacatttatatagatttccctttcatcttactaaattttgcattgttcttttcaagtatgtttcgtatttactgtctttttttctgccatttcccaaataataactccagatttcataattccagtttttacattccgttatctttctggtacaaccattcccattcagccttaaatctgagtcctttttagcagcaacttttttcctgggatcctccttcgtggtcttctaagtcagtgttagttttgaaatttttggccctgcataagttctgcatagcatctaatgtcaaaatagaaccaactggtaatcacagtattatttagtgtggtttccatgacaacaaaaatacatacgaagaaaacttctcaggttactatgctgaaattccaaaatgtctgagttttgaatagtgatcactttgttctggtattgacgcaattatattaggaaaaaagttggttgactgtttttgtttaattgacttctaaaatgttcaaattgtctagttctaaaagtttactaaatgcctagtgcagttaaacatactcttgtttaagtgtgtgttgctaaattttttactgtcattactaaataatctgtgtggcaaaatgtgtgtcagcacttttccctccttttttatctcctattttcaggagtcaaatgtagccataaactgtatccttgtctgacactttagctaaaaatttccagttaggggagtttattgccaaattaaatttggctgttccccccaacccatatagatattaaggaaggtgtacttaaaaaatgtttggactgcttttaaaacctgagcaatgtcattaatccatatgtggactagtgatgaatagatattttcataagagtttaaatgctgatatttggtggaagtagagagtaactcatattctatcaattcaagtattcttactatggttgctttccctatttgttcaatagactgataatactggaatttatagagtttgagccattacaacttttgtgaggatgtgtttcaaacatttctggacaaatcttattttgtatttctggaagaatgtagtaatcttctagaccgcttaaaaccaatgctcccaagctgaatattcttgagaaatttgtttttattatgccatttgacatttcaaatcagtgctcatatacagtaaacttgtgatagaaattgtattttattgctttttggattataattcatataaatataattacttgaatattgtttgagatcattaacatgccagggcagttcccactgatttagatggtccaagataatctcattcaggaggcttgaaacattaatggtttagtcttgtgaattttaacagttctctgtcatcgtttaacaaaaccaacaactgacacaactccttaagctgtggtttcagtctctgctagttcatattgcatgtttattttggacagtcttttgttaagcatggtgcttgtactggtttaaataaaatgttaacattaaaa

SEQ ID NO: 454684 - DNA, 2029 bp, Homo sapiens
aaataaaatgcaaagaacatatgaatggaaaacatgccaaaatttaaattttgctagttttgagatgactaagatattcttaatataagaatacactcaccaagtttggttagtttttagagtctctagacctattatcaaattaatgttcaatggttacttatgttttgtttcacctgttttgcagcagtaagagaaactagtgctgcaagaatgtattttttaatgaagttccttattttgtcttgcatgttttagttttgcttatttttaaatttggaggtcctccataatgtcagataatattgacctgccatacgttagcactcttagttccgctactgtctttaacaggagcaaagagctgtgataaaccatgcttttttgagcttgtctgactcctaattaataacatgtttttggcaagacaacagattgaggttagaggatcagtaggacatttttattccatctgtcctatggggaaatttacaaatcccgtgctctaaaatgttctcaaacatttatatagatttccctttcatcttactaaattttgcattgttcttttcaagtatgtttcgtatttactgtctttttttctgccatttcccaaataataactccagatttcataattccagtttttacattccgttatctttctggtacaaccattcccattcagccttaaatctgagtcctttttagcagcaacttttttcctgggatcctccttcgtggtcttctaagtcagtgttagttttgaaatttttggccctgcataagttctgcatagcatctaatgtcaaaatagaaccaactggtaatcacagtattatttagtgtggtttccatgacaacaaaaatacatacgaagaaaacttctcaggttactatgctgaaattccaaaatgtctgagttttgaatagtgatcactttgttctggtattgacgcaattatattaggaaaaaagttggttgactgtttttgtttaattgacttctaaaatgttcaaattgtctagttctaaaagtttactaaatgcctagtgcagttaaacatactcttgtttaagtgtgtgttgctaaattttttactgtcattactaaataatctgtgtggcaaaatgtgtgtcagcacttttccctccttttttatctcctattttcaggagtcaaatgtagccataaactgtatccttgtctgacactttagctaaaaatttccagttaggggagtttattgccaaattaaatttggctgttccccccaacccatatagatattaaggaaggtgtacttaaaaaatgtttggactgcttttaaaacctgagcaatgtcattaatccatatgtggactagtgatgaatagatattttcataagagtttaaatgctgatatttggtggaagtagagagtaactcatattctatcaattcaagtattcttactatggttgctttccctatttgttcaatagactgataatactggaatttatagagtttgagccattacaacttttgtgaggatgtgtttcaaacatttctggacaaatcttattttgtatttctggaagaatgtagtaatcttctagaccgcttaaaaccaatgctcccaagctgaatattcttgagaaatttgtttttattatgccatttgacatttcaaatcagtgctcatatacagtaaacttgtgatagaaattgtattttattgctttttggattataattcatataaatataattacttgaatattgtttgagatcattaacatgccagggcagttcccactgatttagatggtccaagataatctcattcaggaggcttgaaacattaatggtttagtcttgtgaattttaacagttctctgtcatcgtttaacaaaaccaacaactgacacaactccttaagctgtggtttcagtctctgctagttcatattgcatgtttattttggacagtcttttgttaagcatggtgcttgtactggtttaaataaaatgttaacattaaaa

SEQ ID NO: 454685 - DNA, 816 bp, Homo sapiens
tgataggtgggggcgactgggccaggcgccggggcaggaagggaggcggccgccgtgccattcttaaaggcgcccgagtgtaggcgacaggccgctgacggccggaaggaaaatgagtgagtctttggttgtttgtgatgttgccgaagatttagtggaaaagctgagaaagtttcgttttcgcaaagaaacgaacaacgctgctattataatgaagattgacaaggataaacgcctggtggtactggatgaggagcttgagggcatttcaccagatgaacttaaagatgaactacctgaacgacaacctcgcttcattgtgtatagttataaatatcaacatgatgatggaagagtttcatatcctctgtgctttattttctccagtcctgttggatgtaagcctgaacaacagatgatgtatgctggaagtaagaataagctagtccagacagctgaactaaccaaggtatttgaaataagaaataccgaagacctaactgaagaatggttacgtgagaaacttggattttttcactaatgtgaacttctgtgtttctaaagtatttatgtattaacctgaccatactggaatcagacataaatacttatttatgcctaaaaatgcactgttacttacagtttgtttcctgcagtaaagaaaaattcttcatttgtgcaaaatttgaacaaagaggaaatcatcttcatagtaatgaaactttgtaaagtgtttccttatattggtaattgttagtctaccagaacaactcgctacagttagtctacctgtaagctccggtgagcacctcagca

SEQ ID NO: 454686 - DNA, 234 bp, Homo sapiens
gtaagtgaatttctttaaataacacatatttggcttagatccaattaagccattttatactagacaaattttctgctgtttttaaagatgaacattgttgaataacctaaattgaggagggtctgtgtctatgtgtgtccatgtgcctgtgtgcatgcatccctagaaagaatgaagcatcatctcttagaacttattttcttaggataaatttctagacgtgtaattgttgac

SEQ ID NO: 454687 - DNA, 4088 bp, Homo sapiens
tgataggtgggggcgactgggccaggcgccggggcaggaagggaggcggccgccgtgccattcttaaaggcgcccgagtgtaggcgacaggccgctgacggccggaaggaaaatgagtgagtctttggttgtttgtgatgttgccgaagatttagtggaaaagctgagaaagtttcgttttcgcaaagaaacgaacaacgctgctattataatgaagattgacaaggataaacgcctggtggtactggatgaggagcttgagggcatttcaccagatgaacttaaagatgaactacctgaacgacaacctcgcttcattgtgtatagttataaatatcaacatgatgatggaagagtttcatatcctctgtgctttattttctccagtcctgttggatgtaagcctgaacaacagatgatgtatgctggaagtaagaataagctagtccagacagctgaactaaccaaggtatttgaaataagaaataccgaagacctaactgaagaatggttacgtgagaaacttggattttttcactaatgtgaacttctgtgtttctaaagtatttatgtattaacctgaccatactggaatcagacataaatacttatttatgcctaaaaatgcactgttacttacagtttgtttcctgcagtaaagaaaaattcttcatttgtgcaaaatttgaacaaagaggaaatcatcttcatagtaatgaaactttgtaaagtgtttccttatattggtaattgttaggtggactacttttctccagggactttttgcactcttgtgactaatttctataacttatggttcggaatttgttactatttacagacaccattggaaagtggatatattagattgtgagagacaacagttgcctccttttgacaaatactggatattagcagtttatttatgaaaatagcgtattatcacttgtcaaatcattgaaattcatttggggtcaaagacttgagtgacccagtattgagccatgaataatttagtgtaacctgtattacaagtacattgatgaattctgtatcttctttggtttcctgtatctttttaatcaagtctagaaactatgttcatcagtcactcatttttaaggtcgggagttagattttatgatagaattatgactgttagcttttctccttatagcatcttagtcttagaaattggtgggttgtaataatcaagggcttcattccttttatgtcatttctagacagttttgaatctaggttaataacactttatttataaagcacctcaatgtcctgtgaacactaattattttaaatgtgttaatactgtgcctttgatttgttagctttaaagttagtttaagacttttacactgccagtattccacatttggtgaaattaatacttttttaaagggtccaaataaaataattttctaatgtgtatatctgaaatttgtaataaaatcaacttcatattttaaaaattccaactatctgcttgcattggtgaatatatggcagtcgagagttataattttgggtatacttgtggttagttttgtgccataggaaaaaattatcttaaaactttggccatagttaataacattaacacttcaatagcaatcacatcttatatcctaaatgtcagaagatattctgaactggatgcctgaatagttaactaaaccagtcttgttagatgatggtactcttggcataaagcgaggattctgatatttggcatacttgtaaaaacaaatacataagtaaccattgaacattaatttgataataggtctagagactctaaaaactaaccaaacttggtgagtgtattcttatattaagaatatcttagtcatctcaaaactagcgaggtttctgtgagaagtaaagatagttggaatttttgcgatattgaatagaacatcttctgttcccaacactgtttggcttcactaatttagaagtcaggaagcaatagaaagttggagatgaggaagtgctagagtaggtgtttgttttggttcttggagggaaaagattctttattccaatttccagagagaagagaaaactcacccaggaagtttaaaaattctttaaacaggtattttgatattggagaataacatgcatataattctgtaggaatgcacatgtaatccaagtgagtggagagtgtttttaatgtttttgaatgaaggaaatgaggttttgtttcacctgttttgcagcagtaagagaaactagtgctgcaagaatgtattttttaatgaagttccttattttgtcttgcatgttttagttttgcttatttttaaatttggaggtcctccataatgtcagataatattgacctgccatacgttagcactcttagttccgctactgtctttaacaggagcaaagagctgtgataaaccatgcttttttgagcttgtctgactcctaattaataacatgtttttggcaagacaacagattgaggttagaggatcagtaggacatttttattccatctgtcctatggggaaatttacaaatcccgtgctctaaaatgttctcaaacatttatatagatttccctttcatcttactaaattttgcattgttcttttcaagtatgtttcgtatttactgtctttttttctgccatttcccaaataataactccagatttcataattccagtttttacattccgttatctttctggtacaaccattcccattcagccttaaatctgagtcctttttagcagcaacttttttcctgggatcctccttcgtggtcttctaagtcagtgttagttttgaaatttttggccctgcataagttctgcatagcatctaatgtcaaaatagaaccaactggtaatcacagtattatttagtgtggtttccatgacaacaaaaatacatacgaagaaaacttctcaggttactatgctgaaattccaaaatgtctgagttttgaatagtgatcactttgttctggtattgacgcaattatattaggaaaaaagttggttgactgtttttgtttaattgacttctaaaatgttcaaattgtctagttctaaaagtttactaaatgcctagtgcagttaaacatactcttgtttaagtgtgtgttgctaaattttttactgtcattactaaataatctgtgtggcaaaatgtgtgtcagcacttttccctccttttttatctcctattttcaggagtcaaatgtagccataaactgtatccttgtctgacactttagctaaaaatttccagttaggggagtttattgccaaattaaatttggctgttccccccaacccatatagatattaaggaaggtgtacttaaaaaatgtttggactgcttttaaaacctgagcaatgtcattaatccatatgtggactagtgatgaatagatattttcataagagtttaaatgctgatatttggtggaagtagagagtaactcatattctatcaattcaagtattcttactatggttgctttccctatttgttcaatagactgataatactggaatttatagagtttgagccattacaacttttgtgaggatgtgtttcaaacatttctggacaaatcttattttgtatttctggaagaatgtagtaatcttctagaccgcttaaaaccaatgctcccaagctgaatattcttgagaaatttgtttttattatgccatttgacatttcaaatcagtgctcatatacagtaaacttgtgatagaaattgtattttattgctttttggattataattcatataaatataattacttgaatattgtttgagatcattaacatgccagggcagttcccactgatttagatggtccaagataatctcattcaggaggcttgaaacattaatggtttagtcttgtgaattttaacagttctctgtcatcgtttaacaaaaccaacaactgacacaactccttaagctgtggtttcagtctctgctagttcatattgcatgtttattttggacagtcttttgttaagcatggtgcttgtactggtttaaataaaatgttaacattaaaa

SEQ ID NO: 454688 - DNA, 4198 bp, Homo sapiens
agccggcggcggcgggcagcgcccaggagggctcggcggccgcttccgctcccagcagctggccagtgcccatagctagagtacttggcctctgccgccgccaccacgcctcagggcagcatcttccagctgggcccggggtggacccgcccagcgggccatgggactaggagtgagtctttggttgtttgtgatgttgccgaagatttagtggaaaagctgagaaagtttcgttttcgcaaagaaacgaacaacgctgctattataatgaagattgacaaggataaacgcctggtggtactggatgaggagcttgagggcatttcaccagatgaacttaaagatgaactacctgaacgacaacctcgcttcattgtgtatagttataaatatcaacatgatgatggaagagtttcatatcctctgtgctttattttctccagtcctgttggatgtaagcctgaacaacagatgatgtatgctggaagtaagaataagctagtccagacagctgaactaaccaaggtatttgaaataagaaataccgaagacctaactgaagaatggttacgtgagaaacttggattttttcactaatgtgaacttctgtgtttctaaagtatttatgtattaacctgaccatactggaatcagacataaatacttatttatgcctaaaaatgcactgttacttacagtttgtttcctgcagtaaagaaaaattcttcatttgtgcaaaatttgaacaaagaggaaatcatcttcatagtaatgaaactttgtaaagtgtttccttatattggtaattgttaggtggactacttttctccagggactttttgcactcttgtgactaatttctataacttatggttcggaatttgttactatttacagacaccattggaaagtggatatattagattgtgagagacaacagttgcctccttttgacaaatactggatattagcagtttatttatgaaaatagcgtattatcacttgtcaaatcattgaaattcatttggggtcaaagacttgagtgacccagtattgagccatgaataatttagtgtaacctgtattacaagtacattgatgaattctgtatcttctttggtttcctgtatctttttaatcaagtctagaaactatgttcatcagtcactcatttttaaggtcgggagttagattttatgatagaattatgactgttagcttttctccttatagcatcttagtcttagaaattggtgggttgtaataatcaagggcttcattccttttatgtcatttctagacagttttgaatctaggttaataacactttatttataaagcacctcaatgtcctgtgaacactaattattttaaatgtgttaatactgtgcctttgatttgttagctttaaagttagtttaagacttttacactgccagtattccacatttggtgaaattaatacttttttaaagggtccaaataaaataattttctaatgtgtatatctgaaatttgtaataaaatcaacttcatattttaaaaattccaactatctgcttgcattggtgaatatatggcagtcgagagttataattttgggtatacttgtggttagttttgtgccataggaaaaaattatcttaaaactttggccatagttaataacattaacacttcaatagcaatcacatcttatatcctaaatgtcagaagatattctgaactggatgcctgaatagttaactaaaccagtcttgttagatgatggtactcttggcataaagcgaggattctgatatttggcatacttgtaaaaacaaatacataagtaaccattgaacattaatttgataataggtctagagactctaaaaactaaccaaacttggtgagtgtattcttatattaagaatatcttagtcatctcaaaactagcaaaatttaaattttggcatgttttccattcatatgttctttgcattttatttttgaggtttctgtgagaagtaaagatagttggaatttttgcgatattgaatagaacatcttctgttcccaacactgtttggcttcactaatttagaagtcaggaagcaatagaaagttggagatgaggaagtgctagagtaggtgtttgttttggttcttggagggaaaagattctttattccaatttccagagagaagagaaaactcacccaggaagtttaaaaattctttaaacaggtattttgatattggagaataacatgcatataattctgtaggaatgcacatgtaatccaagtgagtggagagtgtttttaatgtttttgaatgaaggaaatgaggttttgtttcacctgttttgcagcagtaagagaaactagtgctgcaagaatgtattttttaatgaagttccttattttgtcttgcatgttttagttttgcttatttttaaatttggaggtcctccataatgtcagataatattgacctgccatacgttagcactcttagttccgctactgtctttaacaggagcaaagagctgtgataaaccatgcttttttgagcttgtctgactcctaattaataacatgtttttggcaagacaacagattgaggttagaggatcagtaggacatttttattccatctgtcctatggggaaatttacaaatcccgtgctctaaaatgttctcaaacatttatatagatttccctttcatcttactaaattttgcattgttcttttcaagtatgtttcgtatttactgtctttttttctgccatttcccaaataataactccagatttcataattccagtttttacattccgttatctttctggtacaaccattcccattcagccttaaatctgagtcctttttagcagcaacttttttcctgggatcctccttcgtggtcttctaagtcagtgttagttttgaaatttttggccctgcataagttctgcatagcatctaatgtcaaaatagaaccaactggtaatcacagtattatttagtgtggtttccatgacaacaaaaatacatacgaagaaaacttctcaggttactatgctgaaattccaaaatgtctgagttttgaatagtgatcactttgttctggtattgacgcaattatattaggaaaaaagttggttgactgtttttgtttaattgacttctaaaatgttcaaattgtctagttctaaaagtttactaaatgcctagtgcagttaaacatactcttgtttaagtgtgtgttgctaaattttttactgtcattactaaataatctgtgtggcaaaatgtgtgtcagcacttttccctccttttttatctcctattttcaggagtcaaatgtagccataaactgtatccttgtctgacactttagctaaaaatttccagttaggggagtttattgccaaattaaatttggctgttccccccaacccatatagatattaaggaaggtgtacttaaaaaatgtttggactgcttttaaaacctgagcaatgtcattaatccatatgtggactagtgatgaatagatattttcataagagtttaaatgctgatatttggtggaagtagagagtaactcatattctatcaattcaagtattcttactatggttgctttccctatttgttcaatagactgataatactggaatttatagagtttgagccattacaacttttgtgaggatgtgtttcaaacatttctggacaaatcttattttgtatttctggaagaatgtagtaatcttctagaccgcttaaaaccaatgctcccaagctgaatattcttgagaaatttgtttttattatgccatttgacatttcaaatcagtgctcatatacagtaaacttgtgatagaaattgtattttattgctttttggattataattcatataaatataattacttgaatattgtttgagatcattaacatgccagggcagttcccactgatttagatggtccaagataatctcattcaggaggcttgaaacattaatggtttagtcttgtgaattttaacagttctctgtcatcgtttaacaaaaccaacaactgacacaactccttaagctgtggtttcagtctctgctagttcatattgcatgtttattttggacagtcttttgttaagcatggtgcttgtactggtttaaataaaatgttaacattaaaa

SEQ ID NO: 454689 - DNA, 4089 bp, Homo sapiens
tgataggtgggggcgactgggccaggcgccggggcaggaagggaggcggccgccgtgccattcttaaaggcgcccgagtgtaggcgacaggccgctgacggccggaaggaaaatgagtgagtctttggttgtttgtgatgttgccgaagatttagtggaaaagctgagaaagtttcgttttcgcaaagaaacgaacaacgctgctattataatgaagattgacaaggataaacgcctggtggtactggatgaggagcttgagggcatttcaccagatgaacttaaagatgaactacctgaacgacaacctcgcttcattgtgtatagttataaatatcaacatgatgatggaagagtttcatatcctctgtgctttattttctccagtcctgttggatgtaagcctgaacaacagatgatgtatgctggaagtaagaataagctagtccagacagctgaactaaccaaggtatttgaaataagaaataccgaagacctaactgaagaatggttacgtgagaaacttggattttttcactaatgtgaacttctgtgtttctaaagtatttatgtattaacctgaccatactggaatcagacataaatacttatttatgcctaaaaatgcactgttacttacagtttgtttcctgcagtaaagaaaaattcttcatttgtgcaaaatttgtattggtaattgttaggtggactacttttctccagggactttttgcactcttgtgactaatttctataacttatggttcggaatttgttactatttacagacaccattggaaagtggatatattagattgtgagagacaacagttgcctccttttgacaaatactggatattagcagtttatttatgaaaatagcgtattatcacttgtcaaatcattgaaattcatttggggtcaaagacttgagtgacccagtattgagccatgaataatttagtgtaacctgtattacaagtacattgatgaattctgtatcttctttggtttcctgtatctttttaatcaagtctagaaactatgttcatcagtcactcatttttaaggtcgggagttagattttatgatagaattatgactgttagcttttctccttatagcatcttagtcttagaaattggtgggttgtaataatcaagggcttcattccttttatgtcatttctagacagttttgaatctaggttaataacactttatttataaagcacctcaatgtcctgtgaacactaattattttaaatgtgttaatactgtgcctttgatttgttagctttaaagttagtttaagacttttacactgccagtattccacatttggtgaaattaatacttttttaaagggtccaaataaaataattttctaatgtgtatatctgaaatttgtaataaaatcaacttcatattttaaaaattccaactatctgcttgcattggtgaatatatggcagtcgagagttataattttgggtatacttgtggttagttttgtgccataggaaaaaattatcttaaaactttggccatagttaataacattaacacttcaatagcaatcacatcttatatcctaaatgtcagaagatattctgaactggatgcctgaatagttaactaaaccagtcttgttagatgatggtactcttggcataaagcgaggattctgatatttggcatacttgtaaaaacaaatacataagtaaccattgaacattaatttgataataggtctagagactctaaaaactaaccaaacttggtgagtgtattcttatattaagaatatcttagtcatctcaaaactagcaaaatttaaattttggcatgttttccattcatatgttctttgcattttatttttgaggtttctgtgagaagtaaagatagttggaatttttgcgatattgaatagaacatcttctgttcccaacactgtttggcttcactaatttagaagtcaggaagcaatagaaagttggagatgaggaagtgctagagtaggtgtttgttttggttcttggagggaaaagattctttattccaatttccagagagaagagaaaactcacccaggaagtttaaaaattctttaaacaggtattttgatattggagaataacatgcatataattctgtaggaatgcacatgtaatccaagtgagtggagagtgtttttaatgtttttgaatgaaggaaatgaggttttgtttcacctgttttgcagcagtaagagaaactagtgctgcaagaatgtattttttaatgaagttccttattttgtcttgcatgttttagttttgcttatttttaaatttggaggtcctccataatgtcagataatattgacctgccatacgttagcactcttagttccgctactgtctttaacaggagcaaagagctgtgataaaccatgcttttttgagcttgtctgactcctaattaataacatgtttttggcaagacaacagattgaggttagaggatcagtaggacatttttattccatctgtcctatggggaaatttacaaatcccgtgctctaaaatgttctcaaacatttatatagatttccctttcatcttactaaattttgcattgttcttttcaagtatgtttcgtatttactgtctttttttctgccatttcccaaataataactccagatttcataattccagtttttacattccgttatctttctggtacaaccattcccattcagccttaaatctgagtcctttttagcagcaacttttttcctgggatcctccttcgtggtcttctaagtcagtgttagttttgaaatttttggccctgcataagttctgcatagcatctaatgtcaaaatagaaccaactggtaatcacagtattatttagtgtggtttccatgacaacaaaaatacatacgaagaaaacttctcaggttactatgctgaaattccaaaatgtctgagttttgaatagtgatcactttgttctggtattgacgcaattatattaggaaaaaagttggttgactgtttttgtttaattgacttctaaaatgttcaaattgtctagttctaaaagtttactaaatgcctagtgcagttaaacatactcttgtttaagtgtgtgttgctaaattttttactgtcattactaaataatctgtgtggcaaaatgtgtgtcagcacttttccctccttttttatctcctattttcaggagtcaaatgtagccataaactgtatccttgtctgacactttagctaaaaatttccagttaggggagtttattgccaaattaaatttggctgttccccccaacccatatagatattaaggaaggtgtacttaaaaaatgtttggactgcttttaaaacctgagcaatgtcattaatccatatgtggactagtgatgaatagatattttcataagagtttaaatgctgatatttggtggaagtagagagtaactcatattctatcaattcaagtattcttactatggttgctttccctatttgttcaatagactgataatactggaatttatagagtttgagccattacaacttttgtgaggatgtgtttcaaacatttctggacaaatcttattttgtatttctggaagaatgtagtaatcttctagaccgcttaaaaccaatgctcccaagctgaatattcttgagaaatttgtttttattatgccatttgacatttcaaatcagtgctcatatacagtaaacttgtgatagaaattgtattttattgctttttggattataattcatataaatataattacttgaatattgtttgagatcattaacatgccagggcagttcccactgatttagatggtccaagataatctcattcaggaggcttgaaacattaatggtttagtcttgtgaattttaacagttctctgtcatcgtttaacaaaaccaacaactgacacaactccttaagctgtggtttcagtctctgctagttcatattgcatgtttattttggacagtcttttgttaagcatggtgcttgtactggtttaaataaaatgttaacattaaaa

SEQ ID NO: 454690 - DNA, 159 bp, Homo sapiens
ctcttcctgcctatctgtcttcacgctgtgccccacggccattccccaccccgggcagcccccggactccaaaggtcgtggctgccacagcctccctcagctcttcctgcctatctgtcttcacactgagaatggcgcccaataaatgctatccacgga

SEQ ID NO: 454691 - DNA, 3055 bp, Homo sapiens
cggtgggtggtgctgaagggacagctccgcggcggcggcggcggcggcggccccgggcgctgagcgggtgccctgcgcggagagcggcgagcgcagccatgccccaggccgcctccggggcagcagcagcggcggcgcaacgtctacgcggaggtgctgcacttccagtccatgtgctcgtgcctgtggtacaagagccgcgagaagctgcagtactccatccccatgatcatcccgcgggacctctccacgtccgacacgtgcgtggagcagagccactcgtcgccgggagggggcggccgctacagcgacacgccctcgcgacgctgcctgtgcagcggggcgccacgctccgccatcagctcggtgtccacgggtctgcacagcctgtccaccttccgcggcctcatgaagcgcaggagctccgtgtgactgccccgagggacctggagcacctgggggcgcgggcgggggacccctgctgggaggccaggagactgcccctgctgccttctgcccagtgggaccccgcacaacatccctcaccactctcccccagcacccccatctccgactgtgcctgcttgcaccagccggcaggaggccgggctctgaggacccctggggcccccatcggagccctgcaaattccgagaaatgtgaaacttggtggggtcagggaggaaaggcagaagctgggagcctcccttccctttgaaaatctaagaagctcccagtcctcagagaccctgctggtacccagacccccaccttcggaggggacttcatgttccgtgtacgtttgcatctctatttatacctctgtcctgctaggtctcccaccttcccttggttccaaaagccagggtgtctatgtccaagtcacccctactcagccccactccccttcctcatccccagctgtgtctcccaacctcccttcgtgttgttttgcatggctttgcagttatggagaaagtggaaacccagcagtccctaaagctggtccccagaaagcaggacagaaagaaggagggacaggcaggcagcaggaggggcgagctgggaggcaggaggcagcggcctgtcagtctgcagaatggtcgcactggaggttcaagctaactggcctccagccacattctcatagcaggtaggacttcagccttccagacactgcccttagaatctggaacagaagacttcagactcaccataattgctgataattacccactcttaaatttgtcgagtgatttttagcctctgaaaactctatgctggccactgattcctttgagtctcacaaaaccctacttaggtcatcagggcaggagttctcactcccattttacagatgagaatactgaggcctggacaggtgaagtgaccagagagcaaaaggcaaaggggtgggggctgggtgcagtggctcacacctgtattcccaacacttttggaggctgaggttggaggattgcttgagcccaggaattcgagaccagcctaggtgacatagtgagaccccatctctacaaaaaataaaaaattaaccaggtgtggtggcacgtgcctgggagtcccagcgacttgggaggctgaggtgggaggattgtttgagcctgggaggtcgaggctgtagtgagccctgattgcaccactgtactccagcctgggtgacagggcaagaccctgtctcaaaaaaaaaaaaaaaaatggcaaagggagacaagagcccagcctgcttgttgctagccaaagtgttctttccttccagcttggcctgctcttaaaagcaaagctcctgcagtgtacatcctggcattgtgtggctacctgggttttaaaccagaatcagaagtcccggatcagagggcactgctgaggttcagcctcttctcttcttggccaggaggcagcagctctgaatgggcccctgaggctgcacaggggcctttgtcactggggcgcatgcttacaaacagtgcagttcttgggaccgaggtaagcagggctgggtctcatggcagaaaggccaggatctggggctctaggaatttgggaattgggcagagtggccaagaaagctggcaggcatatcctatgggacatcacacctggcaccattgtcattgttggtgcctgtgtcccaagtagctagtgataagctgaggctgcagcaagaaacacccttcccaggtgggggagtttggaccagaggtgccctctgcccaccacacctgcaacccagaagcccagatggaacgcagctgacgaaggtgatgcttgaggctcacttttggggccccacagctggagccggtataatgactgggacaacatcaaggggtggatgaggggcctctcctcccgcaacactgccttcccatgctgttcccctgccagctccttaacactgccgaccaaggccagccctggcattcagggaaattggagggcagcacccgtagggtggccagcctcaggccccaccccagctgtgtcctctagtctctggggacccctggggggaagaagtctaccctgcttgtgagtcccgtctcagtgtggaggaactggctgcacatgggacctgaaggtgccctctgtgtttatgttgggggtgggggggcagtgctggctgcctctgtcctgtgtgtgaccctaccctcgaagggtcctgtcctgtcagtcccgagggagccacaaccaaagctgcggagagaaggtggggaagggtgcggaatggccgtggggcacagcgtggcagactgttcagtctctgctgggtctttcctagggacctggaaggccagtgttgcttccccctcactccctttcactgcaggcagcctctctgcttccccaatgccttatgcctgggcacactgccacagaatatgcaatatgtgtgggtgaccatgccctcacgaccacacccccaccccgggcagcccccggactccaaaggtcgtggctgccacagcctccctcagctcttcctgcctatctgtcttcacactgagaatggcgcccaataaatgctatccacgga

SEQ ID NO: 454692 - DNA, 3020 bp, Homo sapiens
cggtgggtggtgctgaagggacagctccgcggcggcggcggcggcggcggccccgggcgctgagcgggtgccctgcgcggagagcggcgagcgcagccatgccccaggccgcctccggggcagcagcagcggcggccggggccgatgcgcgggccgggggcgccggggggccggcggcggcccgggcgggacgatgaagcggcagaacgtgcgcacgctggcgctcatcgtgtgcaccttcacctacctgctggtgggcgccgcggtcttcgacgcgctggagtcggagcccgagctgatcgagcggcagcggctggagctgcggcagcaggagctgcgggcgcgctacaacctcagccagggcggctacgaggagctggagcgcgtcgtgctgcgcctcaagccgcacaaggccggcgtgcagtggcgcttcgccggctccttctacttcgccatcaccgtcatcaccaccatcggctacgggcacgcggcacccagcacggatggcggcaaggtgttctgcatgttctacgcgctgctgggcatcccgctcacgctcgtcatgttccagagcctgggcgagcgcatcaacaccttggtgaggtacctgctgcaccgcgccaagaaggggctgggcatgcggcgcgccgacgtgtccatggccaacatggtgctcatcggcttcttctcgtgcatcagcacgctgtgcatcggcgccgccgccttctcccactacgagcactggaccttcttccaggcctactactactgcttcatcaccctcaccaccatcggcttcggcgactacgtggcgctgcagaaggaccaggccctgcagacgcagccgcagtacgtggccttcagcttcgtctacatccttacgggcctcacggtcatcggcgccttcctcaacctcgtggtgctgcgcttcatgaccatgaacgccgaggacgagaagcgcgacgccgagcaccgcgcgctgctcacgcgcaacgggcaggcgggcggcggcggagggggtggcagcgcgcacactacggacaccgcctcatccacggcggcagcgggcggcggcggcttccgcaacgtctacgcggaggtgctgcacttccagtccatgtgctcgtgcctgtggtacaagagccgcgagaagctgcagtactccatccccatgatcatcccgcgggacctctccacgtccgacacgtgcgtggagcagagccactcgtcgccgggagggggcggccgctacagcgacacgccctcgcgacgctgcctgtgcagcggggcgccacgctccgccatcagctcggtgtccacgggtctgcacagcctgtccaccttccgcggcctcatgaagcgcaggagctccgtgtgactgccccgagggacctggagcacctgggggcgcgggcgggggacccctgctgggaggccaggagactgcccctgctgccttctgcccagtgggaccccgcacaacatccctcaccactctcccccagcacccccatctccgactgtgcctgcttgcaccagccggcaggaggccgggctctgaggacccctggggcccccatcggagccctgcaaattccgagaaatgtgaaacttggtggggtcagggaggaaaggcagaagctgggagcctcccttccctttgaaaatctaagaagctcccagtcctcagagaccctgctggtacccagacccccaccttcggaggggacttcatgttccgtcttggcctgctcttaaaagcaaagctcctgcagtgtacatcctggcattgtgtggctacctgggttttaaaccagaatcagaagtcccggatcagagggcactgctgaggttcagcctcttctcttcttggccaggaggcagcagctctgaatgggcccctgaggctgcacaggggcctttgtcactggggcgcatgcttacaaacagtgcagttcttgggaccgaggtaagcagggctgggtctcatggcagaaaggccaggatctggggctctaggaatttgggaattgggcagagtggccaagaaagctggcaggcatatcctatgggacatcacacctggcaccattgtcattgttggtgcctgtgtcccaagtagctagtgataagctgaggctgcagcaagaaacacccttcccaggtgggggagtttggaccagaggtgccctctgcccaccacacctgcaacccagaagcccagatggaacgcagctgacgaaggtgatgcttgaggctcacttttggggccccacagctggagccggtataatgactgggacaacatcaaggggtggatgaggggcctctcctcccgcaacactgccttcccatgctgttcccctgccagctccttaacactgccgaccaaggccagccctggcattcagggaaattggagggcagcacccgtagggtggccagcctcaggccccaccccagctgtgtcctctagtctctggggacccctggggggaagaagtctaccctgcttgtgagtcccgtctcagtgtggaggaactggctgcacatgggacctgaaggtgccctctgtgtttatgttgggggtgggggggcagtgctggctgcctctgtcctgtgtgtgaccctaccctcgaagggtcctgtcctgtcagtcccgagggagccacaaccaaagctgcggagagaaggtggggaagggtgcggaatggccgtggggcacagcgtggcagactgttcagtctctgctgggtctttcctagggacctggaaggccagtgttgcttccccctcactccctttcactgcaggcagcctctctgcttccccaatgccttatgcctgggcacactgccacagaatatgcaatatgtgtgggtgaccatgccctcacgaccacacccccaccccgggcagcccccggactccaaaggtcgtggctgccacagcctccctcagctcttcctgcctatctgtcttcacactgagaatggcgcccaataaatgctatccacgga

SEQ ID NO: 454693 - DNA, 4001 bp, Homo sapiens
cggtgggtggtgctgaagggacagctccgcggcggcggcggcggcggcggccccgggcgctgagcgggtgccctgcgcggagagcggcgagcgcagccatgccccaggccgcctccggggcagcagcagcggcggccggggccgatgcgcgggccgggggcgccggggggccggcggcggcccgggcgggacgatgaagcggcagaacgtgcgcacgctggcgctcatcgtgtgcaccttcacctacctgctggtgggcgccgcggtcttcgacgcgctggagtcggagcccgagctgatcgagcggcagcggctggagctgcggcagcaggagctgcgggcgcgctacaacctcagccagggcggctacgaggagctggagcgcgtcgtgctgcgcctcaagccgcacaaggccggcgtgcagtggcgcttcgccggctccttctacttcgccatcaccgtcatcaccaccatcggctacgggcacgcggcacccagcacggatggcggcaaggtgttctgcatgttctacgcgctgctgggcatcccgctcacgctcgtcatgttccagagcctgggcgagcgcatcaacaccttggtgaggtacctgctgcaccgcgccaagaaggggctgggcatgcggcgcgccgacgtgtccatggccaacatggtgctcatcggcttcttctcgtgcatcagcacgctgtgcatcggcgccgccgccttctcccactacgagcactggaccttcttccaggcctactactactgcttcatcaccctcaccaccatcggcttcggcgactacgtggcgctgcagaaggaccaggccctgcagacgcagccgcagtacgtggccttcagcttcgtctacatccttacgggcctcacggtcatcggcgccttcctcaacctcgtggtgctgcgcttcatgaccatgaacgccgaggacgagaagcgcgacgccgagcaccgcgcgctgctcacgcgcaacgggcaggcgggcggcggcggagggggtggcagcgcgcacactacggacaccgcctcatccacggcggcagcgggcggcggcggcttccgcaacgtctacgcggaggtgctgcacttccagtccatgtgctcgtgcctgtggtacaagagccgcgagaagctgcagtactccatccccatgatcatcccgcgggacctctccacgtccgacacgtgcgtggagcagagccactcgtcgccgggagggggcggccgctacagcgacacgccctcgcgacgctgcctgtgcagcggggcgccacgctccgccatcagctcggtgtccacgggtctgcacagcctgtccaccttccgcggcctcatgaagcgcaggagctccgtgtgactgccccgagggacctggagcacctgggggcgcgggcgggggacccctgctgggaggccaggagactgcccctgctgccttctgcccagtgggaccccgcacaacatccctcaccactctcccccagcacccccatctccgactgtgcctgcttgcaccagccggcaggaggccgggctctgaggacccctggggcccccatcggagccctgcaaattccgagaaatgtgaaacttggtggggtcagggaggaaaggcagaagctgggagcctcccttccctttgaaaatctaagaagctcccagtcctcagagaccctgctggtacccagacccccaccttcggaggggacttcatgttccgtgtacgtttgcatctctatttatacctctgtcctgctaggtctcccaccttcccttggttccaaaagccagggtgtctatgtccaagtcacccctactcagccccactccccttcctcatccccagctgtgtctcccaacctcccttcgtgttgttttgcatggctttgcagttatggagaaagtggaaacccagcagtccctaaagctggtccccagaaagcaggacagaaagaaggagggacaggcaggcagcaggaggggcgagctgggaggcaggaggcagcggcctgtcagtctgcagaatggtcgcactggaggttcaagctaactggcctccagccacattctcatagcaggtaggacttcagccttccagacactgcccttagaatctggaacagaagacttcagactcaccataattgctgataattacccactcttaaatttgtcgagtgatttttagcctctgaaaactctatgctggccactgattcctttgagtctcacaaaaccctacttaggtcatcagggcaggagttctcactcccattttacagatgagaatactgaggcctggacaggtgaagtgaccagagagcaaaaggcaaaggggtgggggctgggtgcagtggctcacacctgtattcccaacacttttggaggctgaggttggaggattgcttgagcccaggaattcgagaccagcctaggtgacatagtgagaccccatctctacaaaaaataaaaaattaaccaggtgtggtggcacgtgcctgggagtcccagcgacttgggaggctgaggtgggaggattgtttgagcctgggaggtcgaggctgtagtgagccctgattgcaccactgtactccagcctgggtgacagggcaagaccctgtctcaaaaaaaaaaaaaaaaatggcaaagggagacaagagcccagcctgcttgttgctagccaaagtgttctttccttccagcttggcctgctcttaaaagcaaagctcctgcagtgtacatcctggcattgtgtggctacctgggttttaaaccagaatcagaagtcccggatcagagggcactgctgaggttcagcctcttctcttcttggccaggaggcagcagctctgaatgggcccctgaggctgcacaggggcctttgtcactggggcgcatgcttacaaacagtgcagttcttgggaccgaggtaagcagggctgggtctcatggcagaaaggccaggatctggggctctaggaatttgggaattgggcagagtggccaagaaagctggcaggcatatcctatgggacatcacacctggcaccattgtcattgttggtgcctgtgtcccaagtagctagtgataagctgaggctgcagcaagaaacacccttcccaggtgggggagtttggaccagaggtgccctctgcccaccacacctgcaacccagaagcccagatggaacgcagctgacgaaggtgatgcttgaggctcacttttggggccccacagctggagccggtataatgactgggacaacatcaaggggtggatgaggggcctctcctcccgcaacactgccttcccatgctgttcccctgccagctccttaacactgccgaccaaggccagccctggcattcagggaaattggagggcagcacccgtagggtggccagcctcaggccccaccccagctgtgtcctctagtctctggggacccctggggggaagaagtctaccctgcttgtgagtcccgtctcagtgtggaggaactggctgcacatgggacctgaaggtgccctctgtgtttatgttgggggtgggggggcagtgctggctgcctctgtcctgtgtgtgaccctaccctcgaagggtcctgtcctgtcagtcccgagggagccacaaccaaagctgcggagagaaggtggggaagggtgcggaatggccgtggggcacagcgtggcagactgttcagtctctgctgggtctttcctagggacctggaaggccagtgttgcttccccctcactccctttcactgcaggcagcctctctgcttccccaatgccttatgcctgggcacactgccacagaatatgcaatatgtgtgggtgaccatgccctcacgaccacacccccaccccgggcagcccccggactccaaaggtcgtggctgccacagcctccctcagctcttcctgcctatctgtcttcacactgagaatggcgcccaataaatgctatccacgga

SEQ ID NO: 454694 - DNA, 2275 bp, Homo sapiens
cggtgggtggtgctgaagggacagctccgcggcggcggcggcggcggcggccccgggcgctgagcgggtgccctgcgcggagagcggcgagcgcagccatgccccaggccgcctccggggcagcagcagcggcggccggggccgatgcgcgggccgggggcgccggggggccggcggcggcccgggcgggacgatgaagcggcagaacgtgcgcacgctggcgctcatcgtgtgcaccttcacctacctgctggtgggcgccgcggtcttcgacgcgctggagtcggagcccgagctgatcgagcggcagcggctggagctgcggcagcaggagctgcgggcgcgctacaacctcagccagggcggctacgaggagctggagcgcgtcgtgctgcgcctcaagccgcacaaggccggcgtgcagtggcgcttcgccggctccttctacttcgccatcaccgtcatcaccaccatcggctacgggcacgcggcacccagcacggatggcggcaaggtgttctgcatgttctacgcgctgctgggcatcccgctcacgctcgtcatgttccagagcctgggcgagcgcatcaacaccttggtgaggtacctgctgcaccgcgccaagaaggggctgggcatgcggcgcgccgacgtgtccatggccaacatggtgctcatcggcttcttctcgtgcatcagcacgctgtgcatcggcgccgccgccttctcccactacgagcactggaccttcttccaggcctactactactgcttcatcaccctcaccaccatcggcttcggcgactacgtggcgctgcagaaggaccaggccctgcagacgcagccgcagtacgtggccttcagcttcgtctacatccttacgggcctcacggtcatcggcgccttcctcaacctcgtggtgctgcgcttcatgaccatgaacgccgaggacgagaagcgcgacgccgagcaccgcgcgctgctcacgcgcaacgggcaggcgggcggcggcggagggggtggcagcgcgcacactacggacaccgcctcatccacggcggcagcgggcggcggcggcttccgcaacgtctacgcggaggtgctgcacttccagtccatgtgctcgtgcctgtggtacaagagccgcgagaagctgcagtactccatccccatgatcatcccgcgggacctctccacgtccgacacgtgcgtggagcagagccactcgtcgccgggagggggcggccgctacagcgacacgccctcgcgacgctgcctgtgcagcggggcgccacgctccgccatcagctcggtgtccacgggtctgcacagcctgtccaccttccgcggcctcatgaagcgcaggagctccgtgtgactgccccgagggacctggagcacctgggggcgcgggcgggggacccctgctgggaggccaggagactgcccctgctgccttctgcccagtgggaccccgcacaacatccctcaccactctcccccagcacccccatctccgactgtgcctgcttgcaccagccggcaggaggccgggctctgaggacccctggggcccccatcggagccctgcaaattccgagaaatgtgaaacttggtggggtcagggaggaaaggcagaagctgggagcctcccttccctttgaaaatctaagaagctcccagtcctcagagaccctgctggtacccagacccccaccttcggaggggacttcatgttccgtgtacgtttgcatctctatttatacctctgtcctgctaggtctcccaccttcccttggttccaaaagccagggtgtctatgtccaagtcacccctactcagccccactccccttcctcatccccagctgtgtctcccaacctcccttcgtgttgttttgcatggctttgcagttatggagaaagtggaaacccagcagtccctaaagctggtccccagaaagcaggacagaaagaaggagggacaggcaggcagcaggaggggcgagctgggaggcaggaggcagcggcctgtcagtctgcagaatggtcgcactggaggttcaagctaactggcctccagccacattctcatagcaggtaggacttcagccttccagacactgcccttagaatctggaacagaagacttcagactcaccataattgctgataattacccactcttaaatttgtcgagtgatttttagcctctggtcacttcacctgtccaggcctcagtattctcatctgtaaaatgggagtgagaactcctg

SEQ ID NO: 454695 - DNA, 1992 bp, Homo sapiens
aggcgccgcgcgtgggcggggcgtcggcggcagcagggcggctgaggtggccgctggagctcaggcggcgggcgcggctgggatggcgaagagcaacggagagaatgggccgcgcgcgcccgcggccggggaaagcctgtcgggaacccgggagagcctggcccagggccccgacgccgcaaccaccgacgaactcagctctctcgggtctgactcggaggccaacggcttcgccgagcgccgcatcgacaagttcggcttcatcgtgggctcgcagggcgccgagggcgcgctggaggaagtacccctggaggtgctgaggcagagggagtccaagtggctggacatgctcaacaactgggacaaatggatggccaagaagcacaaaaagattcgtctgcggtgccaaaagggcatcccgccttctctgcggggccgtgcttggcagtacctgtcaggaggcaaggtgaagttacagcagaaccctggaaagtttgacgagctggacatgtcccctggggaccccaagtggctggacgtgattgagcgtgacctgcaccggcagttcccattccatgagatgtttgtgtcccgggggggccacggccagcaggacctattccgtgtgctgaaggcctacacgctgtaccggcccgaggagggctactgccaggcccaggcgcccattgccgctgtcttgctcatgcatatgcctgctgagcaagccttctggtgcctggtacagatctgtgagaagtacctgcccggctactacagcgagaaactggaggcgatccagctggacggggagatccttttctcgctgttgcagaaggtgtcgccggtggcccacaagcacctcagccgtcagaagatcgacccgctcctctatatgacagaatggttcatgtgcgccttctcccgaaccttgccctggagctctgtgctgcgtgtctgggacatgttcttctgtgaaggggtcaagatcatcttccgggtggggctggtgctgctgaagcacgcgctgggctcccctgagaaggtcaaagcctgccagggccagtacgagaccatcgagcgactgcggagcctcagccccaagatcatgcaggaggcctttctggtccaggaggtggtggagttgcccgtgacagagcgccagattgagcgcgaacacctcattcagctgcggcgctggcaggagacccggggtgagctgcagtgccgctccccgcccaggctgcatggtgccaaggctatcttggatgcagaacctggtccccggcctgccctacaaccttcaccatccatccgcctgcccctagatgcccccctccctggctccaaagccaagcccaagccacccaagcaggcccagaaggagcagcggaaacagatgaaggggagagggcagctggagaagcccccagccccaaatcaagccatggtggtggccgctgcaggagatgcatgtcccccacagcatgtgcccccgaaggactcagcccccaaggactcagcccctcaggatttggctccccaggtctcagcccaccaccgctcccaggagagcttgacgtcccaagagagtgaggacacctacttgtaaccctggcagctaaggcctccagggcggggtctccatataactacacggttcatgaactgacattccacatcctgcccaccctctgagggccaagctgcctggccactgggctgggctggagtctggctggtccaacacagattctgcctggtccaacacagattctgcctgagcctccttatttattttctttacagtggcactcaggctggcccagccagggcaggcagaagctagggcctggggggtggggcctccttcagccccctcctcctgggggatgctccccagggttagggtgctggtgtgaggggaaagggtggggtgttctttgtgtaaaatagaaacatggttttgtacagaaataaacagccttgtataga

SEQ ID NO: 454696 - DNA, 550 bp, Homo sapiens
gggcggtacgctaatgcgcgacacggggacaagtggatggcaagaagcacaaaaagattcgtctgcggtgccaaaagggcatcccgccttctctgcggggccgtgcttggcagtacctgtcaggaggcaaggtgaagttacagcagaaccctggaaagtttgacgtaagtttcccttcctttgccctgccctcccttccgcatctcttggcgtcctccccatggcggcaatcctccatgtgctcacctgaacctcacaggatgagcagtccatgaaacctccagtcatgtgcccaactgcccaggccccagcaggccagaccggcccagtcctgggtacctgtgtctcctggagggtctgtacaactgaggctccagccctgagcagccctcagtggaatggccagatttggtaccccctattccagctctttctcttgatgaccactcaggttttgctttcctgggctcagtaggctacctccctgctcttggtcatcaggaggggacactcagaccatttccctgactgccttgggccctgtgccctg

SEQ ID NO: 454697 - DNA, 2396 bp, Homo sapiens
aggcgccgcgcgtgggcggggcgtcggcggcagcagggcggctgaggtggccgctggagctcaggcggcgggcgcggctgggatggcgaagagcaacggagagaatgggccgcgcgcgcccgcggccggggaaagcctgtcgggaacccgggagagcctggcccagggccccgacgccgcaaccaccgacgaactcagctctctcgggtctgactcggaggccaacggcttcgccgagcgccgcatcgacaagttcggcttcatcgtgggctcgcagggcgccgagggcgcgctggaggaagtacccctggaggtgctgaggcagagggagtccaagtggctggacatgctcaacaactgggacaaatggatggccaagaagcacaaaaagattcgtctgcggtgccaaaagggcatcccgccttctctgcggggccgtgcttggcagtacctgtcaggaggcaaggtgaagttacagcagaaccctggaaagtttgacgagctggacatgtcccctggggaccccaagtggctggacgtgattgagcgtgacctgcaccggcagttcccattccatgagatgtttgtgtcccgggggggccacggccagcaggacctattccgtgtgctgaaggcctacacgctgtaccggcccgaggagggctactgccaggcccaggcgcccattgccgctgtcttgctcatgcatatgcctgctgagcaagccttctggtgcctggtacagatctgtgagaagtacctgcccggctactacagcgagaaactggaggcgatccagctggacggggagatccttttctcgctgttgcagaaggtgtcgccggtggcccacaagcacctcagccgtcagaagatcgacccgctcctctatatgacagaatggttcatgtgcgccttctcccgaaccttgccctggagctctgtgctgcgtgtctgggacatgttcttctgtgaaggggtcaagatcatcttccgggtggggctggtgctgctgaagcacgcgctgggctcccctgagaaggtcaaagcctgccagggccagtacgagaccatcgagcgactgcggagcctcagccccaagatcatgcaggaggcctttctggtccaggaggtggtggagttgcccgtgacagagcgccagattgagcgcgaacacctcattcagctgcggcgctggcaggagacccgggagctgcccccatctgagttcctgcaagtagctgaggccacatggctggtgctgaacgtgtcgtctcacagcggtgcggcagtgcaggctgctggggtcaccaagatcgcccgttcggtcatcgcgccactggccgagcaccacgtgtctgtgctgatgctgtccacttaccagacggacttcatcctggtgcgggagcaggacctgtccgtggtgatccacacgctggcccaggagttcgacatttaccgcgaggtgggcggagagcctgtgcctgtgacgagggatgattccagcaatggctttccccgcactcagcatgcacccccaaggaggcagcctctagcagtcctgaacccagctccatcacgttctttgccttctccctcatcgagggttatatctccattgtcatggatgctgaaacacagaaaaagttccccagtgacctcctgctgaccagctcctcgggggagctgtggaggatggtgcgcatcggtggacagcccctgggctttgatgaatgtggcatcgtggcacagattgcaggtcccctggctgccgctgacatctctgcctactacatcagcaccttcaacttcgaccacgccctgggtgcccgaggacggtatcggcagcgtcatcgaggtcctccagcggcggcaggaaggcctggcttcctgaggcccatgggcaacagagcagcctccctgctctcccctcgacccaggcttccaaagacttctctaagctatttccttaagctctggaacgagccccctgttctgctggggaccctcgttccgctctctgtatgtaagctgcgtgcaggcaccggcttttacgcggacacctgtgtacactcacaggtggagtgggcaggtgctagcctgactgcgtgtctgcccatgcaggggaacacggtgctcggggcttaagcccccaacccatcactccctgcgcagcctcggcgtttgcacagtccctgcctgaggcctgagccattccccaaaggcttcctgggccagctgcccccctgacctccgttctgcctctggtggggttgccttccctggccaggtgagtcctgacagtgcctctccctcctggggcctccaaggaaagtattttgacatctctctctcttctgtttttattgacttgttaataaaggactttgtagtga

SEQ ID NO: 454698 - DNA, 2989 bp, Homo sapiens
aggcgccgcgcgtgggcggggcgtcggcggcagcagggcggctgaggtggccgctggagctcaggcggcgggcgcggctgggatggcgaagagcaacggagagaatgggccgcgcgcgcccgcggccggggaaagcctgtcgggaacccgggagagcctggcccagggccccgacgccgcaaccaccgacgaactcagctctctcgggtctgactcggaggccaacggcttcgccgagcgccgcatcgacaagttcggcttcatcgtgggctcgcagggcgccgagggcgcgctggaggaagtacccctggaggtgctgaggcagagggagtccaagtggctggacatgctcaacaactgggacaaatggatggccaagaagcacaaaaagattcgtctgcggtgccaaaagggcatcccgccttctctgcggggccgtgcttggcagtacctgtcaggaggcaaggtgaagttacagcagaaccctggaaagtttgacgagctggacatgtcccctggggaccccaagtggctggacgtgattgagcgtgacctgcaccggcagttcccattccatgagatgtttgtgtcccgggggggccacggccagcaggacctattccgtgtgctgaaggcctacacgctgtaccggcccgaggagggctactgccaggcccaggcgcccattgccgctgtcttgctcatgcatatgcctgctgagcaagccttctggtgcctggtacagatctgtgagaagtacctgcccggctactacagcgagaaactggaggcgatccagctggacggggagatccttttctcgctgttgcagaaggtgtcgccggtggcccacaagcacctcagccgtcagaagatcgacccgctcctctatatgacagaatggttcatgtgcgccttctcccgaaccttgccctggagctctgtgctgcgtgtctgggacatgttcttctgtgaaggggtcaagatcatcttccgggtggggctggtgctgctgaagcacgcgctgggctcccctgagaaggtcaaagcctgccagggccagtacgagaccatcgagcgactgcggagcctcagccccaagatcatgcaggaggcctttctggtccaggaggtggtggagttgcccgtgacagagcgccagattgagcgcgaacacctcattcagctgcggcgctggcaggagacccgggagctgcccccatctgagttcctgcaagtagctgaggccacatggctggtgctgaacgtgtcgtctcacagcggtgcggcagtgcaggctgctggggtcaccaagatcgcccgttcggtcatcgcgccactggccgagcaccacgtgtctgtgctgatgctgtccacttaccagacggacttcatcctggtgcgggagcaggacctgtccgtggtgatccacacgctggcccaggagttcgacatttaccgcgaggtgggcggagagcctgtgcctgtgacgagggatgattccagcaatggctttccccgcactcagcatgggcccagccccacggtgcatcccatccagagcccacagaaccgcttctgtgtcctcacactggaccctgagacgcttccagccatcgccaccaccctcatagatgtcctcttctactcgcacagcacccccaaggaggcagcctctagcagtcctgaacccagctccatcacgttctttgccttctccctcatcgagggttatatctccattgtcatggatgctgaaacacagaaaaagttccccagtgacctcctgctgaccagctcctcgggggagctgtggaggatggtgcgcatcggtggacagcccctgggctttgatgaatgtggcatcgtggcacagattgcaggtcccctggctgccgctgacatctctgcctactacatcagcaccttcaacttcgaccacgccctgggtgcccgaggacggtatcggcagcgtcatcgaggtcctccagcggcggcaggaaggcctggcttcctgaggcccatgggcaacagagcagcctccctgctctcccctcgacccaggcttccaaagacttctctaagctatttccttaagctctggaacgagccccctgttctgctggggaccctcgttccgctctctgtatgtaagctgcgtgcaggcaccggcttttacgcggacacctgtgtacactcacaggtggagtgggcaggtgctagcctgactgcgtgtctgcccatgcaggggaacacggtgctcggggcttaagcccccaacccatcactccctgcgcagcctcggcgtttgcacagtccctgcctgaggcctgagccattccccaaaggcttcctgggccagctgcccccctgacctccgttctgcctctggtggggttgccttccctggccaggtgagtcctgacagtgcctctccctcctggggcctccaaggaaagtattttgacatctctctctcttctgtttttattgacttgttaataaaggactttgtagtgaagataagaaacaaaagaatagggaaaaaaaaataataaccaaaaagcgggggccacgccctaaaatgttccctccgggttcggccaaagatgttggtcctgccgcctgtttgctgagcaacgaatagggggccccgcaatgggaggtgcctttataaaaagacgcaggggcacctgtggtcaaaaaaaacgacagtagggcgcagagaaaactcgagtgtccagtggcgcaccttggcgtgagagaaaccacctgtatccatggtggatggggaacgcccctgttggcagcggacacaatgcctccaaccggtaaacacttggaacgccctacaaaggggatccactatcaaacaattgtaagtgggggctaacgggggtgtaacaattggctggataatgtctgacgaacatggagagcttggaaagcgaggggcaatcccaatatggacagagttttaaccaggtac

SEQ ID NO: 454699 - DNA, 1843 bp, Homo sapiens
gttgcgcgggctgacgcgccactatgtagcgggtttcgggcgggccacgcgtgcgggacaggaacccaaccccagccgaccttgagctccaggagttcgtctcttacgtctgcggaagtgcagctgcctcagttcttagcgcgctggaggaagtacccctggaggtgctgaggcagagggagtccaagtggctggacatgctcaacaactgggacaaatggatggccaagaagcacaaaaagattcgtctgcggtgccaaaagggcatcccgccttctctgcggggccgtgcttggcagtacctgtcaggaggcaaggtgaagttacagcagaaccctggaaagtttgacgagctggacatgtcccctggggaccccaagtggctggacgtgattgagcgtgacctgcaccggcagttcccattccatgagatgtttgtgtcccgggggggccacggccagcaggacctattccgtgtgctgaaggcctacacgctgtaccggcccgaggagggctactgccaggcccaggcgcccattgccgctgtcttgctcatgcatatgcctgctgagcaagccttctggtgcctggtacagatctgtgagaagtacctgcccggctactacagcgagaaactggaggcgatccagctggacggggagatccttttctcgctgttgcagaaggtgtcgccggtggcccacaagcacctcagccgtcagaagatcgacccgctcctctatatgacagaatggttcatgtgcgccttctcccgaaccttgccctggagctctgtgctgcgtgtctgggacatgttcttctgtgaaggggtcaagatcatcttccgggtggggctggtgctgctgaagcacgcgctgggctcccctgagaaggtcaaagcctgccagggccagtacgagaccatcgagcgactgcggagcctcagccccaagatcatgcaggaggcctttctggtccaggaggtggtggagttgcccgtgacagagcgccagattgagcgcgaacacctcattcagctgcggcgctggcaggagacccggggtgagctgcagtgccgctccccgcccaggctgcatggtgccaaggctatcttggatgcagaacctggtccccggcctgccctacaaccttcaccatccatccgcctgcccctagatgcccccctccctggctccaaagccaagcccaagccacccaagcaggcccagaaggagcagcggaaacagatgaaggggagagggcagctggagaagcccccagccccaaatcaagccatggtggtggccgctgcaggagatgcatgtcccccacagcatgtgcccccgaaggactcagcccccaaggactcagcccctcaggatttggctccccaggtctcagcccaccaccgctcccaggagagcttgacgtcccaagagagtgaggacacctacttgtaaccctggcagctaaggcctccagggcggggtctccatataactacacggttcatgaactgacattccacatcctgcccaccctctgagggccaagctgcctggccactgggctgggctggagtctggctggtccaacacagattctgcctggtccaacacagattctgcctgagcctccttatttattttctttacagtggcactcaggctggcccagccagggcaggcagaagctagggcctggggggtggggcctccttcagccccctcctcctgggggatgctccccagggttagggtgctggtgtgaggggaaagggtggggtgttctttgtgtaaaatagaaacatggttttgtacagaaataaacagccttgtataga

SEQ ID NO: 454700 - DNA, 1782 bp, Homo sapiens
aggcgccgcgcgtgggcggggcgtcggcggcagcagggcggctgaggtggccgctggagctcaggcggcgggcgcggctgggatggcgaagagcaacggagagaatgggccgcgcgcgcccgcggccggggaaagcctgtcgggaacccgggagagcctggcccagggccccgacgccgcaaccaccgacgaactcagctctctcgggtctgactcggaggccaacggcttcgccgagcgccgcatcgacaagttcggcttcatcgtgggctcgcagggcgccgagggcgcgctggaggaagtacccctggaggtgctgaggcagagggagtccaagtggctggacatgctcaacaactgggacaaatggatggccaagaagcacaaaaagattcgtctgcggtgccaaaagggcatcccgccttctctgcggggccgtgcttggcagtacctgtcaggaggcaaggtgaagttacagcagaaccctggaaagtttgacgagctggacatgtcccctggggaccccaagtggctggacgtgattgagcgtgacctgcaccggcagttcccattccatgagatgtttgtgtcccgggggggccacggccagcaggacctattccgtgtgctgaaggcctacacgctgtaccggcccgaggagggctactgccaggcccaggcgcccattgccgctgtcttgctcatgcatatgcctgctgagcaagccttctggtgcctggtacagatctgtgagaagtacctgcccggctactacagcgagaaactggaggcgatccagctggacggggagatccttttctcgctgttgcagaaggtgtcgccggtggcccacaagcacctcagccgtcagaagatcgacccgctcctctatatgacagaatggttcatgtgcgccttctcccgaaccttgccctggagctctgtgctgcgtgtctgggacatgttcttctgtgaaggggtcaagatcatcttccgggtggggctggtgctgctgaagcacgcgctgggctcccctgagaaggtcaaagcctgccagggccagtacgagaccatcgagcgactgcggagcctcagccccaagatcatgcaggaggcctttctggtccaggaggtggtggagttgcccgtgacagagcgccagattgagcgcgaacacctcattcagctgcggcgctggcaggagacccgggagctgcccccatctgagttcctgcaagtagctgaggccacatggctggtgctgaacgtgtcgtctcacagcggtgcggcagtgcaggctgctggggtcaccaagatcgcccgttcggtcatcgcgccactggccgagcaccacgtgtctgtgctgatgctgtccacttaccagacggacttcatcctggtgcgggagcaggacctgtccgtggtgatccacacgctggcccaggagttcgacatttaccgcgaggtggagtgggcaggtgctagcctgactgcgtgtctgcccatgcaggggaacacggtgctcggggcttaagcccccaacccatcactccctgcgcagcctcggcgtttgcacagtccctgcctgaggcctgagccattccccaaaggcttcctgggccagctgcccccctgacctccgttctgcctctggtggggttgccttccctggccaggtgagtcctgacagtgcctctccctcctggggcctccaaggaaagtattttgacatctctctctcttctgtttttattgacttgttaataaaggactttgtagtga

SEQ ID NO: 454701 - DNA, 1567 bp, Homo sapiens
aagcttggcacgaggctggaagaattcgcggcctgggtctagttggcggcggggtcgggtccgcgcgagccgcgatggagctgcacatcctagaacaccgggtgcgggtgctgagcgtcgcccgtcccggtctctggctctacacccacccgctcatcaagctgctcttcctgccccgccgcagccggtgcaagttcttcagcctgacggagacccctgaggattacacgcttatggtggacgaggagggctttaaagagctgcccccatctgagttcctgcaagtagctgaggccacatggctggtgctgaacgtgtcgtctcacagcggtgcggcagtgcaggctgctggggtcaccaagatcgcccgttcggtcatcgcgccactggccgagcaccacgtgtctgtgctgatgctgtccacttaccagacggacttcatcctggtgcgggagcaggacctgtccgtggtgatccacacgctggcccaggagttcgacatttaccgcgaggtgggcggagagcctgtgcctgtgacgagggatgattccagcaatggctttccccgcactcagcatgggcccagccccacggtgcatcccatccagagcccacagaaccgcttctgtgtcctcacactggaccctgagacgcttccagccatcgccaccaccctcatagatgtcctcttctactcgcacagcacccccaaggaggcagcctctagcagtcctgaacccagctccatcacgttctttgccttctccctcatcgagggttatatctccattgtcatggatgctgaaacacagaaaaagttccccagtgacctcctgctgaccagctcctcgggggagctgtggaggatggtgcgcatcggtggacagcccctgggctttgatgaatgtggcatcgtggcacagattgcaggtcccctggctgccgctgacatctctgcctactacatcagcaccttcaacttcgaccacgccctgggtgcccgaggacggtatcggcagcgtcatcgaggtcctccagcggcggcaggaaggcctggcttcctgaggcccatgggcaacagagcagcctccctgctctcccctcgacccaggcttccaaagacttctctaagctatttccttaagctctggaacgagccccctgttctgctggggaccctcgttccgctctctgtatgtaagctgcgtgcaggcaccggcttttacgcggacacctgtgtacactcacaggtggagtgggcaggtgctagcctgactgcgtgtctgcccatgcaggggaacacggtgctcggggcttaagcccccaacccatcactccctgcgcagcctcggcgtttgcacagtccctgcctgaggcctgagccattccccaaaggcttcctgggccagctgcccccctgacctccgttctgcctctggtggggttgccttccctggccaggtgagtcctgacagtgcctctccctcctggggcctccaaggaaagtattttgacatctctctctcttctgtttttattgacttgttaataaaggactttgtagtga

SEQ ID NO: 454702 - DNA, 1679 bp, Homo sapiens
cgggatcgggcagaaccgcgatgaagcgtgcagcagtctataagcaccgggtgcggatgctgagcgatctcccgtgccggtctctgtgtctatgcccacaccgcatcctcaatcttggtcttaccatgccccaatgcagtgtggctgcagtgttacttactactgtggatcggataacccgctgtagtgacttactagcagctataatgagtgcgacgaagagaaggcgcttgtatatgatactctggcgatcattctgagatgggatggctactctcctccattcaacctgtagtcttgctaaatgtcgcccctggtggtgccatgtggtacaaagcttctgctaacccacagaagacaccgtagtgagagctgcccccatctgagttcctgcaagtagctgaggccacatggctggtgctgaacgtgtcgtctcacagcggtgcggcagtgcaggctgctggggtcaccaagatcgcccgttcggtcatcgcgccactggccgagcaccacgtgtctgtgctgatgctgtccacttaccagacggacttcatcctggtgcgggagcaggacctgtccgtggtgatccacacgctggcccaggagttcgacatttaccgcgaggtgggcggagagcctgtgcctgtgacgagggatgattccagcaatggctttccccgcactcagcatgggcccagccccacggtgcatcccatccagagcccacagaaccgcttctgtgtcctcacactggaccctgagacgcttccagccatcgccaccaccctcatagatgtcctcttctactcgcacagcacccccaaggaggcagcctctagcagtcctgaacccagctccatcacgttctttgccttctccctcatcgagggttatatctccattgtcatggatgctgaaacacagaaaaagttccccagtgacctcctgctgaccagctcctcgggggagctgtggaggatggtgcgcatcggtggacagcccctgggctttgatgaatgtggcatcgtggcacagattgcaggtcccctggctgccgctgacatctctgcctactacatcagcaccttcaacttcgaccacgccctgggtgcccgaggacggtatcggcagcgtcatcgaggtcctccagcggcggcaggaaggcctggcttcctgaggcccatgggcaacagagcagcctccctgctctcccctcgacccaggcttccaaagacttctctaagctatttccttaagctctggaacgagccccctgttctgctggggaccctcgttccgctctctgtatgtaagctgcgtgcaggcaccggcttttacgcggacacctgtgtacactcacaggtggagtgggcaggtgctagcctgactgcgtgtctgcccatgcaggggaacacggtgctcggggcttaagcccccaacccatcactccctgcgcagcctcggcgtttgcacagtccctgcctgaggcctgagccattccccaaaggcttcctgggccagctgcccccctgacctccgttctgcctctggtggggttgccttccctggccaggtgagtcctgacagtgcctctccctcctggggcctccaaggaaagtattttgacatctctctctcttctgtttttattgacttgttaataaaggactttgtagtga

SEQ ID NO: 454703 - DNA, 1453 bp, Homo sapiens
aagcttggcacgaggctggaagaattcgcggcctgggtctagttggcggcggggtcgggtccgcgcgagccgcgatggagctgcacatcctagaacaccgggtgcgggtgctgagcgtcgcccgtcccggtctctggctctacacccacccgctcatcaagctgctcttcctgccccgccgcagccggtgcaagttcttcagcctgacggagacccctgaggattacacgcttatggtggacgaggagggctttaaagagctgcccccatctgagttcctgcaagtagctgaggccacatggctggtgctgaacgtgtcgtctcacagcggtgcggcagtgcaggctgctggggtcaccaagatcgcccgttcggtcatcgcgccactggccgagcaccacgtgtctgtgctgatgctgtccacttaccagacggacttcatcctggtgcgggagcaggacctgtccgtggtgatccacacgctggcccaggagttcgacatttaccgcgaggtgggcggagagcctgtgcctgtgacgagggatgattccagcaatggctttccccgcactcagcatgggcccagccccacggtgcatcccatccagagcccacagaaccgcttctgtgtcctcacactggaccctgagacgcttccagccatcgccaccaccctcatagatgtcctcttctactcgcacaggttccccagtgacctcctgctgaccagctcctcgggggagctgtggaggatggtgcgcatcggtggacagcccctgggctttgatgaatgtggcatcgtggcacagattgcaggtcccctggctgccgctgacatctctgcctactacatcagcaccttcaacttcgaccacgccctgggtgcccgaggacggtatcggcagcgtcatcgaggtcctccagcggcggcaggaaggcctggcttcctgaggcccatgggcaacagagcagcctccctgctctcccctcgacccaggcttccaaagacttctctaagctatttccttaagctctggaacgagccccctgttctgctggggaccctcgttccgctctctgtatgtaagctgcgtgcaggcaccggcttttacgcggacacctgtgtacactcacaggtggagtgggcaggtgctagcctgactgcgtgtctgcccatgcaggggaacacggtgctcggggcttaagcccccaacccatcactccctgcgcagcctcggcgtttgcacagtccctgcctgaggcctgagccattccccaaaggcttcctgggccagctgcccccctgacctccgttctgcctctggtggggttgccttccctggccaggtgagtcctgacagtgcctctccctcctggggcctccaaggaaagtattttgacatctctctctcttctgtttttattgacttgttaataaaggactttgtagtga

SEQ ID NO: 454704 - DNA, 990 bp, Homo sapiens
aagcttggcacgaggctggaagaattcgcggcctgggtctagttggcggcggggtcgggtccgcgcgagccgcgatggagctgcacatcctagaacaccgggtgcgggtgctgagcgtcgcccgtcccggtctctggctctacacccacccgctcatcaagctgctcttcctgccccgccgcagccggtgcaagttcttcagcctgacggagacccctgaggattacacgcttatggtggacgaggagggctttaaagagctgcccccatctgagttcctgcaagtagctgaggccacatggctggtgctgaacgtgtcgtctcacagcggtgcggcagtgcaggctgctggggtcaccaagatcgcccgttcggtcatcgcgccactggccgagcaccacgtgtctgtgctgatgctgtccacttaccagacggacttcatcctggtgcgggagcaggacctgtccgtggtgatccacacgctggcccaggagttcgacatttaccgcgaggtgggcggagagcctgtgcctgtgacgagggatgattccagcaatggctttccccgcactcagcatgggcccagccccacggtgcatcccatccagagcccacagaaccgcttctgtgtcctcacactggaccctgagacgcttccagccatcgccaccaccctcatagatgtcctcttctactcgcacaggtggaccttggaacttcgtctttgtcctcacagcactgttccctacactctgtcccaccactttccgcccatctatcagttttgcacctcttgcttgtcctctcttggggttcctggcagcccatgatgctcacttgtgcttcactgatgttcggggaaggttcttgccccaaagctggatccctttccagtggggtcgtctgagccatgccctggtctggccctctcaccgtggaatcctttgtttttggcacaggctgggttcattgtcctcccccatccccacc

SEQ ID NO: 454705 - DNA, 2520 bp, Homo sapiens
aggcgccgcgcgtgggcggggcgtcggcggcagcagggcggctgaggtggccgctggagctcaggcggcgggcgcggctgggatggcgaagagcaacggagagaatgggccgcgcgcgcccgcggccggggaaagcctgtcgggaacccgggagagcctggcccagggccccgacgccgcaaccaccgacgaactcagctctctcgggtctgactcggaggccaacggcttcgccgagcgccgcatcgacaagttcggcttcatcgtgggctcgcagggcgccgagggcgcgctggaggaagtacccctggaggtgctgaggcagagggagtccaagtggctggacatgctcaacaactgggacaaatggatggccaagaagcacaaaaagattcgtctgcggtgccaaaagggcatcccgccttctctgcggggccgtgcttggcagtacctgtcaggaggcaaggtgaagttacagcagaaccctggaaagtttgacgagctggacatgtcccctggggaccccaagtggctggacgtgattgagcgtgacctgcaccggcagttcccattccatgagatgtttgtgtcccgggggggccacggccagcaggacctattccgtgtgctgaaggcctacacgctgtaccggcccgaggagggctactgccaggcccaggcgcccattgccgctgtcttgctcatgcatatgcctgctgagcaagccttctggtgcctggtacagatctgtgagaagtacctgcccggctactacagcgagaaactggaggcgatccagctggacggggagatccttttctcgctgttgcagaaggtgtcgccggtggcccacaagcacctcagccgtcagaagatcgacccgctcctctatatgacagaatggttcatgtgcgccttctcccgaaccttgccctggagctctgtgctgcgtgtctgggacatgttcttctgtgaaggggtcaagatcatcttccgggtggggctggtgctgctgaagcacgcgctgggctcccctgagaaggtcaaagcctgccagggccagtacgagaccatcgagcgactgcggagcctcagccccaagatcatgcaggaggcctttctggtccaggaggtggtggagttgcccgtgacagagcgccagattgagcgcgaacacctcattcagctgcggcgctggcaggagacccgggagctgcccccatctgagttcctgcaagtagctgaggccacatggctggtgctgaacgtgtcgtctcacagcggtgcggcagtgcaggctgctggggtcaccaagatcgcccgttcggtcatcgcgccactggccgagcaccacgtgtctgtgctgatgctgtccacttaccagacggacttcatcctggtgcgggagcaggacctgtccgtggtgatccacacgctggcccaggagttcgacatttaccgcgaggtgggcggagagcctgtgcctgtgacgagggatgattccagcaatggctttccccgcactcagcatgggcccagccccacggtgcatcccatccagagcccacagaaccgcttctgtgtcctcacactggaccctgagacgcttccagccatcgccaccaccctcatagatgtcctcttctactcgcacagcacccccaaggaggcagcctctagcagtcctgaacccagctccatcacgttctttgccttctccctcatcgagggttatatctccattgtcatggatgctgaaacacagaaaaagttccccagtgacctcctgctgaccagctcctcgggggagctgtggaggatggtgcgcatcggtggacagcccctgggctttgatgaatgtggcatcgtggcacagattgcaggtcccctggctgccgctgacatctctgcctactacatcagcaccttcaacttcgaccacgccctgggtgcccgaggacggtatcggcagcgtcatcgaggtcctccagcggcggcaggaaggcctggcttcctgaggcccatgggcaacagagcagcctccctgctctcccctcgacccaggcttccaaagacttctctaagctatttccttaagctctggaacgagccccctgttctgctggggaccctcgttccgctctctgtatgtaagctgcgtgcaggcaccggcttttacgcggacacctgtgtacactcacaggtggagtgggcaggtgctagcctgactgcgtgtctgcccatgcaggggaacacggtgctcggggcttaagcccccaacccatcactccctgcgcagcctcggcgtttgcacagtccctgcctgaggcctgagccattccccaaaggcttcctgggccagctgcccccctgacctccgttctgcctctggtggggttgccttccctggccaggtgagtcctgacagtgcctctccctcctggggcctccaaggaaagtattttgacatctctctctcttctgtttttattgacttgttaataaaggactttgtagtga

SEQ ID NO: 454706 - DNA, 2282 bp, Homo sapiens
aggcgccgcgcgtgggcggggcgtcggcggcagcagggcggctgaggtggccgctggagctcaggcggcgggcgcggctgggatggcgaagagcaacggagagaatgggccgcgcgcgcccgcggccggggaaagcctgtcgggaacccgggagagcctggcccagggccccgacgccgcaaccaccgacgaactcagctctctcgggtctgactcggaggccaacggcttcgccgagcgccgcatcgacaagttcggcttcatcgtgggctcgcagggcgccgagggcgcgctggaggaagtacccctggaggtgctgaggcagagggagtccaagtggctggacatgctcaacaactgggacaaatggatggccaagaagcacaaaaagattcgtctgcggtgccaaaagggcatcccgccttctctgcggggccgtgcttggcagtacctgtcaggaggcaaggtgaagttacagcagaaccctggaaagtttgacgagctggacatgtcccctggggaccccaagtggctggacgtgattgagcgtgacctgcaccggcagttcccattccatgagatgtttgtgtcccgggggggccacggccagcaggacctattccgtgtgctgaaggcctacacgctgtaccggcccgaggagggctactgccaggcccaggcgcccattgccgctgtcttgctcatgcatatgcctgctgagcaagccttctggtgcctggtacagatctgtgagaagtacctgcccggctactacagcgagaaactggaggcgatccagctggacggggagatccttttctcgctgttgcagaaggtgtcgccggtggcccacaagcacctcagccgtcagaagatcgacccgctcctctatatgacagaatggttcatgtgcgccttctcccgaaccttgccctggagctctgtgctgcgtgtctgggacatgttcttctgtgaaggggtcaagatcatcttccgggtggggctggtgctgctgaagcacgcgctgggctcccctgagaaggtcaaagcctgccagggccagtacgagaccatcgagcgactgcggagcctcagccccaagatcatgcaggaggcctttctggtccaggaggtggtggagttgcccgtgacagagcgccagattgagcgcgaacacctcattcagctgcggcgctggcaggagacccgggagctgcccccatctgagttcctgcaagtagctgaggccacatggctggtgctgaacgtgtcgtctcacagcggtgcggcagtgcaggctgctggggtcaccaagatcgcccgttcggtcatcgcgccactggccgagcaccacgtgtctgtgctgatgctgtccacttaccagacggacttcatcctggtgcgggagcaggacctgtccgtggtgatccacacgctggcccaggagttcgacatttaccgcgaggtgggcggagagcctgtgcctgtgacgagggatgattccagcaatggctttccccgcactcagcatggttccccagtgacctcctgctgaccagctcctcgggggagctgtggaggatggtgcgcatcggtggacagcccctgggctttgatgaatgtggcatcgtggcacagattgcaggtcccctggctgccgctgacatctctgcctactacatcagcaccttcaacttcgaccacgccctgggtgcccgaggacggtatcggcagcgtcatcgaggtcctccagcggcggcaggaaggcctggcttcctgaggcccatgggcaacagagcagcctccctgctctcccctcgacccaggcttccaaagacttctctaagctatttccttaagctctggaacgagccccctgttctgctggggaccctcgttccgctctctgtatgtaagctgcgtgcaggcaccggcttttacgcggacacctgtgtacactcacaggtggagtgggcaggtgctagcctgactgcgtgtctgcccatgcaggggaacacggtgctcggggcttaagcccccaacccatcactccctgcgcagcctcggcgtttgcacagtccctgcctgaggcctgagccattccccaaaggcttcctgggccagctgcccccctgacctccgttctgcctctggtggggttgccttccctggccaggtgagtcctgacagtgcctctccctcctggggcctccaaggaaagtattttgacatctctctctcttctgtttttattgacttgttaataaaggactttgtagtga

SEQ ID NO: 454707 - DNA, 1892 bp, Homo sapiens
aggcgccgcgcgtgggcggggcgtcggcggcagcagggcggctgaggtggccgctggagctcaggcggcgggcgcggctgggatggcgaagagcaacggagagaatgggccgcgcgcgcccgcggccggggaaagcctgtcgggaacccgggagagcctggcccagggccccgacgccgcaaccaccgacgaactcagctctctcgggtctgactcggaggccaacggcttcgccgagcgccgcatcgacaagttcggcttcatcgtgggctcgcagggcgccgagggcgcattcgtctgcggtgccaaaagggcatcccgccttctctgcggggccgtgcttggcagtacctgtcaggaggcaaggtgaagttacagcagaaccctggaaagtttgacgagctggacatgtcccctggggaccccaagtggctggacgtgattgagcgtgacctgcaccggcagttcccattccatgagatgtttgtgtcccgggggggccacggccagcaggacctattccgtgtgctgaaggcctacacgctgtaccggcccgaggagggctactgccaggcccaggcgcccattgccgctgtcttgctcatgcatatgcctgctgagcaagccttctggtgcctggtacagatctgtgagaagtacctgcccggctactacagcgagaaactggaggcgatccagctggacggggagatccttttctcgctgttgcagaaggtgtcgccggtggcccacaagcacctcagccgtcagaagatcgacccgctcctctatatgacagaatggttcatgtgcgccttctcccgaaccttgccctggagctctgtgctgcgtgtctgggacatgttcttctgtgaaggggtcaagatcatcttccgggtggggctggtgctgctgaagcacgcgctgggctcccctgagaaggtcaaagcctgccagggccagtacgagaccatcgagcgactgcggagcctcagccccaagatcatgcaggaggcctttctggtccaggaggtggtggagttgcccgtgacagagcgccagattgagcgcgaacacctcattcagctgcggcgctggcaggagacccggggtgagctgcagtgccgctccccgcccaggctgcatggtgccaaggctatcttggatgcagaacctggtccccggcctgccctacaaccttcaccatccatccgcctgcccctagatgcccccctccctggctccaaagccaagcccaagccacccaagcaggcccagaaggagcagcggaaacagatgaaggggagagggcagctggagaagcccccagccccaaatcaagccatggtggtggccgctgcaggagatgcatgtcccccacagcatgtgcccccgaaggactcagcccccaaggactcagcccctcaggatttggctccccaggtctcagcccaccaccgctcccaggagagcttgacgtcccaagagagtgaggacacctacttgtaaccctggcagctaaggcctccagggcggggtctccatataactacacggttcatgaactgacattccacatcctgcccaccctctgagggccaagctgcctggccactgggctgggctggagtctggctggtccaacacagattctgcctggtccaacacagattctgcctgagcctccttatttattttctttacagtggcactcaggctggcccagccagggcaggcagaagctagggcctggggggtggggcctccttcagccccctcctcctgggggatgctccccagggttagggtgctggtgtgaggggaaagggtggggtgttctttgtgtaaaatagaaacatggttttgtacagaaataaacagccttgtataga

SEQ ID NO: 454708 - DNA, 1282 bp, Homo sapiens
aggcgccgcgcgtgggcggggcgtcggcggcagcagggcggctgaggtggccgctggagctcaggcggcgggcgcggctgggatggcgaagagcaacggagagaatgggccgcgcgcgcccgcggccggggaaagcctgtcgggaacccgggagagcctggcccagggccccgacgccgcaaccaccgacgaactcagctctctcgggtctgactcggaggccaacggcttcgccgagcgccgcatcgacaagttcggcttcatcgtgggctcgcagggcgccgagggcgcgctggaggaagtacccctggaggtgctgaggcagagggagtccaagtggctggacatgctcaacaactgggacaaatggatggccaagaagcacaaaaagattcgtctgcggtgccaaaagggcatcccgccttctctgcggggccgtgcttggcagtacctgtcaggaggcaaggtgaagttacagcagaaccctggaaagtttgacgagctggacatgtcccctggggaccccaagtggctggacgtgattgagcgtgacctgcaccggcagttcccattccatgagatgtttgtgtcccgggggggccacggccagcaggacctattccgtgtgctgaaggcctacacgctgtaccggcccgaggagggctactgccaggcccaggcgcccattgccgctgtcttgctcatgcatatgcctgctgagcaagccttctggtgcctggtacagatctgtgagaagtacctgcccggctactacagcgagaaactggaggcgatccagctggacggggagatccttttctcgctgttgcagaaggtgtcgccggtggcccacaagcacctcagccgtcagaagatcgacccgctcctctatatgacagaatggttcatgtgcgcctccagggcggggtctccatataactacacggttcatgaactgacattccacatcctgcccaccctctgagggccaagctgcctggccactgggctgggctggagtctggctggtccaacacagattctgcctggtccaacacagattctgcctgagcctccttatttattttctttacagtggcactcaggctggcccagccagggcaggcagaagctagggcctggggggtggggcctccttcagccccctcctcctgggggatgctccccagggttagggtgctggtgtgaggggaaagggtggggtgttctttgtgtaaaatagaaacatggttttgtacagaaataaacagccttgtataga

SEQ ID NO: 454709 - DNA, 1659 bp, Homo sapiens
aagcttggcacgaggctggaagaattcgcggcctgggtctagttggcggcggggtcgggtccgcgcgagccgcgatggagctgcacatcctagaacaccgggtgcgggtgctgagcgtcgcccgtcccggtctctggctctacacccacccgctcatcaagctgctcttcctgccccgccgcagccggtgcgcgcccgggttcgggagcgcagataggggctgggggctctgctctcgctccgggccagggtcggaggattaggatcgccgtaaggcaggtgcaagttcttcagcctgacggagacccctgaggattacacgcttatggtggacgaggagggctttaaagagctgcccccatctgagttcctgcaagtagctgaggccacatggctggtgctgaacgtgtcgtctcacagcggtgcggcagtgcaggctgctggggtcaccaagatcgcccgttcggtcatcgcgccactggccgagcaccacgtgtctgtgctgatgctgtccacttaccagacggacttcatcctggtgcgggagcaggacctgtccgtggtgatccacacgctggcccaggagttcgacatttaccgcgaggtgggcggagagcctgtgcctgtgacgagggatgattccagcaatggctttccccgcactcagcatgggcccagccccacggtgcatcccatccagagcccacagaaccgcttctgtgtcctcacactggaccctgagacgcttccagccatcgccaccaccctcatagatgtcctcttctactcgcacagcacccccaaggaggcagcctctagcagtcctgaacccagctccatcacgttctttgccttctccctcatcgagggttatatctccattgtcatggatgctgaaacacagaaaaagttccccagtgacctcctgctgaccagctcctcgggggagctgtggaggatggtgcgcatcggtggacagcccctgggctttgatgaatgtggcatcgtggcacagattgcaggtcccctggctgccgctgacatctctgcctactacatcagcaccttcaacttcgaccacgccctgggtgcccgaggacggtatcggcagcgtcatcgaggtcctccagcggcggcaggaaggcctggcttcctgaggcccatgggcaacagagcagcctccctgctctcccctcgacccaggcttccaaagacttctctaagctatttccttaagctctggaacgagccccctgttctgctggggaccctcgttccgctctctgtatgtaagctgcgtgcaggcaccggcttttacgcggacacctgtgtacactcacaggtggagtgggcaggtgctagcctgactgcgtgtctgcccatgcaggggaacacggtgctcggggcttaagcccccaacccatcactccctgcgcagcctcggcgtttgcacagtccctgcctgaggcctgagccattccccaaaggcttcctgggccagctgcccccctgacctccgttctgcctctggtggggttgccttccctggccaggtgagtcctgacagtgcctctccctcctggggcctccaaggaaagtattttgacatctctctctcttctgtttttattgacttgttaataaaggactttgtagtga

SEQ ID NO: 454710 - DNA, 1496 bp, Homo sapiens
aagcttggcacgaggctggaagaattcgcggcctgggtctagttggcggcggggtcgggtccgcgcgagccgcgatggagctgcacatcctagaacaccgggtgcgggtgctgagcgtcgcccgtcccggtctctggctctacacccacccgctcatcaagctgctcttcctgccccgccgcagccgagctgcccccatctgagttcctgcaagtagctgaggccacatggctggtgctgaacgtgtcgtctcacagcggtgcggcagtgcaggctgctggggtcaccaagatcgcccgttcggtcatcgcgccactggccgagcaccacgtgtctgtgctgatgctgtccacttaccagacggacttcatcctggtgcgggagcaggacctgtccgtggtgatccacacgctggcccaggagttcgacatttaccgcgaggtgggcggagagcctgtgcctgtgacgagggatgattccagcaatggctttccccgcactcagcatgggcccagccccacggtgcatcccatccagagcccacagaaccgcttctgtgtcctcacactggaccctgagacgcttccagccatcgccaccaccctcatagatgtcctcttctactcgcacagcacccccaaggaggcagcctctagcagtcctgaacccagctccatcacgttctttgccttctccctcatcgagggttatatctccattgtcatggatgctgaaacacagaaaaagttccccagtgacctcctgctgaccagctcctcgggggagctgtggaggatggtgcgcatcggtggacagcccctgggctttgatgaatgtggcatcgtggcacagattgcaggtcccctggctgccgctgacatctctgcctactacatcagcaccttcaacttcgaccacgccctgggtgcccgaggacggtatcggcagcgtcatcgaggtcctccagcggcggcaggaaggcctggcttcctgaggcccatgggcaacagagcagcctccctgctctcccctcgacccaggcttccaaagacttctctaagctatttccttaagctctggaacgagccccctgttctgctggggaccctcgttccgctctctgtatgtaagctgcgtgcaggcaccggcttttacgcggacacctgtgtacactcacaggtggagtgggcaggtgctagcctgactgcgtgtctgcccatgcaggggaacacggtgctcggggcttaagcccccaacccatcactccctgcgcagcctcggcgtttgcacagtccctgcctgaggcctgagccattccccaaaggcttcctgggccagctgcccccctgacctccgttctgcctctggtggggttgccttccctggccaggtgagtcctgacagtgcctctccctcctggggcctccaaggaaagtattttgacatctctctctcttctgtttttattgacttgttaataaaggactttgtagtga

SEQ ID NO: 454711 - DNA, 1182 bp, Homo sapiens
aggcgccgcgcgtgggcggggcgtcggcggcagcagggcggctgaggtggccgctggagctcaggcggcgggcgcggctgggatggcgaagagcaacggagagaatgggccgcgcgcgcccgcggccggggaaagcctgtcgggaacccgggagagcctggcccagggccccgacgccgcaaccaccgacgaactcagctctctcgggtctgactcggaggccaacggcttcgccgagcgccgcatcgacaagttcggcttcatcgtgggctcgcagggcgccgagggcgcattcgtctgcggtgccaaaagggcatcccgccttctctgcggggccgtgcttggcagtacctgtcaggaggcaaggtgaagttacagcagaaccctggaaagtttgacgagctggacatgtcccctggggaccccaagtggctggacgtgattgagcgtgacctgcaccggcagttcccattccatgagatgtttgtgtcccgggggggccacggccagcaggacctattccgtgtgctgaaggcctacacgctgtaccggcccgaggagggctactgccaggcccaggcgcccattgccgctgtcttgctcatgcatatgcctgctgagcaagccttctggtgcctggtacagatctgtgagaagtacctgcccggctactacagcgagaaactggaggcgatccagctggacggggagatccttttctcgctgttgcagaaggtgtcgccggtggcccacaagcacctcagccgtcagaagatcgacccgctcctctatatgacagaatggttcatgtgcgcctccagggcggggtctccatataactacacggttcatgaactgacattccacatcctgcccaccctctgagggccaagctgcctggccactgggctgggctggagtctggctggtccaacacagattctgcctggtccaacacagattctgcctgagcctccttatttattttctttacagtggcactcaggctggcccagccagggcaggcagaagctagggcctggggggtggggcctccttcagccccctcctcctgggggatgctccccagggttagggtgctggtgtgaggggaaagggtggggtgttctttgtgtaaaatagaaacatggttttgtacagaaataaacagccttgtataga

SEQ ID NO: 454712 - DNA, 2195 bp, Homo sapiens
atgaccttgccagcatggaggataaaacagagaaatggtcttcccagcctgaaggtccacttaaattgaaagcttcaagtactgatatgccatcccagatttctgtggttaatgtggatcaactgtgggaagattctgtcctaactgtcaaattccccaaattaatggtaccaaggttctccttcgctgcccccagctcagaggatgatgtgttcatccccactgtgagggaagtgcagtgtccagaggccaatattgatacagccctttgtaaggaaagtccggggctctggggagccagcatcctgaaggcaggtgctggggtccctggggagcagcctgtggaccttaacctgcctttggaagctcccccaatttcaaaggtcagagtgcatattcagggtgctcaggttgaaagtcaagaggtcactatacacagcatagtgacaccagagtttgtagatctctcagtacccaggactttttccactcagattgtgcgggaatcagagatccccacgtcagagattcaaacaccttcgtacggattttccttattaaaagtgaaaatcccagagccccacacgcaggctagagtgtacacaacaatgactcaacactctaggactcaggagggcacagaagaggctcccatacaagccaccccaggagtagactccatttctggagatctccagcctgacactggagaaccatttgagatgatctcttccagcgtcaatgtactgggacagcaaacactcacatttgaagttccttctggccaccagcttgcagacagctgttcagatgaggagccagcagaaattcttgagtttccccctgatgatagccaagaggcaaccacaccactggcagatgaaggcagggctccaaaagacaaaccagaaagtaaaaaatctggtctgctctggttttggcttccaaacattgggttttcctcttctgttgatgagacaggtgttgattccaaaaatgacgtccagagatctgctcccattcaaacacagcctgaggcacgaccagaggcagaactgcctaaaaaacaggagaaggcaggctggttccgatttcccaaattagggttctcctcatctcctaccaagaaaagcaaaagcaccgaagatggggcagagctggaagaacaaaaacttcaagaagaaacaatcacgttttttgatgcccgagaaagtttctcccctgaagagaaggaagagggtgaactgatcgggcctgtgggcactgggctggactccagagtgatggtgacatccgcggcaagaacagagttaatcctgcccgagcaggacagaaaagctgacgatgaaagcaaagggtcaggcctgggaccaaatgaaggctgagaggtatggctcatcggtacaagagagatgcaaaaaactaagttggaaagtaaaggctacacacacatatggagcaccccatcccacagcacattacatccacctcacttcacagaacggagaacagagcagaaatgaccagaacacctttgtcaccatcacacagccctcctaaaatggaaccaaagcttcccagctccctcaaagctttggatgcaaagaaggcaccctgacttccacaagacaccagaattcacacggtactcagaggcactgctggggaagtttgttggtctttattagataaatttccagagacctgtccataatacccaacagaacatgactgtttctttgaggaaagggttataatgtctgtggtgtacaagtcgtttttggtataacttctttcctgctgctgctgcttcccggcaaacatagttttcctatttcaggcagagtgcggtatattccaggaaacactgtttcctactcacttagcttacttctttgttgaatgcctcactaatggcaagtttcaagatgttttgggtgacaatgcacacatgctgggcaaaagggtgatggccagtggctggcagctgggccagcagaagctaggacatctgtgagttgtcattctcatctatccatgtccactggcctgccagcatccgccagtgccttgccagtgtgcacggtcccacactgtggcccctgagtcccctaatgtacacgctgcagccagaatgcagatggagctggcttggctgttccctggatgggcaataaagaaagtgctgcatccca

SEQ ID NO: 454713 - DNA, 821 bp, Homo sapiens
atgaccttgccagcatggaggataaaacagagaaatggtcttcccagcctgaaggtccacttaaattgaaagcttcaagtactgatatgccatcccagatttctgtggttaatgtggatcaactgtgggaagattctgtcctaactgtcaaattccccaaattaatggtaccaaggttctccttcgctgcccccagctcagaggatgatgtgttcatccccactgtgagggaagtgcagtgtccagaggccaatattgatacagccctttgtaaggaaagtccggggctctggggagccagcatcctgaaggcaggtgctggggtccctggggagcagcctgtggaccttaacctgcctttggaagctcccccaatttcaaaggtcagagtgcatattcagggtgctcaggttgaaagtcaagaggtcactatacacagcatagtgacaccagagtttgtagatctctcagtacccaggactttttccactcagattgtgcgggaatcagagatccccacgtcagagattcaaacaccttcgtacggattttccttattaaaagtgaaaatcccagagccccacacgcaggctagagtgtacacaacaatgactcaacactctaggactcaggagggcacagaagaggctcccatacaagccaccccaggagtagactccatttctggagatctccagcctgacactggagaaccatttgagatgatctcttccagcgtcaatgtactgggaagccggtggccagaaggaacttcaaatgtgagtgtttgctgtcccagtacattgacgctggaagagatc

SEQ ID NO: 454714 - DNA, 1031 bp, Homo sapiens
  misc_feature (62)..(62): n is a, c, g, or t
  misc_feature (64)..(64): n is a, c, g, or t
caaccaaacccaatggcaaggaacacaattcgagaaacatccgtttggagccggaagtttcncngaaagaagagggtgaactgatcgggcctgtgggcactgggctggactccagagtgatggtgacatccgcggcaagaacagagttaatcctgcccgagcaggacagaaaagctgacgatgaaagcaaagggtcaggcctgggaccaaatgaaggctgagaggtatggctcatcggtacaagagagatgcaaaaaactaagttggaaagtaaaggctacacacacatatggagcaccccatcccacagcacattacatccacctcacttcacagaacggagaacagagcagaaatgaccagaacacctttgtcaccatcacacagccctcctaaaatggaaccaaagcttcccagctccctcaaagctttggatgcaaagaaggcaccctgacttccacaagacaccagaattcacacggtactcagaggcactgctggggaagtttgttggtctttattagataaatttccagagacctgtccataatacccaacagaacatgactgtttctttgaggaaagggttataatgtctgtggtgtacaagtcgtttttggtataacttctttcctgctgctgctgcttcccggcaaacatagttttcctatttcaggcagagtgcggtatattccaggaaacactgtttcctactcacttagcttacttctttgttgaatgcctcactaatggcaagtttcaagatgttttgggtgacaatgcacacatgctgggcaaaagggtgatggccagtggctggcagctgggccagcagaagctaggacatctgtgagttgtcattctcatctatccatgtccactggcctgccagcatccgccagtgccttgccagtgtgcacggtcccacactgtggcccctgagtcccctaatgtacacgctgcagccagaatgcagatggagctggcttggctgttccctggatgggcaataaagaaagtgctgcatccca

SEQ ID NO: 454715 - DNA, 2620 bp, Homo sapiens
atgaccttgccagcatggaggataaaacagagaaatggtcttcccagcctgaaggtccacttaaattgaaagcttcaagtactgatatgccatcccagatttctgtggttaatgtggatcaactgtgggaagattctgtcctaactgtcaaattccccaaattaatggtaccaaggttctccttcgctgcccccagctcagaggatgatgtgttcatccccactgtgagggaagtgcagtgtccagaggccaatattgatacagccctttgtaaggaaagtccggggctctggggagccagcatcctgaaggcaggtgctggggtccctggggagcagcctgtggaccttaacctgcctttggaagctcccccaatttcaaaggtcagagtgcatattcagggtgctcaggttgaaagtcaagaggtcactatacacagcatagtgacaccagagtttgtagatctctcagtacccaggactttttccactcagattgtgcgggaatcagagatccccacgtcagagattcaaacaccttcgtacggattttccttattaaaagtgaaaatcccagagccccacacgcaggctagagtgtacacaacaatgactcaacactctaggactcaggagggcacagaagaggctcccatacaagccaccccaggagtagactccatttctggagatctccagcctgacactggagaaccatttgagatgatctcttccagcgtcaatgtactgggacagcaaacactcacatttgaagttccttctggccaccagcttgcagacagctgttcagatgaggagccagcagaaattcttgagtttccccctgatgatagccaagaggcaaccacaccactggcagatgaaggcagggctccaaaagacaaaccagaaagtaaaaaatctggtctgctctggttttggcttccaaacattgggttttcctcttctgttgatgagacaggtgttgattccaaaaatgacgtccagagatctgctcccattcaaacacagcctgaggcacgaccagaggcagaactgcctaaaaaacaggagaaggcaggctggttccgatttcccaaattagggttctcctcatctcctaccaagaaaagcaaaagcaccgaagatggggcagagctggaagaacaaaaacttcaagaagaaacaatcacgttttttgatgcccgagaaagtttctcccctgaagagaaggaagagggtgaactgatcgggcctgtgggcactgggctggactccagagtgatggtgacatccgcggcaagaacagagttaatcctgcccgagcaggacagaaaagctgacgatgaaagcaaagggtcaggcctgggaccaaatgaaggctgagaggtatggctcatcggtacaagagagatgcaaaaaactaagttggaaagtaaaggctacacacacatatggagcaccccatcccacagcacattacatccacctcacttcacagaacggagaacagagcagaaatgaccagaacacctttgtcaccatcacacagccctcctaaaatggaaccaaagcttcccagctccctcaaagctttggatgcaaagaaggcaccctgacttccacaagacaccagaattcacacggtactcagaggcactgctggggaagtttgttggtctttattagataaatttccagagacctgtccataatacccaacagaacatgactgtttctttgaggaaagggttataatgtctgtggtgtacaagtcgtttttggtataacttctttcctgctgctgctgcttcccggcaaacatagttttcctatttcaggcagagtgcggtatattccaggaaacactgtttcctactcacttagcttacttctttgttgaatgcctcactaatggcaagtttcaagatgttttgggtgacaatgcacacatgctgggcaaaagggtgatggccagtggctggcagctgggccagcagaagctaggacatctgtgagttgtcattctcatctatccatgtccactggcctgccagcatccgccagtgccttgccagtgtgcacggtcccacactgtggcccctgagtcccctaatgtacacgctgcagccagaatgcagatggagctggcttggctgttccctggatgggcaataaagaaagtgctgcatcccaaaaaaaaaaaaaaaaaaaaaaaaaaaaaaaaaaaaaaaatataacaaatcaacaaaacaaaaaaacaaaagaaacaacaaaaagaaagggggggggggccacaaaagaatctctcccggggggggcgccattctgcgcgaacccacaattttgtgacaaagaggggcgctccaatatgagggcagcgctcatttacaacacacgctgcagcgggtggcccaccagtacaaaaagacgagtaccggacgccggcaaacaccttcaacccctggcgcgacacatcgtgggcaggagccccccccttcatggcgggggggggcggagcaacaaccatcagcggacgcacacaccccaccaccacaaagacattgatcacccactcctgagagaggacacacaacacacaccctccgagaggtgatcgt

SEQ ID NO: 454716 - DNA, 1117 bp, Homo sapiens
ccagagaaacaagacctccaagacggccaggcactggggcacacgccggtaacacagcaccgtgggagctgagacggaaggatcgcctgagcccaggattttgaaaccaccctgggcaacacagtgagaccccgtatctacaaaaaaatacacattagccaggcatggcggcatgcgcctggggtcccaagtactcgggaggtagaggagagaaaaatcacttgagcccagagaggtcaaggctacagggagctgagatcgcatcactgtactccagctggggtgaaacggcgagactctacctcaaaaataaataaatacatacataattaataaataaaacatcaaagaccagccgacctaactccatctaaaatacacaacttctacgcaaaatataaataaaattagaaaacaaactacaatctcagaaaagcactagcaacttagacgacatactaaaggccaaaaataccctcctgacacacagctaataaagaaaaagtcaactattccagttaaaaagaagaaaaggaaactggctgtggtggcttatgcctgtaatcccagtgctttgggaaggccaggagtttgagaccaggatggacagcatagcaagaccccatctctacaaggaaaaaaagaatcagccaggcatggtggtgtggagctgtagttccaactactcggggggctgaggaggaaggatcgcttgagccagggaggtagaggctgcagtgagctatgattgtgccactgcagtccagcctgggcgacagagcaagacccggtctcgaaagaaaagaaagagaaagcaagaaaagaaagatggctgggcacggtggctcactcctgtaatcccagaactttgggaggccaaggtgggtggatcatgagatcaagagatcaagaccatcctggccaacagggtgaaaccccgtctctactaaaaatgcaaaaattagctgggcgtggtggcgggcaccagtccaggctactcgggaggctgaggcaggagaatggtgtgaacccaggaggcggagcttgcagtgagccgagatggcactgctgcactccagcctgggcaacagagtgagactccatctcaaataataat

SEQ ID NO: 454717 - DNA, 2258 bp, Homo sapiens
tacgggttcactcgcatagtgctgtttatgcttcatccatgagcccaccgatagcagagcaaatcatcagatcactaaaacttatcatgggactggatgggaccactcaagggctgcagagagtacagcaacttgcgaaaaacacaagatacttcagacaaagactgcaggaaatgggattcattatctatggcaatgagaatgcttctgttgttcctctgcttctttatatgcctggtaaagtagcggcttttgcaaggcatatgctagagaaaaaaattggagtggtggtcgtgggatttccagccactcccctcgcagaagctcgggctcggttttgtgtttcagcggcacatacccgggagatgttagacacggttttagaagctcttgatgaaatgggtgatctcttgcaactgaaatattcccggcacaagaagtcagcacgtcctgagctctatgatgagacgagctttgaactcgaagattaagtttcctggtcctgaatgacacataaagactttgcgagaaagacctccctccttgcctcacaaggaatataaatggatttctcccccttcctcaggacaattttggttcccagaccagcttgattgaactgagggagacgttgttgtttttaatgtctccagcttggactgcagagacaaaaacatgattccagatttaagtctctcttcttccaagtattctactagaaatacacacacacacacacacacacttctgagaatatttttaatggcaataagcctgtgttttagctgctactgtgcagaccctttcagggattccaaccaaatgcaaatgagagaatttaaaatttttattcagtaagttcactatgtgtttacttattccatctgcagatgtaagtgagtgtggtggacagtagccaccttccttgttccactcataaaagcatcagctagatctcatctgtatcatgggaagttccaggcaggagggtaaagaaatgttgtttctaccatttgtcacatttggacgtttttcacagacaagtgtcaaaagacatagttaatgtttcgagggggaaagcagaactgatcaactgcgactagagacgtctttgaaggaaattttccttttcctcttgctggtctcctacagttttacagctgagcttttgaggtttggaaaattcaagatgtttgtttcataagaaaaggggcagaaagcaagcacaagacacttttaggtctagactaaaatggtagttacaacaatttgaaccttgttggtgcagtgcacggttgaatgcttaccctgcacagcctctattaccttaaggaattagttgtcattttcctattgaattttgagtaaatggtgaaattcagtgtcctttagaatcgactcccaagactatatttgaagaatgcattgattcaagaaggacatttaaaagcaaattctgactttttcaagaccaacacacttgtttaggcctattaaattgtactatcacttgttacatgccctctgaattgggagaaagtgggcttgcacactttgaggtaactaactgtaatttacttgtgttctctctttcttgctctccttctcaacatgaacacaaacctctatggaaaagtagcctcttgttaatctgatctagtttgtatggaaaaagcccatggagaaccttatctttaacaagctcccagagggtgcccagatttggaaattctagagagcagtggtgaccttttagcaaagcttctgtaacagttcgaatgagttgcagaacattccactccatcaaatgacactgtaaacaaatcacttcaagagaggcttggttttgtgtggcacagatggacccaagctttcatgctgtgcactgagatagaaactccacccgcagcgcctgcgatggatggagcagtgtgccctgatgctcaaagcgtattaaaggaaaaaaagtgatcagcatggaaagtttttatggggaaattataactccaagtgggtgcattggtttaaaaatggatcacaatgatagagttcttcatgaatgtttacaagttgtaaggaataccgttagtgaaagaggaaaagaagtgggttctgaaaatgcagtttcccatccaatgattttgataacaaaattccaacttttctcaatgaaactgatgcagtattatttgtgcaaataatactgcatcagtttcatttgtgcaaataaaatgtgtcataaatatgcaaaaaaaaaa

SEQ ID NO: 454718 - DNA, 2695 bp, Homo sapiens
tacgggttcactcgcatagtgctgtttatgcttcatccatgagcccaccgatagcagagcaaatcatcagatcactaaaacttatcatgggactggatgggaccactcaagggctgcagagagtacagcaacttgcgaaaaacacaagatacttcagacaaagactgcaggaaatgggattcattatctatggcaatgagaatgcttctgttgttcctctgcttctttatatgcctggtaaagtagcggcttttgcaaggcatatgctagagaaaaaaattggagtggtggtcgtgggatttccagccactcccctcgcagaagctcgggctcggttttgtgtttcagcggcacatacccgggagatgttagacacggttttagaagctcttgatgaaatgggtgatctcttgcaactgaaatattcccggcacaagaagtcagcacgtcctgagctctatgatgagacgagctttgaactcgaagattaagtttcctggtcctgaatgacacataaagactttgcgagaaagacctccctccttgcctcacaaggaatataaatggatttctcccccttcctcaggacaattttggttcccagaccagcttgattgaactgagggagacgttgttgtttttaatgtctccagcttggactgcagagacaaaaacatgattccagatttaagtctctcttcttccaagtattctactagaaatacacacacacacacacacacacttctgagaatatttttaatggcaataagcctgtgttttagctgctactgtgcagaccctttcagggattccaaccaaatgcaaatgagagaatttaaaatttttattcagtaagttcactatgtgtttacttattccatctgcagatgtaagtgagtgtggtggacagtagccaccttccttgttccactcataaaagcatcagctagatctcatctgtatcatgggaagttccaggcaggagggtaaagaaatgttgtttctaccatttgtcacatttggacgtttttcacagacaagtgtcaaaagacatagttaatgtttcgagggggaaagcagaactgatcaactgcgactagagacgtctttgaaggaaattttccttttcctcttgctggtctcctacagttttacagctgagcttttgaggtttggaaaattcaagatgtttgtttcataagaaaaggggcagaaagcaagcacaagacacttttaggtctagactaaaatggtagttacaacaatttgaaccttgttggtgcagtgcacggttgaatgcttaccctgcacagcctctattaccttaaggaattagttgtcattttcctattgaattttgagtaaatggtgaaattcagtgtcctttagaatcgactcccaagactatatttgaagaatgcattgattcaagaaggacatttaaaagcaaattctgactttttcaagaccaacacacttgtttaggcctattaaattgtactatcacttgttacatgccctctgaattgggagaaagtgggcttgcacactttgaggtaactaactgtaatttacttgtgttctctctttcttgctctccttctcaacatgaacacaaacctctatggaaaagtagcctcttgttaatctgatctagtttgtatggaaaaagcccatggagaaccttatctttaacaagctcccagagggtgcccagatttggaaattctagagagcagtggtgaccttttagcaaagcttctgtaacagttcgaatgagttgcagaacattccactccatcaaatgacactgtaaacaaatcacttcaagagaggcttggttttgtgtggcacagatggacccaagctttcatgctgtgcactgagatagaaactccacccgcagcgcctgcgatggatggagcagtgtgccctgatgctcaaagcgtattaaaggaaaaaaagtgatcagcatggaaagtttttatggggaaattataactccaagtgggtgcattggtttaaaaatggatcacaatgatagagttcttcatgaatgtttacaagttgtaaggaataccgttagtgaaagaggaaaagaagtgggttctgaaaatgcagtttcccatccaatgattttgataacaaaattccaacttttctcaatgaaactgatgcagtattatttgtgcaaataaaatgtgtcataaatatgcaaagaaagggagacatactgttcttatcttgaatatgtgcatttaaatgaattgtccaaaatgcataaatgccttgcgttctataaaggaaacaggaggtcaaaaagacagcgagatatctagtccttccacaaggtatggaaagcaataaacatcttcctttctttctgaaaaaaaaaaaaaaaaaaaaaaaaaaaaaaaatttgtggggggcttgggcctttgaaaaagtttttaaaaacatttggatggggccgccggggccccaaagcggcaagggcatcactggggccaacggtgtcccagaggaaacccggggcgagagaaaaggacgcggaggttctccaccaataaaaacgccgcgggggaaaaccgaggctcttcgcaaacaatcccaaaggggagccgaggggcacaaaagggcgctaacaacaagggggcacaagaaacgccaaatcaaataagccggcgggggt

SEQ ID NO: 454719 - DNA, 295 bp, Homo sapiens
gcggccgcctactactactactgctcgaattcaagcttctaacgatgtacggggacatgctatgaagatcacctatgccaagaaataacatttgggatagtcgtctttaaaagacttggtgttatttacagtgtttgttttgataacatttggctgggtcattttaatagttagagatgaggaggagtaaaagtgaaatttttgtgaaggacttaaattatccagtgtttctttagccttggtgaactatgaaatacgaaggccttaattttgtacaataaacttttatttgtat

SEQ ID NO: 454720 - DNA, 1675 bp, Homo sapiens
ttgaggagcgtggctacgttgcttccggtgcctggctccgtttcctgcttttggttcttacagtagtcggcgtaggccttaggtgggttcgtgcgccttctacctcgctgtttcggttttcctggctcctcggcccttttctcccctgttgcagctgggagcggacgaagcgcgaagctgggattttttactgtctcctgaagaatttaacacaaacatggatatcagaccaaatcatacaatttatatcaacaatatgaatgacaaaattaaaaaggaagaattgaagagatccctatatgccctgttttctcagtttggtcatgtggtggacattgtggctttaaagaccatgaagatgagggggcaggcctttgtcatatttaaggaactgggctcatccacaaatgccttgagacagctacaaggatttccattttatggtaaaccaatgcgaatacagtatgcaaaaacagattcggatataatatcaaaaatgcgtggaacttttgctgacaaagaaaagaaaaaagaaaagaaaaaagccaaaactgtggaacagactgcaacaaccacaaacaaaaagcctggccagggaactccaaattcagctaatacccaaggaaattcaacaccaaatcctcaggtccctgattaccctccaaactatattttattccttaataacttaccagaagagactaatgagatgatgttatccatgctgtttaatcagttccctggcttcaaggaagtacgtctggtaccagggaggcatgacattgcttttgttgaatttgaaaatgatgggcaggctggagctgccagggatgctttacagggatttaagatcacaccgtcccatgctatgaagatcacctatgccaagaaataacatttgggatagtcgtctttaaaagacttggtgttatttacagtgtttgttttgataacatttggctgggtcattttaatagttagagatgaggaggagtaaaagtgaaatttttgtgaaggacttaaattatccagtgtttctttagccttggtgaactatgaaatacgaaggccttaattttgtacaataaacttttatttgtattctgtgtatataatgctttcttgattgacccatctccctatcatcaaatgacttctagtctagaacacacttaaggtttataaacttgtgtaataggatgcttttctagtgttactttggaggagctaattatacaacatcattgaaccattcaataaaagttaagtaaaattagatcacagaagctagtagatgactgttgtattaatggtaacaatgattgttctgggtattagaagaaaatgagaccccaggcaggatcctaaatttgatctttgtatccttttaagaaatgaatatattattttgctgctagtagggattccacaagttttcttcattcagtattaaataaaggctgttcttactgtttactgagaaaacagaaagggaatgctatcttcacactttgcatttaatgctgtttccttcatgaggcaggactgttctaaggttaatatgcaatctctttattgaaagacctccagggtaaaaattttttgatctatagtctcttttcccccttaagacaaatagactgattaataaagagttgccagtgctaaaaaaata

SEQ ID NO: 454721 - DNA, 1236 bp, Homo sapiens
ttgaggagcgtggctacgttgcttccggtgcctggctccgtttcctgcttttggttcttacagtagtcggcgtaggccttaggtgggttcgtgcgccttctacctcgctgtttcggttttcctggctcctcggcccttttctcccctgttgcagctgggagcggacgaagcgcgaagctgggattttttactgtctcctgaagaatttaacacaaacatggatatcagaccaaatcatacaatttatatcaacaatatgaatgacaaaattaaaaaggaagaattgaagagatccctatatgccctgttttctcagtttggtcatgtggtggacattgtggctttaaagaccatgaagatgagggggcaggcctttgtcatatttaaggaactgggctcatccacaaatgccttgagacagctacaaggatttccattttatggtaaaccaatgcgaatacagtatgcaaaaacagattcggatataatatcaaaaatgcgtggaacttttgctgacaaagaaaagaaaaaagaaaagaaaaaagccaaaactgtggaacagactgcaacaaccacaaacaaaaagcctggccagggaactccaaattcagctaatacccaaggaaattcaacaccaaatcctcaggtccctgattaccctccaaactatattttattccttaataacttaccagaagagactaatgagatgatgttatccatgctgtttaatcagttccctggcttcaaggaagtacgtctggtaccagggaggcatgacattgcttttgttgaatttgaaaatgatgggcaggctggagctgccagggatgctttacagggatttaagatcacaccgtcccatgctatgaagatcacctatgccaagaaataacatttgggatagtcgtctttaaaagacttggtgttatttacagtgtttgttttgataacatttggctgggtcattttaatagttagagatgaggaggagtaaaagtgaaatttttgtgaaggacttaaattatccagtgtttctttagccttggtgaactatgaaatacgaaggccttaattttgtacaataaacttttatttgtataaaaaaaaaaaaaaaaaaacaaaaaaaagggggggaggttaaaaagattctaagagggggcaaaagttagggttacccaggttcttggacaaaggggggccaaaaaggaggagaattaaaaggaaggaatgtgg

SEQ ID NO: 454722 - DNA, 1644 bp, Homo sapiens
tggacttcgttagggggccttgggcgaaggtgcttgtgtctggagaggcgggaggcttgcgcgtacgaagtaaaggatagttaatgtcagtctgctcgtgcgaggcgtggacaacggtcgacgtgcgcgttcagattggatacactagtctccatgaagaattgaacgacataacatggatcatcatagaccagatctatcacaattttaatatcatcatcatatgaatgcacacagaatctagaaaggaaattgaagagatccctatatgccctgttttctcagtttggtcatgtggtggacattgtggctttaaagaccatgaagatgagggggcaggcctttgtcatatttaaggaactgggctcatccacaaatgccttgagacagctacaaggatttccattttatggtaaaccaatgcgaatacagtatgcaaaaacagattcggatataatatcaaaaatgcgtggaacttttgctgacaaagaaaagaaaaaagaaaagaaaaaagccaaaactgtggaacagactgcaacaaccacaaacaaaaagcctggccagggaactccaaattcagctaatacccaaggaaattcaacaccaaatcctcaggtccctgattaccctccaaactatattttattccttaataacttaccagaagagactaatgagatgatgttatccatgctgtttaatcagttccctggcttcaaggaagtacgtctggtaccagggaggcatgacattgcttttgttgaatttgaaaatgatgggcaggctggagctgccagggatgctttacagggatttaagatcacaccgtcccatgctatgaagatcacctatgccaagaaataacatttgggatagtcgtctttaaaagacttggtgttatttacagtgtttgttttgataacatttggctgggtcattttaatagttagagatgaggaggagtaaaagtgaaatttttgtgaaggacttaaattatccagtgtttctttagccttggtgaactatgaaatacgaaggccttaattttgtacaataaacttttatttgtattctgtgtatataatgctttcttgattgacccatctccctatcatcaaatgacttctagtctagaacacacttaaggtttataaacttgtgtaataggatgcttttctagtgttactttggaggagctaattatacaacatcattgaaccattcaataaaagttaagtaaaattagatcacagaagctagtagatgactgttgtattaatggtaacaatgattgttctgggtattagaagaaaatgagaccccaggcaggatcctaaatttgatctttgtatccttttaagaaatgaatatattattttgctgctagtagggattccacaagttttcttcattcagtattaaataaaggctgttcttactgtttactgagaaaacagaaagggaatgctatcttcacactttgcatttaatgctgtttccttcatgaggcaggactgttctaaggttaatatgcaatctctttattgaaagacctccagggtaaaaattttttgatctatagtctcttttcccccttaagacaaatagactgattaataaagagttgccagtgctaaaaaaata

SEQ ID NO: 454723 - DNA, 1379 bp, Homo sapiens
gcggccgcctactactactactgctcgaattcaagcttctaacgatgtacggggacatgaagatgagggggcaggcctttgtcatatttaaggaactgggctcatccacaaatgccttgagacagctacaaggatttccattttatggtaaaccaatgcgaatacagtatgcaaaaacagattcggatataatatcaaaaatgcgtggaacttttgctgacaaagaaaagaaaaaagaaaagaaaaaagccaaaactgtggaacagactgcaacaaccacaaacaaaaagcctggccagggaactccaaattcagctaatacccaaggaaattcaacaccaaatcctcaggtccctgattaccctccaaactatattttattccttaataacttaccagaagagactaatgagatgatgttatccatgctgtttaatcagttccctggcttcaaggaagtacgtctggtaccagggaggcatgacattgcttttgttgaatttgaaaatgatgggcaggctggagctgccagggatgctttacagggatttaagatcacaccgtcccatgctatgaagatcacctatgccaagaaataacatttgggatagtcgtctttaaaagacttggtgttatttacagtgtttgttttgataacatttggctgggtcattttaatagttagagatgaggaggagtaaaagtgaaatttttgtgaaggacttaaattatccagtgtttctttagccttggtgaactatgaaatacgaaggccttaattttgtacaataaacttttatttgtattctgtgtatataatgctttcttgattgacccatctccctatcatcaaatgacttctagtctagaacacacttaaggtttataaacttgtgtaataggatgcttttctagtgttactttggaggagctaattatacaacatcattgaaccattcaataaaagttaagtaaaattagatcacagaagctagtagatgactgttgtattaatggtaacaatgattgttctgggtattagaagaaaatgagaccccaggcaggatcctaaatttgatctttgtatccttttaagaaatgaatatattattttgctgctagtagggattccacaagttttcttcattcagtattaaataaaggctgttcttactgtttactgagaaaacagaaagggaatgctatcttcacactttgcatttaatgctgtttccttcatgaggcaggactgttctaaggttaatatgcaatctctttattgaaagacctccagggtaaaaattttttgatctatagtctcttttcccccttaagacaaatagactgattaataaagagttgccagtgctaaaaaaata

SEQ ID NO: 454724 - DNA, 1535 bp, Homo sapiens
ttgaggagcgtggctacgttgcttccggtgcctggctccgtttcctgcttttggttcttacagtagtcggcgtaggccttaggtgggttcgtgcgccttctacctcgctgtttcggttttcctggctcctcggcccttttctcccctgttgcagctgggagcggacgaagcgcgaagctgggattttttactgtctcctgaagaatttaacacaaacatggatatcagaccaaatcatacaatttatatcaacaatatgaatgacaaaattaaaaaggaagaattgaagagatccctatatgccctgttttctcagtttggtcatgtggtggacattgtggctttaaagaccatgaagatgagggggcaggcctttgtcatatttaaggaactgggctcatccacaaatgccttgagacagctacaaggatttccattttatggtaaaccaatgcgaatacagtatgcaaaaacagattcggatataatatcaaaaatgcgtggaacttttgctgacaaagaaaagaaaaaagaaaagaaaaaagccaaaactgtggaacagactgcaacaaccacaaacaaaaagcctggccaggttccctggcttcaaggaagtacgtctggtaccagggaggcatgacattgcttttgttgaatttgaaaatgatgggcaggctggagctgccagggatgctttacagggatttaagatcacaccgtcccatgctatgaagatcacctatgccaagaaataacatttgggatagtcgtctttaaaagacttggtgttatttacagtgtttgttttgataacatttggctgggtcattttaatagttagagatgaggaggagtaaaagtgaaatttttgtgaaggacttaaattatccagtgtttctttagccttggtgaactatgaaatacgaaggccttaattttgtacaataaacttttatttgtattctgtgtatataatgctttcttgattgacccatctccctatcatcaaatgacttctagtctagaacacacttaaggtttataaacttgtgtaataggatgcttttctagtgttactttggaggagctaattatacaacatcattgaaccattcaataaaagttaagtaaaattagatcacagaagctagtagatgactgttgtattaatggtaacaatgattgttctgggtattagaagaaaatgagaccccaggcaggatcctaaatttgatctttgtatccttttaagaaatgaatatattattttgctgctagtagggattccacaagttttcttcattcagtattaaataaaggctgttcttactgtttactgagaaaacagaaagggaatgctatcttcacactttgcatttaatgctgtttccttcatgaggcaggactgttctaaggttaatatgcaatctctttattgaaagacctccagggtaaaaattttttgatctatagtctcttttcccccttaagacaaatagactgattaataaagagttgccagtgctaaaaaaata

SEQ ID NO: 454725 - DNA, 962 bp, Homo sapiens
ttgaggagcgtggctacgttgcttccggtgcctggctccgtttcctgcttttggttcttacagtagtcggcgtaggccttaggtgggttcgtgcgccttctacctcgctgtttcggttttcctggctcctcggcccttttctcccctgttgcagctgggagcggacgaagcgcgaagctgggattttttactgtctcctgaagaatttaacacaaacatggatatcagaccaaatcatacaatttatatcaacaatatgaatgacaaaattaaaaaggaagaattgaagagatccctatatgccctgttttctcagtttggtcatgtggtggacattgtggctttaaagaccatgaagatgagggggcaggcctttgtcatatttaaggaactgggctcatccacaaatgccttgagacagctacaaggatttccattttatggtaaaccaatgcgaatacagtatgcaaaaacagattcggatataatatcaaaaatgcgtggaacttttgctgacaaagaaaagaaaaaagaaaagaaaaaagccaaaactgtggaacagactgcaacaaccacaaacaaaaagcctggccaggttccctggcttcaaggaagtacgtctggtaccagggaggcatgacattgcttttgttgaatttgaaaatgatgggcaggctggagctgccagggatgctttacagggatttaagatcacaccgtcccatgctatgaagatcacctatgccaagaaataacatttgggatagtcgtctttaaaagacttggtgttatttacagtgtttgttttgataacatttggctgggtcattttaatagttagagatgaggaggagtaaaagtgaaatttttgtgaaggacttaaattatccagtgtttctttagccttggtgaactatgaaatacgaaggccttaattttgtacaataaacttttatttgtat

SEQ ID NO: 454726 - DNA, 720 bp, Homo sapiens
ttgaggagcgtggctacgttgcttccggtgcctggctccgtttcctgcttttggttcttacagtagtcggcgtaggccttaggtgggttcgtgcgccttctacctcgctgtttcggttttcctggctcctcggcccttttctcccctgttgcagctgggagcggacgaagcgcgaagctgggattttttactgtctcctgaagaatttaacacaaacatggatatcagaccaaatcatacaatttatatcaacaatatgaatgacaaaattaaaaaggaagaattgaagagatccctatatgccctgttttctcagtttggtcatgtggtggacattgtggctttaaagaccatgaagatgagggggcaggcctttgtcatatttaaggaactgggctcatccacaaatgccttgagacagctacaaggatttccattttatggtaaaccaatgcgaatacagtatgcaaaaacagattcggatataatatcaaaaatgcgtggaacttttgctgacaaagaaaagaaaaaagaaaagaaaaaagccaaaactgtggaacagactgcaacaaccacaaacaaaaagcctggccagggaactccaaattcagctaatacccaaggaaattcaacaccaaatcctcaggtccctgattaccactccacactaccagggaaatagttaagtaacgaaacagaagtgaaggatgagatgaggat

SEQ ID NO: 454727 - DNA, 1432 bp, Homo sapiens
tagtatgctgggaagtagtaacagtacagaggaattgagtatctgagtgatactgagtgtggtaaccagctacggaggggtgacattgctggccatctctaattttattaagatctttgattatgttatccaggtgacaaaattctccaatcacgactcacctccagaagcttaaaacataattgtttcatatactgttaaacacttaagagatttgtaattttccagactttcaatgtctttacttgaatgtctgccttgcttagttactgtaaggttttgatttatttctccagtgtcattgtttttcagctttattgtttgatatagtaagatttcacatgcctagcttacgatgctgtttaaacttacaagctaactttgcctttttactttttaataggtccctgattaccctccaaactatattttattccttaataacttaccagaagagactaatgagatgatgttatccatgctgtttaatcagttccctggcttcaaggaagtacgtctggtaccagggaggcatgacattgcttttgttgaatttgaaaatgatgggcaggctggagctgccagggatgctttacagggatttaagatcacaccgtcccatgctatgaagatcacctatgccaagaaataacatttgggatagtcgtctttaaaagacttggtgttatttacagtgtttgttttgataacatttggctgggtcattttaatagttagagatgaggaggagtaaaagtgaaatttttgtgaaggacttaaattatccagtgtttctttagccttggtgaactatgaaatacgaaggccttaattttgtacaataaacttttatttgtattctgtgtatataatgctttcttgattgacccatctccctatcatcaaatgacttctagtctagaacacacttaaggtttataaacttgtgtaataggatgcttttctagtgttactttggaggagctaattatacaacatcattgaaccattcaataaaagttaagtaaaattagatcacagaagctagtagatgactgttgtattaatggtaacaatgattgttctgggtattagaagaaaatgagaccccaggcaggatcctaaatttgatctttgtatccttttaagaaatgaatatattattttgctgctagtagggattccacaagttttcttcattcagtattaaataaaggctgttcttactgtttactgagaaaacagaaagggaatgctatcttcacactttgcatttaatgctgtttccttcatgaggcaggactgttctaaggttaatatgcaatctctttattgaaagacctccagggtaaaaattttttgatctatagtctcttttcccccttaagacaaatagactgattaataaagagttgccagtgctaaaaaaata

SEQ ID NO: 454728 - DNA, 1148 bp, Homo sapiens
ttgatataatataaaatagaattagtttattcttgcagttcttccatggtattaattacacatgaggctcttccgtctactcagtattcttggttagagtatggttatttttcttggactagtattaggaagttgcttaacaaattttaacacaaagcaaacatttatgtacttgctgtatacatgaattgtttttcttctttatagggttccctggcttcaaggaagtacgtctggtaccagggaggcatgacattgcttttgttgaatttgaaaatgatgggcaggctggagctgccagggatgctttacagggatttaagatcacaccgtcccatgctatgaagatcacctatgccaagaaataacatttgggatagtcgtctttaaaagacttggtgttatttacagtgtttgttttgataacatttggctgggtcattttaatagttagagatgaggaggagtaaaagtgaaatttttgtgaaggacttaaattatccagtgtttctttagccttggtgaactatgaaatacgaaggccttaattttgtacaataaacttttatttgtattctgtgtatataatgctttcttgattgacccatctccctatcatcaaatgacttctagtctagaacacacttaaggtttataaacttgtgtaataggatgcttttctagtgttactttggaggagctaattatacaacatcattgaaccattcaataaaagttaagtaaaattagatcacagaagctagtagatgactgttgtattaatggtaacaatgattgttctgggtattagaagaaaatgagaccccaggcaggatcctaaatttgatctttgtatccttttaagaaatgaatatattattttgctgctagtagggattccacaagttttcttcattcagtattaaataaaggctgttcttactgtttactgagaaaacagaaagggaatgctatcttcacactttgcatttaatgctgtttccttcatgaggcaggactgttctaaggttaatatgcaatctctttattgaaagacctccagggtaaaaattttttgatctatagtctcttttcccccttaagacaaatagactgattaataaagagttgccagtgctaaaaaaata

SEQ ID NO: 454729 - DNA, 1102 bp, Homo sapiens
ttgaggagcgtggctacgttgcttccggtgcctggctccgtttcctgcttttggttcttacagtagtcggcgtaggccttaggtgggttcgtgcgccttctacctcgctgtttcggttttcctggctcctcggcccttttctcccctgttgcagctgggagcggacgaagcgcgaagctgggattttttactgtctcctgaagaatttaacacaaacatggatatcagaccaaatcatacaatttatatcaacaatatgaatgacaaaattaaaaaggaagaattgaagagatccctatatgccctgttttctcagtttggtcatgtggtggacattgtggctttaaagaccatgaagatgagggggcaggcctttgtcatatttaaggaactgggctcatccacaaatgccttgagacagctacaaggatttccattttatggtaaaccaatgcgaatacagtatgcaaaaacagattcggatataatatcaaaaatgcgtggaacttttgctgacaaagaaaagaaaaaagaaaagaaaaaagccaaaactgtggaacagactgcaacaaccacaaacaaaaagcctggccagggaactccaaattcagctaatacccaaggaaattcaacaccaaatcctcaggtccctgattaccctccaaactatattttattccttaataacttaccagaagagactaatgagatgatgttatccatgctgtttaatcagttccctggcttcaaggaagtacgtctggtaccagggaggcatgacattgcttttgttgaatttgaaaatgatgggcaggctggagctgccagggatgctttacagggatttaagatcacaccgtcccatgctatgaagatcacctatgccaagaaataacatttgggatagtcgtctttaaaagacttggtgttatttacagtgtttgttttgataacatttggctgggtcattttaatagttagagatgaggaggagtaaaagtgaaatttttgtgaaggacttaaattatccagtgtttctttagccttggtgaactatgaaatacgaaggccttaattttgtacaataaacttttatttgtat

SEQ ID NO: 454730 - DNA, 1575 bp, Homo sapiens
ttgaggagcgtggctacgttgcttccggtgcctggctccgtttcctgcttttggttcttacagtagtcggcgtaggccttagattttttactgtctcctgaagaatttaacacaaacatggatatcagaccaaatcatacaatttatatcaacaatatgaatgacaaaattaaaaaggaagaattgaagagatccctatatgccctgttttctcagtttggtcatgtggtggacattgtggctttaaagaccatgaagatgagggggcaggcctttgtcatatttaaggaactgggctcatccacaaatgccttgagacagctacaaggatttccattttatggtaaaccaatgcgaatacagtatgcaaaaacagattcggatataatatcaaaaatgcgtggaacttttgctgacaaagaaaagaaaaaagaaaagaaaaaagccaaaactgtggaacagactgcaacaaccacaaacaaaaagcctggccagggaactccaaattcagctaatacccaaggaaattcaacaccaaatcctcaggtccctgattaccctccaaactatattttattccttaataacttaccagaagagactaatgagatgatgttatccatgctgtttaatcagttccctggcttcaaggaagtacgtctggtaccagggaggcatgacattgcttttgttgaatttgaaaatgatgggcaggctggagctgccagggatgctttacagggatttaagatcacaccgtcccatgctatgaagatcacctatgccaagaaataacatttgggatagtcgtctttaaaagacttggtgttatttacagtgtttgttttgataacatttggctgggtcattttaatagttagagatgaggaggagtaaaagtgaaatttttgtgaaggacttaaattatccagtgtttctttagccttggtgaactatgaaatacgaaggccttaattttgtacaataaacttttatttgtattctgtgtatataatgctttcttgattgacccatctccctatcatcaaatgacttctagtctagaacacacttaaggtttataaacttgtgtaataggatgcttttctagtgttactttggaggagctaattatacaacatcattgaaccattcaataaaagttaagtaaaattagatcacagaagctagtagatgactgttgtattaatggtaacaatgattgttctgggtattagaagaaaatgagaccccaggcaggatcctaaatttgatctttgtatccttttaagaaatgaatatattattttgctgctagtagggattccacaagttttcttcattcagtattaaataaaggctgttcttactgtttactgagaaaacagaaagggaatgctatcttcacactttgcatttaatgctgtttccttcatgaggcaggactgttctaaggttaatatgcaatctctttattgaaagacctccagggtaaaaattttttgatctatagtctcttttcccccttaagacaaatagactgattaataaagagttgccagtgctaaaaaaata

SEQ ID NO: 454731 - DNA, 1417 bp, Homo sapiens
gcggccgcctactactactactgctcgaattcaagcttctaacgatgtacggggacatggaagagacgtgattgcagaaagcagataacaaagcatgaagatgagggggcaggcctttgtcatatttaaggaactgggctcatccacaaatgccttgagacagctacaaggatttccattttatggtaaaccaatgcgaatacagtatgcaaaaacagattcggatataatatcaaaaatgcgtggaacttttgctgacaaagaaaagaaaaaagaaaagaaaaaagccaaaactgtggaacagactgcaacaaccacaaacaaaaagcctggccagggaactccaaattcagctaatacccaaggaaattcaacaccaaatcctcaggtccctgattaccctccaaactatattttattccttaataacttaccagaagagactaatgagatgatgttatccatgctgtttaatcagttccctggcttcaaggaagtacgtctggtaccagggaggcatgacattgcttttgttgaatttgaaaatgatgggcaggctggagctgccagggatgctttacagggatttaagatcacaccgtcccatgctatgaagatcacctatgccaagaaataacatttgggatagtcgtctttaaaagacttggtgttatttacagtgtttgttttgataacatttggctgggtcattttaatagttagagatgaggaggagtaaaagtgaaatttttgtgaaggacttaaattatccagtgtttctttagccttggtgaactatgaaatacgaaggccttaattttgtacaataaacttttatttgtattctgtgtatataatgctttcttgattgacccatctccctatcatcaaatgacttctagtctagaacacacttaaggtttataaacttgtgtaataggatgcttttctagtgttactttggaggagctaattatacaacatcattgaaccattcaataaaagttaagtaaaattagatcacagaagctagtagatgactgttgtattaatggtaacaatgattgttctgggtattagaagaaaatgagaccccaggcaggatcctaaatttgatctttgtatccttttaagaaatgaatatattattttgctgctagtagggattccacaagttttcttcattcagtattaaataaaggctgttcttactgtttactgagaaaacagaaagggaatgctatcttcacactttgcatttaatgctgtttccttcatgaggcaggactgttctaaggttaatatgcaatctctttattgaaagacctccagggtaaaaattttttgatctatagtctcttttcccccttaagacaaatagactgattaataaagagttgccagtgctaaaaaaata

SEQ ID NO: 454732 - DNA, 811 bp, Homo sapiens
ttgaggagcgtggctacgttgcttccggtgcctggctccgtttcctgcttttggttcttacagtagtcggcgtaggccttaggtgggttcgtgcgccttctacctcgctgtttcggttttcctggctcctcggcccttttctcccctgttgcagctgggagcggacgaagcgcgaagctgggattttttactgtctcctgaagaatttaacacaaacatggatatcagaccaaatcatacaatttatatcaacaatatgaatgacaaaattaaaaaggaagaattgaagagatccctatatgccctgttttctcagtttggtcatgtggtggacattgtggctttaaagaccatgaagatgagggggcaggcctttgtcatatttaaggaactgggctcatccacaaatgccttgagacagctacaaggatttccattttatggtaaaccaatgcgaatacagtatgcaaaaacagattcggatataatatcaaaaatgcgtggaacttttgctgacaaagaaaagaaaaaagaaaagaaaaaagccaaaactgtggaacagactgcaacaaccacaaacaaaaagcctggccagggaactccaaattcagctaatacccaaggaaattcaacaccaaatcctcaggtccctgattaccctccaaactatattttattccttaataacttaccagaagagactaatgagatgatgttatccatgctgtttaatcagtaagttttttcataaataagtctgtttctgagagcttcctcacaggacaagtagtacttccgtgggttgaatcca

SEQ ID NO: 454733 - DNA, 885 bp, Homo sapiens
ttgaggagcgtggctacgttgcttccggtgcctggctccgtttcctgcttttggttcttacagtagtcggcgtaggccttaggtgggttcgtgcgccttctacctcgctgtttcggttttcctggctcctcggcccttttctcccctgttgcagctgggagcggacgaagcgcgaagctgggattttttactgtctcctgaagaatttaacacaaacatggatatcagaccaaatcatacaatttatatcaacaatatgaatgacaaaattaaaaaggaagaattgaagagatccctatatgccctgttttctcagtttggtcatgtggtggacattgtggctttaaagaccatgaagatgagggggcaggcctttgtcatatttaaggaactgggctcatccacaaatgccttgagacagctacaaggatttccattttatggtaaaccaatgcgaatacagtatgcaaaaacagattcggatataatatcaaaaatgcgtggaacttttgctgacaaagaaaagaaaaaagaaaagaaaaaagccaaaactgtggaacagactgcaacaaccacaaacaaaaagcctggccagggaactccaaattcagctaatacccaaggaaattcaacaccaaatcctcaggtaattttttttccatgtcgtgcttaccttaaaataagattgtaaaaattacagcagtggtataaaacaatttccatgtctccaaaaacaaaatgatttcatctacaagacacagtgcgttaaattgtctgccactgcaatgtaagaactcaactcctgaagaacattttaattcttttttagagagagaaaacgacacctgactttatttcttgttttccataatgaatcaatgacag

SEQ ID NO: 454734 - DNA, 817 bp, Homo sapiens
ttgaggagcgtggctacgttgcttccggtgcctggctccgtttcctgcttttggttcttacagtagtcggcgtaggccttagattttttactgtctcctgaagaatttaacacaaacatggatatcagaccaaatcatacaatttatatcaacaatatgaatgacaaaattaaaaaggaagaattgaagagatccctatatgccctgttttctcagtttggtcatgtggtggacattgtggctttaaagaccatgaagatgagggggcaggcctttgtcatatttaaggaactgggctcatccacaaatgccttgagacagctacaaggatttccattttatggtaaaccaatgcgaatacagtatgcaaaaacagattcggatataatatcaaaaatgcgtggaacttttgctgacaaagaaaagaaaaaagaaaagaaaaaagccaaaactgtggaacagactgcaacaaccacaaacaaaaagcctggccaggttccctggcttcaaggaagtacgtctggtaccagggaggcatgacattgcttttgttgaatttgaaaatgatgggcaggctggagctgccagggatgctttacagggatttaagatcacaccgtcccatgctatgaagatcacctatgccaagaaataacatttgggatagtcgtctttaaaagacttggtgttatttacagtgtttgtttgtacatgggtggtcattatagtagcgatgggagggtaagtgaaatttggacgataatatcaggtcttgcctgggacttgaaaagaggctatttggcaaacttttctaaac

SEQ ID NO: 454735 - DNA, 2254 bp, Homo sapiens
aaatcggtacaagatggcggagggggacgaggcagcgcgagggcagcaaccgcaccaggggctgtggcgccggcgacggaccagcgacccaagcgccgcggttaaccacgtctcgtccacgacctccctaggtgagaattatgaagatgatgacctagtaaattctgatgaggttatgaagaaaccatgtccagtacagattgttcttgctcatgaagatgaccataactttgaacttgatgaagaagctttggagcagatattgctacaggagcacatacgagatcttaacatagtagtggtatctgtggcaggagcttttcgtaaagggaagtcatttctactggacttcatgcttagatacatgtataacaaggattctcaaagttggattggtggaaacaatgaaccattgacaggctttacatggcgaggtggctgtgaaagagaaacaacaggcatacaagtttggaatgaagtatttgtgattgacagacctaatggaactaaagttgctgtgctgcttatggatacccagggtgcctttgatagccagtcaactatcaaagactgtgcaacggtgtttgctctgagcactatgactagctctgtccaggtatataatctgtctcagaatattcaagaagatgatcttcaacatttgcaattatttacagagtatggaagacttgcgatggaagaaatctaccagaaaccatttcagacattaatgtttttgattcgagattggagctatccttatgaacattcatatggtttggaaggtggaaagcaatttcttgaaaagagattacaggtaaaacaaaatcaacatgaagagcttcagaatgtaaggaagcacatacacaattgtttctcaaatcttggttgcttccttttgccacatcctggtcttaaagttgcaactaatcctagttttgatgggagattgaaagatattgatgaagactttaaacgagagcttcgaaatctggttccattgctgcttgcccctgaaaatttggtagaaaaagagataagtggatctaaagtcacttgtagagatcttgtagaatattttaaggcttacatcaaaatctatcaaggagaagaacttccacatccaaagtccatgcttcaggcaacagctgaagctaataatcttgctgcagtagcaggagcaagagatacctattgtaaaagtatggaacaggtatgtggaggggacaagccttacattgcaccttcagatctggagcgaaaacacttggatctcaaggaagtggcgataaaacaatttcgttcagtaaaaaagatgggtggagatgagttctgccgtcgttatcaggaccagcttgaagctgaaattgaagaaacctatgcaaattttataaagcacaatgatggcaaaaatatcttctatgctgctcgtaccccagccacactgtttgcggtcatgtttgctatgtatataatctcaggactgactggcttcattggcctaaactctatagctgtcttgtgtaaccttgtcatggggttagcactgatatttctttgtacttgggcatatgttaaatactctggggagttcagagaaattggaacagtgattgatcagattgctgaaacactatgggaacaggtgttttccaaactgtttgaagttactagacgtcgaatggttcaccgtgctctttcatcagcacagcgacagagactgtcatccaacaataacaagaagaaaaattagacagtatttttaacctttttctctatctgaagtgttcacacttacacatgtaggacaataagcaggaccgtctgggccggtctgcataaatgctgtatacataccagatttgatgctgcatatagggtatggaattgcacatccatctcataggaattgtaaatggtttgaataagaggaaagtaatttttgttgcattataaaatgtctagtagcatcataagtttttttgagagaagcatctttttatttcccatattcctggttattttcatcattgctttgaattgaatttttatatctatttttatatgtaactctttttttacctcatgtttttgtttgttttgcacatttctcataccacaggtattgaagcccctgggtgataatttgatggaggaaaacataaggcagtctgtaacaaactctatcaaagcaggcctgactgaccaggtgtctcatcatgccagattaaagacagactgacagttcatctcc

SEQ ID NO: 454736 - DNA, 3678 bp, Homo sapiens
aaatcggtacaagatggcggagggggacgaggcagcgcgagggcagcaaccgcaccaggggctgtggcgccggcgacggaccagcgacccaagcgccgcggttaaccacgtctcgtccacgacctccctagagtcttgctctgtcgccaggttggagtgcagtggcacgatcttcgcttactgcaacctcccgggttcaagtgattcctctgcctcagcctcccaagtagctgggattacaggattctcaaagttggattggtggaaacaatgaaccattgacaggctttacatggcgaggtggctgtgaaagagaaacaacaggcatacaagtttggaatgaagtatttgtgattgacagacctaatggaactaaagttgctgtgctgcttatggatacccagggtgcctttgatagccagtcaactatcaaagactgtgcaacggtgtttgctctgagcactatgactagctctgtccaggtatataatctgtctcagaatattcaagaagatgatcttcaacatttgcaattatttacagagtatggaagacttgcgatggaagaaatctaccagaaaccatttcagacattaatgtttttgattcgagattggagctatccttatgaacattcatatggtttggaaggtggaaagcaatttcttgaaaagagattacaggtaaaacaaaatcaacatgaagagcttcagaatgtaaggaagcacatacacaattgtttctcaaatcttggttgcttccttttgccacatcctggtcttaaagttgcaactaatcctagttttgatgggagattgaaagatattgatgaagactttaaacgagagcttcgaaatctggttccattgctgcttgcccctgaaaatttggtagaaaaagagataagtggatctaaagtcacttgtagagatcttgtagaatattttaaggcttacatcaaaatctatcaaggagaagaacttccacatccaaagtccatgcttcaggcaacagctgaagctaataatcttgctgcagtagcaggagcaagagatacctattgtaaaagtatggaacaggtatgtggaggggacaagccttacattgcaccttcagatctggagcgaaaacacttggatctcaaggaagtggcgataaaacaatttcgttcagtaaaaaagatgggtggagatgagttctgccgtcgttatcaggaccagcttgaagctgaaattgaagaaacctatgcaaattttataaagcacaatgatggcaaaaatatcttctatgctgctcgtaccccagccacactgtttgcggtcatgtttgctatgtatataatctcaggactgactggcttcattggcctaaactctatagctgtcttgtgtaaccttgtcatggggttagcactgatatttctttgtacttgggcatatgttaaatactctggggagttcagagaaattggaacagtgattgatcagattgctgaaacactatgggaacaggtattgaagcccctgggtgataatttgatggaggaaaacataaggcagtctgtaacaaactctatcaaagcaggcctgactgaccaggtgtctcatcatgccagattaaagacagactgacagttcatctcctcacggactccactctctttttttttcatgcttgctgtacaatgagaactcaaataaaaataaaccaaagtttacaatcaactgtagaagtagtttagtgtaactggcttcacagatggctgccacagagtgtgaagattgtttgttagttttaagcattcttttaatggctcctaagacatgcagatggactgaggagcattggttaatcatgcacctttgtgccatgtttaactcttttatttctttttacttaatctaatgttagtgaatttgtcttatgtaaaaggatatttcagggaaatattttcagaaatctatttagagtctctttaacacagtgtcccattgaaattttaatttttagagaatttatgaatcactgtttcaagaaccagattggaaagacaatgaagcctttattgagccactacattaaaagtatatattgctttactgccttcaataccagtattacatcaatgcatgtatcagaaacttcacagaaattacatggcaactcttgtagctaagaaagtaattctgaggtgtacatttgtcttgcctttttaaatttataaacttgccctaaaaggagatgcatatctgggaaactgaactgtctttttgcagtttagccttcatgtatataaaatatgccattaattttattggggaagaaattccatccaaaaatgttgcctacagctatgagttaagagtgtctgtacagtgtgtagcttttattttctaaaatcacagatagggcatgtatatgacttataaatatataaatacgattttgtattaaaagttttgtagtttatggcaaaatctggtcctgtggtaggctaaataagtactgtccctgtgaaaggaatgtttgtggctcatgtcagtgtgtgaatgcatagacaatttgaagtttttgatatatttgtgatatttatcttgagcactgcaatctcaccccccccccgcccaccaagggaattcaatgggaatgtttattgtgactttgtcctctgttgcattttaaagttatttcctgtaatttattttcagtacataattaaaaatttgttgtatatataaaatgaaacttgtgattcttttttaaggaatttttcaagtatgtattccacttcataaaccacatttgtttatagtgaaaagagcatgagcaggaaacaccccagttgagagctctaaggcattgtacctcaaaactaagcttgtaaaaagttacttttctgtgtctgtctctataagggaaaacctatgattagcctagttgtagatggggattgttaatttctttctctctctttttttttttggggggtatatgtaaggctagcattttttcagtactttggtggtcttctttgtgaacaccgattaaagtacctagtttggttggttcctttttggagacggagtctctctctgtcacccaggctggagtgcagtggtgcgatctgggctcactgcaacctccacctcctgggttcaagtgattctcccgcctcagcctcctgagtagctgggactacaggtgcgtgccaccattcccggctaatgtttcctattttaagtagagatggggtttcaccgttttagccaggatggtctcaatcgcctgaccttgtgatccgcctgccttggcctcccaaagtgttgggattacaggcgtgagccaccgcgcccggcccttagtttgctttttaagcgaagagaatgcaggtgttgagttgcatgtgtgaaaactctgaatttactttggttgatacatcttcgctcccactcccattcagattctgtttttatatggattgtatttgttttcatctgtattaaattgctaacttatctgttcttaaagaatccacctgaaaagtgtctttttatttcttctgccaccctgttttatgaatgctgtggactgttttttatgaatgaaaaaataatttgttgtataatagcagattttctgaaattaaagacagcttacttttaaaaagttataaaatct

SEQ ID NO: 454737 - DNA, 3572 bp, Homo sapiens
aaatcggtacaagatggcggagggggacgaggcagcgcgagggcagcaaccgcaccaggggctgtggcgccggcgacggaccagcgacccaagcgccgcggttaaccacgtctcgtccacgacctccctaggtgagaattatgaagatgatgacctagtaaattctgatgaggttatgaagaaaccatgtccagtacagattgttcttgctcatgaagatgaccataactttgaacttgatgaagaagctttggagcagatattgctacaggagcacatacgagatcttaacatagtagtggtatctgtggcaggagcttttcgtaaagggaagtcatttctactggacttcatgcttagatacatgtataacaaggtatataatctgtctcagaatattcaagaagatgatcttcaacatttgcaattatttacagagtatggaagacttgcgatggaagaaatctaccagaaaccatttcagacattaatgtttttgattcgagattggagctatccttatgaacattcatatggtttggaaggtggaaagcaatttcttgaaaagagattacaggtaaaacaaaatcaacatgaagagcttcagaatgtaaggaagcacatacacaattgtttctcaaatcttggttgcttccttttgccacatcctggtcttaaagttgcaactaatcctagttttgatgggagattgaaagatattgatgaagactttaaacgagagcttcgaaatctggttccattgctgcttgcccctgaaaatttggtagaaaaagagataagtggatctaaagtcacttgtagagatcttgtagaatattttaaggcttacatcaaaatctatcaaggagaagaacttccacatccaaagtccatgcttcaggcaacagctgaagctaataatcttgctgcagtagcaggagcaagagatacctattgtaaaagtatggaacaggtatgtggaggggacaagccttacattgcaccttcagatctggagcgaaaacacttggatctcaaggaagtggcgataaaacaatttcgttcagtaaaaaagatgggtggagatgagttctgccgtcgttatcaggaccagcttgaagctgaaattgaagaaacctatgcaaattttataaagcacaatgatggcaaaaatatcttctatgctgctcgtaccccagccacactgtttgcggtcatgtttgctatgtatataatctcaggactgactggcttcattggcctaaactctatagctgtcttgtgtaaccttgtcatggggttagcactgatatttctttgtacttgggcatatgttaaatactctggggagttcagagaaattggaacagtgattgatcagattgctgaaacactatgggaacaggtattgaagcccctgggtgataatttgatggaggaaaacataaggcagtctgtaacaaactctatcaaagcaggcctgactgaccaggtgtctcatcatgccagattaaagacagactgacagttcatctcctcacggactccactctctttttttttcatgcttgctgtacaatgagaactcaaataaaaataaaccaaagtttacaatcaactgtagaagtagtttagtgtaactggcttcacagatggctgccacagagtgtgaagattgtttgttagttttaagcattcttttaatggctcctaagacatgcagatggactgaggagcattggttaatcatgcacctttgtgccatgtttaactcttttatttctttttacttaatctaatgttagtgaatttgtcttatgtaaaaggatatttcagggaaatattttcagaaatctatttagagtctctttaacacagtgtcccattgaaattttaatttttagagaatttatgaatcactgtttcaagaaccagattggaaagacaatgaagcctttattgagccactacattaaaagtatatattgctttactgccttcaataccagtattacatcaatgcatgtatcagaaacttcacagaaattacatggcaactcttgtagctaagaaagtaattctgaggtgtacatttgtcttgcctttttaaatttataaacttgccctaaaaggagatgcatatctgggaaactgaactgtctttttgcagtttagccttcatgtatataaaatatgccattaattttattggggaagaaattccatccaaaaatgttgcctacagctatgagttaagagtgtctgtacagtgtgtagcttttattttctaaaatcacagatagggcatgtatatgacttataaatatataaatacgattttgtattaaaagttttgtagtttatggcaaaatctggtcctgtggtaggctaaataagtactgtccctgtgaaaggaatgtttgtggctcatgtcagtgtgtgaatgcatagacaatttgaagtttttgatatatttgtgatatttatcttgagcactgcaatctcaccccccccccgcccaccaagggaattcaatgggaatgtttattgtgactttgtcctctgttgcattttaaagttatttcctgtaatttattttcagtacataattaaaaatttgttgtatatataaaatgaaacttgtgattcttttttaaggaatttttcaagtatgtattccacttcataaaccacatttgtttatagtgaaaagagcatgagcaggaaacaccccagttgagagctctaaggcattgtacctcaaaactaagcttgtaaaaagttacttttctgtgtctgtctctataagggaaaacctatgattagcctagttgtagatggggattgttaatttctttctctctctttttttttttggggggtatatgtaaggctagcattttttcagtactttggtggtcttctttgtgaacaccgattaaagtacctagtttggttggttcctttttggagacggagtctctctctgtcacccaggctggagtgcagtggtgcgatctgggctcactgcaacctccacctcctgggttcaagtgattctcccgcctcagcctcctgagtagctgggactacaggtgcgtgccaccattcccggctaatgtttcctattttaagtagagatggggtttcaccgttttagccaggatggtctcaatcgcctgaccttgtgatccgcctgccttggcctcccaaagtgttgggattacaggcgtgagccaccgcgcccggcccttagtttgctttttaagcgaagagaatgcaggtgttgagttgcatgtgtgaaaactctgaatttactttggttgatacatcttcgctcccactcccattcagattctgtttttatatggattgtatttgttttcatctgtattaaattgctaacttatctgttcttaaagaatccacctgaaaagtgtctttttatttcttctgccaccctgttttatgaatgctgtggactgttttttatgaatgaaaaaataatttgttgtataatagcagattttctgaaattaaagacagcttacttttaaaaagttataaaatct

SEQ ID NO: 454738 - DNA, 2967 bp, Homo sapiens
acaatcagcaggtggcaaatctagcaagttccctctggccttgggtgggtccagagatgctctctggtgatccgcctgccttggcctcccaaattgctgggattacaggtgtgagccatcacacctggcctttgtctcctttactcaagcaggagactctcctcatagccacaacatctgggaatgtgctgggtcacacctgaagccagcacatttctgaatctcacccaaggcccatagcttacatcaaaatctatcaaggagaagaacttccacatccaaagtccatgcttcaggcaacagctgaagctaataatcttgctgcagtagcaggagcaagagatacctattgtaaaagtatggaacaggtatgtggaggggacaagccttacattgcaccttcagatctggagcgaaaacacttggatctcaaggaagtggcgataaaacaatttcgttcagtaaaaaagatgggtggagatgagttctgccgtcgttatcaggaccagcttgaagctgaaattgaagaaacctatgcaaattttataaagcacaatgatggcaaaaatatcttctatgctgctcgtaccccagccacactgtttgcggtcatgtttgctatgtatataatctcaggactgactggcttcattggcctaaactctatagctgtcttgtgtaaccttgtcatggggttagcactgatatttctttgtacttgggcatatgttaaatactctggggagttcagagaaattggaacagtgattgatcagattgctgaaacactatgggaacaggtattgaagcccctgggtgataatttgatggaggaaaacataaggcagtctgtaacaaactctatcaaagcaggcctgactgaccaggtgtctcatcatgccagattaaagacagactgacagttcatctcctcacggactccactctctttttttttcatgcttgctgtacaatgagaactcaaataaaaataaaccaaagtttacaatcaactgtagaagtagtttagtgtaactggcttcacagatggctgccacagagtgtgaagattgtttgttagttttaagcattcttttaatggctcctaagacatgcagatggactgaggagcattggttaatcatgcacctttgtgccatgtttaactcttttatttctttttacttaatctaatgttagtgaatttgtcttatgtaaaaggatatttcagggaaatattttcagaaatctatttagagtctctttaacacagtgtcccattgaaattttaatttttagagaatttatgaatcactgtttcaagaaccagattggaaagacaatgaagcctttattgagccactacattaaaagtatatattgctttactgccttcaataccagtattacatcaatgcatgtatcagaaacttcacagaaattacatggcaactcttgtagctaagaaagtaattctgaggtgtacatttgtcttgcctttttaaatttataaacttgccctaaaaggagatgcatatctgggaaactgaactgtctttttgcagtttagccttcatgtatataaaatatgccattaattttattggggaagaaattccatccaaaaatgttgcctacagctatgagttaagagtgtctgtacagtgtgtagcttttattttctaaaatcacagatagggcatgtatatgacttataaatatataaatacgattttgtattaaaagttttgtagtttatggcaaaatctggtcctgtggtaggctaaataagtactgtccctgtgaaaggaatgtttgtggctcatgtcagtgtgtgaatgcatagacaatttgaagtttttgatatatttgtgatatttatcttgagcactgcaatctcaccccccccccgcccaccaagggaattcaatgggaatgtttattgtgactttgtcctctgttgcattttaaagttatttcctgtaatttattttcagtacataattaaaaatttgttgtatatataaaatgaaacttgtgattcttttttaaggaatttttcaagtatgtattccacttcataaaccacatttgtttatagtgaaaagagcatgagcaggaaacaccccagttgagagctctaaggcattgtacctcaaaactaagcttgtaaaaagttacttttctgtgtctgtctctataagggaaaacctatgattagcctagttgtagatggggattgttaatttctttctctctctttttttttttggggggtatatgtaaggctagcattttttcagtactttggtggtcttctttgtgaacaccgattaaagtacctagtttggttggttcctttttggagacggagtctctctctgtcacccaggctggagtgcagtggtgcgatctgggctcactgcaacctccacctcctgggttcaagtgattctcccgcctcagcctcctgagtagctgggactacaggtgcgtgccaccattcccggctaatgtttcctattttaagtagagatggggtttcaccgttttagccaggatggtctcaatcgcctgaccttgtgatccgcctgccttggcctcccaaagtgttgggattacaggcgtgagccaccgcgcccggcccttagtttgctttttaagcgaagagaatgcaggtgttgagttgcatgtgtgaaaactctgaatttactttggttgatacatcttcgctcccactcccattcagattctgtttttatatggattgtatttgttttcatctgtattaaattgctaacttatctgttcttaaagaatccacctgaaaagtgtctttttatttcttctgccaccctgttttatgaatgctgtggactgttttttatgaatgaaaaaataatttgttgtataatagcagattttctgaaattaaagacagcttacttttaaaaagttataaaatct

SEQ ID NO: 454739 - DNA, 234 bp, Homo sapiens
ttttcagacttgtttattgtacataacttattgtgttaatcagaatttttagagtcatagagtattttttgcataataatggcatattttattttttaggcaacagctgaagctaataatcttgctgcagtagcaggagcaagagatacctattgtaaaagtatggaacaggtttgtacctaaaatttaaatttgatgctggagtgagaagatttttaaattaaaaaaaaaaaa

SEQ ID NO: 454740 - DNA, 3812 bp, Homo sapiens
aaatcggtacaagatggcggagggggacgaggcagcgcgagggcagcaaccgcaccaggggctgtggcgccggcgacggaccagcgacccaagcgccgcggttaaccacgtctcgtccacgacctccctaggtgagaattatgaagatgatgacctagtaaattctgatgaggttatgaagaaaccatgtccagtacagattgttcttgctcatgaagatgaccataactttgaacttgatgaagaagctttggagcagatattgctacaggagcacatacgagatcttaacatagtagtggtatctgtggcaggagcttttcgtaaagggaagtcatttctactggacttcatgcttagatacatgtataacaaggattctcaaagttggattggtggaaacaatgaaccattgacaggctttacatggcgaggtggctgtgaaagagaaacaacaggcatacaagtttggaatgaagtatttgtgattgacagacctaatggaactaaagttgctgtgctgcttatggatacccagggtgcctttgatagccagtcaactatcaaagactgtgcaacggtgtttgctctgagcactatgactagctctgtccaggtatataatctgtctcagaatattcaagaagatgatcttcaacatttgcaattatttacagagtatggaagacttgcgatggaagaaatctaccagaaaccatttcagacattaatgtttttgattcgagattggagctatccttatgaacattcatatggtttggaaggtggaaagcaatttcttgaaaagagattacaggtaaaacaaaatcaacatgaagagcttcagaatgtaaggaagcacatacacaattgtttctcaaatcttggttgcttccttttgccacatcctggtcttaaagttgcaactaatcctagttttgatgggagattgaaagatattgatgaagactttaaacgagagcttcgaaatctggttccattgctgcttgcccctgaaaatttggtagaaaaagagataagtggatctaaagtcacttgtagagatcttgtagaatattttaaggcttacatcaaaatctatcaaggagaagaacttccacatccaaagtccatgcttcaggcaacagctgaagctaataatcttgctgcagtagcaggagcaagagatacctattgtaaaagtatggaacaggtatgtggaggggacaagccttacattgcaccttcagatctggagcgaaaacacttggatctcaaggaagtggcgataaaacaatttcgttcagtaaaaaagatgggtggagatgagttctgccgtcgttatcaggaccagcttgaagctgaaattgaagaaacctatgcaaattttataaagcacaatgatggcaaaaatatcttctatgctgctcgtaccccagccacactgtttgcggtcatgtttgctatgtatataatctcaggactgactggcttcattggcctaaactctatagctgtcttgtgtaaccttgtcatggggttagcactgatatttctttgtacttgggcatatgttaaatactctggggagttcagagaaattggaacagtgattgatcagattgctgaaacactatgggaacaggtattgaagcccctgggtgataatttgatggaggaaaacataaggcagtctgtaacaaactctatcaaagcaggcctgactgaccaggtgtctcatcatgccagattaaagacagactgacagttcatctcctcacggactccactctctttttttttcatgcttgctgtacaatgagaactcaaataaaaataaaccaaagtttacaatcaactgtagaagtagtttagtgtaactggcttcacagatggctgccacagagtgtgaagattgtttgttagttttaagcattcttttaatggctcctaagacatgcagatggactgaggagcattggttaatcatgcacctttgtgccatgtttaactcttttatttctttttacttaatctaatgttagtgaatttgtcttatgtaaaaggatatttcagggaaatattttcagaaatctatttagagtctctttaacacagtgtcccattgaaattttaatttttagagaatttatgaatcactgtttcaagaaccagattggaaagacaatgaagcctttattgagccactacattaaaagtatatattgctttactgccttcaataccagtattacatcaatgcatgtatcagaaacttcacagaaattacatggcaactcttgtagctaagaaagtaattctgaggtgtacatttgtcttgcctttttaaatttataaacttgccctaaaaggagatgcatatctgggaaactgaactgtctttttgcagtttagccttcatgtatataaaatatgccattaattttattggggaagaaattccatccaaaaatgttgcctacagctatgagttaagagtgtctgtacagtgtgtagcttttattttctaaaatcacagatagggcatgtatatgacttataaatatataaatacgattttgtattaaaagttttgtagtttatggcaaaatctggtcctgtggtaggctaaataagtactgtccctgtgaaaggaatgtttgtggctcatgtcagtgtgtgaatgcatagacaatttgaagtttttgatatatttgtgatatttatcttgagcactgcaatctcaccccccccccgcccaccaagggaattcaatgggaatgtttattgtgactttgtcctctgttgcattttaaagttatttcctgtaatttattttcagtacataattaaaaatttgttgtatatataaaatgaaacttgtgattcttttttaaggaatttttcaagtatgtattccacttcataaaccacatttgtttatagtgaaaagagcatgagcaggaaacaccccagttgagagctctaaggcattgtacctcaaaactaagcttgtaaaaagttacttttctgtgtctgtctctataagggaaaacctatgattagcctagttgtagatggggattgttaatttctttctctctctttttttttttggggggtatatgtaaggctagcattttttcagtactttggtggtcttctttgtgaacaccgattaaagtacctagtttggttggttcctttttggagacggagtctctctctgtcacccaggctggagtgcagtggtgcgatctgggctcactgcaacctccacctcctgggttcaagtgattctcccgcctcagcctcctgagtagctgggactacaggtgcgtgccaccattcccggctaatgtttcctattttaagtagagatggggtttcaccgttttagccaggatggtctcaatcgcctgaccttgtgatccgcctgccttggcctcccaaagtgttgggattacaggcgtgagccaccgcgcccggcccttagtttgctttttaagcgaagagaatgcaggtgttgagttgcatgtgtgaaaactctgaatttactttggttgatacatcttcgctcccactcccattcagattctgtttttatatggattgtatttgttttcatctgtattaaattgctaacttatctgttcttaaagaatccacctgaaaagtgtctttttatttcttctgccaccctgttttatgaatgctgtggactgttttttatgaatgaaaaaataatttgttgtataatagcagattttctgaaattaaagacagcttacttttaaaaagttataaaatct

SEQ ID NO: 454741 - DNA, 4289 bp, Homo sapiens
aaatcggtacaagatggcggagggggacgaggcagcgcgagggcagcaaccgcaccaggggctgtggcgccggcgacggaccagcgacccaagcgccgcggttaaccacgtctcgtccacgacctccctaggtgagaattatgaagatgatgacctagtaaattctgatgaggttatgaagaaaccatgtccagtacagattgttcttgctcatgaagatgaccataactttgaacttgatgaagaagctttggagcagatattgctacaggagcacatacgagatcttaacatagtagtggtatctgtggcaggagcttttcgtaaagggaagtcatttctactggacttcatgcttagatacatgtataacaaggattctcaaagttggattggtggaaacaatgaaccattgacaggctttacatggcgaggtggctgtgaaagagaaacaacaggcatacaagtttggaatgaagtatttgtgattgacagacctaatggaactaaagttgctgtgctgcttatggatacccagggtgcctttgatagccagtcaactatcaaagactgtgcaacggtgtttgctctgagcactatgactagctctgtccaggtatataatctgtctcagaatattcaagaagatgatcttcaacatttgcaattatttacagagtatggaagacttgcgatggaagaaatctaccagaaaccatttcagacattaatgtttttgattcgagattggagctatccttatgaacattcatatggtttggaaggtggaaagcaatttcttgaaaagagattacaggtaaaacaaaatcaacatgaagagcttcagaatgtaaggaagcacatacacaattgtttctcaaatcttggttgcttccttttgccacatcctggtcttaaagttgcaactaatcctagttttgatgggagattgaaagatattgatgaagactttaaacgagagcttcgaaatctggttccattgctgcttgcccctgaaaatttggtagaaaaagagataagtggatctaaagtcacttgtagagatcttgtagaatattttaaggcttacatcaaaatctatcaaggagaagaacttccacatccaaagtccatgcttcaggcaacagctgaagctaataatcttgctgcagtagcaggagcaagagatacctattgtaaaagtatggaacaggtatgtggaggggacaagccttacattgcaccttcagatctggagcgaaaacacttggatctcaaggaagtggcgataaaacaatttcgttcagtaaaaaagatgggtggagatgagttctgccgtcgttatcaggaccagcttgaagctgaaattgaagaaacctatgcaaattttataaagcacaatgatggcaaaaatatcttctatgctgctcgtaccccagccacactgtttgcggtcatgtttgctatgtatataatctcaggactgactggcttcattggcctaaactctatagctgtcttgtgtaaccttgtcatggggttagcactgatatttctttgtacttgggcatatgttaaatactctggggagttcagagaaattggaacagtgattgatcagattgctgaaacactatgggaacaggtgttttccaaactgtttgaagttactagacgtcgaatggttcaccgtgctctttcatcagcacagcgacagagactgtcatccaacaataacaagaagaaaaattagacagtatttttaacctttttctctatctgaagtgttcacacttacacatgtaggacaataagcaggaccgtctgggccggtctgcataaatgctgtatacataccagatttgatgctgcatatagggtatggaattgcacatccatctcataggaattgtaaatggtttgaataagaggaaagtaatttttgttgcattataaaatgtctagtagcatcataagtttttttgagagaagcatctttttatttcccatattcctggttattttcatcattgctttgaattgaatttttatatctatttttatatgtaactctttttttacctcatgtttttgtttgttttgcacatttctcataccacaggtattgaagcccctgggtgataatttgatggaggaaaacataaggcagtctgtaacaaactctatcaaagcaggcctgactgaccaggtgtctcatcatgccagattaaagacagactgacagttcatctcctcacggactccactctctttttttttcatgcttgctgtacaatgagaactcaaataaaaataaaccaaagtttacaatcaactgtagaagtagtttagtgtaactggcttcacagatggctgccacagagtgtgaagattgtttgttagttttaagcattcttttaatggctcctaagacatgcagatggactgaggagcattggttaatcatgcacctttgtgccatgtttaactcttttatttctttttacttaatctaatgttagtgaatttgtcttatgtaaaaggatatttcagggaaatattttcagaaatctatttagagtctctttaacacagtgtcccattgaaattttaatttttagagaatttatgaatcactgtttcaagaaccagattggaaagacaatgaagcctttattgagccactacattaaaagtatatattgctttactgccttcaataccagtattacatcaatgcatgtatcagaaacttcacagaaattacatggcaactcttgtagctaagaaagtaattctgaggtgtacatttgtcttgcctttttaaatttataaacttgccctaaaaggagatgcatatctgggaaactgaactgtctttttgcagtttagccttcatgtatataaaatatgccattaattttattggggaagaaattccatccaaaaatgttgcctacagctatgagttaagagtgtctgtacagtgtgtagcttttattttctaaaatcacagatagggcatgtatatgacttataaatatataaatacgattttgtattaaaagttttgtagtttatggcaaaatctggtcctgtggtaggctaaataagtactgtccctgtgaaaggaatgtttgtggctcatgtcagtgtgtgaatgcatagacaatttgaagtttttgatatatttgtgatatttatcttgagcactgcaatctcaccccccccccgcccaccaagggaattcaatgggaatgtttattgtgactttgtcctctgttgcattttaaagttatttcctgtaatttattttcagtacataattaaaaatttgttgtatatataaaatgaaacttgtgattcttttttaaggaatttttcaagtatgtattccacttcataaaccacatttgtttatagtgaaaagagcatgagcaggaaacaccccagttgagagctctaaggcattgtacctcaaaactaagcttgtaaaaagttacttttctgtgtctgtctctataagggaaaacctatgattagcctagttgtagatggggattgttaatttctttctctctctttttttttttggggggtatatgtaaggctagcattttttcagtactttggtggtcttctttgtgaacaccgattaaagtacctagtttggttggttcctttttggagacggagtctctctctgtcacccaggctggagtgcagtggtgcgatctgggctcactgcaacctccacctcctgggttcaagtgattctcccgcctcagcctcctgagtagctgggactacaggtgcgtgccaccattcccggctaatgtttcctattttaagtagagatggggtttcaccgttttagccaggatggtctcaatcgcctgaccttgtgatccgcctgccttggcctcccaaagtgttgggattacaggcgtgagccaccgcgcccggcccttagtttgctttttaagcgaagagaatgcaggtgttgagttgcatgtgtgaaaactctgaatttactttggttgatacatcttcgctcccactcccattcagattctgtttttatatggattgtatttgttttcatctgtattaaattgctaacttatctgttcttaaagaatccacctgaaaagtgtctttttatttcttctgccaccctgttttatgaatgctgtggactgttttttatgaatgaaaaaataatttgttgtataatagcagattttctgaaattaaagacagcttacttttaaaaagttataaaatct

SEQ ID NO: 454742 - DNA, 2853 bp, Homo sapiens
cagatacagagcacagtgtaaaatttttttgtcttcagtttccgttagtcatatttggaaaatgattttgcttgagtaggttcaacatataaacaataactagattatgataacctgtgaggtattgtaagtgagtttaaaactgactcaatcatgtaagtggtttgactttctgagactaaaaactatgaacaggaacttctttcaagtgttaattatttctagcatgtaatactgtaattctgtctgtccaggtatgtggaggggacaagccttacattgcaccttcagatctggagcgaaaacacttggatctcaaggaagtggcgataaaacaatttcgttcagtaaaaaagatgggtggagatgagttctgccgtcgttatcaggaccagcttgaagctgaaattgaagaaacctatgcaaattttataaagcacaatgatggcaaaaatatcttctatgctgctcgtaccccagccacactgtttgcggtcatgtttgctatgtatataatctcaggactgactggcttcattggcctaaactctatagctgtcttgtgtaaccttgtcatggggttagcactgatatttctttgtacttgggcatatgttaaatactctggggagttcagagaaattggaacagtgattgatcagattgctgaaacactatgggaacaggtattgaagcccctgggtgataatttgatggaggaaaacataaggcagtctgtaacaaactctatcaaagcaggcctgactgaccaggtgtctcatcatgccagattaaagacagactgacagttcatctcctcacggactccactctctttttttttcatgcttgctgtacaatgagaactcaaataaaaataaaccaaagtttacaatcaactgtagaagtagtttagtgtaactggcttcacagatggctgccacagagtgtgaagattgtttgttagttttaagcattcttttaatggctcctaagacatgcagatggactgaggagcattggttaatcatgcacctttgtgccatgtttaactcttttatttctttttacttaatctaatgttagtgaatttgtcttatgtaaaaggatatttcagggaaatattttcagaaatctatttagagtctctttaacacagtgtcccattgaaattttaatttttagagaatttatgaatcactgtttcaagaaccagattggaaagacaatgaagcctttattgagccactacattaaaagtatatattgctttactgccttcaataccagtattacatcaatgcatgtatcagaaacttcacagaaattacatggcaactcttgtagctaagaaagtaattctgaggtgtacatttgtcttgcctttttaaatttataaacttgccctaaaaggagatgcatatctgggaaactgaactgtctttttgcagtttagccttcatgtatataaaatatgccattaattttattggggaagaaattccatccaaaaatgttgcctacagctatgagttaagagtgtctgtacagtgtgtagcttttattttctaaaatcacagatagggcatgtatatgacttataaatatataaatacgattttgtattaaaagttttgtagtttatggcaaaatctggtcctgtggtaggctaaataagtactgtccctgtgaaaggaatgtttgtggctcatgtcagtgtgtgaatgcatagacaatttgaagtttttgatatatttgtgatatttatcttgagcactgcaatctcaccccccccccgcccaccaagggaattcaatgggaatgtttattgtgactttgtcctctgttgcattttaaagttatttcctgtaatttattttcagtacataattaaaaatttgttgtatatataaaatgaaacttgtgattcttttttaaggaatttttcaagtatgtattccacttcataaaccacatttgtttatagtgaaaagagcatgagcaggaaacaccccagttgagagctctaaggcattgtacctcaaaactaagcttgtaaaaagttacttttctgtgtctgtctctataagggaaaacctatgattagcctagttgtagatggggattgttaatttctttctctctctttttttttttggggggtatatgtaaggctagcattttttcagtactttggtggtcttctttgtgaacaccgattaaagtacctagtttggttggttcctttttggagacggagtctctctctgtcacccaggctggagtgcagtggtgcgatctgggctcactgcaacctccacctcctgggttcaagtgattctcccgcctcagcctcctgagtagctgggactacaggtgcgtgccaccattcccggctaatgtttcctattttaagtagagatggggtttcaccgttttagccaggatggtctcaatcgcctgaccttgtgatccgcctgccttggcctcccaaagtgttgggattacaggcgtgagccaccgcgcccggcccttagtttgctttttaagcgaagagaatgcaggtgttgagttgcatgtgtgaaaactctgaatttactttggttgatacatcttcgctcccactcccattcagattctgtttttatatggattgtatttgttttcatctgtattaaattgctaacttatctgttcttaaagaatccacctgaaaagtgtctttttatttcttctgccaccctgttttatgaatgctgtggactgttttttatgaatgaaaaaataatttgttgtataatagcagattttctgaaattaaagacagcttacttttaaaaagttataaaatct

SEQ ID NO: 454743 - DNA, 664 bp, Homo sapiens
cattgggatttcggtcctggtggtccctaatttgaagttttttttccatggcttagaggtatttccaatgagaaatgaaaactggccctggggctatctgatgggttagagtgcctttgagaagaaatcagtggatactggatttgctcctgtcaatgaagttttaaaggctgtaccaatcctctaatatgaaatgtggaaaagaatgaagagcagcagtaaaagaaatatctagtgaaaaaacaggaagcgtattgaagcttggactagaatttcttcttggtattaaagagacaagtttatcacagaattttttttcctgctggcctattgctataccaatgatgttgagtggcattttctttttagtttttcattaaaatatattccatatctacaactataatatcaaataaagtgattattttttacaaccctcttaacattttttggagatgacatttctgattttcagaaattaacataaaatccagaagcaagattccgtaagctgagaactctggacagttgatcagctttacctatggtgctttgcctttaactagagtgtgtgatggtagattatttcagatatgtatgtaaaactgtttcctgaacaataagatgtatgaacggagcagaaataaatactttttctaattaa

SEQ ID NO: 454744 - DNA, 625 bp, Homo sapiens
taggagatagatgtgtcacgtgaatctagtcaccccaaccaaacaattttagggctatctgatgggttagagtgcctttgagaagaaatcagtggatactggatttgctcctgtcaatgaagttttaaaggctgtaccaatcctctaatatgaaatgtggaaaagaatgaagagcagcagtaaaagaaatatctagtgaaaaaacaggaagcgtattgaagcttggactagaatttcttcttggtattaaagagacaagtttatcacagaattttttttcctgctggcctattgctataccaatgatgttgagtggcattttctttttagtttttcattaaaatatattccatatctacaactataatatcaaataaagtgattattttttacaaccctcttaacattttttggagatgacatttctgattttcagaaattaacataaaatccagaagcaagattccgtaagctgagaactctggacagttgatcagctttacctatggtgctttgcctttaactagagtgtgtgatggtagattatttcagatatgtatgtaaaactgtttcctgaacaataagatgtatgaacggagcagaaataaatactttttctaattaa

SEQ ID NO: 454745 - DNA, 1319 bp, Homo sapiens
acttgttagggagggcgggcctgtttccgggaggcgcgtggggcttgaggccgagaacggcccttgctgccaccaacatggagactttgtaccgtgtcccgttcttagtgctcgaatgtcccaacctgaagctgaagaagccgccctggttgcacatgccgtcggccatgactgtgtatgctctggtggtggtgtcttacttcctcatcaccggaggaataatttatgatgttattgttgaacctccaagtgtcggttctatgactgatgaacatgggcatcagaggccagtagctttcttggcctacagagtaaatggacaatatattatggaaggacttgcatccagcttcctatttacaatgggaggtttaggtttcataatcctggaccgatcgaatgcaccaaatatcccaaaactcaatagattccttcttctgttcattggattcgtctgtgtcctattgagttttttcatggctagagtattcatgagaatgaaactgccgggctatctgatgggttagagtgcctttgagaagaaatcagtggatactggatttgctcctgtcaatgaagttttaaaggctgtaccaatcctctaatatgaaatgtggaaaagaatgaagagcagcagtaaaagaaatatctagtgaaaaaacaggaagcgtattgaagcttggactagaatttcttcttggtattaaagagacaagtttatcacagaattttttttcctgctggcctattgctataccaatgatgttgagtggcattttctttttagtttttcattaaaatatattccatatctacaactataatatcaaataaagtgattattttttacaaccctcttaacattttttggagatgacatttctgattttcagaaattaacataaaatccagaagcaagattccgtaagctgagaactctggacagttgatcagctttacctatggtgctttgcctttaactagagtgtgtgatggtagattatttcagatatgtatgtaaaactgtttcctgaacaataagatgtatgaacggagcagaaataaatactttttctaattaaaaaaaaaaaaaaaaaaaaaaaaaaaaaaaaaaaaaaaaaaaaaaaaaaaaaaaaaaaaagggaaaaaaaaaaaaaaaaaaaaaaaaaaaaccttgtgggccgcttgggccaagtcgattttagactggacaaggtttatccttgcgcccaaatttggggctaattggcccatttggccttatggggggcggtataacaattaatggcccgcggtttaacaaggtgggcatgggagtg

SEQ ID NO: 454746 - DNA, 1029 bp, Homo sapiens
  misc_feature (1015)..(1015): n is a, c, g, or t
acttgttagggagggcgggcctgtttccgggaggcgcgtggggcttgaggccgagaacggcccttgctgccaccaacatggagactttgtaccgtgtcccgttcttagtgctcgaatgtcccaacctgaagctgaagaagccgccctggttgcacatgccgtcggccatgactgtgtatgctctggtggtggtgtcttacttcctcatcaccggaggaataatttatgatgttattgttgaacctccaagtgtcggttctatgactgatgaacatgggcatcagaggccagtagctttcttggcctacagagtaaatggacaatatattatggaaggacttgcatccagcttcctatttacaatgggaggtttaggtttcataatcctggaccgatcgaatgcaccaaatatcccaaaactcaatagattccttcttctgttcattggattcgtctgtgtcctattgagttttttcatggctagagtattcatgagaatgaaactgccgggctatctgatgggttagagtgcctttgagaagaaatcagtggatactggatttgctcctgtcaatgaagttttaaaggctgtaccaatcctctaatatgaaatgtggaaaagaatgaagagcagcagtaaaagaaatatctagtgaaaaaacaggaagcgtattgaagcttggactagaatttcttcttggtattaaagagacaagtttatcacagaattttttttcctgctggcctattgctataccaatgatgttgagtggcattttctttttagtttttcattaaaatatattccatatctacaactataatatcaaataaagtgattattttttacaaccctcttaacattttttggagatgacatttctgattttcagaaattaacataaaatccagaagcaagattccgtaagctgagaactctggacagttgatcagctttacctatggtgctttgcctttaactagagtgtgtgatggtagatatagaagaggcacntttgggaccgagcc

SEQ ID NO: 454747 - DNA, 903 bp, Homo sapiens
acttgttagggagggcgggcctgtttccgggaggcgcgtggggcttgaggccgagaacggcccttgctgccaccaacatggagactttgtaccgtgtcccgttcttagtgctcgaatgtcccaacctgaagctgaagaagccgccctggttgcacatgccgtcggccatgactgtgtatgctctggtggtggtgtcttacttcctcatcaccggaggaataatttatgatgttattgttgaacctccaagtgtcggttctatgactgatgaacatgggcatcagaggccagtagctttcttggcctacagagtaaatggacaatatattatggaaggacttgcatccagcttcctatttacaatgggaggtttaggtttcataatcctggaccgatcgaatgcaccaaatatcccaaaactcaatagattccttcttctgttcattggattcgtctgtgtcctattgagttttttcatggctagagtattcatgagaatgaaactgccgggctatctgatgggttagagtgcctttgagaagaaatcagtggatactggatttgctcctgtcaatgaagttttaaaggctgtaccaatcctctaatatgaaatgtggaaaagaatgaagagcagcagtaaaagaaatatctagtgaaaaaacaggaagcgtattgaagcttggactagaatttcttcttggtattaaagagacaagtttatcacagaattttttttcctgctggcctattgctataccaatgatgttgagtggcattttctttttagtttttcattaaaatatattccacctactcactatcaatacattcatgtattgatatgacgttggaggatgaaccagatagtgaggaaagttgagccaatatattacttgaagtccg

SEQ ID NO: 454748 - DNA, 1080 bp, Homo sapiens
tgcgtggggctgagggcgagaacggtccttgatgctgccaatatggggactctgtaccgtgtcgcgcactaaggctggcgagtgtcctaacctggaagcatagaaagaagcggggcctggtggagacgatgtcggatcggactatgaacatgtgtattgttcatgtctggtgagtgttcttacattccctcgatcaatcggaggaaatcatctggaataatttatgatgttattgttgaacctccaagtgtcggttctatgactgatgaacatgggcatcagaggccagtagctttcttggcctacagagtaaatggacaatatattatggaaggacttgcatccagcttcctatttacaatgggaggtttaggtttcataatcctggaccgatcgaatgcaccaaatatcccaaaactcaatagattccttcttctgttcattggattcgtctgtgtcctattgagttttttcatggctagagtattcatgagaatgaaactgccgggctatctgatgggttagagtgcctttgagaagaaatcagtggatactggatttgctcctgtcaatgaagttttaaaggctgtaccaatcctctaatatgaaatgtggaaaagaatgaagagcagcagtaaaagaaatatctagtgaaaaaacaggaagcgtattgaagcttggactagaatttcttcttggtattaaagagacaagtttatcacagaattttttttcctgctggcctattgctataccaatgatgttgagtggcattttctttttagtttttcattaaaatatattccatatctacaactataatatcaaataaagtgattattttttacaaccctcttaacattttttggagatgacatttctgattttcagaaattaacataaaatccagaagcaagattccgtaagctgagaactctggacagttgatcagctttacctatggtgctttgcctttaactagagtgtgtgatggtagattatttcagatatgtatgtaaaactgtttcctgaacaataagatgtatgaacggagcagaaataaatactttttctaattaa

SEQ ID NO: 454749 - DNA, 999 bp, Homo sapiens
caacctgggcgacagagtgagactctgtctcaaaaaaaaaaaagtaaatgaaccttaagagacaatgaaaactataatcctgttttcaaaaattagtaatacaatctaatctgttctgttgtctttcttataggaataatttatgatgttattgttgaacctccaagtgtcggttctatgactgatgaacatgggcatcagaggccagtagctttcttggcctacagagtaaatggacaatatattatggaaggacttgcatccagcttcctatttacaatgggaggtttaggtttcataatcctggaccgatcgaatgcaccaaatatcccaaaactcaatagattccttcttctgttcattggattcgtctgtgtcctattgagttttttcatggctagagtattcatgagaatgaaactgccgggctatctgatgggttagagtgcctttgagaagaaatcagtggatactggatttgctcctgtcaatgaagttttaaaggctgtaccaatcctctaatatgaaatgtggaaaagaatgaagagcagcagtaaaagaaatatctagtgaaaaaacaggaagcgtattgaagcttggactagaatttcttcttggtattaaagagacaagtttatcacagaattttttttcctgctggcctattgctataccaatgatgttgagtggcattttctttttagtttttcattaaaatatattccatatctacaactataatatcaaataaagtgattattttttacaaccctcttaacattttttggagatgacatttctgattttcagaaattaacataaaatccagaagcaagattccgtaagctgagaactctggacagttgatcagctttacctatggtgctttgcctttaactagagtgtgtgatggtagattatttcagatatgtatgtaaaactgtttcctgaacaataagatgtatgaacggagcagaaataaatactttttctaattaa

SEQ ID NO: 454750 - DNA, 1028 bp, Homo sapiens
acttgttagggagggcgggcctgtttccgggaggcgcgtggggcttgaggccgagaacggcccttgctgccaccaacatggagactttgtaccgtgtcccgttcttagtgctcgaatgtcccaacctgaagctgaagaagccgccctggttgcacatgccgtcggccatgactgtgtatgctctggtggtggtgtcttacttcctcatcaccggaggaataatttatgatgttattgttgaacctccaagtgtcggttctatgactgatgaacatgggcatcagaggccagtagctttcttggcctacagagtaaatggacaatatattatggaaggacttgcatccagcttcctatttacaatgggaggtttaggtttcataatcctggaccgatcgaatgcaccaaatatcccttttttcatggctagagtattcatgagaatgaaactgccgggctatctgatgggttagagtgcctttgagaagaaatcagtggatactggatttgctcctgtcaatgaagttttaaaggctgtaccaatcctctaatatgaaatgtggaaaagaatgaagagcagcagtaaaagaaatatctagtgaaaaaacaggaagcgtattgaagcttggactagaatttcttcttggtattaaagagacaagtttatcacagaattttttttcctgctggcctattgctataccaatgatgttgagtggcattttctttttagtttttcattaaaatatattccatatctacaactataatatcaaataaagtgattattttttacaaccctcttaacattttttggagatgacatttctgattttcagaaattaacataaaatccagaagcaagattccgtaagctgagaactctggacagttgatcagctttacctatggtgctttgcctttaactagagtgtgtgatggtagattatttcagatatgtatgtaaaactgtttcctgaacaataagatgtatgaacggagcagaaataaatactttttctaattaa

SEQ ID NO: 454751 - DNA, 1013 bp, Homo sapiens
acttgttagggagggcgggcctgtttccgggaggcgcgtggggcttgaggccgagaacggcccttgctgccaccaacatggagactttgtaccgtgtcccgttcttagtgctcgaatgtcccaacctgaagctgaagaagccgccctggttgcacatgccgtcggccatgactgtgtatgctctggtggtggtgtcttacttcctcatcaccggaggaataatttatgatgttattgttgaacctccaagtgtcggttctatgactgatgaacatgggcatcagaggccagtagctttcttggcctacagagtaaatggacaatatattatggaaggacttgcatccagcttcctatttacaatgggaggtttaggtttcataatcctggaccgatcgaatgcaccaaatatcccaaaactcaatagattccttcttctgttcattggattcgtctgtgtcctattgagttttttcatggctagagtattcatgagaatgaaactgccgggctatctgatgggttagagtgcctttgagaagaaatcagtggatactggatttgctcctgtcaatgaagttttaaaggctgtaccaatcctctaatatgaaatgtggaaaagaatgaagagcagcagtaaaagaaatatctagtgaaaattttttttcctgctggcctattgctataccaatgatgttgagtggcattttctttttagtttttcattaaaatatattccatatctacaactataatatcaaataaagtgattattttttacaaccctcttaacattttttggagatgacatttctgattttcagaaattaacataaaatccagaagcaagattccgtaagctgagaactctggacagttgatcagctttacctatggtgctttgcctttaactagagtgtgtgatggtagattatttcagatatgtatgtaaaactgtttcctgaacaataagatgtatgaacggagcagaaataaatactttttctaattaa

SEQ ID NO: 454752 - DNA, 811 bp, Homo sapiens
acttgttagggagggcgggcctgtttccgggaggcgcgtggggcttgaggccgagaacggcccttgctgccaccaacatggagactttgtaccgtgtcccgttcttagtgctcgaatgtcccaacctgaagctgaagaagccgccctggttgcacatgccgtcggccatgactgtgtatgctctggtggtggtgtcttacttcctcatcaccggaggaataatttatgatgttattgttgaacctccaagtgtcggttctatgactgatgaacatgggcatcagaggccagtagctttcttggcctacagagtaaatggacaatatattatggaaggacttgcatccagcttcctatttacaatgggaggtttaggtttcataatcctggaccgatcgaatgcaccaaatatcccaaaactcaatagattccttcttctgttcattggattcgtctgtgtcctattgagttttttcatggctagagtattcatgagaatgaaactgccgggctatctgatgggttagagtgcctttgagaagaaatcagtggatactggatttgctcctgtcaatgaagttttaaaggctgtaccaatcctctaatatgaaatgtggaaaagaatgaagagcagcagtaaaagaaatatctagtgaaacaggaggtatgagtggacaaaattctctggctaagagcagtttccagaatttttctggggatgggtaccaggtgtgggggtctcttggtttaaaatttcattccttttacaagggttttaccttcattttgggggcttttgaaacaaaacagc

SEQ ID NO: 454753 - DNA, 1055 bp, Homo sapiens
agctgatatccgaggttcatttttagcaaataagggacgtaattcattctaaagaaacaaaacatttgtacagctgctgaggacaatgtgtagtagagagggtgaggaatttggagtccagttttggcctgccacttaatagctctgagactttggattagttctgtgaactctcttggcctcaggttccaaacctgttaaatgaagtattaatgtaccttggggagttacagttgtcaacattaaatgagaaggtgtgctctcaatcataatgtaagtgttaatcaatgtcagtgttttcattctaaagatagagtcctaaaagttctgtttcaagttagattatggccacagtttcaaaaataaatgaataaaccattactgtttttgttttgtttcgtattgagacggagtctcgctctgttgcccaggctggagtgcagtggcgtgatctcggctcactacaaactctgcctcccaggggctatctgatgggttagagtgcctttgagaagaaatcagtggatactggatttgctcctgtcaatgaagttttaaaggctgtaccaatcctctaatatgaaatgtggaaaagaatgaagagcagcagtaaaagaaatatctagtgaaaaaacaggaagcgtattgaagcttggactagaatttcttcttggtattaaagagacaagtttatcacagaattttttttcctgctggcctattgctataccaatgatgttgagtggcattttctttttagtttttcattaaaatatattccatatctacaactataatatcaaataaagtgattattttttacaaccctcttaacattttttggagatgacatttctgattttcagaaattaacataaaatccagaagcaagattccgtaagctgagaactctggacagttgatcagctttacctatggtgctttgcctttaactagagtgtgtgatggtagattatttcagatatgtatgtaaaactgtttcctgaacaataagatgtatgaacggagcagaaataaatactttttctaattaa

SEQ ID NO: 454754 - DNA, 763 bp, Homo sapiens
cactatgtagatggggtgaggggggcaaaatatgaaataaggaccataataaagaatcacgcaattatatttttggattgttatttgatatatcataaaatttgttttggcattttgaaatactatgataataagagaatataaaaacaattcttttcactttttgtgcttataattatatttctgcaggggctatctgatgggttagagtgcctttgagaagaaatcagtggatactggatttgctcctgtcaatgaagttttaaaggctgtaccaatcctctaatatgaaatgtggaaaagaatgaagagcagcagtaaaagaaatatctagtgaaaaaacaggaagcgtattgaagcttggactagaatttcttcttggtattaaagagacaagtttatcacagaattttttttcctgctggcctattgctataccaatgatgttgagtggcattttctttttagtttttcattaaaatatattccatatctacaactataatatcaaataaagtgattattttttacaaccctcttaacattttttggagatgacatttctgattttcagaaattaacataaaatccagaagcaagattccgtaagctgagaactctggacagttgatcagctttacctatggtgctttgcctttaactagagtgtgtgatggtagattatttcagatatgtatgtaaaactgtttcctgaacaataagatgtatgaacggagcagaaataaatactttttctaattaa

SEQ ID NO: 454755 - DNA, 424 bp, Homo sapiens
  misc_feature (391)..(391): n is a, c, g, or t
  misc_feature (410)..(410): n is a, c, g, or t
acttgttagggagggcgggcctgtttccgggaggcgcgtggggcttgaggccgagaacggcccttgctgccaccaacatggagactttgtaccgtgtcccgttcttagtgctcgaatgtcccaacctgaagctgaagaagccgccctggttgcacatgccgtcggccatgactgtgtatgctctggtggtggtgtcttacttcctcatcaccggaggaataatttatgatgttattgttgaacctccaagtgtcggttctatgactgatgaacatgggcatcagaggccagtagctttcttggcctacagagtaaatggacaatatattatggaaggacttgcatccagcttcctatttacaatgggaggtttttaagggcttttcatttnccctgggaccccggatccngttggcctaccccc

SEQ ID NO: 454756 - DNA, 1082 bp, Homo sapiens
acttgttagggagggcgggcctgtttccgggaggcgcgtggggcttgaggccgagaacggcccttgctgccaccaacatggagactttgtaccgtgtcccgttcttagtgctcgaatgtcccaacctgaagctgaagaagccgccctggttgcacatgccgtcggccatgactgtgtatgctctggtggtggtgtcttacttcctcatcaccggaggaataatttatgatgttattgttgaacctccaagtgtcggttctatgactgatgaacatgggcatcagaggccagtagctttcttggcctacagagtaaatggacaatatattatggaaggacttgcatccagcttcctatttacaatgggaggtttaggtttcataatcctggaccgatcgaatgcaccaaatatcccaaaactcaatagattccttcttctgttcattggattcgtctgtgtcctattgagttttttcatggctagagtattcatgagaatgaaactgccgggctatctgatgggttagagtgcctttgagaagaaatcagtggatactggatttgctcctgtcaatgaagttttaaaggctgtaccaatcctctaatatgaaatgtggaaaagaatgaagagcagcagtaaaagaaatatctagtgaaaaaacaggaagcgtattgaagcttggactagaatttcttcttggtattaaagagacaagtttatcacagaattttttttcctgctggcctattgctataccaatgatgttgagtggcattttctttttagtttttcattaaaatatattccatatctacaactataatatcaaataaagtgattattttttacaaccctcttaacattttttggagatgacatttctgattttcagaaattaacataaaatccagaagcaagattccgtaagctgagaactctggacagttgatcagctttacctatggtgctttgcctttaactagagtgtgtgatggtagattatttcagatatgtatgtaaaactgtttcctgaacaataagatgtatgaacggagcagaaataaatactttttctaattaa

SEQ ID NO: 454757 - DNA, 1193 bp, Homo sapiens
cgaaaacttgtaatcagcactcacctaattaggggtcatcgccggaccgaagacgagcgcaggatcagtgacgagaagggcgatactcgtatacaactatcgaagtatagcgaggacggaattgccggattcggcatacgcggagcgcgtggggcttgaggccgagaacggcccttgctgccaccaacatggagactttgtaccgtgtcccgttcttagtgctcgaatgtcccaacctgaagctgaagaagccgccctggttgcacatgccgtcggccatgactgtgtatgctctggtggtggtgtcttacttcctcatcaccggaggaataatttatgatgttattgttgaacctccaagtgtcggttctatgactgatgaacatgggcatcagaggccagtagctttcttggcctacagagtaaatggacaatatattatggaaggacttgcatccagcttcctatttacaatgggaggtttaggtttcataatcctggaccgatcgaatgcaccaaatatcccaaaactcaatagattccttcttctgttcattggattcgtctgtgtcctattgagttttttcatggctagagtattcatgagaatgaaactgccgggctatctgatgggttagagtgcctttgagaagaaatcagtggatactggatttgctcctgtcaatgaagttttaaaggctgtaccaatcctctaatatgaaatgtggaaaagaatgaagagcagcagtaaaagaaatatctagtgaaaaaacaggaagcgtattgaagcttggactagaatttcttcttggtattaaagagacaagtttatcacagaattttttttcctgctggcctattgctataccaatgatgttgagtggcattttctttttagtttttcattaaaatatattccatatctacaactataatatcaaataaagtgattattttttacaaccctcttaacattttttggagatgacatttctgattttcagaaattaacataaaatccagaagcaagattccgtaagctgagaactctggacagttgatcagctttacctatggtgctttgcctttaactagagtgtgtgatggtagattatttcagatatgtatgtaaaactgtttcctgaacaataagatgtatgaacggagcagaaataaatactttttctaattaa

SEQ ID NO: 454758 - DNA, 1152 bp, Homo sapiens
cgaaaacttgtaatcagcactcacctaattaggggtcatcgccggaccgaagacgagcgcaggatcagtgacgagaagggcgatactcgtatacaactatcgaagtatagcgaggacggaattgccggattcggcatacgcggagcgcgtggggcttgaggccgagaacggcccttgctgccaccaacatggagactttgtaccgtgtcccgttcttagtgctcgaatgtcccaacctgaagctgaagaagccgccctggttgcacatgccgtcggccatgactgtgaataatttatgatgttattgttgaacctccaagtgtcggttctatgactgatgaacatgggcatcagaggccagtagctttcttggcctacagagtaaatggacaatatattatggaaggacttgcatccagcttcctatttacaatgggaggtttaggtttcataatcctggaccgatcgaatgcaccaaatatcccaaaactcaatagattccttcttctgttcattggattcgtctgtgtcctattgagttttttcatggctagagtattcatgagaatgaaactgccgggctatctgatgggttagagtgcctttgagaagaaatcagtggatactggatttgctcctgtcaatgaagttttaaaggctgtaccaatcctctaatatgaaatgtggaaaagaatgaagagcagcagtaaaagaaatatctagtgaaaaaacaggaagcgtattgaagcttggactagaatttcttcttggtattaaagagacaagtttatcacagaattttttttcctgctggcctattgctataccaatgatgttgagtggcattttctttttagtttttcattaaaatatattccatatctacaactataatatcaaataaagtgattattttttacaaccctcttaacattttttggagatgacatttctgattttcagaaattaacataaaatccagaagcaagattccgtaagctgagaactctggacagttgatcagctttacctatggtgctttgcctttaactagagtgtgtgatggtagattatttcagatatgtatgtaaaactgtttcctgaacaataagatgtatgaacggagcagaaataaatactttttctaattaa

SEQ ID NO: 454759 - DNA, 1101 bp, Homo sapiens
ggctgtatccggcgaggcgggtggcggcttgaggtcgaataacggaccttggtgactacctgtatgctaagttagttcaccggtgttccagtactgcattgctctgtatctgtccacatacactgaaagcctggagaggagagccgcgcatggttgcgcaatgccgttcggactgaggacttgtgtatgctggtgtgtgggtgtctctacttgcctctatcaaccggaggtcataaattctatgtatgttcatcgtcggagcctccaagtgtcggttctatgactgatgaacatgggcatcagaggccagtagctttcttggcctacagagtaaatggacaatatattatggaaggacttgcatccagcttcctatttacaatgggaggtttaggtttcataatcctggaccgatcgaatgcaccaaatatcccaaaactcaatagattccttcttctgttcattggattcgtctgtgtcctattgagttttttcatggctagagtattcatgagaatgaaactgccgggctatctgatgggttagagtgcctttgagaagaaatcagtggatactggatttgctcctgtcaatgaagttttaaaggctgtaccaatcctctaatatgaaatgtggaaaagaatgaagagcagcagtaaaagaaatatctagtgaaaaaacaggaagcgtattgaagcttggactagaatttcttcttggtattaaagagacaagtttatcacagaattttttttcctgctggcctattgctataccaatgatgttgagtggcattttctttttagtttttcattaaaatatattccatatctacaactataatatcaaataaagtgattattttttacaaccctcttaacattttttggagatgacatttctgattttcagaaattaacataaaatccagaagcaagattccgtaagctgagaactctggacagttgatcagctttacctatggtgctttgcctttaactagagtgtgtgatggtagattatttcagatatgtatgtaaaactgtttcctgaacaataagatgtatgaacggagcagaaataaatactttttctaattaa

SEQ ID NO: 454760 - DNA, 884 bp, Homo sapiens
acttgttagggagggcgggcctgtttccgggaggcgcgtggggcttgaggccgagaacggcccttgctgccaccaacatggagactttgtaccgtgtcccgttcttagtgctcgaatgtcccaacctgaagctgaagaagccgccctggttgcacatgccgtcggccatgactgtgtatgctctggtggtggtgtcttacttcctcatcaccggaggaataatttatgatgttattgttgaacctccaagtgtcggttctatgactgatgaacatgggcatcagaggccagtagctttcttggcctacaggggctatctgatgggttagagtgcctttgagaagaaatcagtggatactggatttgctcctgtcaatgaagttttaaaggctgtaccaatcctctaatatgaaatgtggaaaagaatgaagagcagcagtaaaagaaatatctagtgaaaaaacaggaagcgtattgaagcttggactagaatttcttcttggtattaaagagacaagtttatcacagaattttttttcctgctggcctattgctataccaatgatgttgagtggcattttctttttagtttttcattaaaatatattccatatctacaactataatatcaaataaagtgattattttttacaaccctcttaacattttttggagatgacatttctgattttcagaaattaacataaaatccagaagcaagattccgtaagctgagaactctggacagttgatcagctttacctatggtgctttgcctttaactagagtgtgtgatggtagattatttcagatatgtatgtaaaactgtttcctgaacaataagatgtatgaacggagcagaaataaatactttttctaattaa

SEQ ID NO: 454761 - DNA, 1121 bp, Homo sapiens
acttgttagggagggcgggcctgtttccgggaggcgcgtggggcttgaggccgagaacggcccttgctgccaccaacatggagactttgtaccgtgtcccgttcttagtgctcgaatgtcccaacctgaagctgaagaagccgccctggttgcacatgccgtcggccatgactgtgtatgctctggtggtggtgtcttacttcctcatcaccggaggaataatttatgatgttattgttgaacctccaagtgtcggttctatgactgatgaacatgggcatcagaggccagtagctttcttggcctacaggggctatctgatgggttagagtgcctttgagaagaaatcagtggatactggatttgctcctgtcaatgaagttttaaaggctgtaccaatcctctaatatgaaatgtggaaaagaatgaagagcagcagtaaaagaaatatctagtgaaaaaacaggaagcgtattgaagcttggactagaatttcttcttggtattaaagagacaagtttatcacagaattttttttcctgctggcctattgctataccaatgatgttgagtggcattttctttttagtttttcattaaaatatattccatatctacaactataatatcaaataaagtgattattttttacaaccctcttaacattttttggagatgacatttctgattttcagaaattaacataaaatccagaagcaagattccgtaagctgagaactctggacagttgatcagctttacctatggtgctttgcctttaactagagtgtgtgatggtagattatttcagatatgtatgtaaaactgtttcctgaacaataagatgtatgaacggagcagaaataaatactttttctaattaaaaaaaaaaaaaaaaaaaaaaaaaaaaaaaaaaaaaaaaaaaaaaaaaaaaaaaaaaaaagggaaaaaaaaaaaaaaaaaaaaaaaaaaaaccttgtgggccgcttgggccaagtcgattttagactggacaaggtttatccttgcgcccaaatttggggctaattggcccatttggccttatggggggcggtataacaattaatggcccgcggtttaacaaggtgggcatgggagtg

SEQ ID NO: 454762 - DNA, 2694 bp, Homo sapiens
agcctcgcggtgccgcgccctggggcgggcctgcccatggcctgccgggaaatgtagtttctgatgccctgcccgcgccgcctcgccgctcgccggccgggcgccccaagcaactacaacttccatcacgctctgcgaggccttgatctgcaggcttttgcaggggaaggagtggggcgaacatggctgaaggaagccgaggtggccctacgtgtagcggggtgggtggcaggcaggacccagtctccggcagtggcggctgcaactttccagagtatgagcttcccgagctaaatacgcgcgctttccatgtgggcgcctttggggagctgtggcggggccgtctgcgcggggccggggacttgtcgctgagggagccgccggcatccgctctgcctgggagccaggcagctgactccgaccgggaggatgccgcggtggccagggatctggactgcagcctggaggcggcggctgagctgagggcggtgtgcggccttgataaactgaaatgccttgaggacggtgaggatccagaagtcattccggagaatactgacctggtgactttgggggttagaaaaaggttcttggaacatcgggaagaaaccattacaatagatcgagcctgcagacaagaaacattcgtttatgagatggagtcacatgccataggaaaaaagcctgaaaattcagcagacatgattgaagaaggggagcttatcctatctgtgaatatcttgtaccctgttatatttcataagcacaaagaacacaaaccataccaaacaatgctggtgttgggcagtcaaaaactcacacaactgagggattcaattcgatgtgtcagtgacctccagattggtggtgaattcagcaacactcctgaccaagcccctgagcacatcagcaaagacctatacaaatcagccttcttttattttgaaggaacattttataatgataaaagatacccagaatgcagagatttgagcagaactatcattgagtggtcagagtcccatgatagaggctatggaaagtttcagactgctagaatggaagatttcaccttcaatgacttgtgtattaaactgggttttccttacttatactgtcatcagggagactgtgaacatgtcattgtcattactgacataaggcttgtgcatcatgatgactgcttggataggacattgtatcccctccttatcaagaagcattggctatggaccagaaaatgttttgtttgtaaaatgtatacagccagatgggtgacgaacaatgacagttttgcaccagaggacccatgcttcttttgtgatgtttgcttccgaatgctgcactatgattcagaaggcaacaaactgggggaattccttgcttatccttatgttgatcctggaacctttaattaagaatagctacactcacaaaaataccccctcatgaaataactgttctcttggatggttaccttatttctaagaaacgccactgaggaacaggatccactttgaacagtccgctaaagctatcaaaaaaaagtccaaatcacagattttcttataatgatagtatttaaatgtttataacatagtttaattttatatttattccagatagtatttaatttagtgctttttacccattttgagttgagttgtagtactttatatattctgactttaaatcctttgtcagacacacatattctttctcccaatccatgccttccctattcattctctgtccagagttttttgctaaagatagaattattaatgatacatcaagtagtggaagtgttttgaaaattctttgaagaatgtgagagctacaccttctaccatgaggcttccaaggttgtatttaaatttgactgaatatctggatggctaagaacagacatttatcttacacatggaaaactgacgaaacctataagcctatgtgtttgacagtgaagtatgttttatggacttaaatgccacaaacagttaagtccattggcttggagatgacaagcacgagtttctggtatgtctagtgttctcattcactgattcagtcagtacacagataatcactatagagaacttaagaggctggcttatgttatacctaaatttttactttcttgtatacaacaatgctaaaattgagcagattgataactgccagcaaaccatagatttaagataaatgaatgatttacccaaccctaaaattccatgggtaaattttgattcctttattttcaatactgcgttccttataggtcttacatcgcatatcgcaaggatattttatcttattcattcatttcatactctcaaaacaccaaacttcaaaaagttaattattgtcataatgcattattccatgtgtggtgtcaatacattttagcggacaaagaagaaacatgccagttaaaacatttctgctactggattctttattaattatttgagaacgttattttgctagttcttaaggttaagtttttcatcaaagactcaggtacctattattgttccctggtgaaactgaggagaaaagttaatcaaccaggttactcccacagtttgcccgtgtgttatgtatcagttatacaggtatcccaccaagttcaagtcaaaagaaattcctaactttgtatatttctggagctatataaacccctgatttaag

SEQ ID NO: 454763 - DNA, 1052 bp, Homo sapiens
agcctcgcggtgccgcgccctggggcgggcctgcccatggcctgccgggaaatgtagtttctgatgccctgcccgcgccgcctcgccgctcgccggccgggcgccccaagcaactacaacttccatcacgctctgcgaggccttgatctgcaggcttttgcaggggaaggagtggggcgaacatggctgaaggaagccgaggtggccctacgtgtagcggggtgggtggcaggcaggacccagtctccggcagtggcggctgcaactttccagagtatgagcttcccgagctaaatacgcgcgctttccatgtgggcgcctttggggagctgtggcggggccgtctgcgcggggccggggacttgtcgctgagggagccgccggcatccgctctgcctgggagccaggcagctgactccgaccgggaggatgccgcggtggccagggatctggactgcagcctggaggcggcggctgagctgagggcggtgtgcggccttgataaactgaaatgccttgaggacggtgaggatccagaagtcattccggagaatactgacctggtgactttgggggttagaaaaaggttcttggaacatcgggaagaaaccattacaatagatcgagcctgcagacaagaaacattcgtttatgagatggagtcacatgccataggaaaaaagcctgaaaattcagcagacatgattgaagaaggggagcttatcctatctgtgaatatcttgtaccctgttatatttcataagcacaaagaacacaaaccataccaaacaatgctggtgttgggcagtcaaaaactcacacaactgagggattcaattcgatgtgtcagtgacctccagattggtggtgaattcagcaacactcctgaccaagcccctgagcacatcagcaaagacctatacaaatcagccttcttttattttgaaggaacattttataatgataaaagatacccagaatgcagagatttgagcagaactatcattgacgtggtcacgagtcccatggataagaggcaatgggaaagttcc

SEQ ID NO: 454764 - DNA, 248 bp, Homo sapiens
tgcttctatctaactccttcagatacacagtggaacaaagcaagacttcaactatggctccatagcctattttagggtgggtattaaaaaatagcctgtgatggccgggcatgttggctcacagctgtaatcccaacactgggaagccaaggtgggtggatcacctgaggtcaggagttcgaggccgggctggccaacatggtgaaacctcatctctactaaaaatacaaaaaattagatgggcgtgg

SEQ ID NO: 454765 - DNA, 4012 bp, Homo sapiens
agcctcgcggtgccgcgccctggggcgggcctgcccatggcctgccgggaaatgtagtttctgatgccctgcccgcgccgcctcgccgctcgccggccgggcgccccaagcaactacaacttccatcacgctctgcgaggccttgatctgcaggcttttgcaggggaaggagtggggcgaacatggctgaaggaagccgaggtggccctacgtgtagcggggtgggtggcaggcaggacccagtctccggcagtggcggctgcaactttccagagtatgagcttcccgagctaaatacgcgcgctttccatgtgggcgcctttggggagctgtggcggggccgtctgcgcggggccggggacttgtcgctgagggagccgccggcatccgctctgcctgggagccaggcagctgactccgaccgggaggatgccgcggtggccagggatctggactgcagcctggaggcggcggctgagctgagggcggtgtgcggccttgataaactgaaatgccttgaggacggtgaggatccagaagtcattccggagaatactgacctggtgactttgggggttagaaaaaggttcttggaacatcgggaagaaaccattacaatagatcgagcctgcagacaagaaacattcgtttatgagatggagtcacatgccataggaaaaaagcctgaaaattcagcagacatgattgaagaaggggagcttatcctatctgtgaatatcttgtaccctgttatatttcataagcacaaagaacacaaaccataccaaacaatgctggtgttgggcagtcaaaaactcacacaactgagggattcaattcgatgtgtcagtgacctccagattggtggtgaattcagcaacactcctgaccaagcccctgagcacatcagcaaagacctatacaaatcagccttcttttattttgaaggaacattttataatgataaaagatacccagaatgcagagatttgagcagaactatcattgagtggtcagagtcccatgatagaggctatggaaagtttcagactgctagaatggaagatttcaccttcaatgacttgtgtattaaactgggttttccttacttatactgtcatcagggagactgtgaacatgtcattgtcattactgacataaggcttgtgcatcatgatgactgcttggataggacattgtatcccctccttatcaagaagcattggctatggaccagaaaatgttttgtttgtaaaatgtatacagccagatgggtgacgaacaatgacagttttgcaccagaggacccatgcttcttttgtgatgtttgcttccgaatgctgcactatgattcagaaggcaacaaactgggggaattccttgcttatccttatgttgatcctggaacctttaattaagaatagctacactcacaaaaataccccctcatgaaataactgttctcttggatggttaccttatttctaagaaacgccactgaggaacaggatccactttgaacagtccgctaaagctatcaaaaaaaagtccaaatcacagattttcttataatgatagtatttaaatgtttataacatagtttaattttatatttattccagatagtatttaatttagtgctttttacccattttgagttgagttgtagtactttatatattctgactttaaatcctttgtcagacacacatattctttctcccaatccatgccttccctattcattctctgtccagagttttttgctaaagatagaattattaatgatacatcaagtagtggaagtgttttgaaaattctttgaagaatgtgagagctacaccttctaccatgaggcttccaaggtaaagatccttcaaataactgtaatggaaactagggagaatgaattatttacaaataagacaaaattaatagctttgggattatttattttttgagacaaaatctcgctcttgttgcccaggctggaatacaatggcgcaatctcagctcactgcagcctccgcctcccggattcaagtgattctcctgccacagcctcctgagtagctgggattgcaggcacctgggcaccatgcctggctaatttttgtatttttagtagagacggggtttcaccatgttggccaggctggtctcaaactcctaacctcaggcgatccacccgcctaagcctcccaaaattttgggatcacaggcgtgagccaccgcgcccggctgctttgggggaatttaatcttagtgtgctgtttagtaatgttaggttttgttttggaggaaactaggcatacaagacatgttaataagactatgtgaataatgaatttaaaaagatcttgagtatatactcataactccagaaataacattaacttgaagctttatttcttgacaaaagctttatgaatgttatgagtttaaaatatgtcaatttaatactatgatttaaaaaacaatagcagatttcgtatgactgtggggacatggaaaaatcaagatcctattgattgctagctctggctcacttattctccggtaatgatactattggatatataccaaaattatataagcaaaaagaaaaaaaataagttttcctggcccaggtcttccattcttctggtccccttactatagtaattctagttactctcatcttattctgaggaaaaaaaaaaaaaccaaaactttttaaacttattttttgacatagggtcttactgtgtcacccaggctggagtacagtggcgtgatcttggctcactggagccctgacctccctaggctcaggtgatcctcccacctcagcctaccgagtagctgagacatggtggcacaggccaccatggcgggctaatttttttatttcttgtagatacagggtttcactatgttgcgcagaatagtctcgaactcctgacctcaagtgatccatccgccttggcctcccagagtgctgcgattacaggcatgaaccacagcgcccagcaaaataaactttctttattttcaggtctagaccatcagatagatttattcaaatattttctgggaacctttatgggtagaacatttaatactgtttagaagacttttaggaatactatagatttcaaatgcatcatttaaaataaataaattccactttctctctcctaggttgtatttaaatttgactgaatatctggatggctaagaacagacatttatcttacacatggaaaactgacgaaacctataagcctatgtgtttgacagtgaagtatgttttatggacttaaatgccacaaacagttaagtccattggcttggagatgacaagcacgagtttctggtatgtctagtgttctcattcactgattcagtcagtacacagataatcactatagagaacttaagaggctggcttatgttatacctaaatttttactttcttgtatacaacaatgctaaaattgagcagattgataactgccagcaaaccatagatttaagataaatgaatgatttacccaaccctaaaattccatgggtaaattttgattcctttattttcaatactgcgttccttataggtcttacatcgcatatcgcaaggatattttatcttattcattcatttcatactctcaaaacaccaaacttcaaaaagttaattattgtcataatgcattattccatgtgtggtgtcaatacattttagcggacaaagaagaaacatgccagttaaaacatttctgctactggattctttattaattatttgagaacgttattttgctagttcttaaggttaagtttttcatcaaagactcaggtacctattattgttccctggtgaaactgaggagaaaagttaatcaaccaggttactcccacagtttgcccgtgtgttatgtatcagttatacaggtatcccaccaagttcaagtcaaaagaaattcctaactttgtatatttctggagctatataaacccctgatttaag

SEQ ID NO: 454766 - DNA, 2364 bp, Homo sapiens
agcctcgcggtgccgcgccctggggcgggcctgcccatggcctgccgggaaatgtagtttctgatgccctgcccgcgccgcctcgccgctcgccggccgggcgccccaagcaactacaacttccatcacgctctgcgaggccttgatctgcaggcttttgcaggggaaggagtggggcgaacatggctgaaggaagccgaggtggccctacgtgtagcggggtgggtggcaggcaggacccagtctccggcagtggcggctgcaactttccagagtatgagcttcccgagctaaatacgcgcgctttccatgtgggcgcctttggggagctgtggcggggccgtctgcgcggggccggggacttgtcgctgagggagccgccggcatccgctctgcctgggagccaggcagctgactccgaccgggaggatgccgcggtggccagggatctggactgcagcctggaggcggcggctgagctgagggcggtgtgcggccttgataaactgaaatgccttgaggacggtgaggatccagaagtcattccggagaatactgacctggtgactttgggggttagaaaaaggttcttggaacatcgggaagaaaccattacaatagatcgagcctgcagacaagaaacattcgtttatgagatggagtcacatgccataggaaaaaagcctgaaaattcagcagacatgattgaagaaggggagcttatcctatctgtgaatatcttgtaccctgttatatttcataagcacaaagaacacaaaccataccaaacaatgctggtgttgggcagtcaaaaactcacacaactgagggattcaattcgatgtgtcagtgacctccagattggtggtgaattcagcaacactcctgaccaagcccctgagcacatcagcaaagacctatacaaatcagccttcttttattttgaaggaacattttataatgataaaagatacccagaatgcagagatttgagcagaactatcattgagtggtcagagtcccatgatagaggctatggaaagtttcagactgctagaatggaagatttcaccttcaatgacttgtgtattaaactgggttttccttacttatactgtcatcagggagactgtgaacatgtcattgtcattactgacataaggcttgtgcatcatgatgactgcttggataggacattgtatcccctccttatcaagaagcattggctatggaccagaaaatgttttgtttgtaaaatgtatacagccagatgggtgacgaacaatgacagttttgcaccagaggacccatgcttcttttgtgatgtttgcttccgaatgctgcactatgattcagaaggcaacaaactgggggaattccttgcttatccttatgttgatcctggaacctttaattaagaatagctacactcacaaaaataccccctcatgaaataactgttctcttggatggttaccttatttctaagaaacgccactgaggaacaggatccactttgaacagtccgctaaagctatcaaaaaaaagtccaaatcacagattttcttataatgatagtatttaaatgtttataacatagtttaattttatatttattccagatagtatttaatttagtgctttttacccattttgagttgagttgtagtactttatatattctgactttaaatcctttgtcagacacacatattctttctcccaatccatgccttccctattcattctctgtccagagttttttgctaaagatagaattattaatgatacatcaagtagtggaagtgttttgaaaattctttgaagaatgtgagagctacaccttctaccatgaggcttccaaggtaaagatccttcaaataactgtaatcccagctacttgggaggctgaggcaggagaatcgcttgaacccgggaagtggaggttgcagtgagcacgatcgtgccattgcactccagcctgagcaacaagagtgaaactctgtctcaaagaaaaaacaacaacaacaaaactgtgattctccatctaactttttacaattatcctttcacaattcaagaaagtgtgaatgcaagtcattactaacagtatctcagtaaaagtagtccagggagcaaatattttctttttaactgggttcccagctagttccattcccttgaattcagtgggcaaagtcactgttcaattaaaaggtttttactcttcttcctttttgaattgtaacttgcttactgaattcaggaattgggtgatcaaaagataactgcttattatagtaagataaccttggaacagaactgtgattaaaaacctgaataataaaaaacacacaagaccca

SEQ ID NO: 454767 - DNA, 856 bp, Homo sapiens
agcctcgcggtgccgcgccctggggcgggcctgcccatggcctgccgggaaatgtagtttctgatgccctgcccgcgccgcctcgccgctcgccggccgggcgccccaagcaactacaacttccatcacgctctgcgaggccttgatctgcaggcttttgcaggggaaggagtggggcgaacatggctgaaggaagccgaggtggccctacgtgtagcggggtgggtggcaggcaggacccagtctccggcagtggcggctgcaactttccagagtatgagcttcccgagctaaatacgcgcgctttccatgtgggcgcctttggggagctgtggcggggccgtctgcgcggggccggggacttgtcgctgagggagccgccggcatccgctctgcctgggagccaggcagctgactccgaccgggaggatgccgcggtggccagggatctggactgcagcctggaggcggcggctgagctgagggcggtgtgcggccttgataaactgaaatgccttgaggacggtgaggatccagaagtcattccggagaatactgacctggtgactttgggggttagaaaaaggttcttggaacatcgggaagaaaccattacaatagatcgagcctgcagacaagaaacattcgtttatgagatggtaattaagagtctcatctttttcacccttttctcttaaaacagtaaaccgacattggctgagggttagtaatgacagtatggtagctttatactggatatgcttagttgaaaacaaactagagaaactcctttgagtctgggaactagtgagagaagaggacccttagaactcaagtgaccacatgtttgactttt

SEQ ID NO: 454768 - DNA, 240 bp, Homo sapiens
ccttgataaactgaaatgccttgaggacggtgaggatccagaagtcattccggagaatactgacctggtgactttggggtatggaggacttggtttttatgacctatttatttaaacattttttcaacattatgttttgaaaagttgaaagtgcagtattgattgttgtctgtatacccaccccttaaattcagctgttcttaatatttgaccatatttactttagccgtgtgtatggga

SEQ ID NO: 454769 - DNA, 404 bp, Homo sapiens
gtctctaaatgaacacttatttattctttgacttttagcacaaagaacacaaaccataccaaacaatgctggtgttgggcagtcaaaaactcacacaactgagggattcaattcgatgtgtcagtgacctccagattggtggtgaattcagcaacactcctgaccaagcccctgagcacatcagcaaagtaaggtgatttcctcccataaaacaaaaggaaataacaagctaagaaaatagcgattactctagctggttcataaatgtcccagtaaatccttttcttctcctgcgggattccatcaaactacactatctcattccttccctttatcaccggaacttttccaaagaagaggctagactctgttttgatttcttcatctctcatttgtttctaaac

SEQ ID NO: 454770 - DNA, 2434 bp, Homo sapiens
agcctcgcggtgccgcgccctggggcgggcctgcccatggcctgccgggaaatgtagtttctgatgccctgcccgcgccgcctcgccgctcgccggccgggcgccccaagcaactacaacttccatcacgctctgcgaggccttgatctgcaggcttttgcaggggaaggagtggggcgaacatggctgaaggaagccgaggtggccctacgtgtagcggggtgggtggcaggcaggacccagtctccggcagtggcggctgcaactttccagagtatgagcttcccgagctaaatacgcgcgctttccatgtgggcgcctttggggagctgtggcggggccgtctgcgcggggccggggacttgtcgctgagggagccgccggcatccgctctgcctgggagccaggcagctgactccgaccgggaggatgccgcggtggccagggatctggactgcagcctggaggcggcggctgagctgagggcggtgtgcggccttgataaactgaaatgccttgaggacggtgaggatccagaagtcattccggagaatactgacctggtgactttgggggttagaaaaaggttcttggaacatcgggaagaaaccattacaatagatcgagcctgcagacaagaaacattcgtttatgagatggagtcacatgccataggaaaaaagcctgaaaattcagcagacatgattgaagaaggggagcttatcctatctgtgaatatcttgtaccctgttatatttcataagcacaaagaacacaaaccataccaaacaatgctggtgttgggcagtcaaaaactcacacaactgagggattcaattcgatgtgtcagtgacctccagattggtggtgaattcagcaacactcctgaccaagcccctgagcacatcagcaaagacctatacaaatcagccttcttttattttgaaggaacattttataatgataaaagatacccagaatgcagagatttgagcagaactatcattgagtggtcagagtcccatgatagaggctatggaaagtttcagactgctagaatggaagatttcaccttcaatgacttgtgtattaaactgggttttccttacttatactgtcatcagggagactgtgaacatgtcattgtcattactgacataaggcttgtgcatcatgatgactgcttggataggacattgtatcccctccttatcaagaagcattggctatggaccagaaaatgttttgtttgtaaaatgtatacagccagatgggtgacgaacaatgacagttttgcaccagaggacccatgcttcttttgtgatgtttgcttccgaatgctgcactatgattcagaaggcaacaaactgggggaattccttgcttatccttatgttgatcctggaacctttaattaagaatagctacactcacaaaaataccccctcatgaaataactgttctcttggatggttaccttatttctaagaaacgccactgaggaacaggatccactttgaacagtccgctaaagctatcaaaaaaaagtccaaatcacagattttcttataatgatagtatttaaatgtttataacatagtttaattttatatttattccagatagtatttaatttagtgctttttacccattttgagttgagttgtagtactttatatattctgactttaaatcctttgtcagacacacatattctttctcccaatccatgccttccctattcattctctgtccagagttttttgctaaagatagaattattaatgatacatcaagtagtggaagtgttttgaaaattctttgaagaatgtgagagctacaccttctaccatgaggcttccaaggttgtatttaaatttgactgaatatctggatggctaagaacagacatttatcttacacatggaaaactgacgaaacctataagcctatgtgtttgacagtgaagtatgttttatggacttaaatgccacaaacagttaagtccattggcttggagatgacaagcacgagtttctggtatgtctagtgttctcattcactgattcagtcagtacacagataatcactatagagaacttaagaggctggcttatgttatacctaaatttttactttcttgtatacaacaatgctaaaattgagcagattgataactgccagcaaaccatagatttaagataaatgaatgatttacccaaccctaaaattccatgggtaaattttgattcctttattttcaatactgcgttccttataggtcttacatcgcatatcgcaaggatattttatcttattcattcatttcatactctcaaaacaccaaacttcaaaaagttaattattgtcataatgcattattccatgtgtggtgtcaatacattttagcggacaaagaagaaacatgccagtt

SEQ ID NO: 454771 - DNA, 554 bp, Homo sapiens
atacactcgagttggacccgattggagcaccactcctgacagcccctgagcacatcagcaaagacctatacaaatcagccttcttttattttgaaggaacattttataatgataaaagatacccagaatgcagagatttgagcagaactatcattgagtggtcagagtcccatgatagaggctatggaaagtttcagactgctagaatggaagatttcaccttcaatgacttgtgtattaaactgggttttccttacttatactgtcatcagggagactgtgaacatgtcattgtcattactgacataaggcttgtgcatcatgatgactgcttggataggacattgtatcccctccttatcaagaagcattggctatggaccagaaaatgttttgtttgtaaaatgtatacagccagatgggtgacgaacaatgacagttttgcaccagaggacccatgcttcttttgtgagtgtagctgccaatgcgcgcatgggcagcaacactcgtaacaagcctctggggagagtgaattgtcatccatttcaccactg

SEQ ID NO: 454772 - DNA, 3862 bp, Homo sapiens
agcctcgcggtgccgcgccctggggcgggcctgcccatggcctgccgggaaatgtagtttctgatgccctgcccgcgccgcctcgccgctcgccggccgggcgccccaagcaactacaacttccatcacgctctgcgaggccttgatctgcaggcttttgcaggggaaggagtggggcgaacatggctgaaggaagccgaggtggccctacgtgtagcggggtgggtggcaggcaggacccagtctccggcagtggcggctgcaactttccagagtatgagcttcccgagctaaatacgcgcgctttccatgtgggcgcctttggggagctgtggcggggccgtctgcgcggggccggggacttgtcgctgagggagccgccggcatccgctctgcctgggagccaggcagctgactccgaccgggaggatgccgcggtggccagggatctggactgcagcctggaggcggcggctgagctgagggcggtgtgcggccttgataaactgaaatgccttgaggacggtgaggatccagaagtcattccggagaatactgacctggtgactttgggggttagaaaaaggttcttggaacatcgggaagaaaccattacaatagatcgagcctgcagacaagaaacattcgtttatgagatggagtcacatgccataggaaaaaagcctgaaaattcagcagacatgattgaagaaggggagcttatcctatctgtgaatatcttgtaccctgttatatttcataaggacctatacaaatcagccttcttttattttgaaggaacattttataatgataaaagatacccagaatgcagagatttgagcagaactatcattgagtggtcagagtcccatgatagaggctatggaaagtttcagactgctagaatggaagatttcaccttcaatgacttgtgtattaaactgggttttccttacttatactgtcatcagggagactgtgaacatgtcattgtcattactgacataaggcttgtgcatcatgatgactgcttggataggacattgtatcccctccttatcaagaagcattggctatggaccagaaaatgttttgtttgtaaaatgtatacagccagatgggtgacgaacaatgacagttttgcaccagaggacccatgcttcttttgtgatgtttgcttccgaatgctgcactatgattcagaaggcaacaaactgggggaattccttgcttatccttatgttgatcctggaacctttaattaagaatagctacactcacaaaaataccccctcatgaaataactgttctcttggatggttaccttatttctaagaaacgccactgaggaacaggatccactttgaacagtccgctaaagctatcaaaaaaaagtccaaatcacagattttcttataatgatagtatttaaatgtttataacatagtttaattttatatttattccagatagtatttaatttagtgctttttacccattttgagttgagttgtagtactttatatattctgactttaaatcctttgtcagacacacatattctttctcccaatccatgccttccctattcattctctgtccagagttttttgctaaagatagaattattaatgatacatcaagtagtggaagtgttttgaaaattctttgaagaatgtgagagctacaccttctaccatgaggcttccaaggtaaagatccttcaaataactgtaatggaaactagggagaatgaattatttacaaataagacaaaattaatagctttgggattatttattttttgagacaaaatctcgctcttgttgcccaggctggaatacaatggcgcaatctcagctcactgcagcctccgcctcccggattcaagtgattctcctgccacagcctcctgagtagctgggattgcaggcacctgggcaccatgcctggctaatttttgtatttttagtagagacggggtttcaccatgttggccaggctggtctcaaactcctaacctcaggcgatccacccgcctaagcctcccaaaattttgggatcacaggcgtgagccaccgcgcccggctgctttgggggaatttaatcttagtgtgctgtttagtaatgttaggttttgttttggaggaaactaggcatacaagacatgttaataagactatgtgaataatgaatttaaaaagatcttgagtatatactcataactccagaaataacattaacttgaagctttatttcttgacaaaagctttatgaatgttatgagtttaaaatatgtcaatttaatactatgatttaaaaaacaatagcagatttcgtatgactgtggggacatggaaaaatcaagatcctattgattgctagctctggctcacttattctccggtaatgatactattggatatataccaaaattatataagcaaaaagaaaaaaaataagttttcctggcccaggtcttccattcttctggtccccttactatagtaattctagttactctcatcttattctgaggaaaaaaaaaaaaaccaaaactttttaaacttattttttgacatagggtcttactgtgtcacccaggctggagtacagtggcgtgatcttggctcactggagccctgacctccctaggctcaggtgatcctcccacctcagcctaccgagtagctgagacatggtggcacaggccaccatggcgggctaatttttttatttcttgtagatacagggtttcactatgttgcgcagaatagtctcgaactcctgacctcaagtgatccatccgccttggcctcccagagtgctgcgattacaggcatgaaccacagcgcccagcaaaataaactttctttattttcaggtctagaccatcagatagatttattcaaatattttctgggaacctttatgggtagaacatttaatactgtttagaagacttttaggaatactatagatttcaaatgcatcatttaaaataaataaattccactttctctctcctaggttgtatttaaatttgactgaatatctggatggctaagaacagacatttatcttacacatggaaaactgacgaaacctataagcctatgtgtttgacagtgaagtatgttttatggacttaaatgccacaaacagttaagtccattggcttggagatgacaagcacgagtttctggtatgtctagtgttctcattcactgattcagtcagtacacagataatcactatagagaacttaagaggctggcttatgttatacctaaatttttactttcttgtatacaacaatgctaaaattgagcagattgataactgccagcaaaccatagatttaagataaatgaatgatttacccaaccctaaaattccatgggtaaattttgattcctttattttcaatactgcgttccttataggtcttacatcgcatatcgcaaggatattttatcttattcattcatttcatactctcaaaacaccaaacttcaaaaagttaattattgtcataatgcattattccatgtgtggtgtcaatacattttagcggacaaagaagaaacatgccagttaaaacatttctgctactggattctttattaattatttgagaacgttattttgctagttcttaaggttaagtttttcatcaaagactcaggtacctattattgttccctggtgaaactgaggagaaaagttaatcaaccaggttactcccacagtttgcccgtgtgttatgtatcagttatacaggtatcccaccaagttcaagtcaaaagaaattcctaactttgtatatttctggagctatataaacccctgatttaag

SEQ ID NO: 454773 - DNA, 2746 bp, Homo sapiens
  misc_feature (699)..(699): n is a, c, g, or t
  misc_feature (999)..(999): n is a, c, g, or t
  misc_feature (2069)..(2069): n is a, c, g, or t
ttctttaaattctacaaagagatacacttcccccaaatacatttactttactgacagcaaagttagtttccatttggaaaagttatcctgtttccaacatcgagttatctctgttgccagaaaatcaaaaggcagccaatccgatttgtaaacctttcctctggcacattgtcaagatctcttgcaaaacgaaattgtcctacagccctcccctcccctgtggctctaagtgcagttctgccccatctaaatattaatattttgcaatcgtgctctttatgagcccctggcagagtggagatacgccacagacgggttgaggagagagtcgtggggaccacctggccagtggctgtggtcttaatggagattgacaagcccaaaggaggtttgcaaataccctgatgcctgcagccggctttgcatccagcagctccctccacagatttacagtggcctctattgtccttgaagagctgcttagaaacaaggttgcaaagctttctccttggggccttgggaaggctggatgaaccctcgcgtctccacctgatagggctgatccaagtgtttctgggtggtggttttccacactggttttatttaaggtctatcaacaggtgctgagtgtgaggcagggaggcaagtgtttttctttttttttttttgagacggagtctcgctctgtcgcccaggccngactgcggactgcagtggcgcaatctcggctcactgcaagctccgcttcccgggttcacgccattctcctgcctcagcctcccgagtagctgggactacaggcgcccgccactgcgcccggctaattttttgtatttttttttagtagagacggggtttcaccttgttagccaggatggtctcgatctcctgacctcatgatccacccgcctcggcctcccaaagtgctgggattacaggcgtgagccaccgcgcccggccgcaagtgtttttctgtgggtgtttcttccttttaaccanctgcaccacatgcttctggtttcaaagcagaaatttcttctctgccactttcatgttttatgtcttttgacttataggagtgccttagttgaaattccatgaaaagggtgtgaagtgtggatcaccttgcttagactctgttaggaggttgagtgcttgtgcaggctgggagagcatgcacttcttttcaggaggcaggtgaagggagcaggtgggatgaggcagaagactggccagaaagaacacttttctccccatgagttttgcagttagacagaagtagtaaggacgattgtgaagttcttgaaagtgagaagagagaacatgttcctttgaaattaaaactcagtttttcctgatttttcacgttagctaaaacgtgccaggaaacgggcttttcctgatttctttttttccctagtacaataacataatgactaaatttggaaaagtactttgcagttttcaaagcactttgttattcacagtaactgcagagatccccccgttttagatgagaagggaaactgaggtgtgaagaaggaaaggaacaggagagaagtgacaaagatgagtaaagtattggtaatttcttttctctgggagttctaacattctaacaggcttgtagtttaagacgtttctagatagcagattctcacacctaactcactatattttccaaacttatctaactataagaatccgctggtgtgcttgttcatatacagattcttaggcccatcttctagttattctgatttcagttggtctggggtgatctaggagtctgctttttttaacaaggtcatgtggggattcttatctcttggcatgtttgggaaattttacatagccggcagctgaagtgcacatggaaataagttgtccaaggtcacgcaatctgaactccctgatccccacctggtgtctctggtccctgagcccacatccccctaccacccactgttccacagctgccttcccagggacacagagtttgtgatcaatactgaataattctgccacgtctttattgtcatgccttcatcacctactacgtatgaagntgtccagaaacaggagggatttaagggtgagggagagaatgaagaagacagacacaggcataagagacaaaaagaaacctcaatgttattaaaaattcaagccaggtgtaggggtgcacacctgtagccctagttactagggaggctgagacgggaggattgcttgagcccaagagttcaaggccagtctgggcaacatagcgagcctgcctcaaaaaagaaaaaaaaatcactacaaccatagaggtgcagtaaattctaaatctaattgccatattaagaggcattcattctccattcccttcataaaacctacttattaatgccagtcacactaaatattcataaccaataggctgtgcactagtacagaagtctcaaaagtggagagtagccaagcacagtggctcacacctgtaatcccaacactttgggaggccaattcaggagcattgcttgagcccaggagttcgagaccagcctaggcaacatggtgacaccatgtctctacaaaaaattttaaaaattagccaggcatagtggcacatgcctatagtcccagctatgaagggaggctgaggtgggaggatcacttgcgcccaggagttcaaggctgcaatgagctatgatcatgccactgcactgcagcctgggcgacagagcaagactctcttttt

SEQ ID NO: 454774 - DNA, 3032 bp, Homo sapiens
aggtgaaatcttgctctgtcacccaggctggagtgcagtgtcacaatcttggctcactgcaacctccacttcccaggtttaagtgattctcccacctcagcctcctgagtagctgggattacaggttcagggagcaagtttccgaggttggaaagaagtgacttcactgtttaacaaagatgatgagcagcatctcctggaaagatgtaaatctcccaagtccaaaggaactaacttacgattaaaagaagagttgaaggcagagaagaaatctggattttgggacaatttggttttaaaacagaatatacagtctaaaaaaccagatgaaattgaaggttgggagcctccaaaacttgctcttgaagacatatcggctgaccctgaggacaccgtgggtggccacccatcctggtcaggctgggaggatgacgccaagggctcgaccaagtacaccagcctggccagctctgccaacagctccaggtggagcctgcgcgcggcagggaggctggtgagcatccgacggcagagtaaaggccacctgacagatagcccggaggaggcggagtgaggggggctgcgtggcaagtgtgccccgacatggtggccttttatgagtataccatgtagttgttgagtcttttccgcgttagaaagaatagagagtctactttttgcctatatttgatatttggacctctgtttctttatttaatgaactctcacacacactgtgactccttggtgaacacgtgcagggattgtacatttgattgccttattgcagaaatattcacctatcagtccatgttttgcagaaactggagatgtgaatttatgatgctctcccataatacagcagtaatgatttgcagtttctcacaaaatgattttcatgctgctctgtgttgtagttctgtttcagaacttccgtacctttttcttgtatgtagcacgtataaatgcagctgtcatgcagttcttttcttttgctagaaaattagtcaggaggtaagatgaatcttccaaagttatgttaaattttgtttaacttgacaaattaaactttgttcttattaaacaaatacgtaaacaaatactggaaaagcaaaggttatatttgggagtaaaatgtatcttaaaatgcatgttcatcttttgctgagggaggaatagcttcttgtatgtccactggatagtaacagtggttcttttttggaattttatttttacctcttttgaacttctaaatcggtccctttattttcttaaaacatttgctctcttttttgtttacagattaaagaagtatggatcaattttagtcagttgataatttcatttaggaaacattgtcttgctcattatagagagttaagactgtgcataaaatactgaagtgcctcttttttattaggctcatatgtttgttcttgcaaagcgagatgcctattgtgattggtgttagatctgtaagaagctgtgttttttccacaagaataatcgacgaccggtttgagagcatctctcgcgttctttttctgtctgcttactgtccttgacaatgtgatcctgcacagtatcaggtgccagttatgcgtccctggaaggttggctcttatcagcaagtcctgcagatatctcttagataaaagtggtttgaaagaaaaggtatatttttcttttttgtttaaaagtaaaataaaacctccagttacactgtgcattcccctcacgtaaaaacaagacaaaaaccctttcctgagttgctcggcatgcactcctgtgctgtttcatgcatgtggatgttccttccgtttgttcctgtggaataactgagtgtgcctgatggcagaacacactgcagtgttatcagtgtctgcatgttttttaatagaacaggtttacttgatctgtcatctgttatgcaaaaaacagcaattacttttgcatccatctagctaaatctataatctgtgtcaatcacttatacctatcaatcatccgtatctattcacctgtcctctatgtctgtcttctctcagtctacatccatctagccttctgtcaatcatctacttttttttttaatagaacaagaagtttacttatcaagtcttgaaagggggacatgtttcaattggtgttcaaacaaaaattccagcttgtattagaaccttgaaatggtgaagttgtggaggttttctttgttccataatacagagacaagttcataatttttagtataacagctaagttgacaaattctaagtttcctcaggtaaatagtcgtaactgtccttttccctagagaagtgcttgctgggatagtaaaaacatacaccatttcatgacttctgcaaatactttccagcggaagtcagtgtaggtttgtttttggctaacatggtcttgctgcgcaggaatgtaaacactgtgtttgaaactctggaaatcacgtgtgtggggagatggggacgcttcccatgttgtggggagctctgtggctgtgatggctgcagttgccgtgcctctgttggaacgctaagtgcctgcaactcacgtcaatcatagaattgtgacgcacagttggcaaaatagttctttatgctatttctcaaaatttgaggacaaacccagattgggattggaatatgcactgtaaatcaaatttttcttatctacaaagactaatgtaaaaatgattttttcttctgtgcctgattaaattaactgtggtttttaatataaatatttattggtgtgctttgggagaaaaattatcttttcttgaaagaagttatcaaagcaaatttattatcttcacaagttaatgggagaatgtggttttgattctgggtgtttgaattgtgtaaacacacagcttccttgtgtgaagagagttgtcctgtgctccttctactgtactttttttattttttaataggaaagtgatgtgcttcagagaagggttcctccttaatgttgaggttttttaaaaataaaaatactgtttttaagctctttcc

SEQ ID NO: 454775 - DNA, 3043 bp, Homo sapiens
agccgcaggcagagcgtccggcggccgggagggacgcggagccacagcccgacgcacggacggagggacgccggagcccgcctgaccatgtggaagctgggccggggccgagtgctgctggacgagccccccgaggaggaggacggcctgcgtggggggccgccaccggccgccgccgccgccgcccaggttcagggagcaagtttccgaggttggaaagaagtgacttcactgtttaacaaagatgatgagcagcatctcctggaaagatgtaaatctcccaagtccaaaggaactaacttacgattaaaagaagagttgaaggcagagaagaaatctggattttgggacaatttggttttaaaacagaatatacagtctaaaaaaccagatgaaattgaaggttgggagcctccaaaacttgctcttgaagacatatcggctgaccctgaggacaccgtgggtggccacccatcctggtcaggctgggaggatgacgccaagggctcgaccaagtacaccagcctggccagctctgccaacagctccaggtggagcctgcgcgcggcagggaggctggtgagcatccgacggcagagtaaaggccacctgacagatagcccggaggaggcggagtgaggggggctgcgtggcaagtgtgccccgacatggtggccttttatgagtataccatgtagttgttgagtcttttccgcgttagaaagaatagagagtctactttttgcctatatttgatatttggacctctgtttctttatttaatgaactctcacacacactgtgactccttggtgaacacgtgcagggattgtacatttgattgccttattgcagaaatattcacctatcagtccatgttttgcagaaactggagatgtgaatttatgatgctctcccataatacagcagtaatgatttgcagtttctcacaaaatgattttcatgctgctctgtgttgtagttctgtttcagaacttccgtacctttttcttgtatgtagcacgtataaatgcagctgtcatgcagttcttttcttttgctagaattgacaaattaaactttgttcttattaaacaaatacgtaaacaaatactggaaaagcaaaggttatatttgggagtaaaatgtatcttaaaatgcatgttcatcttttgctgagggaggaatagcttcttgtatgtccactggatagtaacagtggttcttttttggaattttatttttacctcttttgaacttctaaatcggtccctttattttcttaaaacatttgctctcttttttgtttacagattaaagaagtatggatcaattttagtcagttgataatttcatttaggaaacattgtcttgctcattatagagagttaagactgtgcataaaatactgaagtgcctcttttttattaggctcatatgtttgttcttgcaaagcgagatgcctattgtgattggtgttagatctgtaagaagctgtgttttttccacaagaataatcgacgaccggtttgagagcatctctcgcgttctttttctgtctgcttactgtccttgacaatgtgatcctgcacagtatcaggtgccagttatgcgtccctggaaggttggctcttatcagcaagtcctgcagatatctcttagataaaagtggtttgaaagaaaaggtatatttttcttttttgtttaaaagtaaaataaaacctccagttacactgtgcattcccctcacgtaaaaacaagacaaaaaccctttcctgagttgctcggcatgcactcctgtgctgtttcatgcatgtggatgttccttccgtttgttcctgtggaataactgagtgtgcctgatggcagaacacactgcagtgttatcagtgtctgcatgttttttaatagaacaggtttacttgatctgtcatctgttatgcaaaaaacagcaattacttttgcatccatctagctaaatctataatctgtgtcaatcacttatacctatcaatcatccgtatctattcacctgtcctctatgtctgtcttctctcagtctacatccatctagccttctgtcaatcatctacttttttttttaatagaacaagaagtttacttatcaagtcttgaaagggggacatgtttcaattggtgttcaaacaaaaattccagcttgtattagaaccttgaaatggtgaagttgtggaggttttctttgttccataatacagagacaagttcataatttttagtataacagctaagttgacaaattctaagtttcctcaggtaaatagtcgtaactgtccttttccctagagaagtgcttgctgggatagtaaaaacatacaccatttcatgacttctgcaaatactttccagcggaagtcagtgtaggtttgtttttggctaacatggtcttgctgcgcaggaatgtaaacactgtgtttgaaactctggaaatcacgtgtgtggggagatggggacgcttcccatgttgtggggagctctgtggctgtgatggctgcagttgccgtgcctctgttggaacgctaagtgcctgcaactcacgtcaatcatagaattgtgacgcacagttggcaaaatagttctttatgctatttctcaaaatttgaggacaaacccagattgggattggaatatgcactgtaaatcaaatttttcttatctacaaagactaatgtaaaaatgattttttcttctgtgcctgattaaattaactgtggtttttaatataaatatttattggtgtgctttgggagaaaaattatcttttcttgaaagaagttatcaaagcaaatttattatcttcacaagttaatgggagaatgtggttttgattctgggtgtttgaattgtgtaaacacacagcttccttgtgtgaagagagttgtcctgtgctccttctactgtactttttttattttttaataggaaagtgatgtgcttcagagaagggttcctccttaatgttgaggttttttaaaaataaaaatactgtttttaagctctttcc

SEQ ID NO: 454776 - DNA, 3271 bp, Homo sapiens
agccgcaggcagagcgtccggcggccgggagggacgcggagccacagcccgacgcacggacggagggacgccggagcccgcctgaccatgtggaagctgggccggggccgagtgctgctggacgagccccccgaggaggaggacggcctgcgtggggggccgccaccggccgccgccgccgccgcccaggttcagggagcaagtttccgaggttggaaagaagtgacttcactgtttaacaaagatgatgagcagcatctcctggaaagatgtaaatctcccaagtccaaaggaactaacttacgattaaaagaagagttgaaggcagagaagaaatctggattttgggacaatttggttttaaaacagaatatacagtctaaaaaaccagatgaaattgaaggttgggagcctccaaaacttgctcttgaagacatatcggctgaccctgaggacaccgtgggtggccacccatcctggtcaggctgggaggatgacgccaagggctcgaccaagtacaccagcctggccagctctgccaacagctccaggtggagcctgcgcgcggcagggaggctggtgagcatccgacggcagagtaaaggccacctgacagatagcccggaggaggcggagtgaggggggctgcgtggcaagtgtgccccgacatggtggccttttatgagtataccatgtagttgttgagtcttttccgcgttagaaagaatagagagtctactttttgcctatatttgatatttggacctctgtttctttatttaatgaactctcacacacactgtgactccttggtgaacacgtgcagggattgtacatttgattgccttattgcagaaatattcacctatcagtccatgttttgcagaaactggagatgtgaatttatgatgctctcccataatacagcagtaatgatttgcagtttctcacaaaatgattttcatgctgctctgtgttgtagttctgtttcagaacttccgtacctttttcttgtatgtagcacgtataaatgcagctgtcatgcagttcttttcttttgctagaaaattagtcaggaggtaagatgaatcttccaaagttatgttaaattttgtttaacttgacaaattaaactttgttcttattaaacaaatacgtaaacaaatactggaaaagcaaaggttatatttgggagtaaaatgtatcttaaaatgcatgttcatcttttgctgagggaggaatagcttcttgtatgtccactggatagtaacagtggttcttttttggaattttatttttacctcttttgaacttctaaatcggtccctttattttcttaaaacatttgctctcttttttgtttacagattaaagaagtatggatcaattttagtcagttgataatttcatttaggaaacattgtcttgctcattatagagagttaagactgtgcataaaatactgaagtgcctcttttttattaggctcatatgtttgttcttgcaaagcgagatgcctattgtgattggtgttagatctgtaagaagctgtgttttttccacaagaataatcgacgaccggtttgagagcatctctcgcgttctttttctgtctgcttactgtccttgacaatgtgatcctgcacagtatcaggtgccagttatgcgtccctggaaggttggctcttatcagcaagtcctgcagatatctcttagataaaagtggtttgaaagaaaaggtatatttttcttttttgtttaaaagtaaaataaaacctccagttacactgtgcattcccctcacgtaaaaacaagacaaaaaccctttcctgagttgctcggcatgcactcctgtgctgtttcatgcatgtggatgttccttccgtttgttcctgtggaataactgagtgtgcctgatggcagaacacactgcagtgttatcagtgtctgcatgttttttaatagaacaggtttacttgatctgtcatctgttatgcaaaaaacagcaattacttttgcatccatctagctaaatctataatctgtgtcaatcacttatacctatcaatcatccgtatctattcacctgtcctctatgtctgtcttctctcagtctacatccatctagccttctgtcaatcatctacttttttttttaatagaacaagaagtttacttatcaagtcttgaaagggggacatgtttcaattggtgttcaaacaaaaattccagcttgtattagaaccttgaaatggtgaagttgtggaggttttctttgttccataatacagagacaagttcataatttttagtataacagctaagttgacaaattctaagtttcctcaggtaaatagtcgtaactgtccttttccctagagaagtgcttgctgggatagtaaaaacatacaccatttcatgacttctgcaaatactttccagcggaagtcagtgtaggtttgtttttggctaacatggtcttgctgcgcaggaatgtaaacactgtgtttgaaactctggaaatcacgtgtgtggggagatggggacgcttcccatgttgtggggagctctgtggctgtgatggctgcagttgccgtgcctctgttggaacgctaagtgcctgcaactcacgtcaatcatagaattgtgacgcacagttggcaaaatagttctttatgctatttctcaaaatttgaggacaaacccagattgggattggaatatgcactgtaaatcaaatttttcttatctacaaagactaatgtaaaaatgattttttcttctgtgcctgattaaattaactgtggtttttaatataaatatttattggtgtgctttgggagaaaaattatcttttcttgaaagaagttatcaaagcaaatttattatcttcacaagttaatgggagaatgtggttttgattctgggtgtttgaattgtgtaaacacacagcttccttgtgtgaagagagttgtcctgtgctccttctactgtactttttttattttttaataggaaagtgatgtgcttcagagaagggttcctccttaatgttgaggttttttaaaaataaaaatactgtttttaagctctttccttattggtttgcatgattattggcatctgcttacgatggctttaatcactcagagctaatggcacctttcctatttagcctcattttagaatgcagtcaacacatgtagacttttcacaaataaatgaacaacttcaaccttggttttcaagatgtgtcttctgcgtatttgaa

SEQ ID NO: 454777 - DNA, 3097 bp, Homo sapiens
agccgcaggcagagcgtccggcggccgggagggacgcggagccacagcccgacgcacggacggagggacgccggagcccgcctgaccatgtggaagctgggccggggccgagtgctgctggacgagccccccgaggaggaggacggcctgcgtggggggccgccaccggccgccgccgccgccgcccaggttcagggagcaagtttccgaggttggaaagaagtgacttcactgtttaacaaagatgatgagcagcatctcctggaaagatgtaaatctcccaagtccaaaggaactaacttacgattaaaagaagagttgaaggcagagaagaaatctggattttgggacaatttggttttaaaacagaatatacagtctaaaaaaccagatgaaattgaaggttgggagcctccaaaacttgctcttgaagacatatcggctgaccctgaggacaccgtgggtggccacccatcctggtcaggctgggaggatgacgccaagggctcgaccaagtacaccagcctggccagctctgccaacagctccaggtggagcctgcgcgcggcagggaggctggtgagcatccgacggcagagtaaaggccacctgacagatagcccggaggaggcggagtgaggggggctgcgtggcaagtgtgccccgacatggtggccttttatgagtataccatgtagttgttgagtcttttccgcgttagaaagaatagagagtctactttttgcctatatttgatatttggacctctgtttctttatttaatgaactctcacacacactgtgactccttggtgaacacgtgcagggattgtacatttgattgccttattgcagaaatattcacctatcagtccatgttttgcagaaactggagatgtgaatttatgatgctctcccataatacagcagtaatgatttgcagtttctcacaaaatgattttcatgctgctctgtgttgtagttctgtttcagaacttccgtacctttttcttgtatgtagcacgtataaatgcagctgtcatgcagttcttttcttttgctagaaaattagtcaggaggtaagatgaatcttccaaagttatgttaaattttgtttaacttgacaaattaaactttgttcttattaaacaaatacgtaaacaaatactggaaaagcaaaggttatatttgggagtaaaatgtatcttaaaatgcatgttcatcttttgctgagggaggaatagcttcttgtatgtccactggatagtaacagtggttcttttttggaattttatttttacctcttttgaacttctaaatcggtccctttattttcttaaaacatttgctctcttttttgtttacagattaaagaagtatggatcaattttagtcagttgataatttcatttaggaaacattgtcttgctcattatagagagttaagactgtgcataaaatactgaagtgcctcttttttattaggctcatatgtttgttcttgcaaagcgagatgcctattgtgattggtgttagatctgtaagaagctgtgttttttccacaagaataatcgacgaccggtttgagagcatctctcgcgttctttttctgtctgcttactgtccttgacaatgtgatcctgcacagtatcaggtgccagttatgcgtccctggaaggttggctcttatcagcaagtcctgcagatatctcttagataaaagtggtttgaaagaaaaggtatatttttcttttttgtttaaaagtaaaataaaacctccagttacactgtgcattcccctcacgtaaaaacaagacaaaaaccctttcctgagttgctcggcatgcactcctgtgctgtttcatgcatgtggatgttccttccgtttgttcctgtggaataactgagtgtgcctgatggcagaacacactgcagtgttatcagtgtctgcatgttttttaatagaacaggtttacttgatctgtcatctgttatgcaaaaaacagcaattacttttgcatccatctagctaaatctataatctgtgtcaatcacttatacctatcaatcatccgtatctattcacctgtcctctatgtctgtcttctctcagtctacatccatctagccttctgtcaatcatctacttttttttttaatagaacaagaagtttacttatcaagtcttgaaagggggacatgtttcaattggtgttcaaacaaaaattccagcttgtattagaaccttgaaatggtgaagttgtggaggttttctttgttccataatacagagacaagttcataatttttagtataacagctaagttgacaaattctaagtttcctcaggtaaatagtcgtaactgtccttttccctagagaagtgcttgctgggatagtaaaaacatacaccatttcatgacttctgcaaatactttccagcggaagtcagtgtaggtttgtttttggctaacatggtcttgctgcgcaggaatgtaaacactgtgtttgaaactctggaaatcacgtgtgtggggagatggggacgcttcccatgttgtggggagctctgtggctgtgatggctgcagttgccgtgcctctgttggaacgctaagtgcctgcaactcacgtcaatcatagaattgtgacgcacagttggcaaaatagttctttatgctatttctcaaaatttgaggacaaacccagattgggattggaatatgcactgtaaatcaaatttttcttatctacaaagactaatgtaaaaatgattttttcttctgtgcctgattaaattaactgtggtttttaatataaatatttattggtgtgctttgggagaaaaattatcttttcttgaaagaagttatcaaagcaaatttattatcttcacaagttaatgggagaatgtggttttgattctgggtgtttgaattgtgtaaacacacagcttccttgtgtgaagagagttgtcctgtgctccttctactgtactttttttattttttaataggaaagtgatgtgcttcagagaagggttcctccttaatgttgaggttttttaaaaataaaaatactgtttttaagctctttcc

SEQ ID NO: 454778 - DNA, 1670 bp, Homo sapiens
  misc_feature (1670)..(1670): n is a, c, g, or t
agccgcaggcagagcgtccggcggccgggagggacgcggagccacagcccgacgcacggacggagggacgccggagcccgcctgaccatgtggaagctgggccggggccgagtgctgctggacgagccccccgaggaggaggacggcctgcgtggggggccgccaccggccgccgccgccgccgcccaggttcagggagcaagtttccgaggttggaaagaagtgacttcactgtttaacaaagatgatgagcagcatctcctggaaagatgtaaatctcccaagtccaaaggaactaacttacgattaaaagaagagttgaaggcagagaagaaatctggattttgggacaatttggttttaaaacagaatatacagtctaaaaaaccagatgaaattgaaggttgggagcctccaaaacttgctcttgaagacatatcggctgaccctgaggacaccgtgggtggccacccatcctggtcaggctgggaggatgacgccaagggctcgaccaagtacaccagcctggccagctctgccaacagctccaggtggagcctgcgcgcggcagggaggctggtgagcatccgacggcagagtaaaggccacctgacagatagcccggaggaggcggagtgaggggggctgcgtggcaagtgtgccccgacatggtggccttttatgagtataccatgtagttgttgagtcttttccgcgttagaaagaatagagagtctactttttgcctatatttgatatttggacctctgtttctttatttaatgaactctcacacacactgtgactccttggtgaacacgtgcagggattgtacatttgattgccttattgcagaaatattcacctatcagtccatgttttgcagaaactggagatgtgaatttatgatgctctcccataatacagcagtaatgatttgcagtttctcacaaaatgattttcatgctgctctgtgttgtagttctgtttcagaacttccgtacctttttcttgtatgtagcacgtataaatgcagctgtcatgcagttcttttcttttgctagaaaattagtcaggaggtaagatgaatcttccaaagttatgttaaattttgtttaacttgacaaattaaactttgttcttattaaacaaatacgtaaacaaaaaaaaaaaaaaaaaaaaaaaaaaaaattttggcggcgcgccccagggcccccgaaaaaaagcttcttaagaacacaatgcggtgtgaggagacagcgggacccaagagagaaacgtgcacacctgggccaaaacgggtaccacgagagaaaaccggggcacaacacaagagcgcggggatctctcccccagttaaaaaaaaaaaggcgcgcgggggagaacaccacgcagagctctctcggtggaagaaccaattcccggcaagagaggcggagaaccaccagaaggaggaccacataagcggggggcgcatcataaccaccgaaggggggatctccccagagagagcagagccgcagcatactacacaaaatatgaccccccgccgcagcagagagagacaacggaagaagacgagcaaacagcagacaccaagaagaagaacaacacgaagacgaatcaaaaagcaagacaaaagacaaagacggaacagccggaaagagaan

SEQ ID NO: 454779 - DNA, 1516 bp, Homo sapiens
gagcgggtgagaggagcgggacacgcggaggaggtaaggaaggggtaggccctctccgggatctctgtcccccagtcaccttcctgcgacccttcctgggaggggcgtcctgggcggtgggggaaggtgggaggggcgggcggttacctcatcgccgcctccgggaggccccgctcgctcgcgccggcggctggggcggcgactccaggcgcggaagcgagagaaggatagaggcacagaggctccgggaggcagcgctgccccccgcgccccgcaccgctgcgggacccgcgccgcgagaggggcggacttcggcgcctcgcgcgtccgccggcgcctgggttggcgctgcggggcggaggcggtgtctgagcgccgctccggctctgctctctctcgagcttcggcacccgcccgagccgctcgcgcgcccgccacctgtctgcccactcggctgtctgtctgccctcccgccgccagctcctgcctcgggcctgccctctccggtctcggtgctccgaggggcgacgagaagcgcgacggggccgtggcgcaccgggcagggcgcgcggggcgcacggcctgggggcgcacggtgcggcgccggcccatgaggctttccagcgcggggagcggcagcgccggccggccatggggggtagcctgcgggtggccgttctaggcgccccgggcgtgggcaagacggccatcatccgccagttcctgttcggtgactaccccgagcgccaccggcccacggacgggccgcgcctctaccgacccgcggtgctgctcgacggcgccgtctacgacttgagcatccgcgacggcgacgtcgctggccccggctcgagccccgggggtccggaggagtggccagacgctaaggactggagcttgcaggacacggacgccttcgtgctcgtctacgacatctgcagcccggacagtttcgactacgtgaaggccctgcggcagcgcatcgcggagaccaggccggcgggcgcgcccgaagcgcccatcctcgtggtaggcaacaagcgggacaggcagcggctgcgcttcggaccgcggcgcgcgctggccgccctagtgcgcaggggctggcgctgcggctacctcgagtgctccgccaagtacaactggcacgtgctgcgtctcttccgcgagctgctgcgctgcgctctggtgcgcgcgcgccctgcacacccggccctgcgcctgcagggggcgctgcatcccgcgcgctgcagcctcatgtgacccgatcggacagtgccatccatgggccccaccttgtgactgggacaatcagggacctggattggacgggatcgcccaacctccattggagatgaccagtcctttctgggacctcaatgggtcacaatcccattggatggaaaggacttggctatgaacttgactggaaacacgcagcctgctcctggagcttcactggacatattctttatgccacacctaccacgggataataaaagggaaaataatttga

SEQ ID NO: 454780 - DNA, 1146 bp, Homo sapiens
agtcttagaggccgtggtaagcaccgagagcatctagggaggagagcggcctgagccgagttggggaaagctgaaaagaggaagattcggggagtggccagacgctaaggactggagcttgcaggacacggacgccttcgtgctcgtctacgacatctgcagcccggacagtttcgactacgtgaaggccctgcggcagcgcatcgcggagaccaggtaggggcccggcagttctggcggtggggagctaggacaggtctggcagggcctttgcctgaggagagtgtgtagggtctcccaacgtcgtgggccgggtcttaggccttcgcccgtgggaaggtcttaagctgtatgtgctctttggcccacatgggcctggggtttcgttggggcggcggggggggcggtgtctctggccgtaggaagggaatgcgcctgcgtgtgtatacccactgggggaattctccggccgtggggtccccgcgtctctcatctccattcggcccccaggccggcgggcgcgcccgaagcgcccatcctcgtggtaggcaacaagcgggacaggcagcggctgcgcttcggaccgcggcgcgcgctggccgccctagtgcgcaggggctggcgctgcggctacctcgagtgctccgccaagtacaactggcacgtgctgcgtctcttccgcgagctgctgcgctgcgctctggtgcgcgcgcgccctgcacacccggccctgcgcctgcagggggcgctgcatcccgcgcgctgcagcctcatgtgacccgatcggacagtgccatccatgggccccaccttgtgactgggacaatcagggacctggattggacgggatcgcccaacttcactgggactggacagggaagtctccgccctgattggatgaggaaagctccaacccagtctcctaagcgactggcccccttttgaacctcattggacccaaccaggtcccaagctccattggagatgaccagtcctttctgggacctcaatgggtcacaatcccattggatggaaaggacttggctatgaacttgactggaaacacgcagcctgctcctggagcttcactggacatattctttatgccacacctaccacgggataataaaagggaaaataatttga

SEQ ID NO: 454781 - DNA, 458 bp, Homo sapiens
gtagccgcagcgccagcccctgcgcactagggcggccagcgcgcgccgcggtccggggcgctgcatcccgcgcgctgcagcctcatgtgacccgatcggacagtgccatccatgggccccaccttgtgactgggacaatcagggacctggattggacgggatcgcccaacttcactgggactggacagggaagtctccgccctgattggatgaggaaagctccaacccagtctcctaagcgactggcccccttttgaacctcattggacccaaccaggtcccaagctccattggagatgaccagtcctttctgggacctcaatgggtcacaatcccattggatggaaaggacttggctatgaacttgactggaaacacgcagcctgctcctggagcttcactggacatattctttatgccacacctaccacgggataataaaagggaaaataatttga

SEQ ID NO: 454782 - DNA, 1631 bp, Homo sapiens
gagcgggtgagaggagcgggacacgcggaggaggtaaggaaggggtaggccctctccgggatctctgtcccccagtcaccttcctgcgacccttcctgggaggggcgtcctgggcggtgggggaaggtgggaggggcgggcggttacctcatcgccgcctccgggaggccccgctcgctcgcgccggcggctggggcggcgactccaggcgcggaagcgagagaaggatagaggcacagaggctccgggaggcagcgctgccccccgcgccccgcaccgctgcgggacccgcgccgcgagaggggcggacttcggcgcctcgcgcgtccgccggcgcctgggttggcgctgcggggcggaggcggtgtctgagcgccgctccggctctgctctctctcgagcttcggcacccgcccgagccgctcgcgcgcccgccacctgtctgcccactcggctgtctgtctgccctcccgccgccagctcctgcctcgggcctgccctctccggtctcggtgctccgaggggcgacgagaagcgcgacggggccgtggcgcaccgggcagggcgcgcggggcgcacggcctgggggcgcacggtgcggcgccggcccatgaggctttccagcgcggggagcggcagcgccggccggccatggggggtagcctgcgggtggccgttctaggcgccccgggcgtgggcaagacggccatcatccgccagttcctgttcggtgactaccccgagcgccaccggcccacggacgggccgcgcctctaccgacccgcggtgctgctcgacggcgccgtctacgacttgagcatccgcgacggcgacgtcgctggccccggctcgagccccgggggtccggaggagtggccagacgctaaggactggagcttgcaggacacggacgccttcgtgctcgtctacgacatctgcagcccggacagtttcgactacgtgaaggccctgcggcagcgcatcgcggagaccaggccggcgggcgcgcccgaagcgcccatcctcgtggtaggcaacaagcgggacaggcagcggctgcgcttcggaccgcggcgcgcgctggccgccctagtgcgcaggggctggcgctgcggctacctcgagtgctccgccaagtacaactggcacgtgctgcgtctcttccgcgagctgctgcgctgcgctctggtgcgcgcgcgccctgcacacccggccctgcgcctgcagggggcgctgcatcccgcgcgctgcagcctcatgtgacccgatcggacagtgccatccatgggccccaccttgtgactgggacaatcagggacctggattggacgggatcgcccaacttcactgggactggacagggaagtctccgccctgattggatgaggaaagctccaacccagtctcctaagcgactggcccccttttgaacctcattggacccaaccaggtcccaagctccattggagatgaccagtcctttctgggacctcaatgggtcacaatcccattggatggaaaggacttggctatgaacttgactggaaacacgcagcctgctcctggagcttcactggacatattctttatgccacacctaccacgggataataaaagggaaaataatttga

SEQ ID NO: 454783 - DNA, 1810 bp, Homo sapiens
gagcgggtgagaggagcgggacacgcggaggaggtaaggaaggggtaggccctctccgggatctctgtcccccagtcaccttcctgcgacccttcctgggaggggcgtcctgggcggtgggggaaggtgggaggggcgggcggttacctcatcgccgcctccgggaggccccgctcgctcgcgccggcggctggggcggcgactccaggcgcggaagcgagagaaggatagaggcacagaggctccgggaggcagcgctgccccccgcgccccgcaccgctgcgggacccgcgccgcgagaggggcggacttcggcgcctcgcgcgtccgccggcgcctgggttggcgctgcggggcggaggcggtgtctgagcgccgctccggctctgctctctctcgagcttcggcacccgcccgagccgctcgcgcgcccgccacctgtctgcccactcggctgtctgtctgccctcccgccgccagctcctgcctcgggcctgccctctccggtctcggtgctccgaggggcgacgagaagcgcgacggggccgtggcgcaccgggcagggcgcgcggggcgcacggcctgggggcgcacggtgcggcgccggcccatgaggctttccagcgcggggagcggcagcgccggccggccatggggggtagcctgcgggtggccgttctaggcgccccgggcgtgggcaagacggccatcatccgccagttcctgttcggtgactaccccgagcgccaccggcccacggacgggccgcgcctctaccgacccgcggtgctgctcgacggcgccgtctacgacttgagcatccgcgacggcgacgtcgctggccccggctcgagccccgggggtccggaggagtggccagacgctaaggactggagcttgcaggacacggacgccttcgtgctcgtctacgacatctgcagcccggacagtttcgactacgtgaaggccctgcggcagcgcatcgcggagaccaggtaggggcccggcagttctggcggtggggagctaggacaggtctggcagggcctttgcctgaggagagtgtgtagggtctcccaacgtcgtgggccgggtcttaggccttcgcccgtgggaaggtcttaagctgtatgtgctctttggcccacatgggcctggggtttcgttggggcggcggggggggcggtgtctctggccgtaggaagggaatgcgcctgcgtgtgtatacccactgggggaattctccggccgtggggtccccgcgtctctcatctccattcggcccccaggccggcgggcgcgcccgaagcgcccatcctcgtggtaggcaacaagcgggacaggcagcggctgcgcttcggaccgcggcgcgcgctggccgccctagtgcgcaggggctggcgctgcggctacctcgagtgctccgccaagtacaactggcacgtgctgcgtctcttccgcgagctgctgcgctgcgctctggtgcgcgcgcgccctgcacacccggccctgcgcctgcagggggcgctgcatcccgcgcgctgcagcctcatgtgacccgatcggacagtgccatccatgggccccaccttgtgactgggacaatcagggacctggattggacgggatcgcccaacctccattggagatgaccagtcctttctgggacctcaatgggtcacaatcccattggatggaaaggacttggctatgaacttgactggaaacacgcagcctgctcctggagcttcactggacatattctttatgccacacctaccacgggataataaaagggaaaataatttga

SEQ ID NO: 454784 - DNA, 522 bp, Homo sapiens
gcaggagaatcgcttcaacctgggaggcacaggctgcagtgatctgagatcatgccacttccctccagcctgggtgacaaagaaagactctgtttcaaacaaaacaaaacaaaacaaaacagaaggatgggaggatggagggaatcatggtggacaggaggcaggactagactgcagctccagacaaagcagcatctggaagcttccatggtgaattttagctccagatcaactgcaagaataaatcagcaattctgaggggacccacagaccctctgaaggaagcggattgctcctgtagggcccagaagacaccccaaatactgtgagtgccccaactgcggaagtgggaaagggagaccctcctctcccaacacactcccccaatttgagtgggagaaatattcaatgaaatagatagcttaaagaaaaaacaatagaaaattcaggaaactttggacacacttttagaaatgtgaaatgctctggaaagtctcagcaatagaacaagtagaagaagga

SEQ ID NO: 454785 - DNA, 484 bp, Homo sapiens
gtctcgaactcctgacctcaagtaatcagcccacctcggcctccgaaagtgctgggattacaggcctgagccaccactcctgacctgtatagtattattctacacataaccgaatgctgaaatgatggaaagttaatcagaaaatgcttccataatctttgtattgaggtttaaaagacatcatacatatgccatgactgaagaggtaagtgggagaagaggagaaggcattttgatgtaatgggaaaactatgtacttttgacttagatctagttgattcacatttagcaatatcatgtaaccttgtggaagttacataaaccattcaacccatggctttcttatctgtaacatgaggctactacttctatttatcttgcagactagtgggaattagagtaagtggataagaaattcttatcactgaattagtttttgagtaaatggtaacttctcttattttttgagatggagtcttgctcc

SEQ ID NO: 454786 - DNA, 423 bp, Homo sapiens
tctgggtaattaaatgtttgtgtgtgtgtgtgtgtgtgtgtgtgtgtgtgtgtgtgtgtgtgtgtgtgtatttaggttttggtgaggtataaagccatttaagtctagctataccaaaaagaatttacctttccattacagatgattcattcagtaagcatttgttgaggatctttatatgccaggtgcttctctaggagctgaggataccaaaatggagaagacaagatttctgccctcaaggcgttcaacgtctggttgggagatggactcatgattgcagtattcatggtatcagtgacatgggtagtatcatctcaatgaaggaacaacttagggaaggaacgatgcacccgtctcttgccctgcctctccagtattcgggcttccttgctgggaaataactctattagcagagaagaa

SEQ ID NO: 454787 - DNA, 588 bp, Homo sapiens
ccccgcctccgcccccggctggcgtgagctgggtgtttcctgcctctctcagtccgggtttggagactcctgcgtcctccgacttttcatggaagagatgtcaggagaaagtgtggtgagctcagcggtgccagcggctgctacccgcaccacttccttcaagggcacgagccccagctccaaatacgtgaagctgaatgtgggtggagccctctactataccaccatgcagacgctgaccaagcaggacaccatgctgaaggccatgttcagcgggcgcatggaagtgctcaccgacagtgaaggctggatcctcattgaccgctgtgggaagcactttggtacgatactcaactaccttcgagacggggcggtgcctttacccgagagccgccgggagatcgaggagctgctagcagaagccaagtactacctagtccaaggcctggtggaagagtgccaggcggccctacaattcactggtggtgagaatccttctctcttcccagccatgactgccccatctcccctcgccagagcctgtccagccggtcaactttaaaaatgcagtgctaggcaggcctccta

SEQ ID NO: 454788 - DNA, 3558 bp, Homo sapiens
ccccgcctccgcccccggctggcgtgagctgggtgtttcctgcctctctcagtccgggtttggagactcctgcgtcctccgacttttcatggaagagatgtcaggagaaagtgtggtgagctcagcggtgccagcggctgctacccgcaccacttccttcaagggcacgagccccagctccaaatacgtgaagctgaatgtgggtggagccctctactataccaccatgcagacgctgaccaagcaggacaccatgctgaaggccatgttcagcgggcgcatggaagtgctcaccgacagtgaaggctggatcctcattgaccgctgtgggaagcactttggtacgatactcaactaccttcgagacggggcggtgcctttacccgagagccgccgggagatcgaggagctgctagcagaagccaagtactacctagtccaaggcctggtggaagagtgccaggcggccctacaaaacaaagatacttatgagcctttctgcaaggtccctgtgatcacctcatccaaggaagaacaaaaacttatagcgacttcaaataagccagccgtgaagttgctctacaacagaagtaacaacaaatactcatataccagcaattctgacgacaatatgttgaaaaacattgaactgtttgataagctgtctctgcgctttaacggaagggtcctgttcataaaggatgttattggggatgaaatctgctgctggtccttttatggtcagggccggaagattgctgaagtctgttgtacctccatcgtctatgccactgagaagaaacagaccaaggtggagtttcccgaagcccggatttatgaggagaccctgaacattttgctgtatgaggcccaggatggccggggacctgacaatgcgctcctggaggccacaggcggggcggcggggcgctcccaccacctggacgaggacgaggagcgggagcggatcgagcgcgtgcggaggatccacatcaagcgccctgatgaccgggcccacctccaccagtgagcaggcaagagaccgagccgccctcctctcaccgcccccactccctgccgtgctacacccagatcctgtgcaggctgccgggccccttctgcttcccttggagcctggagatacttttgtaacaagccagatgattattttggtattgcttgacaaggcaaattgattgtcttgacccaggcgtatgacccctgtcgttgaacaagctgtgtctaagatctctacttttcatgagaatctgagactctttggagccaggctttctcggttctcagaggaaaagtatgaatgagtgtgaagtgtatgtgagaacttttgtttgcaatatttatttttgtgggtgtcgacttcctatgtgggctttttgggtgacactcccttaagggttcagtttgacaattctgagagttgtcctgcagttggaggccaccagaggtatctgagctccctgcttcctatttcataatcctccagccccagcaggtccactcctggttcctgtgtgtttggcccgggcacaatccccactgctttgctagacgtgctttctgccatgtggctttgggcctagagcttgttgataattgcagcttgtggcagtggaaatatggctgaatgagcgtctaaatcgttgagaccagtgcaactttgggtgcaaggctttgtttagggatcaagccttttgccaccttgggctggtctttggcctggtgctcactgggaccccatatgtctgcgtaggagcagaactttccatggcagtaagtgtccagctctgtttctggttctttccccaactccagccccgtccagttgttctcctgattgacccgactccactccaggaaggccatctgaccctgtgacaggcatagctcataaactacccctcccaggctcctctgcacctgcaaaggaacaggagtgagtcgtgactgacaggggtggttgagactagactaggtagagtagttaccaggagatgtgaatgtgcgtcaggtgatggatgggtttgtcaagggaatcgttaccgttttataccaaaggtattaacatgggcagcctttgacacatgtattccaaaaacgagtttatattttcaaacggtttttacagcttagactttgtacttactgccctgcctgtgacagttgtatgccttcattttgtatccaacagcaaagtctacaataaaactttaaaacaatcatgactgaatgtcaaaatcgtgtattgggcagatgctttttaaactgtcgtgtgagaaacttttatattaggccatttggattttattaagtgctaaggaaagagggcttacaaaatgtttcgtaaatattttatactgtttaagtgttaaacaccaaccctgtctttcttttgggttgagcttttttagaaagtcgaagtgaatgttggccaggaaaatggaaaagccattgtataaatttttttttgaggcggagtcttgctctattggccaggctggagtgtagtggcaccatctccacttaccacaacttgtgcctcctgggttcaagcgattctgctgcctcagcctcccgagtagctgggattgcaggtacccatcagcccatgcccagctaattttgtatttttagtagagatggggtttcaccatgttggccaggctggtcttgaactcctgaccctgtgatccgaccaccttggcctcccaaagtgctgggattacaggtgtgagtcaccacacctggctgcatagtgttttaaatgtttgtgtgaagaatgagtttgtggaacaatttgatttgctgtggcctctatgcctaatgagctagtgtttctggcagctctctctacccaactttgcacttgtagttttgagtctttgtctctctggaatatgaacaggtttataaaacattccatggtgaacaattctgtcggctgcattatagccatgagtgaatagacagcattggctggtccaagctctgttattgagtatacaaggaactgatttttcttatgttagcactaagggcaaaaaccaatatttataatgtaagcactatccaggtaaaacactggcccaagatttggtaaagagatttcattgcaatgtaataactacagttttttacaaattggaacagctttggtgtgtcgtaatcaagggttttttttgtttgtttgtttcaaataagccatctgattgtggtgactggggcccatgtccaagacaattcctggcatattctgtcaccctcccgtggggcgatcactgtgtggggaccccattccccagttaaagtgtgtctctgtaccttacaacagcgattcaggacccaagtgtgaacaacactcagcccgccctctggagcgtgtgctgtctttagggccctacccaaagtcactgtaacagttaagtgtgtcattaacctttctgtctctttgcgccataaaaaaatgctcaaagttttagatgtagccactgtatgttgtacaaacgttggcgacatgtaaaataaaagtcataaaatgct

SEQ ID NO: 454789 - DNA, 1897 bp, Homo sapiens
ccaatatgtgcctcttctatatctacccccttgtctttgcctctgatttttacacagtgtagagtggccagcagtgaacaggttgaggatgtgcgggtagatagataactttgggtctggtttgtgtctgtgttcatgtttgtttaagggatatgtgtgactgtgggtggggacgtgtgcttgtggggcacaggtggcccctgctggagcccggctgggcgcagcgcctatgtaggacgggtgttctcagtgacctacctcccaggctcctctgcacctgcaaaggaacaggagtgagtcgtgactgacaggggtggttgagactagactaggtagagtagttaccaggagatgtgaatgtgcgtcaggtgatggatgggtttgtcaagggaatcgttaccgttttataccaaaggtattaacatgggcagcctttgacacatgtattccaaaaacgagtttatattttcaaacggtttttacagcttagactttgtacttactgccctgcctgtgacagttgtatgccttcattttgtatccaacagcaaagtctacaataaaactttaaaacaatcatgactgaatgtcaaaatcgtgtattgggcagatgctttttaaactgtcgtgtgagaaacttttatattaggccatttggattttattaagtgctaaggaaagagggcttacaaaatgtttcgtaaatattttatactgtttaagtgttaaacaccaaccctgtctttcttttgggttgagcttttttagaaagtcgaagtgaatgttggccaggaaaatggaaaagccattgtataaatttttttttgaggcggagtcttgctctattggccaggctggagtgtagtggcaccatctccacttaccacaacttgtgcctcctgggttcaagcgattctgctgcctcagcctcccgagtagctgggattgcaggtacccatcagcccatgcccagctaattttgtatttttagtagagatggggtttcaccatgttggccaggctggtcttgaactcctgaccctgtgatccgaccaccttggcctcccaaagtgctgggattacaggtgtgagtcaccacacctggctgcatagtgttttaaatgtttgtgtgaagaatgagtttgtggaacaatttgatttgctgtggcctctatgcctaatgagctagtgtttctggcagctctctctacccaactttgcacttgtagttttgagtctttgtctctctggaatatgaacaggtttataaaacattccatggtgaacaattctgtcggctgcattatagccatgagtgaatagacagcattggctggtccaagctctgttattgagtatacaaggaactgatttttcttatgttagcactaagggcaaaaaccaatatttataatgtaagcactatccaggtaaaacactggcccaagatttggtaaagagatttcattgcaatgtaataactacagttttttacaaattggaacagctttggtgtgtcgtaatcaagggttttttttgtttgtttgtttcaaataagccatctgattgtggtgactggggcccatgtccaagacaattcctggcatattctgtcaccctcccgtggggcgatcactgtgtggggaccccattccccagttaaagtgtgtctctgtaccttacaacagcgattcaggacccaagtgtgaacaacactcagcccgccctctggagcgtgtgctgtctttagggccctacccaaagtcactgtaacagttaagtgtgtcattaacctttctgtctctttgcgccataaaaaaatgctcaaagttttagatgtagccactgtatgttgtacaaacgttggcgacatgtaaaataaaagtcataaaatgct

SEQ ID NO: 454790 - DNA, 2633 bp, Homo sapiens
ccccgcctccgcccccggctggcgtgagctgggtgtttcctgcctctctcagtccgggtttggagactcctgcgtcctccgacttttcatggaagagatgtcaggagaaagtgtggtgagctcagcggtgccagcggctgctacccgcaccacttccttcaagggcacgagccccagctccaaatacgtgaagctgaatgtgggtggagccctctactataccaccatgcagacgctgaccaagcaggacaccatgctgaaggccatgttcagcgggcgcatggaagtgctcaccgacagtgaaggctggatcctcattgaccgctgtgggaagcactttggtacgatactcaactaccttcgagacggggcggtgcctttacccgagagccgccgggagatcgaggagctgctagcagaagccaagtactacctagtccaaggcctggtggaagagtgccaggcggccctacaaaacaaagatacttatgagcctttctgcaaggtccctgtgatcacctcatccaaggaagaacaaaaacttatagcgacttcaaataagccagccgtgaagttgctctacaacagaagtaacaacaaatactcatataccagcaattctgacgacaatatgttgaaaaacattgaactgtttgataagctgtctctgcgctttaacggaagggtcctgttcataaaggatgttattggggatgaaatctgctgctggtccttttatggtcagggccggaagattgctgaagtctgttgtacctccatcgtctatgccactgagaagaaacagaccaaggtggagtttcccgaagcccggatttatgaggagaccctgaacattttgctgtatgaggcccaggatggccggggacctgacaatgcgctcctggaggccacaggcggggcggcggggcgctcccaccacctggacgaggacgaggagcgggagcggatcgagcgcgtgcggaggatccacatcaagcgccctgatgaccgggcccacctccaccagtgagcaggcaagagaccgagccgccctcctctcaccgcccccactccctgccgtgctacacccagatcctgtgcaggctgccgggccccttctgcttcccttggagcctggagatacttttgtaacaagccagatgattattttggtattgcttgacaaggcaaattgattgtcttgacccaggcgtatgacccctgtcgttgaacaagctgtgtctaagatctctacttttcatgagaatctgagactctttggagccaggctttctcggttctcagaggaaaagtatgaatgagtgtgaagtgtatgtgagaacttttgtttgcaatatttatttttgtgggtgtcgacttcctatgtgggctttttgggtgacactcccttaagggttcagtttgacaattctgagagttgtcctgcagttggaggccaccagaggtatctgagctccctgcttcctatttcataatcctccagccccagcaggtccactcctggttcctgtgtgtttggcccgggcacaatccccactgctttgctagacgtgctttctgccatgtggctttgggcctagagcttgttgataattgcagcttgtggcagtggaaatatggctgaatgagcgtctaaatcgttgagaccagtgcaactttgggtgcaaggctttgtttagggatcaagccttttgccaccttgggctggtctttggcctggtgctcactgggaccccatatgtctgcgtaggagcagaactttccatggcagtaagtgtccagctctgtttctggttctttccccaactccagccccgtccagttgttctcctgattgacccgactccactccaggaaggccatctgaccctgtgacaggcatagctcataaactacccctccctgggatcccgctcctcttcagcctccttccccatgaagctgggctaactttctaagtcattttgcttagaaattcagtgtggcccataccctttgtcctcccagcctggcatccaggcagggacaccctcacaccaccagccccagggagcttccctgctataaacacagacccccttgtctttgcctctgatttttacacagtgtagagtggccagcagtgaacaggttgaggatgtgcgggtagatagataactttgggtctggtttgtgtctgtgttcatgtttgtttaagggatatgtgtgactgtgggtggggacgtgtgcttgtggggcacaggtggcccctgctggagcccggctgggcgcagcgcctatgtaggacgggtgttctcagtgacctacctcccaggctcctctgcacctgcaaaggaacaggagtgagtcgtgactgacaggggtggttgagactagactaggtagagtagttaccaggagatgtgaatgtgcgtcaggtgatggatgggtttgtcaagggaatcgttaccgttttataccaaaggtattaacatgggcagcctttgacacatgtattccaaaaacgagctctccacctccgcccggaaagttggtggaacgggtggtgccaaacagtttgcccctttcgcatgtggccctataaatagaatccgccctttctgtcttcctta

SEQ ID NO: 454791 - DNA, 2651 bp, Homo sapiens
ccccgcctccgcccccggctggcgtgagctgggtgtttcctgcctctctcagtccgggtttggagactcctgcgtcctccgacttttcatggaagagatgtcaggagaaagtgtggtgagctcagcggtgccagcggctgctacccgcaccacttccttcaagggcacgagccccagctccaaatacgtgaagctgaatgtgggtggagccctctactataccaccatgcagacgctgaccaagcaggacaccatgctgaaggccatgttcagcgggcgcatggaagtgctcaccgacagtgaaggctggatcctcattgaccgctgtgggaagcactttggtacgatactcaactaccttcgagacggggcggtgcctttacccgagagccgccgggagatcgaggagctgctagcagaagccaagtactacctagtccaaggcctggtggaagagtgccaggcggccctacaaaacaaagatacttatgagcctttctgcaaggtccctgtgatcacctcatccaaggaagaacaaaaacttatagcgacttcaaataagccagccgtgaagttgctctacaacagaagtaacaacaaatactcatataccagcaattctgacgacaatatgttgaaaaacattgaactgtttgataagctgtctctgcgctttaacggaagggtcctgttcataaaggatgttattggggatgaaatctgctgctggtccttttatggtcagggccggaagattgctgaagtctgttgtacctccatcgtctatgccactgagaagaaacagaccaaggtggagtttcccgaagcccggatttatgaggagaccctgaacattttgctgtatgaggcccaggatggccggggacctgacaatgcgctcctggaggccacaggcggggcggcggggcgctcccaccacctggacgaggacgaggagcgggagcggatcgagcgcgtgcggaggatccacatcaagcgccctgatgaccgggcccacctccaccagtgagcaggcaagagaccgagccgccctcctctcaccgcccccactccctgccgtgctacacccagatcctgtgcaggctgccgggccccttctgcttcccttggagcctggagatacttttgtaacaagccagatgattattttggtattgcttgacaaggcaaattgattgtcttgacccaggcgtatgacccctgtcgttgaacaagctgtgtctaagatctctacttttcatgagaatctgagactctttggagccaggctttctcggttctcagaggaaaagtatgaatgagtgtgaagtgtatgtgagaacttttgtttgcaatatttatttttgtgggtgtcgacttcctatgtgggctttttgggtgacactcccttaagggttcagtttgacaattctgagagttgtcctgcagttggaggccaccagaggtatctgagctccctgcttcctatttcataatcctccagccccagcaggtccactcctggttcctgtgtgtttggcccgggcacaatccccactgctttgctagacgtgctttctgccatgtggctttgggcctagagcttgttgataattgcagcttgtggcagtggaaatatggctgaatgagcgtctaaatcgttgagaccagtgcaactttgggtgcaaggctttgtttagggatcaagccttttgccaccttgggctggtctttggcctggtgctcactgggaccccatatgtctgcgtaggagcagaactttccatggcagtaagtgtccagctctgtttctggttctttccccaactccagccccgtccagttgttctcctgattgacccgactccactccaggaaggccatctgaccctgtgacaggcatagctcataaactacccctccctgggatcccgctcctcttcagcctccttccccatgaagctgggctaactttctaagtcattttgcttagaaattcagtgtggcccataccctttgtcctcccagcctggcatccaggcagggacaccctcacaccaccagccccagggagcttccctgctataaacacagacccccttgtctttgcctctgatttttacacagtgtagagtggccagcagtgaacaggttgaggatgtgcgggtagatagataactttgggtctggtttgtgtctgtgttcatgtttgtttaagggatatgtgtgactgtgggtggggacgtgtgcttgtggggcacaggtggcccctgctggagcccggctgggcgcagcgcctatgtaggacgggtgttctcagtgacctacctcccaggctcctctgcacctgcaaaggaacaggagtgagtcgtgactgacaggggtggttgagactagactaggtagagtagttaccaggagatgtgaatgtgcgtcaggtgatggatgggtttgtcaagggaatcgttaccgttttataccaaaggtattaacatgggcagcctttgacacatgtattccaaaaacgagtttatattttcaaacggtttttacagcttagactttgtacttactgccctgcctgtgacagttgtatgccttcattttgtatccaacagcaaagtctacaataaaactttaaaacaatcatg

SEQ ID NO: 454792 - DNA, 3967 bp, Homo sapiens
ccccgcctccgcccccggctggcgtgagctgggtgtttcctgcctctctcagtccgggtttggagactcctgcgtcctccgacttttcatggaagagatgtcaggagaaagtgtggtgagctcagcggtgccagcggctgctacccgcaccacttccttcaagggcacgagccccagctccaaatacgtgaagctgaatgtgggtggagccctctactataccaccatgcagacgctgaccaagcaggacaccatgctgaaggccatgttcagcgggcgcatggaagtgctcaccgacagtgaaggctggatcctcattgaccgctgtgggaagcactttggtacgatactcaactaccttcgagacggggcggtgcctttacccgagagccgccgggagatcgaggagctgctagcagaagccaagtactacctagtccaaggcctggtggaagagtgccaggcggccctacaaaacaaagatacttatgagcctttctgcaaggtccctgtgatcacctcatccaaggaagaacaaaaacttatagcgacttcaaataagccagccgtgaagttgctctacaacagaagtaacaacaaatactcatataccagcaattctgacgacaatatgttgaaaaacattgaactgtttgataagctgtctctgcgctttaacggaagggtcctgttcataaaggatgttattggggatgaaatctgctgctggtccttttatggtcagggccggaagattgctgaagtctgttgtacctccatcgtctatgccactgagaagaaacagaccaaggtggagtttcccgaagcccggatttatgaggagaccctgaacattttgctgtatgaggcccaggatggccggggacctgacaatgcgctcctggaggccacaggcggggcggcggggcgctcccaccacctggacgaggacgaggagcgggagcggatcgagcgcgtgcggaggatccacatcaagcgccctgatgaccgggcccacctccaccagtgagcaggcaagagaccgagccgccctcctctcaccgcccccactccctgccgtgctacacccagatcctgtgcaggctgccgggccccttctgcttcccttggagcctggagatacttttgtaacaagccagatgattattttggtattgcttgacaaggcaaattgattgtcttgacccaggcgtatgacccctgtcgttgaacaagctgtgtctaagatctctacttttcatgagaatctgagactctttggagccaggctttctcggttctcagaggaaaagtatgaatgagtgtgaagtgtatgtgagaacttttgtttgcaatatttatttttgtgggtgtcgacttcctatgtgggctttttgggtgacactcccttaagggttcagtttgacaattctgagagttgtcctgcagttggaggccaccagaggtatctgagctccctgcttcctatttcataatcctccagccccagcaggtccactcctggttcctgtgtgtttggcccgggcacaatccccactgctttgctagacgtgctttctgccatgtggctttgggcctagagcttgttgataattgcagcttgtggcagtggaaatatggctgaatgagcgtctaaatcgttgagaccagtgcaactttgggtgcaaggctttgtttagggatcaagccttttgccaccttgggctggtctttggcctggtgctcactgggaccccatatgtctgcgtaggagcagaactttccatggcagtaagtgtccagctctgtttctggttctttccccaactccagccccgtccagttgttctcctgattgacccgactccactccaggaaggccatctgaccctgtgacaggcatagctcataaactacccctccctgggatcccgctcctcttcagcctccttccccatgaagctgggctaactttctaagtcattttgcttagaaattcagtgtggcccataccctttgtcctcccagcctggcatccaggcagggacaccctcacaccaccagccccagggagcttccctgctataaacacagacccccttgtctttgcctctgatttttacacagtgtagagtggccagcagtgaacaggttgaggatgtgcgggtagatagataactttgggtctggtttgtgtctgtgttcatgtttgtttaagggatatgtgtgactgtgggtggggacgtgtgcttgtggggcacaggtggcccctgctggagcccggctgggcgcagcgcctatgtaggacgggtgttctcagtgacctacctcccaggctcctctgcacctgcaaaggaacaggagtgagtcgtgactgacaggggtggttgagactagactaggtagagtagttaccaggagatgtgaatgtgcgtcaggtgatggatgggtttgtcaagggaatcgttaccgttttataccaaaggtattaacatgggcagcctttgacacatgtattccaaaaacgagtttatattttcaaacggtttttacagcttagactttgtacttactgccctgcctgtgacagttgtatgccttcattttgtatccaacagcaaagtctacaataaaactttaaaacaatcatgactgaatgtcaaaatcgtgtattgggcagatgctttttaaactgtcgtgtgagaaacttttatattaggccatttggattttattaagtgctaaggaaagagggcttacaaaatgtttcgtaaatattttatactgtttaagtgttaaacaccaaccctgtctttcttttgggttgagcttttttagaaagtcgaagtgaatgttggccaggaaaatggaaaagccattgtataaatttttttttgaggcggagtcttgctctattggccaggctggagtgtagtggcaccatctccacttaccacaacttgtgcctcctgggttcaagcgattctgctgcctcagcctcccgagtagctgggattgcaggtacccatcagcccatgcccagctaattttgtatttttagtagagatggggtttcaccatgttggccaggctggtcttgaactcctgaccctgtgatccgaccaccttggcctcccaaagtgctgggattacaggtgtgagtcaccacacctggctgcatagtgttttaaatgtttgtgtgaagaatgagtttgtggaacaatttgatttgctgtggcctctatgcctaatgagctagtgtttctggcagctctctctacccaactttgcacttgtagttttgagtctttgtctctctggaatatgaacaggtttataaaacattccatggtgaacaattctgtcggctgcattatagccatgagtgaatagacagcattggctggtccaagctctgttattgagtatacaaggaactgatttttcttatgttagcactaagggcaaaaaccaatatttataatgtaagcactatccaggtaaaacactggcccaagatttggtaaagagatttcattgcaatgtaataactacagttttttacaaattggaacagctttggtgtgtcgtaatcaagggttttttttgtttgtttgtttcaaataagccatctgattgtggtgactggggcccatgtccaagacaattcctggcatattctgtcaccctcccgtggggcgatcactgtgtggggaccccattccccagttaaagtgtgtctctgtaccttacaacagcgattcaggacccaagtgtgaacaacactcagcccgccctctggagcgtgtgctgtctttagggccctacccaaagtcactgtaacagttaagtgtgtcattaacctttctgtctctttgcgccataaaaaaatgctcaaagttttagatgtagccactgtatgttgtacaaacgttggcgacatgtaaaataaaagtcataaaatgct

SEQ ID NO: 454793 - DNA, 4500 bp, Homo sapiens
ccccgcctccgcccccggctggcgtgagctgggtgtttcctgcctctctcagtccgggtttggagactcctgcgtcctccgacttttcatggaagagatgtcaggagaaagtgtggtgagctcagcggtgccagcggctgctacccgcaccacttccttcaagggcacgagccccagctccaaatacgtgaagctgaatgtgggtggagccctctactataccaccatgcagacgctgaccaagcaggacaccatgctgaaggccatgttcagcgggcgcatggaagtgctcaccgacagtgaaggctggatcctcattgaccgctgtgggaagcactttggtacgatactcaactaccttcgagacggggcggtgcctttacccgagagccgccgggagatcgaggagctgctagcagaagccaagtactacctagtccaaggcctggtggaagagtgccaggcggccctacaaaacaaagatacttatgagcctttctgcaaggtccctgtgatcacctcatccaaggaagaacaaaaacttatagcgacttcaaataagccagccgtgaagttgctctacaacagaagtaacaacaaatactcatataccagcaattctgacgacaatatgttgaaaaacattgaactgtttgataagctgtctctgcgctttaacggaagggtcctgttcataaaggatgttattggggatgaaatctgctgctggtccttttatggtcagggccggaagattgctgaagtctgttgtacctccatcgtctatgccactgagaagaaacagaccaaggtggagtttcccgaagcccggatttatgaggagaccctgaacattttgctgtatgaggcccaggatggccggggacctgacaatgcgctcctggaggccacaggcggggcggcggggcgctcccaccacctggacgaggacgaggagcgggagcggatcgagcgcgtgcggaggatccacatcaagcgccctgatgaccgggcccacctccaccagtgagcaggcaagagaccgagccgccctcctctcaccgcccccactccctgccgtgctacacccagatcctgtgcaggctgccgggccccttctgcttcccttggagcctggagatacttttgtaacaagccagatgattattttggtattgcttgacaaggcaaattgattgtcttgacccaggcgtatgacccctgtcgttgaacaagctgtgtctaagatctctacttttcatgagaatctgagactctttggagccaggctttctcggttctcagaggaaaagtatgaatgagtgtgaagtgtatgtgagaacttttgtttgcaatatttatttttgtgggtgtcgacttcctatgtgggctttttgggtgacactcccttaagggttcagtttgacaattctgagagttgtcctgcagttggaggccaccagaggtatctgagctccctgcttcctatttcataatcctccagccccagcaggtccactcctggttcctgtgtgtttggcccgggcacaatccccactgctttgctagacgtgctttctgccatgtggctttgggcctagagcttgttgataattgcagcttgtggcagtggaaatatggctgaatgagcgtctaaatcgttgagaccagtgcaactttgggtgcaaggctttgtttagggatcaagccttttgccaccttgggctggtctttggcctggtgctcactgggaccccatatgtctgcgtaggagcagaactttccatggcagtaagtgtccagctctgtttctggttctttccccaactccagccccgtccagttgttctcctgattgacccgactccactccaggaaggccatctgaccctgtgacaggcatagctcataaactacccctccctgggatcccgctcctcttcagcctccttccccatgaagctgggctaactttctaagtcattttgcttagaaattcagtgtggcccataccctttgtcctcccagcctggcatccaggcagggacaccctcacaccaccagccccagggagcttccctgctataaacacagacccccttgtctttgcctctgatttttacacagtgtagagtggccagcagtgaacaggttgaggatgtgcgggtagatagataactttgggtctggtttgtgtctgtgttcatgtttgtttaagggatatgtgtgactgtgggtggggacgtgtgcttgtggggcacaggtggcccctgctggagcccggctgggcgcagcgcctatgtaggacgggtgttctcagtgacctacctcccaggctcctctgcacctgcaaaggaacaggagtgagtcgtgactgacaggggtggttgagactagactaggtagagtagttaccaggagatgtgaatgtgcgtcaggtgatggatgggtttgtcaagggaatcgttaccgttttataccaaaggtattaacatgggcagcctttgacacatgtattccaaaaacgagtttatattttcaaacggtttttacagcttagactttgtacttactgccctgcctgtgacagttgtatgccttcattttgtatccaacagcaaagtctacaataaaactttaaaacaatcatgactgaatgtcaaaatcgtgtattgggcagatgctttttaaactgtcgtgtgagaaacttttatattaggccatttggattttattaagtgctaaggaaagagggcttacaaaatgtttcgtaaatattttatactgtttaagtgttaaacaccaaccctgtctttcttttgggttgagcttttttagaaagtcgaagtgaatgttggccaggaaaatggaaaagccattgtataaatttttttttgaggcggagtcttgctctattggccaggctggagtgtagtggcaccatctccacttaccacaacttgtgcctcctgggttcaagcgattctgctgcctcagcctcccgagtagctgggattgcaggtacccatcagcccatgcccagctaattttgtatttttagtagagatggggtttcaccatgttggccaggctggtcttgaactcctgaccctgtgatccgaccaccttggcctcccaaagtgctgggattacaggtgtgagtcaccacacctggctgcatagtgttttaaatgtttgtgtgaagaatgagtttgtggaacaatttgatttgctgtggcctctatgcctaatgagctagtgtttctggcagctctctctacccaactttgcacttgtagttttgagtctttgtctctctggaatatgaacaggtttataaaacattccatggtgaacaattctgtcggctgcattatagccatgagtgaatagacagcattggctggtccaagctctgttattgagtatacaaggaactgatttttcttatgttagcactaagggcaaaaaccaatatttataatgtaagcactatccaggtaaaacactggcccaagatttggtaaagagatttcattgcaatgtaataactacagttttttacaaattggaacagctttggtgtgtcgtaatcaagggttttttttgtttgtttgtttcaaataagccatctgattgtggtgactggggcccatgtccaagacaattcctggcatattctgtcaccctcccgtggggcgatcactgtgtggggaccccattccccagttaaagtgtgtctctgtaccttacaacagcgattcaggacccaagtgtgaacaacactcagcccgccctctggagcgtgtgctgtctttagggccctacccaaagtcactgtaacagttaagtgtgtcattaacctttctgtctctttgcgccataaaaaaatgctcaaagttttagatgtagccactgtatgttgtacaaacgttggcgacatgtaaaataaaagtcataaaatgctaaaaaaaaaaaaaaaaaaaaaaaaaaaaaaaaaaaaaaaaaaaaaaaaaaaaaaaaaaaaaaaaaaaaaaaaaaaaaaaaaaaaaaaaaaaggggggggcccgggcaaaaactaacaccatgcaggggggcggccaccaatcacgctgcacacagcagacgtcgtaggcgtagcacaaggaggggaccccaacataaagagggagagtggtacagaggcaccctcggacgacgcgcagccagtaagtatgaacacgtgacaagacgggaggaacgacaagtgcacaccaccggagagcatccatcgcccgcggagacagaagacccccaccagcaggcgggggggagcggaccacaagcgggggcggaaccgcagccaccacaccgcgcagaacaagaaagccgacccccggaaggagagaacacgacgaaccaacaggcgggaataagaagaacgtagacaaacacggacgactgtacggccaaacggaaagaaagagcgccccggacgccgacgagaacagaaataagcgg

SEQ ID NO: 454794 - DNA, 3831 bp, Homo sapiens
ctttcccgagtccgtttgaggaagtccccgaggcgcacagagcaagcccacgcgagggcacctctggaggggagcgcctgcaggaccttgtaaagtcaaaaatgtcagaaacttccaggaccgcctttggaggcagaagagcagttccacccaataactctaatgcagcggaagatgacctgcccacagtggagcttcagggcgtggtgccccggggcgtcaacctgcaagagtttcttaatgtcacgagcgttcacctgttcaaggagagatgggacactaacaaggtggaccaccacactgacaagtatgaaaacaacaagctgattgtccgcagagggcagtctttctatgtgcagattgacttcagtcgtccatatgaccccagaagggatctcttcagggtggaatacgtcattggtcgctacccacaggagaacaagggaacctacatcccagtgcctatagtctcagagttacaaagtggaaagtggggggccaagattgtcatgagagaggacaggtctgtgcggctgtccatccagtcttcccccaaatgtattgtggggaaattccgcatgtatgttgctgtctggactccctatggcgtacttcgaaccagtcgaaacccagaaacagacacgtacattctcttcaatccttggtgtgaagatgatgctgtgtatctggacaatgagaaagaaagagaagagtatgtcctgaatgacatcggggtaattttttatggagaggtcaatgacatcaagaccagaagctggagctatggtcagtttgaagatggcatcctggacacttgcctgtatgtgatggacagagcacaaatggacctctctggaagagggaatcccatcaaagtcagccgtgtggggtctgcaatggtgaatgccaaagatgacgaaggtgtcctcgttggatcctgggacaatatctatgcctatggcgtccccccatcggcctggactggaagcgttgacattctattggaataccggagctctgagaatccagtccggtatggccaatgctgggtttttgctggtgtctttaacacatttttacgatgccttggaataccagcaagaattgttaccaattatttctctgcccatgataatgatgccaatttgcaaatggacatcttcctggaagaagatgggaacgtgaattccaaactcaccaaggattcagtgtggaactaccactgctggaatgaagcatggatgacaaggcctgaccttcctgttggatttggaggctggcaagctgtggacagcaccccccaggaaaatagcgatggcatgtatcggtgtggccccgcctcggttcaagccatcaagcacggccatgtctgcttccaatttgatgcaccttttgtttttgcagaggtcaacagcgacctcatttacattacagctaagaaagatggcactcatgtggtggaaaatgtggatgccacccacattgggaaattaattgtgaccaaacaaattggaggagatggcatgatggatattactgatacttacaaattccaagaaggtcaagaagaagagagattggccctagaaactgccctgatgtacggagctaaaaagcccctcaacacagaaggtgtcatgaaatcaaggtccaacgttgacatggactttgaagtggaaaatgctgtgctgggaaaagacttcaagctctccatcaccttccggaacaacagccacaaccgttacaccatcacagcttatctctcagccaacatcaccttctacaccggggtcccgaaggcagaattcaagaaggagacgttcgacgtgacgctggagcccttgtccttcaagaaagaggcggtgctgatccaagccggcgagtacatgggtcagctgctggaacaagcgtccctgcacttctttgtcacagctcgcatcaatgagaccagggatgttctggccaagcaaaagtccaccgtgctaaccatccctgagatcatcatcaaggtccgtggcactcaggtagttggttctgacatgactgtgacagttgagtttaccaatcctttaaaagaaaccctgcgaaatgtctgggtacacctggatggtcctggagtaacaagaccaatgaagaagatgttccgtgaaatccggcccaactccaccgtgcagtgggaagaagtgtgccggccctgggtctctgggcatcggaagctgatagccagcatgagcagtgactccctgagacatgtgtatggcgagctggacgtgcagattcaaagacgaccttccatgtgaatgcacaggaagctgagatgaaccctggcatttggcctcttgtagtcttggctaaggaaattctaacgcaaaaatagctcttgctttgacttaggtgtgaagacccagacaggactgcagagggccccagagtggagatcccacatatttcaaaaacatgcttttccaaacccaggctattcggcaaggaagttagtttttaatctctccaccttccaaagagtgctaagcattagctttaattaagctctcatagctcataagagtaacagtcatcatttatcatcacaaatggctacatctccaaatatcagtgggctctcttaccagggagatttgctcaatacctggcctcatttaaaacaagacttcagattccccactcagccttttgggaataatagcacatgatttgggctctagaattccagtcccctttctcggggtcaggttctaccctccatgtgagaatatttttcccaggactagagcacaacataatttttatttttggcaaagccagaaaaagatctttcattttgcacctgcagccaagcaaatgcctgccaaattttagatttaccttgttagaagaggtggccccatattaacaaattgcatttgtgggaaacttaaccacctacaaggagataagaaagcaggtgcaacactcaagtctattgaataatgtagttttgtgatgcattttatagaatgtgtcacactgtggcctgatcagcaggagccaatatcccttactttaaccctttctgggatgcaatactaggaagtaaagtgaagaatttatctctttagttagtgattatatttcacccatctctcaggaatcatctcctttgcagaatgatgcaggttcaggtcccctttcagagatataataagcccaacaagttgaagaagctggcggatctagtgaccagatatatagaaggactgcagccactgattctctcttgtccttcacatcacccatgttgagacctcagcttggcactcaggtgctgaagggtaatatggactcagccttgcaaatagccagtgctagttctgacccaaccacagaggatgctgacatcatttgtattatgttccaaggctactacagagaaggctgcctgctatgtatttgcaaggctgatttatggtcagaatttccctctgatatgtctagggtgtgatttaggtcagtagactgtgattcttagcaaaaaatgaacagtgataagtatactgggggcaaaatcagaatggaatgctctggtctatataaccacatttctaagcctttgagactgttcctgagccttcagcactaacctatgagggtgagctggtcccctctatatatacatcatacttaactttactaagtaatctcacagcatttgccaagtctcccaatatccaattttaaaatgaaatgcattttgctagacagttaaactggcttaacttagtatattattattaattacaatgtaatagaagcttaaaataaagttaaactgat

SEQ ID NO: 454795 - DNA, 3969 bp, Homo sapiens
ctttcccgagtccgtttgaggaagtccccgaggcgcacagagcaagcccacgcgagggcacctctggaggggagcgcctgcaggaccttgtaaagtcaaaaatgtcagaaacttccaggaccgcctttggaggcagaagagcagttccacccaataactctaatgcagcggaagatgacctgcccacagtggagcttcagggcgtggtgccccggggcgtcaacctgcaagagtttcttaatgtcacgagcgttcacctgttcaaggagagatgggacactaacaaggtggaccaccacactgacaagtatgaaaacaacaagctgattgtccgcagagggcagtctttctatgtgcagattgacttcagtcgtccatatgaccccagaagggatctcttcagggtggaatacgtcattggtcgctacccacaggagaacaagggaacctacatcccagtgcctatagtctcagagttacaaagtggaaagtggggggccaagattgtcatgagagaggacaggtctgtgcggctgtccatccagtcttcccccaaatgtattgtggggaaattccgcatgtatgttgctgtctggactccctatggcgtacttcgaaccagtcgaaacccagaaacagacacgtacattctcttcaatccttggtgtgaagatgatgctgtgtatctggacaatgagaaagaaagagaagagtatgtcctgaatgacatcggggtaattttttatggagaggtcaatgacatcaagaccagaagctggagctatggtcagtttgaagatggcatcctggacacttgcctgtatgtgatggacagagcacaaatggacctctctggaagagggaatcccatcaaagtcagccgtgtggggtctgcaatggtgaatgccaaagatgacgaaggtgtcctcgttggatcctgggacaatatctatgcctatggcgtccccccatcggcctggactggaagcgttgacattctattggaataccggagctctgagaatccagtccggtatggccaatgctgggtttttgctggtgtctttaacacatttttacgatgccttggaataccagcaagaattgttaccaattatttctctgcccatgataatgatgccaatttgcaaatggacatcttcctggaagaagatgggaacgtgaattccaaactcaccaaggattcagtgtggaactaccactgctggaatgaagcatggatgacaaggcctgaccttcctgttggatttggaggctggcaagctgtggacagcaccccccaggaaaatagcgatggcatgtatcggtgtggccccgcctcggttcaagccatcaagcacggccatgtctgcttccaatttgatgcaccttttgtttttgcagaggtcaacagcgacctcatttacattacagctaagaaagatggcactcatgtggtggaaaatgtggatgccacccacattgggaaattaattgtgaccaaacaaattggaggagatggcatgatggatattactgatacttacaaattccaagaaggtcaagaagaagagagattggccctagaaactgccctgatgtacggagctaaaaagcccctcaacacagaaggtgtcatgaaatcaaggtccaacgttgacatggactttgaagtggaaaatgctgtgctgggaaaagacttcaagctctccatcaccttccggaacaacagccacaaccgttacaccatcacagcttatctctcagccaacatcaccttctacaccggggtcccgaaggcagaattcaagaaggagacgttcgacgtgacgctggagcccttgtccttcaagaaagaggcggtgctgatccaagccggcgagtacatgggtcagctgctggaacaagcgtccctgcacttctttgtcacagctcgcatcaatgagaccagggatgttctggccaagcaaaagtccaccgtgctaaccatccctgagatcatcatcaaggtccgtggcactcaggtagttggttctgacatgactgtgacagttgagtttaccaatcctttaaaagaaaccctgcgaaatgtctgggtacacctggatggtcctggagtaacaagaccaatgaagaagatgttccgtgaaatccggcccaactccaccgtgcagtgggaagaagtgtgccggccctgggtctctgggcatcggaagctgatagccagcatgagcagtgactccctgagacatgtgtatggcgagctggacgtgcagattcaaagacgaccttccatgtgaatgcacaggaagctgagatgaaccctggcatttggcctcttgtagtcttggctaaggaaattctaacgcaaaaatagctcttgctttgacttaggtgtgaagacccagacaggactgcagagggccccagagtggagatcccacatatttcaaaaacatgcttttccaaacccaggctattcggcaaggaagttagtttttaatctctccaccttccaaagagtgctaagcattagctttaattaagctctcatagctcataagagtaacagtcatcatttatcatcacaaatggctacatctccaaatatcagtgggctctcttaccagggagatttgctcaatacctggcctcatttaaaacaagacttcagattccccactcagccttttgggaataatagcacatgatttgggctctagaattccagtcccctttctcggggtcaggttctaccctccatgtgagaatatttttcccaggactagagcacaacataatttttatttttggcaaagccagaaaaagatctttcattttgcacctgcagccaagcaaatgcctgccaaattttagatttaccttgttagaagaggtggccccatattaacaaattgcatttgtgggaaacttaaccacctacaaggagataagaaagcaggtgcaacactcaagtctattgaataatgtagttttgtgatgcattttatagaatgtgtcacactgtggcctgatcagcaggagccaatatcccttactttaaccctttctgggatgcaatactaggaagtaaagtgaagaatttatctctttagttagtgattatatttcacccatctctcaggaatcatctcctttgcagaatgatgcaggttcaggtcccctttcagagatataataagcccaacaagttgaagaagctggcggatctagtgaccagatatatagaaggactgcagccactgattctctcttgtccttcacatcacccatgttgagacctcagcttggcactcaggtgctgaagggtaatatggactcagccttgcaaatagccagtgctagttctgacccaaccacagaggatgctgacatcatttgtattatgttccaaggctactacagagaaggctgcctgctatgtatttgcaaggctgatttatggtcagaatttccctctgatatgtctagggtgtgatttaggtcagtagactgtgattcttagcaaaaaatgaacagtgataagtatactgggggcaaaatcagaatggaatgctctggtctatataaccacatttctaagcctttgagactgttcctgagccttcagcactaacctatgagggtgagctggtcccctctatatatacatcatacttaactttactaagtaatctcacagcatttgccaagtctcccaatatccaattttaaaatgaaatgcattttgctagacagttaaactggcttaacttagtatattattattaattacaatgtaatagaagcttaaaataaagttaaactgatgaattatttcagaagtaaatgggtattcaagataaacaatgaaaggaggaggaaaaaataggcactcatacgtaatctatatattaaaacgctattgagaactcagtagccagttgacctgtggagatcctctagagc

SEQ ID NO: 454796 - DNA, 480 bp, Homo sapiens
gtgacatgatgggaagcttctaacataacgaaaactagcgtgagactgagaacctgaagacttcaactctggccctagcttctctgtatttggatctcccagacaggcatccatctatcccacagtgagtgccttgtggtctgaaacgagatcaaaggtggaaaaagctttaaaaagctctcttcaaaaacaagaatgtcacaagaggctgactctcgagactgtgttcccctacccctgcctcctacagagtttcattcagcagaccttgctacctgccttcttcagggaaaataatcttgtttttgagtttatgtttaaactaaagttagttgattattttcttcaacccttgtttttcttgttcatagagtttcttaatgtcacgagcgttcacctgttcaaggagagatgggacactaacaaggtggaccaccacactgacaagtatgaaaacaacaagctgattgtccgcagagg

SEQ ID NO: 454797 - DNA, 2702 bp, Homo sapiens
  misc_feature (15)..(15): n is a, c, g, or t
  misc_feature (24)..(24): n is a, c, g, or t
acagcattttccacntcaaagtcnatgtcaacgttggaccttgatttcatgacaccttctgtgttgaggggctttttagctccgtacatcagggcagtttctagggccaatctctcttctgcctgaccttcctgttggatttggaggctggcaagctgtggacagcaccccccaggaaaatagcgatggcatgtatcggtgtggccccgcctcggttcaagccatcaagcacggccatgtctgcttccaatttgatgcaccttttgtttttgcagaggtcaacagcgacctcatttacattacagctaagaaagatggcactcatgtggtggaaaatgtggatgccacccacattgggaaattaattgtgaccaaacaaattggaggagatggcatgatggatattactgatacttacaaattccaagaaggtcaagaagaagagagattggccctagaaactgccctgatgtacggagctaaaaagcccctcaacacagaaggtgtcatgaaatcaaggtccaacgttgacatggactttgaagtggaaaatgctgtgctgggaaaagacttcaagctctccatcaccttccggaacaacagccacaaccgttacaccatcacagcttatctctcagccaacatcaccttctacaccggggtcccgaaggcagaattcaagaaggagacgttcgacgtgacgctggagcccttgtccttcaagaaagaggcggtgctgatccaagccggcgagtacatgggtcagctgctggaacaagcgtccctgcacttctttgtcacagctcgcatcaatgagaccagggatgttctggccaagcaaaagtccaccgtgctaaccatccctgagatcatcatcaaggtccgtggcactcaggtagttggttctgacatgactgtgacagttgagtttaccaatcctttaaaagaaaccctgcgaaatgtctgggtacacctggatggtcctggagtaacaagaccaatgaagaagatgttccgtgaaatccggcccaactccaccgtgcagtgggaagaagtgtgccggccctgggtctctgggcatcggaagctgatagccagcatgagcagtgactccctgagacatgtgtatggcgagctggacgtgcagattcaaagacgaccttccatgtgaatgcacaggaagctgagatgaaccctggcatttggcctcttgtagtcttggctaaggaaattctaacgcaaaaatagctcttgctttgacttaggtgtgaagacccagacaggactgcagagggccccagagtggagatcccacatatttcaaaaacatgcttttccaaacccaggctattcggcaaggaagttagtttttaatctctccaccttccaaagagtgctaagcattagctttaattaagctctcatagctcataagagtaacagtcatcatttatcatcacaaatggctacatctccaaatatcagtgggctctcttaccagggagatttgctcaatacctggcctcatttaaaacaagacttcagattccccactcagccttttgggaataatagcacatgatttgggctctagaattccagtcccctttctcggggtcaggttctaccctccatgtgagaatatttttcccaggactagagcacaacataatttttatttttggcaaagccagaaaaagatctttcattttgcacctgcagccaagcaaatgcctgccaaattttagatttaccttgttagaagaggtggccccatattaacaaattgcatttgtgggaaacttaaccacctacaaggagataagaaagcaggtgcaacactcaagtctattgaataatgtagttttgtgatgcattttatagaatgtgtcacactgtggcctgatcagcaggagccaatatcccttactttaaccctttctgggatgcaatactaggaagtaaagtgaagaatttatctctttagttagtgattatatttcacccatctctcaggaatcatctcctttgcagaatgatgcaggttcaggtcccctttcagagatataataagcccaacaagttgaagaagctggcggatctagtgaccagatatatagaaggactgcagccactgattctctcttgtccttcacatcacccatgttgagacctcagcttggcactcaggtgctgaagggtaatatggactcagccttgcaaatagccagtgctagttctgacccaaccacagaggatgctgacatcatttgtattatgttccaaggctactacagagaaggctgcctgctatgtatttgcaaggctgatttatggtcagaatttccctctgatatgtctagggtgtgatttaggtcagtagactgtgattcttagcaaaaaatgaacagtgataagtatactgggggcaaaatcagaatggaatgctctggtctatataaccacatttctaagcctttgagactgttcctgagccttcagcactaacctatgagggtgagctggtcccctctatatatacatcatacttaactttactaagtaatctcacagcatttgccaagtctcccaatatccaattttaaaatgaaatgcattttgctagacagttaaactggcttaacttagtatattattattaattacaatgtaatagaagcttaaaataaagttaaactgat

SEQ ID NO: 454798 - DNA, 558 bp, Homo sapiens
aacacaggcattagccacaaggtaaacatcagagccagcagagccagcagtgtcatcttcctgaagtagaaaaaaacagctatcaattaaaacaatcacccaccagtataacaatgaagagtatcaccataaaccaaggcaaataaatgatcttgccaggaaagagatttagaggtgtaaagagagagctgagaaactagaaagccaatttgctgaaaagaggttcagtgtttaagattagttcccttatcgctttcatctacactcatgtcttttactgttttgtcctaagcaaatgtggtcaggaaaatgtgtgagttatagttaatgttcttaaccaatcaaattactagccgagtgtaatggtgcactcctgtagttccagatactcaggaggctgagggttacttttagacaagtattttatatgtattattggaagtattattaataggatctgttgttacattttctatctagtaattgttgcaaaaccagaatacttaaaacatcacatgtaatttttaaaaaccctatctctacttaatggaaaaaata

SEQ ID NO: 454799 - DNA, 336 bp, Homo sapiens
tgagacagagtctcgcactgttgcccaaggctgaagtacagtggtgcgatctccgctcactgcaacctccgcctcccaggttcaagcgattttcctgagtagctggggttacaggcgcctgccaccacacccggctaattttttgtatttttactagagatggggtttcactatgttggccaggctggtcttgaactcctgacctcttgatccgcctgcctcagcctcccaaagtgctgggattacaggcgtgagccaccgcgcctggccagctttgtttttttaaggagggttacttttagacaagtattttatatgtattattggaagtattat

SEQ ID NO: 454800 - DNA, 2995 bp, Homo sapiens
ctccgccgccgcctcgggaggtgaggacgaggaggaagcgagcagcccagacagcggccacctcaaggatggaatccgacgtggtaggcccagagcagatactgtccgcgatttaataaatgaaggagagcattcatccagcagaatccgttgtaacatctgtaatagggtgtttccacgggagaaatcgctccaggctcacaaaaggactcatacaggtgagaggccctatctgtgtgactatccagactgtggaaaagcctttgttcaaagtggacagctcaaaacacatcagcgtcttcacaccggagagaaaccttttgtttgttcagtggctgcctgagcagattcacccatgcaaaccgccactgtccgaagcacccctacgccaggctgaagagagaggagcccacggacacactcagcaaacatcaggctgccgacaacaaggccgcggccgagtggctggcgaggtattgggaaatgagagagcagcgcacccccactttgaaaggcaagctggttcagaaggctgatcaggagcagcaggaccctctggaataccttcagtctgatgaagaggacgacgagaagagaggggcccagcgccggctgcaggagcagcgggagcgcctgcatggagccctcgcgctcatagagcttgccaacctgactggggcgccactccgacagtagcttggacactgactcttccactgtacaaaagtactgcccagcatacttaaaaagtagatccttgggcataagctaagcaccttatttgcttatcataggctgctattctgtagaaatttatgaagaatgttattgccccagaatatggggtgagagagaactgcacttttttaatatggaaatgaattcatcgtaaagtttaaaatattttgtaaatatggactgcacagtacagggtagaaaactacatattgtgggaagctagattttgcaagtttaatgcattcattggaagcagttctcacaggaagcactttctgaataagacacttgtttgaaaaacagaatggtacaaatagccaaagaagattaaaacagattatttataagatcatttttaacaatatatattagtatgtttaacaatactgtaaacactgaagcaagcaagaaagtataaaatatgtaagatagataattttaattgcaaaatactgtgcccactaaggctagagaaatgggaggctattttggaagatgttctaagtaatggacttagaagaaaatagatatttgaggctcttggtaagatgcacaatagttcagaatttttgaaattggagcaaaatcagtcttattctatctggggctttacaactcagtataatgtttaagtttgaaaagcacttgtcatccctagcatgttaacttgggaacttttgcacatttcatatttctcatttgctgaaattgagtgattaatcttgcaaagtctaggtaacatagtaattggtaattttaaaaatacatattaagggccctgtaatgagatttggcacttggatttttactaaagggacacctgcagggttgtttgtagtgaaatgttttagatctttgttagcaaacactacattttaattgtactgcttgtttagaattattagcaaatggaagcctccatatttatattttcagtgcataaagccaccttcttgctttacttcagagtaacatgccaagctattttgtgttcactaaatttagctatcagttaaacactgcagaaaatattagctactcaaataagtaggcttctgaaatagttttaactgcaagtgtgttaacttgtgtggtggtttgaagccatttttccaaataaagttattaaacaccactttatgtactgaagcatgaacagaaaaatcaagagctgagcagaccacctcctttatgtaggcaaaacttccatcattttggctttgttctaaacagaactaaatgacatgcatagcatggtaacttacagatcgcttaattggagtaaaactcagagtaatagagggaaatatgggctcttcagtgcctttttagcttttttgagttgaagacgttcctacagatgtagtttaaacattacaaagtaggcttctttatccaaaaatcccaatgtgtcatagtacacagatagtttaaaatatgtagccacggggaaggggaggcatgtaaatgtcttgaagaggagaaaaagtatgaaagaagatacgatagttacgaataatgtgtatgatgaggacatactttaaaaatgtaattcctctgtacagtaaattacaaatctttagggatttttttgtaataagagaatttatatttgtaatggtctaagaatttttttgtaatgtggtatatagaattttaatttggagcacttataagctggtaagagagactatagcatctgaattatcttggtttatgtttcagcatttcctctagaatttttgctctcaaatatgtgatttaatgaactaaaaacaacactcatcagtcttgggaaatttgaactttgatcaacttaactaaagaaggaagggtagtaagaatttttcaaatacaaatatttgccaattcacagatgataacatttaaggccttcaaaagtaagggtttttccttgtttctccagtcagcttttgtcaactctaatagttttttcataaacattttttatttgtataattgcaacagtttaagaaattatcacaactatttagaaacatttaaaatgttctttttgatataagctatatacttggaaaaatacattggtatctaaaatttgaggtgtgttaagactgctttttgttttaaaaaatggtttacattcaaatttttgaagtgttttatgcttcatatggctaagttgtagtttggcagagttaacagcataagaataaacatgctgtaattttaaaagatgctttgaataaaaatttattttaatttaaaaaaaaaa

SEQ ID NO: 454801 - DNA, 473 bp, Homo sapiens
tcctgagtagctgggattacaggcagagaccaccacacccggctaattttcgtatttttagtagagatggcattttgccgtgttggccaggttggtctctagctcctgatctcaagtgattcgcctgcctcggcctcccaaagtgctgggattacaggcgtgagccaccacgccctgccattttgaacattttgaactcatgctaataaatcactttccaatggtgttggacacacatggccacgaccaaaatgtgactgtcttcctgtccccgctctagcactgatgagactgtgctggtttgattgttttctcctccaaattatagatcctaaatttcaccatattaatttacttttctggataccagtgaaactgaatgttttccacatgtctatgtgctggatgtccagatcctgacaggtgttaaccttgtgttttgaaggctgcctgagcagattcacccatgcaaa

SEQ ID NO: 454802 - DNA, 273 bp, Homo sapiens
ccccagcagatagtcattgatgccacccaagtgctgccattagcatttccacctgcagctcagtaggggccatgacatgttttattgttattgggagtcatgacctatataaaggctgattctctccccatccccctcctcttctggccttattatctcagatataatatctaacatctgtctacttaggtgagaggccctatctgtgtgactatccagactgtggaaaagcctttgttcaaagtggacagctcaaaacacatcagcgtcttc

SEQ ID NO: 454803 - DNA, 847 bp, Homo sapiens
  misc_feature (825)..(825): n is a, c, g, or t
  misc_feature (827)..(827): n is a, c, g, or t
  misc_feature (835)..(835): n is a, c, g, or t
gcatagctgaacgactctcttaatcctccaccgctacacgatgaatattctatctttcctcagacatactccatagatattaatggctatattcttgtgtattctgttacatcaatcaaaagttttgaagtgattaaagttatccatggcaaattgttggatatggtggggaaagtacaaatacctattatgttggttgggaataagaaagacctgcatatggaaagggtgatcagttatgaagaagggaaagctttggcagaatcttggaatgcagcttttttggaatcttctgctaaagaaaatcagactgctgtggatgtttttcgaaggataattttggaggcagaaaaaatggacggggcagcttcacaaggcaagtcttcatgctcggtgatgtgattctgctgcaaagcctgaggacactgggaatatattctacctgaagaagcaaactgcccgttctccttgaagataaactatgcttcttttttcttctgttaacctgaaagatatcatttgggtcagagctcccctcccttcagattatgttaactctgagtctgtccaaatgagttcacttccattttcaaattttaagcaatcatattttcaatttatatattgtatttcttaatattatgaccaagaattttatcggcattaatttttcagtgtagtttgttgtttaaaataatgtaatcatcaaaatgatgcatattgttacactactattaactaggcttcagtatatcagtgtttatttcattgtgttaaatgtatacttgtaaataaaatagctaaaaaaacaaaaaagagaacaananaaaagagncggaaaatcgtg

SEQ ID NO: 454804 - DNA, 1012 bp, Homo sapiens
  misc_feature (1)..(1): n is a, c, g, or t
  misc_feature (118)..(118): n is a, c, g, or t
  misc_feature (121)..(121): n is a, c, g, or t
  misc_feature (125)..(125): n is a, c, g, or t
  misc_feature (144)..(145): n is a, c, g, or t
  misc_feature (155)..(155): n is a, c, g, or t
  misc_feature (163)..(163): n is a, c, g, or t
  misc_feature (180)..(181): n is a, c, g, or t
  misc_feature (194)..(194): n is a, c, g, or t
  misc_feature (197)..(197): n is a, c, g, or t
ntcattacttcgatcgctggttctttcagtgcaagtcccctgtttaacccgcagacggggtaagactactagggaatgggccgggccccctccagtcgcggatgaaaggttaaggccnaangccnttccagttaatggtacgcnntagtgttttnaccacatnttgaattaagtgcagtnntcttttaataacnccngtcgatgaatattctatctttcctcagacatactccatagatattaatggctatattcttgtgtattctgttacatcaatcaaaagttttgaagtgattaaagttatccatggcaaattgttggatatggtggggaaagtacaaatacctattatgttggttgggaataagaaagacctgcatatggaaagggtgatcagttatgaagaagggaaagctttggcagaatcttggaatgcagcttttttggaatcttctgctaaagaaaatcagactgctgtggatgtttttcgaaggataattttggaggcagaaaaaatggacggggcagcttcacaaggcaagtcttcatgctcggtgatgtgattctgctgcaaagcctgaggacactgggaatatattctacctgaagaagcaaactgcccgttctccttgaagataaactatgcttcttttttcttctgttaacctgaaagatatcatttgggtcagagctcccctcccttcagattatgttaactctgagtctgtccaaatgagttcacttccattttcaaattttaagcaatcatattttcaatttatatattgtatttcttaatattatgaccaagaattttatcggcattaatttttcagtgtagtttgttgtttaaaataatgtaatcatcaaaatgatgcatattgttacactactattaactaggcttcagtatatcagtgtttatttcattgtgttaaatgtatacttgtaaataaaatagacagatcggcctgaaacatcctcggccattatgagttctgaaattacaatt

SEQ ID NO: 454805 - DNA, 423 bp, Homo sapiens
taggatccagactgagcaatacaatctggcacttactggtttgtcttttttttcttacaaatagaatacctattatgttggttgggaataagaaagacctgcatatggaaaggtatgtagcttttataaagtcaaatctaagatgatttagtcactgaagtatcattttaattattgttctgatgtcaagaatatttttagctgtagcatttttatccgttcagaggtgttatggtcgtgtgcagcagaagcaaaagtggaatagaaatctcacattcctctagaaaagagagagcaaactttataggaaactacctttaggttatctgccactttgcataaagcaaattctaaaaagacatagtgctcatttatgcagcaagtggtttttgagtaccagggtttgggatttagtgtaggagc

SEQ ID NO: 454806 - DNA, 2282 bp, Homo sapiens
aaccggttggaagtttgaagccttcaaacctagccggcgcccaacagcgcggtagcagcgaggtgtatttttagctcccgggcgggcagccccgcccccccctccccgcctccttgtttcccccaatgggagatggagtttccgacacgtcatcgcgcggctgtgcaggagctgtccaatcggcgctcggggagaatggcgtaattaaaaagcggcggaagaaggtgggagggtcatgacgcagcgagtttcagtcgtgacttttctgggggcatcgcggcgtcccctttttttgcctttaaagtaaaacgtcgccccgacgcaccccccgcgtatttcggggggcggaggcggcgggccacggcgcgaagaggggcggtgctgacgccggccggtcacgtgggcgtgttgtgggggggaggggcgccgccgcgcggtcggttccgggcggttgggagcgcgcgagctagcgagcgagaggcagccgcgcccgccgccgcccctgctctgtatgccgctctctcccggcgcggccgccgccgatcacagcagcaggagccaccgccgccgcggttgatgtggttgggccggggctgaggaggccgccaagatgccgcagtccaagtcccggaagatcgcgatcctgggctaccggtctgtggggaaatcctcattgacgattcaatttgttgaaggccaatttgtggactcctacgatccaaccatagaaaacacttttacaaagttgatcacagtaaatggacaagaatatcatcttcaacttgtagacacagccgggcaagatgaatattctatctttcctcagacatactccatagatattaatggctatattcttgtgtattctgttacatcaatcaaaagttttgaagtgattaaagttatccatggcaaattgttggatatggtggggaaagtacaaatacctattatgttggttgggaataagaaagacctgcatatggaaagggtgatcagttatgaagaagggaaagctttggcagaatcttggaatgcagcttttttggaatcttctgctaaagaaaatcagactgctgtggatgtttttcgaaggataattttggaggcagaaaaaatggacggggcagcttcacaaggcaagtcttcatgctcggtgatgtgattctgctgcaaagcctgaggacactgggaatatattctacctgaagaagcaaactgcccgttctccttgaagataaactatgcttcttttttcttctgttaacctgaaagatatcatttgggtcagagctcccctcccttcagattatgttaactctgagtctgtccaaatgagttcacttccattttcaaattttaagcaatcatattttcaatttatatattgtatttcttaatattatgaccaagaattttatcggcattaatttttcagtgtagtttgttgtttaaaataatgtaatcatcaaaatgatgcatattgttacactactattaactaggcttcagtatatcagtgtttatttcattgtgttaaatgtatacttgtaaataaaatagctgcaaacctcagtcctttgtgctacttgatgtggctttcaaagaagagaagccttgtcctgagtttctcacttggcttcaggaaggccccaggttggattccagaaaccagtgaagatgtggccacaggaggaggtgtgctgaggtggctgctgaccgtggactccctgcgcagtggcctgcagatgttggggctgggttacagctgattgaagctgagtggccctggggggtctgtgaggggagttcctccccagtgatgaaattctctccttccaccctcaaatccctagaccttgactgaaatgctccgtggtcgggagcctggtcaaggaggaggagctgctgagaggcattgttcgcccttgctcatagcttagctcgatgtccgtgtcagacaggagatgattgagaacagccttgcctgtcactgtcctagaacaccctggagtttagtgttctgtgtcagagtcttgggagcctccttcagacccagatgacgggcctccctctgtccaaggagcagctgtaaaggagaagagggatttcatttgtttggtggctgttaccttgtctgtaagtcaaacttggagttgagcagtgctttttaaacgattcccttttgcagctaaaatttcacagggctatttctaatacgtaagcaaatgttaccattgactttattaataaaatatagttttgctttgcaaaaaaaataa

SEQ ID NO: 454807 - DNA, 1617 bp, Homo sapiens
aaccggttggaagtttgaagccttcaaacctagccggcgcccaacagcgcggtagcagcgaggtgtatttttagctcccgggcgggcagccccgcccccccctccccgcctccttgtttcccccaatgggagatggagtttccgacacgtcatcgcgcggctgtgcaggagctgtccaatcggcgctcggggagaatggcgtaattaaaaagcggcggaagaaggtgggagggtcatgacgcagcgagtttcagtcgtgacttttctgggggcatcgcggcgtcccctttttttgcctttaaagtaaaacgtcgccccgacgcaccccccgcgtatttcggggggcggaggcggcgggccacggcgcgaagaggggcggtgctgacgccggccggtcacgtgggcgtgttgtgggggggaggggcgccgccgcgcggtcggttccgggcggttgggagcgcgcgagctagcgagcgagaggcagccgcgcccgccgccgcccctgctctgtatgccgctctctcccggcgcggccgccgccgatcacagcagcaggagccaccgccgccgcggttgatgtggttgggccggggctgaggaggccgccaagatgccgcagtccaagtcccggaagatcgcgatcctgggctaccggtctgtggggaaatcctcattgacgattcaatttgttgaaggccaatttgtggactcctacgatccaaccatagaaaacacttttacaaagttgatcacagtaaatggacaagaatatcatcttcaacttgtagacacagccgggcaagatgaatattctatctttcctcagacatactccatagatattaatggctatattcttgtgtattctgttacatcaatcaaaagttttgaagtgattaaagttatccatggcaaattgttggatatggtggggaaagtacaaatacctattatgttggttgggaataagaaagacctgcatatggaaagggtgatcagttatgaagaagggaaagctttggcagaatcttggaatgcagcttttttggaatcttctgctaaagaaaatcagactgctgtggatgtttttcgaaggataattttggaggcagaaaaaatggacggggcagcttcacaaggcaagtcttcatgctcggtgatgtgattctgctgcaaagcctgaggacactgggaatatattctacctgaagaagcaaactgcccgttctccttgaagataaactatgcttcttttttcttctgttaacctgaaagatatcatttgggtcagagctcccctcccttcagattatgttaactctgagtctgtccaaatgagttcacttccattttcaaattttaagcaatcatattttcaatttatatattgtatttcttaatattatgaccaagaattttatcggcattaatttttcagtgtagtttgttgtttaaaataatgtaatcatcaaaatgatgcatattgttacactactattaactaggcttcagtatatcagtgtttatttcattgtgttaaatgtatacttgtaaataaaataggatgcggcaaggtttctccctctttctgcaaccaatgtgacaaattgaaattaa

SEQ ID NO: 454808 - DNA, 1614 bp, Homo sapiens
aaccggttggaagtttgaagccttcaaacctagccggcgcccaacagcgcggtagcagcgaggtgtatttttagctcccgggcgggcagccccgcccccccctccccgcctccttgtttcccccaatgggagatggagtttccgacacgtcatcgcgcggctgtgcaggagctgtccaatcggcgctcggggagaatggcgtaattaaaaagcggcggaagaaggtgggagggtcatgacgcagcgagtttcagtcgtgacttttctgggggcatcgcggcgtcccctttttttgcctttaaagtaaaacgtcgccccgacgcaccccccgcgtatttcggggggcggaggcggcgggccacggcgcgaagaggggcggtgctgacgccggccggtcacgtgggcgtgttgtgggggggaggggcgccgccgcgcggtcggttccgggcggttgggagcgcgcgagctagcgagcgagaggcagccgcgcccgccgccgcccctgctctgtatgccgctctctcccggcgcggccgccgccgatcacagcagcaggagccaccgccgccgcggttgatgtggttgggccggggctgaggaggccgccaagatgccgcagtccaagtcccggaagatcgcgatcctgggctaccggtctgtggggaaatcctcattgacgattcaatttgttgaaggccaatttgtggactcctacgatccaaccatagaaaacacttttacaaagttgatcacagtaaatggacaagaatatcatcttcaacttgtagacacagccgggcaagatgaatattctatctttcctcagacatactccatagatattaatggctatattcttgtgtattctgttacatcaatcaaaagttttgaagtgattaaagttatccatggcaaattgttggatatggtggggaaagtacaaatacctattatgttggttgggaataagaaagacctgcatatggaaagggtgatcagttatgaagaagggaaagctttggcagaatcttggaatgcagcttttttggaatcttctgctaaagaaaatcagactgctgtggatgtttttcgaaggataattttggaggcagaaaaaatggacggggcagcttcacaaggcaagtcttcatgctcggtgatgtgattctgctgcaaagcctgaggacactgggaatatattctacctgaagaagcaaactgcccgttctccttgaagataaactatgcttcttttttcttctgttaacctgaaagatatcatttgggtcagagctcccctcccttcagattatgttaactctgagtctgtccaaatgagttcacttccattttcaaattttaagcaatcatattttcaatttatatattgtatttcttaatattatgaccaagaattttatcggcattaatttttcagtgtagtttgttgtttaaaataatgtaatcatcaaaatgatgcatattgttacactactattaactaggcttcagtatatcagtgtttatttcattgtgttaaatgtatacttgtaaataaaatagacagatcggcctgaaacatcctcggccattatgagttctgaaattacaatt

SEQ ID NO: 454809 - DNA, 1847 bp, Homo sapiens
  misc_feature (1791)..(1791): n is a, c, g, or t
aaccggttggaagtttgaagccttcaaacctagccggcgcccaacagcgcggtagcagcgaggtgtatttttagctcccgggcgggcagccccgcccccccctccccgcctccttgtttcccccaatgggagatggagtttccgacacgtcatcgcgcggctgtgcaggagctgtccaatcggcgctcggggagaatggcgtaattaaaaagcggcggaagaaggtgggagggtcatgacgcagcgagtttcagtcgtgacttttctgggggcatcgcggcgtcccctttttttgcctttaaagtaaaacgtcgccccgacgcaccccccgcgtatttcggggggcggaggcggcgggccacggcgcgaagaggggcggtgctgacgccggccggtcacgtgggcgtgttgtgggggggaggggcgccgccgcgcggtcggttccgggcggttgggagcgcgcgagctagcgagcgagaggcagccgcgcccgccgccgcccctgctctgtatgccgctctctcccggcgcggccgccgccgatcacagcagcaggagccaccgccgccgcggttgatgtggttgggccggggctgaggaggccgccaagatgccgcagtccaagtcccggaagatcgcgatcctgggctaccggtctgtggggaaatcctcattgacgattcaatttgttgaaggccaatttgtggactcctacgatccaaccatagaaaacacttttacaaagttgatcacagtaaatggacaagaatatcatcttcaacttgtagacacagccgggcaagatgaatattctatctttcctcagacatactccatagatattaatggctatattcttgtgtattctgttacatcaatcaaaagttttgaagtgattaaagttatccatggcaaattgttggatatggtggggaaagtacaaatacctattatgttggttgggaataagaaagacctgcatatggaaagggtgatcagttatgaagaagggaaagctttggcagaatcttggaatgcagcttttttggaatcttctgctaaagaaaatcagactgctgtggatgtttttcgaaggataattttggaggcagaaaaaatggacggggcagcttcacaaggcaagtcttcatgctcggtgatgtgattctgctgcaaagcctgaggacactgggaatatattctacctgaagaagcaaactgcccgttctccttgaagataaactatgcttcttttttcttctgttaacctgaaagatatcatttgggtcagagctcccctcccttcagattatgttaactctgagtctgtccaaatgagttcacttccattttcaaattttaagcaatcatattttcaatttatatattgtatttcttaatattatgaccaagaattttatcggcattaatttttcagtgtagtttgttgtttaaaataatgtaatcatcaaaatgatgcatattgttacactactattaactaggcttcagtatatcagtgtttatttcattgtgttaaatgtatacttgtaaataaaatagaaaaaaaaaaaaatggcctccttggcctaaaagctggagatctgagggcgcttaactttagtgggggtaattcattatcctcgctgattgccccgctcatcttaagtcttccgctgccggagagcggctctaagacaatcatatggcgtgccttaggactccccgagaattatgggtatatcgcaggatgtaacctagagtaaaaggacattaaaaggttggaacctntaaacagccgcggtgatgggagtaatacaataagttcctcaccctacgaaccaacg

SEQ ID NO: 454810 - DNA, 1620 bp, Homo sapiens
aaccggttggaagtttgaagccttcaaacctagccggcgcccaacagcgcggtagcagcgaggtgtatttttagctcccgggcgggcagccccgcccccccctccccgcctccttgtttcccccaatgggagatggagtttccgacacgtcatcgcgcggctgtgcaggagctgtccaatcggcgctcggggagaatggcgtaattaaaaagcggcggaagaaggtgggagggtcatgacgcagcgagtttcagtcgtgacttttctgggggcatcgcggcgtcccctttttttgcctttaaagtaaaacgtcgccccgacgcaccccccgcgtatttcggggggcggaggcggcgggccacggcgcgaagaggggcggtgctgacgccggccggtcacgtgggcgtgttgtgggggggaggggcgccgccgcgcggtcggttccgggcggttgggagcgcgcgagctagcgagcgagaggcagccgcgcccgccgccgcccctgctctgtatgccgctctctcccggcgcggccgccgccgatcacagcagcaggagccaccgccgccgcggttgatgtggttgggccggggctgaggaggccgccaagatgccgcagtccaagtcccggaagatcgcgatcctgggctaccggtctgtggggaaatcctcattgacgattcaatttgttgaaggccaatttgtggactcctacgatccaaccatagaaaacacttttacaaagttgatcacagtaaatggacaagaatatcatcttcaacttgtagacacagccgggcaagatgaatattctatctttcctcagacatactccatagatattaatggctatattcttgtgtattctgttacatcaatcaaaagttttgaagtgattaaagttatccatggcaaattgttggatatggtggggaaagtacaaatacctattatgttggttgggaataagaaagacctgcatatggaaagggtgatcagttatgaagaagggaaagctttggcagaatcttggaatgcagcttttttggaatcttctgctaaagaaaatcagactgctgtggatgtttttcgaaggataattttggaggcagaaaaaatggacggggcagcttcacaaggcaagtcttcatgctcggtgatgtgattctgctgcaaagcctgaggacactgggaatatattctacctgaagaagcaaactgcccgttctccttgaagataaactatgcttcttttttcttctgttaacctgaaagatatcatttgggtcagagctcccctcccttcagattatgttaactctgagtctgtccaaatgagttcacttccattttcaaattttaagcaatcatattttcaatttatatattgtatttcttaatattatgaccaagaattttatcggcattaatttttcagtgtagtttgttgtttaaaataatgtaatcatcaaaatgatgcatattgttacactactattaactaggcttcagtatatcagtgtttatttcattgtgttaaatgtatacttgtaaataaaatagcaagaacgcgacacgcttttgtcctccccttctcctacatattaaaccgcgacaaaa

SEQ ID NO: 454811 - DNA, 1619 bp, Homo sapiens
  misc_feature (1566)..(1566): n is a, c, g, or t
aaccggttggaagtttgaagccttcaaacctagccggcgcccaacagcgcggtagcagcgaggtgtatttttagctcccgggcgggcagccccgcccccccctccccgcctccttgtttcccccaatgggagatggagtttccgacacgtcatcgcgcggctgtgcaggagctgtccaatcggcgctcggggagaatggcgtaattaaaaagcggcggaagaaggtgggagggtcatgacgcagcgagtttcagtcgtgacttttctgggggcatcgcggcgtcccctttttttgcctttaaagtaaaacgtcgccccgacgcaccccccgcgtatttcggggggcggaggcggcgggccacggcgcgaagaggggcggtgctgacgccggccggtcacgtgggcgtgttgtgggggggaggggcgccgccgcgcggtcggttccgggcggttgggagcgcgcgagctagcgagcgagaggcagccgcgcccgccgccgcccctgctctgtatgccgctctctcccggcgcggccgccgccgatcacagcagcaggagccaccgccgccgcggttgatgtggttgggccggggctgaggaggccgccaagatgccgcagtccaagtcccggaagatcgcgatcctgggctaccggtctgtggggaaatcctcattgacgattcaatttgttgaaggccaatttgtggactcctacgatccaaccatagaaaacacttttacaaagttgatcacagtaaatggacaagaatatcatcttcaacttgtagacacagccgggcaagatgaatattctatctttcctcagacatactccatagatattaatggctatattcttgtgtattctgttacatcaatcaaaagttttgaagtgattaaagttatccatggcaaattgttggatatggtggggaaagtacaaatacctattatgttggttgggaataagaaagacctgcatatggaaagggtgatcagttatgaagaagggaaagctttggcagaatcttggaatgcagcttttttggaatcttctgctaaagaaaatcagactgctgtggatgtttttcgaaggataattttggaggcagaaaaaatggacggggcagcttcacaaggcaagtcttcatgctcggtgatgtgattctgctgcaaagcctgaggacactgggaatatattctacctgaagaagcaaactgcccgttctccttgaagataaactatgcttcttttttcttctgttaacctgaaagatatcatttgggtcagagctcccctcccttcagattatgttaactctgagtctgtccaaatgagttcacttccattttcaaattttaagcaatcatattttcaatttatatattgtatttcttaatattatgaccaagaattttatcggcattaatttttcagtgtagtttgttgtttaaaataatgtaatcatcaaaatgatgcatattgttacactactattaactaggcttcagtatatcagtgtttatttcattgtgttaaatgtatacttgtaaataaaatagcangatgcggccgaccatcctatcactgtggatacttttgaataattcacataata

SEQ ID NO: 454812 - DNA, 2374 bp, Homo sapiens
aaccggttggaagtttgaagccttcaaacctagccggcgcccaacagcgcggtagcagcgaggtgtatttttagctcccgggcgggcagccccgcccccccctccccgcctccttgtttcccccaatgggagatggagtttccgacacgtcatcgcgcggctgtgcaggagctgtccaatcggcgctcggggagaatggcgtaattaaaaagcggcggaagaaggtgggagggtcatgacgcagcgagtttcagtcgtgacttttctgggggcatcgcggcgtcccctttttttgcctttaaagtaaaacgtcgccccgacgcaccccccgcgtatttcggggggcggaggcggcgggccacggcgcgaagaggggcggtgctgacgccggccggtcacgtgggcgtgttgtgggggggaggggcgccgccgcgcggtcggttccgggcggttgggagcgcgcgagctagcgagcgagaggcagccgcgcccgccgccgcccctgctctgtatgccgctctctcccggcgcggccgccgccgatcacagcagcaggagccaccgccgccgcggttgatgtggttgggccggggctgaggaggccgccaagatgccgcagtccaagtcccggaagatcgcgatcctgggctaccggtctgtgggttcctcaagccaggacctacgcacctgttgtgagtggtgttatagttctgcagggcgcacaggtgcatccccatgggcacatttaatttagggaaatcctcattgacgattcaatttgttgaaggccaatttgtggactcctacgatccaaccatagaaaacacttttacaaagttgatcacagtaaatggacaagaatatcatcttcaacttgtagacacagccgggcaagatgaatattctatctttcctcagacatactccatagatattaatggctatattcttgtgtattctgttacatcaatcaaaagttttgaagtgattaaagttatccatggcaaattgttggatatggtggggaaagtacaaatacctattatgttggttgggaataagaaagacctgcatatggaaagggtgatcagttatgaagaagggaaagctttggcagaatcttggaatgcagcttttttggaatcttctgctaaagaaaatcagactgctgtggatgtttttcgaaggataattttggaggcagaaaaaatggacggggcagcttcacaaggcaagtcttcatgctcggtgatgtgattctgctgcaaagcctgaggacactgggaatatattctacctgaagaagcaaactgcccgttctccttgaagataaactatgcttcttttttcttctgttaacctgaaagatatcatttgggtcagagctcccctcccttcagattatgttaactctgagtctgtccaaatgagttcacttccattttcaaattttaagcaatcatattttcaatttatatattgtatttcttaatattatgaccaagaattttatcggcattaatttttcagtgtagtttgttgtttaaaataatgtaatcatcaaaatgatgcatattgttacactactattaactaggcttcagtatatcagtgtttatttcattgtgttaaatgtatacttgtaaataaaatagctgcaaacctcagtcctttgtgctacttgatgtggctttcaaagaagagaagccttgtcctgagtttctcacttggcttcaggaaggccccaggttggattccagaaaccagtgaagatgtggccacaggaggaggtgtgctgaggtggctgctgaccgtggactccctgcgcagtggcctgcagatgttggggctgggttacagctgattgaagctgagtggccctggggggtctgtgaggggagttcctccccagtgatgaaattctctccttccaccctcaaatccctagaccttgactgaaatgctccgtggtcgggagcctggtcaaggaggaggagctgctgagaggcattgttcgcccttgctcatagcttagctcgatgtccgtgtcagacaggagatgattgagaacagccttgcctgtcactgtcctagaacaccctggagtttagtgttctgtgtcagagtcttgggagcctccttcagacccagatgacgggcctccctctgtccaaggagcagctgtaaaggagaagagggatttcatttgtttggtggctgttaccttgtctgtaagtcaaacttggagttgagcagtgctttttaaacgattcccttttgcagctaaaatttcacagggctatttctaatacgtaagcaaatgttaccattgactttattaataaaatatagttttgctttgcaaaaaaaataa

SEQ ID NO: 454813 - DNA, 1844 bp, Homo sapiens
aaccggttggaagtttgaagccttcaaacctagccggcgcccaacagcgcggtagcagcgaggtgtatttttagctcccgggcgggcagccccgcccccccctccccgcctccttgtttcccccaatgggagatggagtttccgacacgtcatcgcgcggctgtgcaggagctgtccaatcggcgctcggggagaatggcgtaattaaaaagcggcggaagaagggaaatcctcattgacgattcaatttgttgaaggccaatttgtggactcctacgatccaaccatagaaaacacttttacaaagttgatcacagtaaatggacaagaatatcatcttcaacttgtagacacagccgggcaagatgaatattctatctttcctcagacatactccatagatattaatggctatattcttgtgtattctgttacatcaatcaaaagttttgaagtgattaaagttatccatggcaaattgttggatatggtggggaaagtacaaatacctattatgttggttgggaataagaaagacctgcatatggaaagggtgatcagttatgaagaagggaaagctttggcagaatcttggaatgcagcttttttggaatcttctgctaaagaaaatcagactgctgtggatgtttttcgaaggataattttggaggcagaaaaaatggacggggcagcttcacaaggcaagtcttcatgctcggtgatgtgattctgctgcaaagcctgaggacactgggaatatattctacctgaagaagcaaactgcccgttctccttgaagataaactatgcttcttttttcttctgttaacctgaaagatatcatttgggtcagagctcccctcccttcagattatgttaactctgagtctgtccaaatgagttcacttccattttcaaattttaagcaatcatattttcaatttatatattgtatttcttaatattatgaccaagaattttatcggcattaatttttcagtgtagtttgttgtttaaaataatgtaatcatcaaaatgatgcatattgttacactactattaactaggcttcagtatatcagtgtttatttcattgtgttaaatgtatacttgtaaataaaatagctgcaaacctcagtcctttgtgctacttgatgtggctttcaaagaagagaagccttgtcctgagtttctcacttggcttcaggaaggccccaggttggattccagaaaccagtgaagatgtggccacaggaggaggtgtgctgaggtggctgctgaccgtggactccctgcgcagtggcctgcagatgttggggctgggttacagctgattgaagctgagtggccctggggggtctgtgaggggagttcctccccagtgatgaaattctctccttccaccctcaaatccctagaccttgactgaaatgctccgtggtcgggagcctggtcaaggaggaggagctgctgagaggcattgttcgcccttgctcatagcttagctcgatgtccgtgtcagacaggagatgattgagaacagccttgcctgtcactgtcctagaacaccctggagtttagtgttctgtgtcagagtcttgggagcctccttcagacccagatgacgggcctccctctgtccaaggagcagctgtaaaggagaagagggatttcatttgtttggtggctgttaccttgtctgtaagtcaaacttggagttgagcagtgctttttaaacgattcccttttgcagctaaaatttcacagggctatttctaatacgtaagcaaatgttaccattgactttattaataaaatatagttttgctttgcaaaaaaaataa

SEQ ID NO: 454814 - DNA, 1878 bp, Homo sapiens
ccaatcaacatccaaccccaatcaactcccggcgcggccgccgccgatcacagcagcaggagccaccgccgccgcggttgatgtggttgggccggggctgaggaggccgccaagatgccgcagtccaagtcccggaagatcgcgatcctgggctaccggtctgtgggttcctcaagccaggacctacgcacctgttgtgagtggtgttatagttctgcagggcgcacaggtgcatccccatgggcacatttaatttagggaaatcctcattgacgattcaatttgttgaaggccaatttgtggactcctacgatccaaccatagaaaacacttttacaaagttgatcacagtaaatggacaagaatatcatcttcaacttgtagacacagccgggcaagatgaatattctatctttcctcagacatactccatagatattaatggctatattcttgtgtattctgttacatcaatcaaaagttttgaagtgattaaagttatccatggcaaattgttggatatggtggggaaagtacaaatacctattatgttggttgggaataagaaagacctgcatatggaaagggtgatcagttatgaagaagggaaagctttggcagaatcttggaatgcagcttttttggaatcttctgctaaagaaaatcagactgctgtggatgtttttcgaaggataattttggaggcagaaaaaatggacggggcagcttcacaaggcaagtcttcatgctcggtgatgtgattctgctgcaaagcctgaggacactgggaatatattctacctgaagaagcaaactgcccgttctccttgaagataaactatgcttcttttttcttctgttaacctgaaagatatcatttgggtcagagctcccctcccttcagattatgttaactctgagtctgtccaaatgagttcacttccattttcaaattttaagcaatcatattttcaatttatatattgtatttcttaatattatgaccaagaattttatcggcattaatttttcagtgtagtttgttgtttaaaataatgtaatcatcaaaatgatgcatattgttacactactattaactaggcttcagtatatcagtgtttatttcattgtgttaaatgtatacttgtaaataaaatagctgcaaacctcagtcctttgtgctacttgatgtggctttcaaagaagagaagccttgtcctgagtttctcacttggcttcaggaaggccccaggttggattccagaaaccagtgaagatgtggccacaggaggaggtgtgctgaggtggctgctgaccgtggactccctgcgcagtggcctgcagatgttggggctgggttacagctgattgaagctgagtggccctggggggtctgtgaggggagttcctccccagtgatgaaattctctccttccaccctcaaatccctagaccttgactgaaatgctccgtggtcgggagcctggtcaaggaggaggagctgctgagaggcattgttcgcccttgctcatagcttagctcgatgtccgtgtcagacaggagatgattgagaacagccttgcctgtcactgtcctagaacaccctggagtttagtgttctgtgtcagagtcttgggagcctccttcagacccagatgacgggcctccctctgtccaaggagcagctgtaaaggagaagagggatttcatttgtttggtggctgttaccttgtctgtaagtcaaacttggagttgagcagtgctttttaaacgattcccttttgcagctaaaatttcacagggctatttctaatacgtaagcaaatgttaccattgactttattaataaaatatagttttgctttgcaaaaaaaataa

SEQ ID NO: 454815 - DNA, 1776 bp, Homo sapiens
agcgggccgccgaggagtccgggtctcgtctggggaagtgaggcggcgccggggagccacgctagaggctgccgcgagggagtcacacctgcctccccgccttcgccgcgggcgcgcgtgaccggggctggcggtctcccccaccccgcccccgatggaaatcctcattgacgattcaatttgttgaaggccaatttgtggactcctacgatccaaccatagaaaacacttttacaaagttgatcacagtaaatggacaagaatatcatcttcaacttgtagacacagccgggcaagatgaatattctatctttcctcagacatactccatagatattaatggctatattcttgtgtattctgttacatcaatcaaaagttttgaagtgattaaagttatccatggcaaattgttggatatggtggggaaagtacaaatacctattatgttggttgggaataagaaagacctgcatatggaaagggtgatcagttatgaagaagggaaagctttggcagaatcttggaatgcagcttttttggaatcttctgctaaagaaaatcagactgctgtggatgtttttcgaaggataattttggaggcagaaaaaatggacggggcagcttcacaaggcaagtcttcatgctcggtgatgtgattctgctgcaaagcctgaggacactgggaatatattctacctgaagaagcaaactgcccgttctccttgaagataaactatgcttcttttttcttctgttaacctgaaagatatcatttgggtcagagctcccctcccttcagattatgttaactctgagtctgtccaaatgagttcacttccattttcaaattttaagcaatcatattttcaatttatatattgtatttcttaatattatgaccaagaattttatcggcattaatttttcagtgtagtttgttgtttaaaataatgtaatcatcaaaatgatgcatattgttacactactattaactaggcttcagtatatcagtgtttatttcattgtgttaaatgtatacttgtaaataaaatagctgcaaacctcagtcctttgtgctacttgatgtggctttcaaagaagagaagccttgtcctgagtttctcacttggcttcaggaaggccccaggttggattccagaaaccagtgaagatgtggccacaggaggaggtgtgctgaggtggctgctgaccgtggactccctgcgcagtggcctgcagatgttggggctgggttacagctgattgaagctgagtggccctggggggtctgtgaggggagttcctccccagtgatgaaattctctccttccaccctcaaatccctagaccttgactgaaatgctccgtggtcgggagcctggtcaaggaggaggagctgctgagaggcattgttcgcccttgctcatagcttagctcgatgtccgtgtcagacaggagatgattgagaacagccttgcctgtcactgtcctagaacaccctggagtttagtgttctgtgtcagagtcttgggagcctccttcagacccagatgacgggcctccctctgtccaaggagcagctgtaaaggagaagagggatttcatttgtttggtggctgttaccttgtctgtaagtcaaacttggagttgagcagtgctttttaaacgattcccttttgcagctaaaatttcacagggctatttctaatacgtaagcaaatgttaccattgactttattaataaaatatagttttgctttgcaaaaaaaataa

SEQ ID NO: 454816 - DNA, 1674 bp, Homo sapiens
  misc_feature (18)..(18): n is a, c, g, or t
cgactccgtaggcgcggngggcggctcctgctcttcctggactcctgagcagagggaaatcctcattgacgattcaatttgttgaaggccaatttgtggactcctacgatccaaccatagaaaacacttttacaaagttgatcacagtaaatggacaagaatatcatcttcaacttgtagacacagccgggcaagatgaatattctatctttcctcagacatactccatagatattaatggctatattcttgtgtattctgttacatcaatcaaaagttttgaagtgattaaagttatccatggcaaattgttggatatggtggggaaagtacaaatacctattatgttggttgggaataagaaagacctgcatatggaaagggtgatcagttatgaagaagggaaagctttggcagaatcttggaatgcagcttttttggaatcttctgctaaagaaaatcagactgctgtggatgtttttcgaaggataattttggaggcagaaaaaatggacggggcagcttcacaaggcaagtcttcatgctcggtgatgtgattctgctgcaaagcctgaggacactgggaatatattctacctgaagaagcaaactgcccgttctccttgaagataaactatgcttcttttttcttctgttaacctgaaagatatcatttgggtcagagctcccctcccttcagattatgttaactctgagtctgtccaaatgagttcacttccattttcaaattttaagcaatcatattttcaatttatatattgtatttcttaatattatgaccaagaattttatcggcattaatttttcagtgtagtttgttgtttaaaataatgtaatcatcaaaatgatgcatattgttacactactattaactaggcttcagtatatcagtgtttatttcattgtgttaaatgtatacttgtaaataaaatagctgcaaacctcagtcctttgtgctacttgatgtggctttcaaagaagagaagccttgtcctgagtttctcacttggcttcaggaaggccccaggttggattccagaaaccagtgaagatgtggccacaggaggaggtgtgctgaggtggctgctgaccgtggactccctgcgcagtggcctgcagatgttggggctgggttacagctgattgaagctgagtggccctggggggtctgtgaggggagttcctccccagtgatgaaattctctccttccaccctcaaatccctagaccttgactgaaatgctccgtggtcgggagcctggtcaaggaggaggagctgctgagaggcattgttcgcccttgctcatagcttagctcgatgtccgtgtcagacaggagatgattgagaacagccttgcctgtcactgtcctagaacaccctggagtttagtgttctgtgtcagagtcttgggagcctccttcagacccagatgacgggcctccctctgtccaaggagcagctgtaaaggagaagagggatttcatttgtttggtggctgttaccttgtctgtaagtcaaacttggagttgagcagtgctttttaaacgattcccttttgcagctaaaatttcacagggctatttctaatacgtaagcaaatgttaccattgactttattaataaaatatagttttgctttgcaaaaaaaataa

SEQ ID NO: 454817 - DNA, 2234 bp, Homo sapiens
aaccggttggaagtttgaagccttcaaacctagccggcgcccaacagcgcggtagcagcgaggtgtatttttagctcccgggcgggcagccccgcccccccctccccgcctccttgtttcccccaatgggagatggagtttccgacacgtcatcgcgcggctgtgcaggagctgtccaatcggcgctcggggagaatggcgtaattaaaaagcggcggaagaaggtgggagggtcatgacgcagcgagtttcagtcgtgacttttctgggggcatcgcggcgtcccctttttttgcctttaaagtaaaacgtcgccccgacgcaccccccgcgtatttcggggggcggaggcggcgggccacggcgcgaagaggggcggtgctgacgccggccggtcacgtgggcgtgttgtgggggggaggggcgccgccgcgcggtcggttccgggcggttgggagcgcgcgagctagcgagcgagaggcagccgcgcccgccgccgcccctgctctgtatgccgctctctcccggcgcggccgccgccgatcacagcagcaggagccaccgccgccgcggttgatgtggttgggccggggctgaggaggccgccaagatgccgcagtccaagtcccggaagatcgcgatcctgggctaccggtctgtggggaaatcctcattgacgattcaatttgttgaaggccaatttgtggactcctacgatccaaccatagaaaacattgtagacacagccgggcaagatgaatattctatctttcctcagacatactccatagatattaatggctatattcttgtgtattctgttacatcaatcaaaagttttgaagtgattaaagttatccatggcaaattgttggatatggtggggaaagtacaaatacctattatgttggttgggaataagaaagacctgcatatggaaagggtgatcagttatgaagaagggaaagctttggcagaatcttggaatgcagcttttttggaatcttctgctaaagaaaatcagactgctgtggatgtttttcgaaggataattttggaggcagaaaaaatggacggggcagcttcacaaggcaagtcttcatgctcggtgatgtgattctgctgcaaagcctgaggacactgggaatatattctacctgaagaagcaaactgcccgttctccttgaagataaactatgcttcttttttcttctgttaacctgaaagatatcatttgggtcagagctcccctcccttcagattatgttaactctgagtctgtccaaatgagttcacttccattttcaaattttaagcaatcatattttcaatttatatattgtatttcttaatattatgaccaagaattttatcggcattaatttttcagtgtagtttgttgtttaaaataatgtaatcatcaaaatgatgcatattgttacactactattaactaggcttcagtatatcagtgtttatttcattgtgttaaatgtatacttgtaaataaaatagctgcaaacctcagtcctttgtgctacttgatgtggctttcaaagaagagaagccttgtcctgagtttctcacttggcttcaggaaggccccaggttggattccagaaaccagtgaagatgtggccacaggaggaggtgtgctgaggtggctgctgaccgtggactccctgcgcagtggcctgcagatgttggggctgggttacagctgattgaagctgagtggccctggggggtctgtgaggggagttcctccccagtgatgaaattctctccttccaccctcaaatccctagaccttgactgaaatgctccgtggtcgggagcctggtcaaggaggaggagctgctgagaggcattgttcgcccttgctcatagcttagctcgatgtccgtgtcagacaggagatgattgagaacagccttgcctgtcactgtcctagaacaccctggagtttagtgttctgtgtcagagtcttgggagcctccttcagacccagatgacgggcctccctctgtccaaggagcagctgtaaaggagaagagggatttcatttgtttggtggctgttaccttgtctgtaagtcaaacttggagttgagcagtgctttttaaacgattcccttttgcagctaaaatttcacagggctatttctaatacgtaagcaaatgttaccattgactttattaataaaatatagttttgctttgcaaaaaaaataa

SEQ ID NO: 454818 - DNA, 1790 bp, Homo sapiens
gtctctttgaaaaagaatcaaggtttaccaagcttgattttagccagtcaccgtatttcctagctaaataatggaagtaggggagaatctatacaagtcagagagttgttcttttttgtttcatggggcctttctctgagactgctagggactctgtgcttgattggttgtcattgttcaaacttcaggtggtttcgagttaatttttttaaactaatgtttaatttcctttttccctgtagcttttacaaagttgatcacagtaaatggacaagaatatcatcttcaacttgtagacacagccgggcaagatgaatattctatctttcctcagacatactccatagatattaatggctatattcttgtgtattctgttacatcaatcaaaagttttgaagtgattaaagttatccatggcaaattgttggatatggtggggaaagtacaaatacctattatgttggttgggaataagaaagacctgcatatggaaagggtgatcagttatgaagaagggaaagctttggcagaatcttggaatgcagcttttttggaatcttctgctaaagaaaatcagactgctgtggatgtttttcgaaggataattttggaggcagaaaaaatggacggggcagcttcacaaggcaagtcttcatgctcggtgatgtgattctgctgcaaagcctgaggacactgggaatatattctacctgaagaagcaaactgcccgttctccttgaagataaactatgcttcttttttcttctgttaacctgaaagatatcatttgggtcagagctcccctcccttcagattatgttaactctgagtctgtccaaatgagttcacttccattttcaaattttaagcaatcatattttcaatttatatattgtatttcttaatattatgaccaagaattttatcggcattaatttttcagtgtagtttgttgtttaaaataatgtaatcatcaaaatgatgcatattgttacactactattaactaggcttcagtatatcagtgtttatttcattgtgttaaatgtatacttgtaaataaaatagctgcaaacctcagtcctttgtgctacttgatgtggctttcaaagaagagaagccttgtcctgagtttctcacttggcttcaggaaggccccaggttggattccagaaaccagtgaagatgtggccacaggaggaggtgtgctgaggtggctgctgaccgtggactccctgcgcagtggcctgcagatgttggggctgggttacagctgattgaagctgagtggccctggggggtctgtgaggggagttcctccccagtgatgaaattctctccttccaccctcaaatccctagaccttgactgaaatgctccgtggtcgggagcctggtcaaggaggaggagctgctgagaggcattgttcgcccttgctcatagcttagctcgatgtccgtgtcagacaggagatgattgagaacagccttgcctgtcactgtcctagaacaccctggagtttagtgttctgtgtcagagtcttgggagcctccttcagacccagatgacgggcctccctctgtccaaggagcagctgtaaaggagaagagggatttcatttgtttggtggctgttaccttgtctgtaagtcaaacttggagttgagcagtgctttttaaacgattcccttttgcagctaaaatttcacagggctatttctaatacgtaagcaaatgttaccattgactttattaataaaatatagttttgctttgcaaaaaaaataa

SEQ ID NO: 454819 - DNA, 1620 bp, Homo sapiens
gtctctttgaaaaagaatcaaggtttaccaagcttgattttagccagtcaccgtatttcctagctaaataatcttttacaaagttgatcacagtaaatggacaagaatatcatcttcaacttgtagacacagccgggcaagatgaatattctatctttcctcagacatactccatagatattaatggctatattcttgtgtattctgttacatcaatcaaaagttttgaagtgattaaagttatccatggcaaattgttggatatggtggggaaagtacaaatacctattatgttggttgggaataagaaagacctgcatatggaaagggtgatcagttatgaagaagggaaagctttggcagaatcttggaatgcagcttttttggaatcttctgctaaagaaaatcagactgctgtggatgtttttcgaaggataattttggaggcagaaaaaatggacggggcagcttcacaaggcaagtcttcatgctcggtgatgtgattctgctgcaaagcctgaggacactgggaatatattctacctgaagaagcaaactgcccgttctccttgaagataaactatgcttcttttttcttctgttaacctgaaagatatcatttgggtcagagctcccctcccttcagattatgttaactctgagtctgtccaaatgagttcacttccattttcaaattttaagcaatcatattttcaatttatatattgtatttcttaatattatgaccaagaattttatcggcattaatttttcagtgtagtttgttgtttaaaataatgtaatcatcaaaatgatgcatattgttacactactattaactaggcttcagtatatcagtgtttatttcattgtgttaaatgtatacttgtaaataaaatagctgcaaacctcagtcctttgtgctacttgatgtggctttcaaagaagagaagccttgtcctgagtttctcacttggcttcaggaaggccccaggttggattccagaaaccagtgaagatgtggccacaggaggaggtgtgctgaggtggctgctgaccgtggactccctgcgcagtggcctgcagatgttggggctgggttacagctgattgaagctgagtggccctggggggtctgtgaggggagttcctccccagtgatgaaattctctccttccaccctcaaatccctagaccttgactgaaatgctccgtggtcgggagcctggtcaaggaggaggagctgctgagaggcattgttcgcccttgctcatagcttagctcgatgtccgtgtcagacaggagatgattgagaacagccttgcctgtcactgtcctagaacaccctggagtttagtgttctgtgtcagagtcttgggagcctccttcagacccagatgacgggcctccctctgtccaaggagcagctgtaaaggagaagagggatttcatttgtttggtggctgttaccttgtctgtaagtcaaacttggagttgagcagtgctttttaaacgattcccttttgcagctaaaatttcacagggctatttctaatacgtaagcaaatgttaccattgactttattaataaaatatagttttgctttgcaaaaaaaataa

SEQ ID NO: 454820 - DNA, 1583 bp, Homo sapiens
  misc_feature (30)..(30): n is a, c, g, or t
cgtgatgttatcgcccaacaccaaccatanaaacacttttacaaagttgatcacagtaaatggacaagaatatcatcttcaacttgtagacacagccgggcaagatgaatattctatctttcctcagacatactccatagatattaatggctatattcttgtgtattctgttacatcaatcaaaagttttgaagtgattaaagttatccatggcaaattgttggatatggtggggaaagtacaaatacctattatgttggttgggaataagaaagacctgcatatggaaagggtgatcagttatgaagaagggaaagctttggcagaatcttggaatgcagcttttttggaatcttctgctaaagaaaatcagactgctgtggatgtttttcgaaggataattttggaggcagaaaaaatggacggggcagcttcacaaggcaagtcttcatgctcggtgatgtgattctgctgcaaagcctgaggacactgggaatatattctacctgaagaagcaaactgcccgttctccttgaagataaactatgcttcttttttcttctgttaacctgaaagatatcatttgggtcagagctcccctcccttcagattatgttaactctgagtctgtccaaatgagttcacttccattttcaaattttaagcaatcatattttcaatttatatattgtatttcttaatattatgaccaagaattttatcggcattaatttttcagtgtagtttgttgtttaaaataatgtaatcatcaaaatgatgcatattgttacactactattaactaggcttcagtatatcagtgtttatttcattgtgttaaatgtatacttgtaaataaaatagctgcaaacctcagtcctttgtgctacttgatgtggctttcaaagaagagaagccttgtcctgagtttctcacttggcttcaggaaggccccaggttggattccagaaaccagtgaagatgtggccacaggaggaggtgtgctgaggtggctgctgaccgtggactccctgcgcagtggcctgcagatgttggggctgggttacagctgattgaagctgagtggccctggggggtctgtgaggggagttcctccccagtgatgaaattctctccttccaccctcaaatccctagaccttgactgaaatgctccgtggtcgggagcctggtcaaggaggaggagctgctgagaggcattgttcgcccttgctcatagcttagctcgatgtccgtgtcagacaggagatgattgagaacagccttgcctgtcactgtcctagaacaccctggagtttagtgttctgtgtcagagtcttgggagcctccttcagacccagatgacgggcctccctctgtccaaggagcagctgtaaaggagaagagggatttcatttgtttggtggctgttaccttgtctgtaagtcaaacttggagttgagcagtgctttttaaacgattcccttttgcagctaaaatttcacagggctatttctaatacgtaagcaaatgttaccattgactttattaataaaatatagttttgctttgcaaaaaaaataa

SEQ ID NO: 454821 - DNA, 2142 bp, Homo sapiens
aaccggttggaagtttgaagccttcaaacctagccggcgcccaacagcgcggtagcagcgaggtgtatttttagctcccgggcgggcagccccgcccccccctccccgcctccttgtttcccccaatgggagatggagtttccgacacgtcatcgcgcggctgtgcaggagctgtccaatcggcgctcggggagaatggcgtaattaaaaagcggcggaagaaggtgggagggtcatgacgcagcgagtttcagtcgtgacttttctgggggcatcgcggcgtcccctttttttgcctttaaagtaaaacgtcgccccgacgcaccccccgcgtatttcggggggcggaggcggcgggccacggcgcgaagaggggcggtgctgacgccggccggtcacgtgggcgtgttgtgggggggaggggcgccgccgcgcggtcggttccgggcggttgggagcgcgcgagctagcgagcgagaggcagccgcgcccgccgccgcccctgctctgtatgccgctctctcccggcgcggccgccgccgatcacagcagcaggagccaccgccgccgcggttgatgtggttgggccggggctgaggaggccgccaagatgccgcagtccaagtcccggaagatcgcgatcctgggctaccggtctgtgggatgaatattctatctttcctcagacatactccatagatattaatggctatattcttgtgtattctgttacatcaatcaaaagttttgaagtgattaaagttatccatggcaaattgttggatatggtggggaaagtacaaatacctattatgttggttgggaataagaaagacctgcatatggaaagggtgatcagttatgaagaagggaaagctttggcagaatcttggaatgcagcttttttggaatcttctgctaaagaaaatcagactgctgtggatgtttttcgaaggataattttggaggcagaaaaaatggacggggcagcttcacaaggcaagtcttcatgctcggtgatgtgattctgctgcaaagcctgaggacactgggaatatattctacctgaagaagcaaactgcccgttctccttgaagataaactatgcttcttttttcttctgttaacctgaaagatatcatttgggtcagagctcccctcccttcagattatgttaactctgagtctgtccaaatgagttcacttccattttcaaattttaagcaatcatattttcaatttatatattgtatttcttaatattatgaccaagaattttatcggcattaatttttcagtgtagtttgttgtttaaaataatgtaatcatcaaaatgatgcatattgttacactactattaactaggcttcagtatatcagtgtttatttcattgtgttaaatgtatacttgtaaataaaatagctgcaaacctcagtcctttgtgctacttgatgtggctttcaaagaagagaagccttgtcctgagtttctcacttggcttcaggaaggccccaggttggattccagaaaccagtgaagatgtggccacaggaggaggtgtgctgaggtggctgctgaccgtggactccctgcgcagtggcctgcagatgttggggctgggttacagctgattgaagctgagtggccctggggggtctgtgaggggagttcctccccagtgatgaaattctctccttccaccctcaaatccctagaccttgactgaaatgctccgtggtcgggagcctggtcaaggaggaggagctgctgagaggcattgttcgcccttgctcatagcttagctcgatgtccgtgtcagacaggagatgattgagaacagccttgcctgtcactgtcctagaacaccctggagtttagtgttctgtgtcagagtcttgggagcctccttcagacccagatgacgggcctccctctgtccaaggagcagctgtaaaggagaagagggatttcatttgtttggtggctgttaccttgtctgtaagtcaaacttggagttgagcagtgctttttaaacgattcccttttgcagctaaaatttcacagggctatttctaatacgtaagcaaatgttaccattgactttattaataaaatatagttttgctttgcaaaaaaaataa

SEQ ID NO: 454822 - DNA, 1519 bp, Homo sapiens
gcatagctgaacgactctcttaatcctccaccgctacacgatgaatattctatctttcctcagacatactccatagatattaatggctatattcttgtgtattctgttacatcaatcaaaagttttgaagtgattaaagttatccatggcaaattgttggatatggtggggaaagtacaaatacctattatgttggttgggaataagaaagacctgcatatggaaagggtgatcagttatgaagaagggaaagctttggcagaatcttggaatgcagcttttttggaatcttctgctaaagaaaatcagactgctgtggatgtttttcgaaggataattttggaggcagaaaaaatggacggggcagcttcacaaggcaagtcttcatgctcggtgatgtgattctgctgcaaagcctgaggacactgggaatatattctacctgaagaagcaaactgcccgttctccttgaagataaactatgcttcttttttcttctgttaacctgaaagatatcatttgggtcagagctcccctcccttcagattatgttaactctgagtctgtccaaatgagttcacttccattttcaaattttaagcaatcatattttcaatttatatattgtatttcttaatattatgaccaagaattttatcggcattaatttttcagtgtagtttgttgtttaaaataatgtaatcatcaaaatgatgcatattgttacactactattaactaggcttcagtatatcagtgtttatttcattgtgttaaatgtatacttgtaaataaaatagctgcaaacctcagtcctttgtgctacttgatgtggctttcaaagaagagaagccttgtcctgagtttctcacttggcttcaggaaggccccaggttggattccagaaaccagtgaagatgtggccacaggaggaggtgtgctgaggtggctgctgaccgtggactccctgcgcagtggcctgcagatgttggggctgggttacagctgattgaagctgagtggccctggggggtctgtgaggggagttcctccccagtgatgaaattctctccttccaccctcaaatccctagaccttgactgaaatgctccgtggtcgggagcctggtcaaggaggaggagctgctgagaggcattgttcgcccttgctcatagcttagctcgatgtccgtgtcagacaggagatgattgagaacagccttgcctgtcactgtcctagaacaccctggagtttagtgttctgtgtcagagtcttgggagcctccttcagacccagatgacgggcctccctctgtccaaggagcagctgtaaaggagaagagggatttcatttgtttggtggctgttaccttgtctgtaagtcaaacttggagttgagcagtgctttttaaacgattcccttttgcagctaaaatttcacagggctatttctaatacgtaagcaaatgttaccattgactttattaataaaatatagttttgctttgcaaaaaaaataa

SEQ ID NO: 454823 - DNA, 1560 bp, Homo sapiens
ctcaggatggtggcacacaggcatgtcctgccgtggtttcacccttcattctgttgaaaactggatgataacaaactcaggatgaatattctatctttcctcagacatactccatagatattaatggctatattcttgtgtattctgttacatcaatcaaaagttttgaagtgattaaagttatccatggcaaattgttggatatggtggggaaagtacaaatacctattatgttggttgggaataagaaagacctgcatatggaaagggtgatcagttatgaagaagggaaagctttggcagaatcttggaatgcagcttttttggaatcttctgctaaagaaaatcagactgctgtggatgtttttcgaaggataattttggaggcagaaaaaatggacggggcagcttcacaaggcaagtcttcatgctcggtgatgtgattctgctgcaaagcctgaggacactgggaatatattctacctgaagaagcaaactgcccgttctccttgaagataaactatgcttcttttttcttctgttaacctgaaagatatcatttgggtcagagctcccctcccttcagattatgttaactctgagtctgtccaaatgagttcacttccattttcaaattttaagcaatcatattttcaatttatatattgtatttcttaatattatgaccaagaattttatcggcattaatttttcagtgtagtttgttgtttaaaataatgtaatcatcaaaatgatgcatattgttacactactattaactaggcttcagtatatcagtgtttatttcattgtgttaaatgtatacttgtaaataaaatagctgcaaacctcagtcctttgtgctacttgatgtggctttcaaagaagagaagccttgtcctgagtttctcacttggcttcaggaaggccccaggttggattccagaaaccagtgaagatgtggccacaggaggaggtgtgctgaggtggctgctgaccgtggactccctgcgcagtggcctgcagatgttggggctgggttacagctgattgaagctgagtggccctggggggtctgtgaggggagttcctccccagtgatgaaattctctccttccaccctcaaatccctagaccttgactgaaatgctccgtggtcgggagcctggtcaaggaggaggagctgctgagaggcattgttcgcccttgctcatagcttagctcgatgtccgtgtcagacaggagatgattgagaacagccttgcctgtcactgtcctagaacaccctggagtttagtgttctgtgtcagagtcttgggagcctccttcagacccagatgacgggcctccctctgtccaaggagcagctgtaaaggagaagagggatttcatttgtttggtggctgttaccttgtctgtaagtcaaacttggagttgagcagtgctttttaaacgattcccttttgcagctaaaatttcacagggctatttctaatacgtaagcaaatgttaccattgactttattaataaaatatagttttgctttgcaaaaaaaataa

SEQ ID NO: 454824 - DNA, 2922 bp, Homo sapiens
gttcattagacgcacgtcactaggtccatgcagggagatgacacacagtgtggccactaggagagcaggagatctgggagccggctccaagctgcctgccacacagtcctagttctttcagtctgtttctcacgtgacaggttactgtatttttgcccaagtggcgacacttttaaagataggcaaatacagcatgcggaggaaaccgtggttctgtaatgcaaccgcaggtccttaggacacccatatcccatttgttgacccacagcgagcttgtaggggggttaaatttcatttttgtttttatcaaatgacagcacacatcgtttaaaatagcacagtgtgtaattcattcaacaagctaacttattctgaagcttgtgatgcaatcatgaacaaagcagacaaatccctgcccttgcggacctattatttctggtgtgggagacaaacagtaaaacgacacacatgcgagataggatgtctgtgaccatgctgccaagaaaaataaagtacggaaggggtaagaaatggaaaggaaatttgtcatttagggtaaacagaagaggtgtaagaagtgacatttgaggctgggtgtggtggctcacgcctgtaatcccagcactttgggaggccgaggcaggcggatcacgaggtcagaagtttgcggcttgagagtcactggggccgagtaaagatggccacccatcagaggatgttgaaccaggcaccgtccatctgctgcagcagagtcctctggttgctgtgctgagcaggggtggcggggaagggttggggctgtggaactgatgcaggcagacttgggccaggaattcacacctcagcggcagcagtggaggggagtgagaagccgtcagattctaggtaggatttgaaagtagagccagtgatgtgctggcagatgtttgcatgggttttttgggggagggtggaaaatgatttgtggccatttgccagcagtcagtggtataaataatcctgctgtggcagatttcaagtgatcattatgacatctcagatccccttcccggtgagagccacctccatcctagagtcatcggctcattgatctgattgaaagccaagagatactggcatcacccagagaatgtatgtacctaggaaagaacacaggagcaggctgaatgtactagggcactctaggaaaagctgttcaagttgtaatgtaaacagttggttctttgctgaatgagttgggtgattaaaatttgcatttatgtggtttctcagcccagtggtaggctttccgtttgaatgccttacctgtttcactttgaatatcctcagtcagggttgctgagtgtcagatgtatgcacatgtgaatggattgctaggaaaaaacaggagttctttgtgttcattttatgttatgttaaaatggtgagtctgtgacattttacatttttccagctggcaacataacatacatttaaaaacttcaacattaaaatggatgtctaatttatactttttgttttatagttttgaagtgattaaagttatccatggcaaattgttggatatggtggggaaagtacaaatacctattatgttggttgggaataagaaagacctgcatatggaaagggtgatcagttatgaagaagggaaagctttggcagaatcttggaatgcagcttttttggaatcttctgctaaagaaaatcagactgctgtggatgtttttcgaaggataattttggaggcagaaaaaatggacggggcagcttcacaaggcaagtcttcatgctcggtgatgtgattctgctgcaaagcctgaggacactgggaatatattctacctgaagaagcaaactgcccgttctccttgaagataaactatgcttcttttttcttctgttaacctgaaagatatcatttgggtcagagctcccctcccttcagattatgttaactctgagtctgtccaaatgagttcacttccattttcaaattttaagcaatcatattttcaatttatatattgtatttcttaatattatgaccaagaattttatcggcattaatttttcagtgtagtttgttgtttaaaataatgtaatcatcaaaatgatgcatattgttacactactattaactaggcttcagtatatcagtgtttatttcattgtgttaaatgtatacttgtaaataaaatagctgcaaacctcagtcctttgtgctacttgatgtggctttcaaagaagagaagccttgtcctgagtttctcacttggcttcaggaaggccccaggttggattccagaaaccagtgaagatgtggccacaggaggaggtgtgctgaggtggctgctgaccgtggactccctgcgcagtggcctgcagatgttggggctgggttacagctgattgaagctgagtggccctggggggtctgtgaggggagttcctccccagtgatgaaattctctccttccaccctcaaatccctagaccttgactgaaatgctccgtggtcgggagcctggtcaaggaggaggagctgctgagaggcattgttcgcccttgctcatagcttagctcgatgtccgtgtcagacaggagatgattgagaacagccttgcctgtcactgtcctagaacaccctggagtttagtgttctgtgtcagagtcttgggagcctccttcagacccagatgacgggcctccctctgtccaaggagcagctgtaaaggagaagagggatttcatttgtttggtggctgttaccttgtctgtaagtcaaacttggagttgagcagtgctttttaaacgattcccttttgcagctaaaatttcacagggctatttctaatacgtaagcaaatgttaccattgactttattaataaaatatagttttgctttgcaaaaaaaataa

SEQ ID NO: 454825 - DNA, 1404 bp, Homo sapiens
taggatccagactgagcaatacaatctggcacttactggtttgtcttttttttcttacaaatagaatacctattatgttggttgggaataagaaagacctgcatatggaaagggtgatcagttatgaagaagggaaagctttggcagaatcttggaatgcagcttttttggaatcttctgctaaagaaaatcagactgctgtggatgtttttcgaaggataattttggaggcagaaaaaatggacggggcagcttcacaaggcaagtcttcatgctcggtgatgtgattctgctgcaaagcctgaggacactgggaatatattctacctgaagaagcaaactgcccgttctccttgaagataaactatgcttcttttttcttctgttaacctgaaagatatcatttgggtcagagctcccctcccttcagattatgttaactctgagtctgtccaaatgagttcacttccattttcaaattttaagcaatcatattttcaatttatatattgtatttcttaatattatgaccaagaattttatcggcattaatttttcagtgtagtttgttgtttaaaataatgtaatcatcaaaatgatgcatattgttacactactattaactaggcttcagtatatcagtgtttatttcattgtgttaaatgtatacttgtaaataaaatagctgcaaacctcagtcctttgtgctacttgatgtggctttcaaagaagagaagccttgtcctgagtttctcacttggcttcaggaaggccccaggttggattccagaaaccagtgaagatgtggccacaggaggaggtgtgctgaggtggctgctgaccgtggactccctgcgcagtggcctgcagatgttggggctgggttacagctgattgaagctgagtggccctggggggtctgtgaggggagttcctccccagtgatgaaattctctccttccaccctcaaatccctagaccttgactgaaatgctccgtggtcgggagcctggtcaaggaggaggagctgctgagaggcattgttcgcccttgctcatagcttagctcgatgtccgtgtcagacaggagatgattgagaacagccttgcctgtcactgtcctagaacaccctggagtttagtgttctgtgtcagagtcttgggagcctccttcagacccagatgacgggcctccctctgtccaaggagcagctgtaaaggagaagagggatttcatttgtttggtggctgttaccttgtctgtaagtcaaacttggagttgagcagtgctttttaaacgattcccttttgcagctaaaatttcacagggctatttctaatacgtaagcaaatgttaccattgactttattaataaaatatagttttgctttgcaaaaaaaataa

SEQ ID NO: 454826 - DNA, 1350 bp, Homo sapiens
tcccccgggctgcaggattcggcacgagtgggaataagaaagacctgcatatggaaagggtgatcagttatgaagaagggaaagctttggcagaatcttggaatgcagcttttttggaatcttctgctaaagaaaatcagactgctgtggatgtttttcgaaggataattttggaggcagaaaaaatggacggggcagcttcacaaggcaagtcttcatgctcggtgatgtgattctgctgcaaagcctgaggacactgggaatatattctacctgaagaagcaaactgcccgttctccttgaagataaactatgcttcttttttcttctgttaacctgaaagatatcatttgggtcagagctcccctcccttcagattatgttaactctgagtctgtccaaatgagttcacttccattttcaaattttaagcaatcatattttcaatttatatattgtatttcttaatattatgaccaagaattttatcggcattaatttttcagtgtagtttgttgtttaaaataatgtaatcatcaaaatgatgcatattgttacactactattaactaggcttcagtatatcagtgtttatttcattgtgttaaatgtatacttgtaaataaaatagctgcaaacctcagtcctttgtgctacttgatgtggctttcaaagaagagaagccttgtcctgagtttctcacttggcttcaggaaggccccaggttggattccagaaaccagtgaagatgtggccacaggaggaggtgtgctgaggtggctgctgaccgtggactccctgcgcagtggcctgcagatgttggggctgggttacagctgattgaagctgagtggccctggggggtctgtgaggggagttcctccccagtgatgaaattctctccttccaccctcaaatccctagaccttgactgaaatgctccgtggtcgggagcctggtcaaggaggaggagctgctgagaggcattgttcgcccttgctcatagcttagctcgatgtccgtgtcagacaggagatgattgagaacagccttgcctgtcactgtcctagaacaccctggagtttagtgttctgtgtcagagtcttgggagcctccttcagacccagatgacgggcctccctctgtccaaggagcagctgtaaaggagaagagggatttcatttgtttggtggctgttaccttgtctgtaagtcaaacttggagttgagcagtgctttttaaacgattcccttttgcagctaaaatttcacagggctatttctaatacgtaagcaaatgttaccattgactttattaataaaatatagttttgctttgcaaaaaaaataa

SEQ ID NO: 454827 - DNA, 1147 bp, Homo sapiens
aaccggttggaagtttgaagccttcaaacctagccggcgcccaacagcgcggtagcagcgaggtgtatttttagctcccgggcgggcagccccgcccccccctccccgcctccttgtttcccccaatgggagatggagtttccgacacgtcatcgcgcggctgtgcaggagctgtccaatcggcgctcggggagaatggcgtaattaaaaagcggcggaagaaggtgggagggtcatgacgcagcgagtttcagtcgtgacttttctgggggcatcgcggcgtcccctttttttgcctttaaagtaaaacgtcgccccgacgcaccccccgcgtatttcggggggcggaggcggcgggccacggcgcgaagaggggcggtgctgacgccggccggtcacgtgggcgtgttgtgggggggaggggcgccgccgcgcggtcggttccgggcggttgggagcgcgcgagctagcgagcgagaggcagccgcgcccgccgccgcccctgctctgtatgccgctctctcccggcgcggccgccgccgatcacagcagcaggagccaccgccgccgcggttgatgtggttgggccggggctgaggaggccgccaagatgccgcagtccaagtcccggaagatcgcgatcctgggctaccggtctgtggggaaatcctcattgacgattcaatttgttgaaggccaatttgtggactcctacgatccaaccatagaaaacacttttacaaagttgatcacagtaaatggacaagaatatcatcttcaacttgtagacacagccgggcaagtaagtgacctctggtatctcagaatcttatacagcatatctgacagtcttggtcctagcactgatttttaaaagtaccagctatgccaagaaaacccctcaggttgtgtgcagacagtccctgactcccaatggtttggcttgcagtggctcgacttaacaatttctcatctttacgatgggtctattgaggtatttgatacattttcaactcatgatatttttggtttacagtaggtttatcacgatgtaaccccatcataagtcaaggagcttacacagataactaaatgttagtatgctgtctacttggtcttttctaagacatttctggcagttatcttt

SEQ ID NO: 454828 - DNA, 740 bp, Homo sapiens
  misc_feature (361)..(362): n is a, c, g, or t
  misc_feature (507)..(507): n is a, c, g, or t
aaccggttggaagtttgaagccttcaaacctagccggcgcccaacagcgcggtagcagcgaggtgtatttttagctcccgggcgggcagccccgcccccccctccccgcctccttgtttcccccaatgggagatggagtttccgacacgtcatcgcgcggctgtgcaggagctgtccaatcggcgctcggggagaatggcgtaattaaaaagcggcggaagaaggtgggagggtcatgacgcagcgagtttcagtcgtgacttttctgggggcatcgcggcgtcccctttttttgcctttaaagtcacggcgcgaagaggggcggtgctgacgccggccggtcacgtgggcgtgttgtggnnttttttttttttttcttttcttcttcttctctttttctttccttcctcctttttcctttccccctcttcctttccccctctttgtcctctcctccccctcgctccttttccctttcctctccttccctcctcctttccctctctnctcccttgttcttccctttcgttctctcctccgtcgtcccttccgttcccctctctgttcctgtctcccctgttccttcctctcttttttcccgcttcctccccccttcgcctttcttcttcctcgtctttgtcgttctccgctttcgctccgctctctctcctttctcgcctccgcgcctcgctgccctttccttccccgcgtttacctgcctcccctatcgctcttctctc

SEQ ID NO: 454829 - DNA, 302 bp, Homo sapiens
tctgatgtgcttgttggtcagtaatatttgttaatgtcacagacatgtttactttgtaatagcttaattgcataatatcctcatataaagcaaattaatgaaatttatttcattttttgaaattgctcacatgctaattaaatgaatgttttctgaccctgataccttcagtgtcttcatctattaatggttttttaataaaacagcaaaattaaaaatttttaccttcatatgccaacacacactaagctcttgttctcttttatagggaaatcctcattgacgattcaatttgttgaagg

SEQ ID NO: 454830 - DNA, 473 bp, Homo sapiens
cgacgtgttgtgtctgagatcccggtgctgaagactaacgccggaccccgagatcgtgagttgtgggtgcagcgactgaaggaggaatatcagtcccttatccgggaaatcctcattgacgattcaatttgttgaaggccaatttgtggactcctacgatccaaccatagaaaacacttttacaaagttgatcacagtaaatggacaagaatatcatcttcaacttgtagacacagccgggcaagatgaatattctatctttcctcagacatactccatagatattaatggctatattcttgtgtattctgttacatcaatcaaaagtttggaagtgatggttccccgcagcggggaacaatcacttttgctaggcaacctagcaaaagtgaacaaataggattacatgaagtgaaaaagcttatgtacagcaaaggaaacaatcaacaaagtgatggttccccgctgggtac

SEQ ID NO: 454831 - DNA, 1617 bp, Homo sapiens
aaccggttggaagtttgaagccttcaaacctagccggcgcccaacagcgcggtagcagcgaggtgtatttttagctcccgggcgggcagccccgcccccccctccccgcctccttgtttcccccaatgggagatggagtttccgacacgtcatcgcgcggctgtgcaggagctgtccaatcggcgctcggggagaatggcgtaattaaaaagcggcggaagaaggtgggagggtcatgacgcagcgagtttcagtcgtgacttttctgggggcatcgcggcgtcccctttttttgcctttaaagtaaaacgtcgccccgacgcaccccccgcgtatttcggggggcggaggcggcgggccacggcgcgaagaggggcggtgctgacgccggccggtcacgtgggcgtgttgtgggggggaggggcgccgccgcgcggtcggttccgggcggttgggagcgcgcgagctagcgagcgagaggcagccgcgcccgccgccgcccctgctctgtatgccgctctctcccggcgcggccgccgccgatcacagcagcaggagccaccgccgccgcggttgatgtggttgggccggggctgaggaggccgccaagatgccgcagtccaagtcccggaagatcgcgatcctgggctaccggtctgtggggaaatcctcattgacgattcaatttgttgaaggccaatttgtggactcctacgatccaaccatagaaaacacttttacaaagttgatcacagtaaatggacaagaatatcatcttcaacttgtagacacagccgggcaagatgaatattctatctttcctcagacatactccatagatattaatggctatattcttgtgtattctgttacatcaatcaaaagttttgaagtgattaaagttatccatggcaaattgttggatatggtggggaaagtacaaatacctattatgttggttgggaataagaaagacctgcatatggaaagggtgatcagttatgaagaagggaaagctttggcagaatcttggaatgcagcttttttggaatcttctgctaaagaaaatcagactgctgtggatgtttttcgaaggataattttggaggcagaaaaaatggacggggcagcttcacaaggcaagtcttcatgctcggtgatgtgattctgctgcaaagcctgaggacactgggaatatattctacctgaagaagcaaactgcccgttctccttgaagataaactatgcttcttttttcttctgttaacctgaaagatatcatttgggtcagagctcccctcccttcagattatgttaactctgagtctgtccaaatgagttcacttccattttcaaattttaagcaatcatattttcaatttatatattgtatttcttaatattatgaccaagaattttatcggcattaatttttcagtgtagtttgttgtttaaaataatgtaatcatcaaaatgatgcatattgttacactactattaactaggcttcagtatatcagtgtttatttcattgtgttaaatgtatacttgtaaataaaatagtagatgcggccagctttcatcttctttgttggatacggtgaaaacgagatatac

SEQ ID NO: 454832 - DNA, 1610 bp, Homo sapiens
  misc_feature (1588)..(1588): n is a, c, g, or t
  misc_feature (1590)..(1590): n is a, c, g, or t
  misc_feature (1598)..(1598): n is a, c, g, or t
aaccggttggaagtttgaagccttcaaacctagccggcgcccaacagcgcggtagcagcgaggtgtatttttagctcccgggcgggcagccccgcccccccctccccgcctccttgtttcccccaatgggagatggagtttccgacacgtcatcgcgcggctgtgcaggagctgtccaatcggcgctcggggagaatggcgtaattaaaaagcggcggaagaaggtgggagggtcatgacgcagcgagtttcagtcgtgacttttctgggggcatcgcggcgtcccctttttttgcctttaaagtaaaacgtcgccccgacgcaccccccgcgtatttcggggggcggaggcggcgggccacggcgcgaagaggggcggtgctgacgccggccggtcacgtgggcgtgttgtgggggggaggggcgccgccgcgcggtcggttccgggcggttgggagcgcgcgagctagcgagcgagaggcagccgcgcccgccgccgcccctgctctgtatgccgctctctcccggcgcggccgccgccgatcacagcagcaggagccaccgccgccgcggttgatgtggttgggccggggctgaggaggccgccaagatgccgcagtccaagtcccggaagatcgcgatcctgggctaccggtctgtggggaaatcctcattgacgattcaatttgttgaaggccaatttgtggactcctacgatccaaccatagaaaacacttttacaaagttgatcacagtaaatggacaagaatatcatcttcaacttgtagacacagccgggcaagatgaatattctatctttcctcagacatactccatagatattaatggctatattcttgtgtattctgttacatcaatcaaaagttttgaagtgattaaagttatccatggcaaattgttggatatggtggggaaagtacaaatacctattatgttggttgggaataagaaagacctgcatatggaaagggtgatcagttatgaagaagggaaagctttggcagaatcttggaatgcagcttttttggaatcttctgctaaagaaaatcagactgctgtggatgtttttcgaaggataattttggaggcagaaaaaatggacggggcagcttcacaaggcaagtcttcatgctcggtgatgtgattctgctgcaaagcctgaggacactgggaatatattctacctgaagaagcaaactgcccgttctccttgaagataaactatgcttcttttttcttctgttaacctgaaagatatcatttgggtcagagctcccctcccttcagattatgttaactctgagtctgtccaaatgagttcacttccattttcaaattttaagcaatcatattttcaatttatatattgtatttcttaatattatgaccaagaattttatcggcattaatttttcagtgtagtttgttgtttaaaataatgtaatcatcaaaatgatgcatattgttacactactattaactaggcttcagtatatcagtgtttatttcattgtgttaaatgtatacttgtaaataaaatagctaaaaaaacaaaaaagagaacaananaaaagagncggaaaatcgtg

SEQ ID NO: 454833 - DNA, 1625 bp, Homo sapiens
aaccggttggaagtttgaagccttcaaacctagccggcgcccaacagcgcggtagcagcgaggtgtatttttagctcccgggcgggcagccccgcccccccctccccgcctccttgtttcccccaatgggagatggagtttccgacacgtcatcgcgcggctgtgcaggagctgtccaatcggcgctcggggagaatggcgtaattaaaaagcggcggaagaaggtgggagggtcatgacgcagcgagtttcagtcgtgacttttctgggggcatcgcggcgtcccctttttttgcctttaaagtaaaacgtcgccccgacgcaccccccgcgtatttcggggggcggaggcggcgggccacggcgcgaagaggggcggtgctgacgccggccggtcacgtgggcgtgttgtgggggggaggggcgccgccgcgcggtcggttccgggcggttgggagcgcgcgagctagcgagcgagaggcagccgcgcccgccgccgcccctgctctgtatgccgctctctcccggcgcggccgccgccgatcacagcagcaggagccaccgccgccgcggttgatgtggttgggccggggctgaggaggccgccaagatgccgcagtccaagtcccggaagatcgcgatcctgggctaccggtctgtggggaaatcctcattgacgattcaatttgttgaaggccaatttgtggactcctacgatccaaccatagaaaacacttttacaaagttgatcacagtaaatggacaagaatatcatcttcaacttgtagacacagccgggcaagatgaatattctatctttcctcagacatactccatagatattaatggctatattcttgtgtattctgttacatcaatcaaaagttttgaagtgattaaagttatccatggcaaattgttggatatggtggggaaagtacaaatacctattatgttggttgggaataagaaagacctgcatatggaaagggtgatcagttatgaagaagggaaagctttggcagaatcttggaatgcagcttttttggaatcttctgctaaagaaaatcagactgctgtggatgtttttcgaaggataattttggaggcagaaaaaatggacggggcagcttcacaaggcaagtcttcatgctcggtgatgtgattctgctgcaaagcctgaggacactgggaatatattctacctgaagaagcaaactgcccgttctccttgaagataaactatgcttcttttttcttctgttaacctgaaagatatcatttgggtcagagctcccctcccttcagattatgttaactctgagtctgtccaaatgagttcacttccattttcaaattttaagcaatcatattttcaatttatatattgtatttcttaatattatgaccaagaattttatcggcattaatttttcagtgtagtttgttgtttaaaataatgtaatcatcaaaatgatgcatattgttacactactattaactaggcttcagtatatcagtgtttatttcattgtgttaaatgtatacttgtaaataaaataggatgcggccggccccccccaccatcaatcttttattttaaactttttaatttatactgagta

SEQ ID NO: 454834 - DNA, 1630 bp, Homo sapiens
aaccggttggaagtttgaagccttcaaacctagccggcgcccaacagcgcggtagcagcgaggtgtatttttagctcccgggcgggcagccccgcccccccctccccgcctccttgtttcccccaatgggagatggagtttccgacacgtcatcgcgcggctgtgcaggagctgtccaatcggcgctcggggagaatggcgtaattaaaaagcggcggaagaaggtgggagggtcatgacgcagcgagtttcagtcgtgacttttctgggggcatcgcggcgtcccctttttttgcctttaaagtaaaacgtcgccccgacgcaccccccgcgtatttcggggggcggaggcggcgggccacggcgcgaagaggggcggtgctgacgccggccggtcacgtgggcgtgttgtgggggggaggggcgccgccgcgcggtcggttccgggcggttgggagcgcgcgagctagcgagcgagaggcagccgcgcccgccgccgcccctgctctgtatgccgctctctcccggcgcggccgccgccgatcacagcagcaggagccaccgccgccgcggttgatgtggttgggccggggctgaggaggccgccaagatgccgcagtccaagtcccggaagatcgcgatcctgggctaccggtctgtggggaaatcctcattgacgattcaatttgttgaaggccaatttgtggactcctacgatccaaccatagaaaacacttttacaaagttgatcacagtaaatggacaagaatatcatcttcaacttgtagacacagccgggcaagatgaatattctatctttcctcagacatactccatagatattaatggctatattcttgtgtattctgttacatcaatcaaaagttttgaagtgattaaagttatccatggcaaattgttggatatggtggggaaagtacaaatacctattatgttggttgggaataagaaagacctgcatatggaaagggtgatcagttatgaagaagggaaagctttggcagaatcttggaatgcagcttttttggaatcttctgctaaagaaaatcagactgctgtggatgtttttcgaaggataattttggaggcagaaaaaatggacggggcagcttcacaaggcaagtcttcatgctcggtgatgtgattctgctgcaaagcctgaggacactgggaatatattctacctgaagaagcaaactgcccgttctccttgaagataaactatgcttcttttttcttctgttaacctgaaagatatcatttgggtcagagctcccctcccttcagattatgttaactctgagtctgtccaaatgagttcacttccattttcaaattttaagcaatcatattttcaatttatatattgtatttcttaatattatgaccaagaattttatcggcattaatttttcagtgtagtttgttgtttaaaataatgtaatcatcaaaatgatgcatattgttacactactattaactaggcttcagtatatcagtgtttatttcattgtgttaaatgtatacttgtaaataaaatagtactggttatgcgagcaagctctctattttttttcttgtctgtatatgccgatcgctaactccgtat

SEQ ID NO: 454835 - DNA, 1626 bp, Homo sapiens
aaccggttggaagtttgaagccttcaaacctagccggcgcccaacagcgcggtagcagcgaggtgtatttttagctcccgggcgggcagccccgcccccccctccccgcctccttgtttcccccaatgggagatggagtttccgacacgtcatcgcgcggctgtgcaggagctgtccaatcggcgctcggggagaatggcgtaattaaaaagcggcggaagaaggtgggagggtcatgacgcagcgagtttcagtcgtgacttttctgggggcatcgcggcgtcccctttttttgcctttaaagtaaaacgtcgccccgacgcaccccccgcgtatttcggggggcggaggcggcgggccacggcgcgaagaggggcggtgctgacgccggccggtcacgtgggcgtgttgtgggggggaggggcgccgccgcgcggtcggttccgggcggttgggagcgcgcgagctagcgagcgagaggcagccgcgcccgccgccgcccctgctctgtatgccgctctctcccggcgcggccgccgccgatcacagcagcaggagccaccgccgccgcggttgatgtggttgggccggggctgaggaggccgccaagatgccgcagtccaagtcccggaagatcgcgatcctgggctaccggtctgtggggaaatcctcattgacgattcaatttgttgaaggccaatttgtggactcctacgatccaaccatagaaaacacttttacaaagttgatcacagtaaatggacaagaatatcatcttcaacttgtagacacagccgggcaagatgaatattctatctttcctcagacatactccatagatattaatggctatattcttgtgtattctgttacatcaatcaaaagttttgaagtgattaaagttatccatggcaaattgttggatatggtggggaaagtacaaatacctattatgttggttgggaataagaaagacctgcatatggaaagggtgatcagttatgaagaagggaaagctttggcagaatcttggaatgcagcttttttggaatcttctgctaaagaaaatcagactgctgtggatgtttttcgaaggataattttggaggcagaaaaaatggacggggcagcttcacaaggcaagtcttcatgctcggtgatgtgattctgctgcaaagcctgaggacactgggaatatattctacctgaagaagcaaactgcccgttctccttgaagataaactatgcttcttttttcttctgttaacctgaaagatatcatttgggtcagagctcccctcccttcagattatgttaactctgagtctgtccaaatgagttcacttccattttcaaattttaagcaatcatattttcaatttatatattgtatttcttaatattatgaccaagaattttatcggcattaatttttcagtgtagtttgttgtttaaaataatgtaatcatcaaaatgatgcatattgttacactactattaactaggcttcagtatatcagtgtttatttcattgtgttaaatgtatacttgtaaataaaatagcagagatgcgttccgcttctatacttaacttttattgtgttgtctaatattatttaaataaga

SEQ ID NO: 454836 - DNA, 2186 bp, Homo sapiens
aaccggttggaagtttgaagccttcaaacctagccggcgcccaacagcgcggtagcagcgaggtgtatttttagctcccgggcgggcagccccgcccccccctccccgcctccttgtttcccccaatgggagatggagtttccgacacgtcatcgcgcggctgtgcaggagctgtccaatcggcgctcggggagaatggcgtaattaaaaagcggcggaagaaggtgggagggtcatgacgcagcgagtttcagtcgtgacttttctgggggcatcgcggcgtcccctttttttgcctttaaagtaaaacgtcgccccgacgcaccccccgcgtatttcggggggcggaggcggcgggccacggcgcgaagaggggcggtgctgacgccggccggtcacgtgggcgtgttgtgggggggaggggcgccgccgcgcggtcggttccgggcggttgggagcgcgcgagctagcgagcgagaggcagccgcgcccgccgccgcccctgctctgtatgccgctctagtccaagtcccggaagatcgcgatcctgggctaccggtctgtggggaaatcctcattgacgattcaatttgttgaaggccaatttgtggactcctacgatccaaccatagaaaacacttttacaaagttgatcacagtaaatggacaagaatatcatcttcaacttgtagacacagccgggcaagatgaatattctatctttcctcagacatactccatagatattaatggctatattcttgtgtattctgttacatcaatcaaaagttttgaagtgattaaagttatccatggcaaattgttggatatggtggggaaagtacaaatacctattatgttggttgggaataagaaagacctgcatatggaaagggtgatcagttatgaagaagggaaagctttggcagaatcttggaatgcagcttttttggaatcttctgctaaagaaaatcagactgctgtggatgtttttcgaaggataattttggaggcagaaaaaatggacggggcagcttcacaaggcaagtcttcatgctcggtgatgtgattctgctgcaaagcctgaggacactgggaatatattctacctgaagaagcaaactgcccgttctccttgaagataaactatgcttcttttttcttctgttaacctgaaagatatcatttgggtcagagctcccctcccttcagattatgttaactctgagtctgtccaaatgagttcacttccattttcaaattttaagcaatcatattttcaatttatatattgtatttcttaatattatgaccaagaattttatcggcattaatttttcagtgtagtttgttgtttaaaataatgtaatcatcaaaatgatgcatattgttacactactattaactaggcttcagtatatcagtgtttatttcattgtgttaaatgtatacttgtaaataaaatagctgcaaacctcagtcctttgtgctacttgatgtggctttcaaagaagagaagccttgtcctgagtttctcacttggcttcaggaaggccccaggttggattccagaaaccagtgaagatgtggccacaggaggaggtgtgctgaggtggctgctgaccgtggactccctgcgcagtggcctgcagatgttggggctgggttacagctgattgaagctgagtggccctggggggtctgtgaggggagttcctccccagtgatgaaattctctccttccaccctcaaatccctagaccttgactgaaatgctccgtggtcgggagcctggtcaaggaggaggagctgctgagaggcattgttcgcccttgctcatagcttagctcgatgtccgtgtcagacaggagatgattgagaacagccttgcctgtcactgtcctagaacaccctggagtttagtgttctgtgtcagagtcttgggagcctccttcagacccagatgacgggcctccctctgtccaaggagcagctgtaaaggagaagagggatttcatttgtttggtggctgttaccttgtctgtaagtcaaacttggagttgagcagtgctttttaaacgattcccttttgcagctaaaatttcacagggctatttctaatacgtaagcaaatgttaccattgactttattaataaaatatagttttgctttgcaaaaaaaataa

SEQ ID NO: 454837 - DNA, 2228 bp, Homo sapiens
aaccggttggaagtttgaagccttcaaacctagccggcgcccaacagcgcggtagcagcgaggtgtatttttagctcccgggcgggcagccccgcccccccctccccgcctccttgtttcccccaatgggagatggagtttccgacacgtcatcgcgcggctgtgcaggagctgtccaatcggcgctcggggagaatggcgtaattaaaaagcggcggaagaaggtgggagggtcatgacgcagcgagtttcagtcgtgacttttctgggggcatcgcggcgtcccctttttttgcctttaaagtaaaacgtcgccccgacgcaccccccgcgtatttcggggggcggaggcggcgggccacggcgcgaagaggggcggtgctgacgccggccggtcacgtgggcgtgttgtgggggggaggggcgccgccgcgcggtcggttccgggcggttgggagcgcgcgagctagcgagcgagaggcagccgcgcccgccgccgcccctgctctgtatgccgctctctcccggcgcggccgccgccgatcacagcagcaggagccaccgccgccgcggttgatgtggttgggccggggctgaggaggccgccaagatgccgcagtccaagtcccggaagatcgcgatcctgggctaccggtctgtggggaaatcctcattgacgattcaatttgttgaaggccaatttgtggactcctacgatccaaccatagaaaacacttttacaaagttgatcacagtaaatggacaagaatatcatcttcaacttgtagacacagccgggcaagatgaatattctatctttcctcagacatactccatagatattaatggctatattcttgtgtattctgttacatcaatcaaaagttttgaagtgattaaagttatccatggcaaattgttggatatggtggggaaagtacaaatacctattatgttggttgggaataagaaagacctgcatatggaaagggtgatcagttatgaagaagggaaagctttggcagaatcttggaatgcagcttttttggaatcttctgctaaagaaaatcagactgctgtggatgtttttcgaaggataattttggaggcagaatgctgcaaagcctgaggacactgggaatatattctacctgaagaagcaaactgcccgttctccttgaagataaactatgcttcttttttcttctgttaacctgaaagatatcatttgggtcagagctcccctcccttcagattatgttaactctgagtctgtccaaatgagttcacttccattttcaaattttaagcaatcatattttcaatttatatattgtatttcttaatattatgaccaagaattttatcggcattaatttttcagtgtagtttgttgtttaaaataatgtaatcatcaaaatgatgcatattgttacactactattaactaggcttcagtatatcagtgtttatttcattgtgttaaatgtatacttgtaaataaaatagctgcaaacctcagtcctttgtgctacttgatgtggctttcaaagaagagaagccttgtcctgagtttctcacttggcttcaggaaggccccaggttggattccagaaaccagtgaagatgtggccacaggaggaggtgtgctgaggtggctgctgaccgtggactccctgcgcagtggcctgcagatgttggggctgggttacagctgattgaagctgagtggccctggggggtctgtgaggggagttcctccccagtgatgaaattctctccttccaccctcaaatccctagaccttgactgaaatgctccgtggtcgggagcctggtcaaggaggaggagctgctgagaggcattgttcgcccttgctcatagcttagctcgatgtccgtgtcagacaggagatgattgagaacagccttgcctgtcactgtcctagaacaccctggagtttagtgttctgtgtcagagtcttgggagcctccttcagacccagatgacgggcctccctctgtccaaggagcagctgtaaaggagaagagggatttcatttgtttggtggctgttaccttgtctgtaagtcaaacttggagttgagcagtgctttttaaacgattcccttttgcagctaaaatttcacagggctatttctaatacgtaagcaaatgttaccattgactttattaataaaatatagttttgctttgcaaaaaaaataa

SEQ ID NO: 454838 - DNA, 2225 bp, Homo sapiens
aaccggttggaagtttgaagccttcaaacctagccggcgcccaacagcgcggtagcagcgaggtgtatttttagctcccgggcgggcagccccgcccccccctccccgcctccttgtttcccccaatgggagatggagtttccgacacgtcatcgcgcggctgtgcaggagctgtccaatcggcgctcggggagaatggcgtaattaaaaagcggcggaagaaggtgggagggtcatgacgcagcgagtttcagtcgtgacttttctgggggcatcgcggcgtcccctttttttgcctttaaagtaaaacgtcgccccgacgcaccccccgcgtatttcggggggcggaggcggcgggccacggcgcgaagaggggcggtgctgacgccggccggtcacgtgggcgtgttgtgggggggaggggcgccgccgcgcggtcggttccgggcggttgggagcgcgcgagctagcgagcgagaggcagccgcgcccgccgccgcccctgctctgtatgccgctctctcccggcgcggccgccgccgatcacagcagcaggagccaccgccgccgcggttgatgtggttgggccggggctgaggaggccgccaagatgccgcagtccaagtcccggaagatcgcgatcctgggctaccggtctgtggggaaatcctcattgacgattcaatttgttgaaggccaatttgtggactcctacgatccaaccatagaaaacacttttacaaagttgatcacagtaaatggacaagaatatcatcttcaacttgtagacacagccgggcaagatgaatattctatctttcctcagacatactccatagatattaatggctatattcttgtgtattctgttacatcaatcaaaagaatacctattatgttggttgggaataagaaagacctgcatatggaaagggtgatcagttatgaagaagggaaagctttggcagaatcttggaatgcagcttttttggaatcttctgctaaagaaaatcagactgctgtggatgtttttcgaaggataattttggaggcagaaaaaatggacggggcagcttcacaaggcaagtcttcatgctcggtgatgtgattctgctgcaaagcctgaggacactgggaatatattctacctgaagaagcaaactgcccgttctccttgaagataaactatgcttcttttttcttctgttaacctgaaagatatcatttgggtcagagctcccctcccttcagattatgttaactctgagtctgtccaaatgagttcacttccattttcaaattttaagcaatcatattttcaatttatatattgtatttcttaatattatgaccaagaattttatcggcattaatttttcagtgtagtttgttgtttaaaataatgtaatcatcaaaatgatgcatattgttacactactattaactaggcttcagtatatcagtgtttatttcattgtgttaaatgtatacttgtaaataaaatagctgcaaacctcagtcctttgtgctacttgatgtggctttcaaagaagagaagccttgtcctgagtttctcacttggcttcaggaaggccccaggttggattccagaaaccagtgaagatgtggccacaggaggaggtgtgctgaggtggctgctgaccgtggactccctgcgcagtggcctgcagatgttggggctgggttacagctgattgaagctgagtggccctggggggtctgtgaggggagttcctccccagtgatgaaattctctccttccaccctcaaatccctagaccttgactgaaatgctccgtggtcgggagcctggtcaaggaggaggagctgctgagaggcattgttcgcccttgctcatagcttagctcgatgtccgtgtcagacaggagatgattgagaacagccttgcctgtcactgtcctagaacaccctggagtttagtgttctgtgtcagagtcttgggagcctccttcagacccagatgacgggcctccctctgtccaaggagcagctgtaaaggagaagagggatttcatttgtttggtggctgttaccttgtctgtaagtcaaacttggagttgagcagtgctttttaaacgattcccttttgcagctaaaatttcacagggctatttctaatacgtaagcaaatgttaccattgactttattaataaaatatagttttgctttgcaaaaaaaataa

SEQ ID NO: 454839 - DNA, 1301 bp, Homo sapiens
aaccggttggaagtttgaagccttcaaacctagccggcgcccaacagcgcggtagcagcgaggtgtatttttagctcccgggcgggcagccccgcccccccctccccgcctccttgtttcccccaatgggagatggagtttccgacacgtcatcgcgcggctgtgcaggagctgtccaatcggcgctcggggagaatggcgtaattaaaaagcggcggaagaaggtgggagggtcatgacgcagcgagtttcagtcgtgacttttctgggggcatcgcggcgtcccctttttttgcctttaaagtaaaacgtcgccccgacgcaccccccgcgtatttcggggggcggaggcggcgggccacggcgcgaagaggggcggtgctgacgccggccggtcacgtgggcgtgttgtgggggggaggggcgccgccgcgcggtcggttccgggcggttgggagcgcgcgagctagcgagcgagaggcagccgcgcccgccgccgcccctgctctgtatgccgctctctcccggcgcggccgccgccgatcacagcagcaggagccaccgccgccgcggttgatgtggttgggccggggctgaggaggccgccaagatgccgcagtccaagtcccggaagatcgcgatcctgggctaccggtctgtggggaaatcctcattgacgattcaatttgttgaaggccaatttgtggactcctacgatccaaccatagaaaacacttttacaaagttgatcacagtaaatggacaagaatatcatcttcaacttgtagacacagccgggcaagatgaatattctatctttcctcagacatactccatagatattaatggctatattcttgtgtattctgttacatcaatcaaaagttttgaagtgattaaagttatccatggcaaattgttggatatggtggggaaagtacaaatacctattatgttggttgggaataagaaagacctgcatatggaaaggtatgtagcttttataaagtcaaatctaagatgatttagtcactgaagtatcattttaattattgttctgatgtcaagaatatttttagctgtagcatttttatccgttcagaggtgttatggtcgtgtgcagcagaagcaaaagtggaatagaaatctcacattcctctagaaaagagagagcaaactttataggaaactacctttaggttatctgccactttgcataaagcaaattctaaaaagacatagtgctcatttatgcagcaagtggtttttgagtaccagggtttgggatttagtgtaggagc

SEQ ID NO: 454840 - DNA, 777 bp, Homo sapiens
gcggagtattccaggcgcctgcaactaaacgtggccgggtctgcaagctaggtgccagcggggaaagtttccctgcttcttatcgtctgctttaacgccttaaatagcccgctgaaggctgcagcaggtgctaggtagcagcctcccggccctcgggaaaggcggggtggggaggcgagagcagcttagcctcctcgacctcccttcctggtgacggacgaacagttcccgtagaatttcgcttcaccgagtgaccttgagcccagggcgacggtcagcttgttaattcctggctgcaggaactttgtgagaattttaatgcatggaaaagctgtccatgttccaactgctgtacatccaaaagtctcagtgtaatagcaggaccaaaatattctgtcaatcagctgaccatatacttaatgactcctaaaatctcgtggacttctaagaaagcgccatggcctgtgctgctgttatgattcctgggttgttgcggtgctctgttggagccatccgtattgaggctgcgtcactgagattgacactcagcactttgcgccaccttactctaaccagcataatgaaatccaaaaggaaaactgatcacatggagagaactgcaagtgtccttcgacgggagagcaacttatttcatcaagggagaaagcactaacatctgagaaaggaaagtggacgagctcttgttacccttctaatgtacagattttttccaccatattcagactatagaaagctaatctaccacctgaaggggtg

SEQ ID NO: 454841 - DNA, 709 bp, Homo sapiens
acggggtttcaccctgttggtcaggttggtctcaaactcctgacctcaggggatccacctgctttggcctcccaaagtgctgggaaaaattattaactcaatcctttaacttgttatgggtctgctcagattttctttcttcttgagtcagatttggtagtttatgtcattttaggaatgtgtgcatttcatgtaagttagctaattttttggcatatagttgttcatggaattcctttataattctttttatttctataagctttgtgatgatatctcctcttttattcttgattttagtaattttttttcatagtcttgcaaaggtttgtcaattctgtttaatttaccaatttttaaaattgcttcaacaataatcatttatttggctttctttttagggttgatttctttattccaggagtctctgtggttggtgggttttcaatatgctccagtcccagactgctagaacaagagagagtgatagaattggcagtgaaatatacgaaccaccctcctgccctctgggttcacaatacggtaagcacactgcctgtttaaacgcgatgatctgggtatctctgccacccacaaaatttgtgttaagctcatttgattcacctaagaaacctgggcttgagtaaaagggtacatgcccagaaagagcttctaagaaaggtcaaagaaactttgatgcattaagtat

SEQ ID NO: 454842 - DNA, 1515 bp, Homo sapiens
gcggagtattccaggcgcctgcaactaaacgtggccgggtctgcaagctaggtgccagcggggaaagtttccctgcttcttatcgtctgctttaacgccttaaatagcccgctgaaggctgcagcaggtgctaggtagcagcctcccggccctcgggaaaggcggggtggggaggcgagagcagcttagcctcctcgacctcccttcctggtgacggacgaacagttcccgtagaatttcgcttcaccgagtgaccttgagcccagggcgacggtcagcttgttaattcctggctgcaggaactttgtgagaattttaatgcatggaaaagctgtccatgttccaactgctgtacatccaaaagtctcagtgtaatagcaggaccaaaatattctgtcaatcagctgaccatatacttaatgactcctaaaatctcgtggacttctaagaaagcgccatggcctgtgctgctgttatgattcctgggttgttgcggtgctctgttggagccatccgtattgaggctgcgtcactgagattgacactcagcactttgcgccaccttactctaaccagcataatgaaatccaaaaggaaaactgatcacatggagagaactgcaagtgtccttcgacgggagattgtggcagcagctaaggtgtgtggagctgccagtgagtcaccgtcagtgaagagcctccgcttgcttgttgctgatcaagacttttcctttaaagctggccagtgggttgatttctttattccaggagtctctgtggttggtgggttttcaatatgctccagtcccagactgctagaacaagagagagtgatagaattggcagtgaaatatacgaaccaccctcctgccctctgggttcacaatacgtgtacacttgactgtgaagtggctgtgagagtgggtggagagttcttctttgaccctcagcctgcggatgcctctagaaacctcgtgttgattgcaggaggagtcggaattaaccctctgctttccatcctgcggcacgcagcagatctcctcagagagcaggcaaacaaaagaaatggatatgagataggaacaataaaactattctacagtgcaaaaaataccagcgaactcctgtttaagaaaaatatccttgatttagtaaatgaatttcctgagaagattgcatgcagtttgcatgttacaaaacagactacacaaatcaatgcggaactcaagccatacatcacggaaggaagaataacggagaaggagataagagatcatatttcaaaagagactttgttctatatttgtggcccacctccaatgacagactttttctccaagcaactggaaaacaaccatgtacccaaagaacacatttgctttgagaagtggtggtaggaggcagacaaaggcagaaaaaataaagagcaagtagagcagcaactgagggagccatcctcacagacttgtggcagcagctaaggtgcgtagacatgacgggatcctctagatcacct

SEQ ID NO: 454843 - DNA, 1119 bp, Homo sapiens
gcggagtattccaggcgcctgcaactaaacgtggccgggtctgcaagctaggtgccagcggggaaagtttccctgcttcttatcgtctgctttaacgccttaaatagcccgctgaaggctgcagcaggtgctaggtagcagcctcccggccctcgggaaaggcggggtggggaggcgagagcagcttagcctcctcgacctcccttcctggtgacggacgaacagttcccgtagaatttcgcttcaccgagtgaccttgagcccagggcgacggtcagcttgttaattcctggctgcaggaactttgtgagaattttaatgcatggaaaagctgtccatgttccaactgctgtacatccaaaagtctcagtgtaatagcaggaccaaaatattctgtcaatcagctgaccatatacttaatgactcctaaaatctcgtggacttctaagaaagcgccatggcctgtgctgctgttatgattcctgggttgttgcggtgctctgttggagccatccgtattgaggctgcgtcactgagattgacactcagcactttgcgccaccttactctaaccagcataatgaaatccaaaaggaaaactgatcacatggagagaactgcaagtgtccttcgacgggagattgtggcagcagctaaggtgtgtggagctgccagtgagtcaccgtcagtgaagagcctccgcttgcttgttgctgatcaagacttttcctttaaagctggccagtgggttgatttctttattccaggagtctctgtggttggtgggttttcaatatgctccagtcccagactgctagaacaagagagagtgatagaattggcagtgaaatatacgaaccaccctcctgccctctgggttcacaatacgtgtacacttgactgtgaagtggctgtgagagtgggtggagagttcttctttgaccctcagcctgcggatgcctctagaaacaaagcagatgaaagaataaaggaaatagataccttttgaatttgaggggtgttgagccatgaatggcacatacctgcatagctcccgagtcaaacctattcaaggctttccagaaatcagatacatcatgtaaaaatagtgcttctcaa

SEQ ID NO: 454844 - DNA, 521 bp, Homo sapiens
ctaggtgccagcggggaaagtttccctgcttcttatcgtctgctttaacgccttaaatagcccgctgaaggctgcagcaggtgctaggtagcagcctcccggccctcgggaaaggcggggtggggaggcgagagcagcttagcctcctcgacctcccttcctggtgacggacgaacagttcccgtagaatttcgcttcaccgagtgaccttgagcccagggcgacggtcagcttgttaattcctggctgcaggtacattccgcttcttcctcaccccagacgccttaaaataccctaaattgtgttgctgaaaggaccaagccctggaaggcagggattgagttctagtcttctgtttgccaggcttataacattattaacgacgatgatttttagtaatagtaataacatcaccttttattattgggaagttatgtgccagctattgcactaagtggaattgtcaactctaggagtttacatgttattccattttattaatctttaaactgaggtacaga

SEQ ID NO: 454845 - DNA, 1844 bp, Homo sapiens
gcggagtattccaggcgcctgcaactaaacgtggccgggtctgcaagctaggtgccagcggggaaagtttccctgcttcttatcgtctgctttaacgccttaaatagcccgctgaaggctgcagcaggtgctaggtagcagcctcccggccctcgggaaaggcggggtggggaggcgagagcagcttagcctcctcgacctcccttcctggtgacggacgaacagttcccgtagaatttcgcttcaccgagtgaccttgagcccagggcgacggtcagcttgttaattcctggctgcaggaactttgtgagaattttaatgcatggaaaagctgtccatgttccaactgctgtacatccaaaagtctcagtgtaatagcaggaccaaaatattctgtcaatcagctgaccatatacttaatgactcctaaaatctcgtggacttctaagaaagcgccatggcctgtgctgctgttatgattcctgggttgttgcggtgctctgttggagccatccgtattgaggctgcgtcactgagattgacactcagcactttgcgccaccttactctaaccagcataatgaaatccaaaaggaaaactgatcacatggagagaactgcaagtgtccttcgacgggagattgtggcagcagctaaggtgtgtggagctgccagtgagtcaccgtcagtgaagagcctccgcttgcttgttgctgatcaagacttttcctttaaagctggccagtgggttgatttctttattccaggagtctctgtggttggtgggttttcaatatgctccagtcccagactgctagaacaagagagagtgatagaattggcagtgaaatatacgaaccaccctcctgccctctgggttcacaatacgtgtacacttgactgtgaagtggctgtgagagtgggtggagagttcttctttgaccctcagcctgcggatgcctctagaaacctcgtgttgattgcaggaggagtcggaattaaccctctgctttccatcctgcggcacgcagcagatctcctcagagagcaggcaaacaaaagaaatggatatgagataggaacaataaaactattctacagtgcaaaaaataccagcgaactcctgtttaagaaaaatatccttgatttagtaaatgaatttcctgagaagattgcatgcagtttgcatgttacaaaacagactacacaaatcaatgcggaactcaagccatacatcacggaaggaagaataacggagaaggagataagagatcatatttcaaaagagactttgttctatatttgtggcccacctccaatgacagactttttctccaagcaactggaaaacaaccatgtacccaaagaacacatttgctttgagaagtggtggtaggaggcagacaaaggcagaaaaaataaagaggtgagatctactcaggagagctcctgtcctttgtggcatgattaattttttttatctctacttgagttgtcttattttttaaggctataaacttagtgaccagctggataataaaagccagctggcagacttaaatgataaactttttgcaaagacctcagtgatcaaactattttttactatactgattttctgttattaacaacgatttaattgtctcatgatgtaccatgattggtcagtatagatttttcttttgtctttaggcaaaaaaaagatatatacttatgtctaatcataggaaaatgtgatttttgagtataaaatgtgggctagctttaaattatttgacagccatctatatatcttatgtttaatgaaagtataatttaaatacaatcttaataattttactttg

SEQ ID NO: 454846 - DNA, 1469 bp, Homo sapiens
gcggagtattccaggcgcctgcaactaaacgtggccgggtctgcaagctaggtgccagcggggaaagtttccctgcttcttatcgtctgctttaacgccttaaatagcccgctgaaggctgcagcaggtgctaggtagcagcctcccggccctcgggaaaggcggggtggggaggcgagagcagcttagcctcctcgacctcccttcctggtgacggacgaacagttcccgtagaatttcgcttcaccgagtgaccttgagcccagggcgacggtcagcttgttaattcctggctgcaggaactttgtgagaattttaatgcatggaaaagctgtccatgttccaactgctgtacatccaaaagtctcagtgtaatagcaggaccaaaatattctgtcaatcagctgaccatatacttaatgactcctaaaatctcgtggacttctaagaaagcgccatggcctgtgctgctgttatgattcctgggttgttgcggtgctctgttggagccatccgtattgaggctgcgtcactgagattgacactcagcactttgcgccaccttactctaaccagcataatgaaatccaaaaggaaaactgatcacatggagagaactgcaagtgtccttcgacgggagattgtggcagcagctaaggtgtgtggagctgccagtgagtcaccgtcagtgaagagcctccgcttgcttgttgctgatcaagacttttcctttaaagctggccagtgggttgatttctttattccaggagtctctgtggttggtgggttttcaatatgctccagtcccagactgctagaacaagagagagtgatagaattggcagtgaaatatacgaaccaccctcctgccctctgggttcacaatacgtgtacacttgactgtgaagtggctgtgagagtgggtggagagttcttctttgaccctcagcctgcggatgcctctagaaaaaaatatccttgatttagtaaatgaatttcctgagaagattgcatgcagtttgcatgttacaaaacagactacacaaatcaatgcggaactcaagccatacatcacggaaggaagaataacggagaaggagataagagatcatatttcaaaagagactttgttctatatttgtggcccacctccaatgacagactttttctccaagcaactggaaaacaaccatgtacccaaagaacacatttgctttgagaagtggtggtaggaggcagacaaaggcagaaaaaataaagagggctctgtgtccaaagaacatgaggaaccaagcgtgaggaatgcaggagtgatgccaggagtgaggagccgagcaggtcaggcaggccctgccgagaatgtggcctcagccatcaaagtgggaatatctgggcggcttgagcctccagaagagcctttcttcttcttctttttggcggcccaacaggacgatagcagacaagggcct

SEQ ID NO: 454847 - DNA, 4151 bp, Homo sapiens
gttcacgccctggctggtttggattcgagaggaaaaatcattaaaggatctggagttttcaccccaaaactttaatcgttttgtcccttctttttttttcttgtctttcctccagcagctgcagactacataatgaaaaataacaaaagtgcccatgcgcgaggctgtgcaactaaccacccgacgattgcggggaggaggagtaagagtcggctaagcggcgcccagtgtcctactgcgcctgtgcgccggtggcgtgcgcagaggcctctgggtaggtggctcaaccccgcctctcagttgaggactctgaaggctgtttctgtggcgcttcccctgcgaggatggctaccctggttgtaaacaagctcggagcgggagtagacagtggccggcagggcagccgggggacagctgtagtgaaggtgctagagtgtggagtttgtgaagatgtcttttctttgcaaggagacaaagttccccgtcttttgctttgtggccataccgtctgtcatgactgtctcactcgcctacctcttcatggaagagcaatccgttgcccatttgatcgacaagtaacagacctaggtgattcaggtgtctggggattgaaaaaaaattttgctttattggagcttttggaacgactgcagaatgggcctattggtcagtatggagctgcagaagaatccattgggatatctggagagagcatcattcgttgtgatgaagatgaagctcaccttgcctctgtatattgcactgtgtgtgcaactcatttgtgctctgagtgttctcaagttactcattctacaaagacattagcaaagcacaggcgagttcctctagctgataaacctcatgagaaaactatgtgctctcagcaccaggtgcatgccattgagtttgtttgcttggaagaaggttgtcaaactagcccactcatgtgctgtgtctgcaaagaatatggaaaacaccagggtcacaagcattcagtattggaaccagaagctaatcagatccgagcatcaattttagatatggctcactgcatacggaccttcacagaggaaatctcagattattccagaaaattagttggaattgtgcagcacattgaaggaggagaacaaatcgtggaagatggaattggaatggctcacacagaacatgtaccagggactgcagagaatgcccggtcatgtattcgagcttatttttatgatctacatgaaactctgtgtcgtcaagaagaaatggctctaagtgttgttgatgctcatgttcgtgaaaaattgatttggctcaggcagcaacaagaagatatgactattttgttgtcagaggtttctgcagcctgcctccactgtgaaaagactttgcagcaggatgattgtagagttgtcttggcaaaacaggaaattacaaggttactggaaacattgcagaaacagcagcagcagtttacagaagttgcagatcacattcagttggatgccagcatccctgtcacttttacaaaggataatcgagttcacattggaccaaaaatggaaattcgggtcgttacgttaggattggatggtgctggaaaaactactatcttgtttaagttaaaacaggatgaattcatgcagcccattccaacaattggttttaacgtggaaactgtagaatataaaaatctaaaattcactatttgggatgtaggtggaaaacacaaattaagaccattgtggaaacattattacctcaatactcaagctgttgtgtttgttgtagatagcagtcatagagacagaattagtgaagcacacagcgaacttgcaaagttgttaacggaaaaagaactccgagatgctctgctcctgatttttgctaacaaacaggatgttgctggagcactgtcagtagaagaaatcactgaactactcagtctccataaattatgctgtggccgtagctggtatattcagggctgtgatgctcgaagtggtatgggactgtatgaagggttggactggctctcacggcaacttgtagctgctggagtattggatgttgcttgattttaaaggcagcagttgtttgaagttttgtggttaaaagtaactttgcacatagtatgttttaagaaattatacatctcaaaagatggtaatttaggatgcatatatatatatatatatataaaggaatcttggattgggaattcagtactttgctttaaaaaaattttgtggcagaattaaatttctaattgagcagattagattgaattaaatagaaacttattgaatatacattcttttaaaaagtatatttgttatttaagtttttcagataatatgtgaccaatatactgggaaagaggtagtcacagagaaagggtaagtgaaggtttattctttcagtgaaaaaagaatagccaattgagtgcctaatgagacctctgtgtgaagcaagtgaagtatagctgcttcttttaacctgccttttcactgaatgttggcagcatttagtagtagaaatgacagttgcttaatgaaatagaatccaaactacatatttggataataggattactttatgtttatgttcagagttaacagaacacctttaatgctaagaactataaggtacagaaaattaatactttatatagtgttttattaactttctcctacagcattttgtataaaacacaatgagggagtgaaatgttacccaattaggcttgtcaggttagtaataaactgaacagtaataaaactgtggaagtaattggatctgaatttatgaaagacccatttccaggactgaacctaggtcagagctctaaattggtccttctatttttcaacaaatttaaagtaatatttctttctaatataatattgcatcctttgtgggaatgactataggtaaaatgtagtaagtaacgcagaaccagggttggctttatttaaaagctagtgacctaaatagaaagcgaacttcaagagaagttgtaagtacagtggcaaatgcttattacttacttcaaactgtttcccaaaataagtgcatttattttgacaataaaacttaaggctgttcatgagaaggccttgaaaagttactctagaggaaaaatgtctaaagaaaaaaaaaattcaaaaagtttacattaattattcagtgttgtgagtaaataaaaatgtgtgctctttactgtttttcatttttaaagaatattattatggaagcacgatttatttaaataggtacattgagacttttttttttaatgttctgatacattaggatgaagttaaatcttaaatcttattagttgaattgttgtaaggacagtgatgtctggtaacaagatgtgactttttggtagcactgttgtggttcattcttttcaaatctatttttgtttaaaaacaatacaagttttagaaaacaaagcattaaaaaaaaagcctatcagtattatgggcaatatgtaaataaataaatgtaatatttcatcctttatttttcaggtaaaaggtcatgctgttacaggtgtagtttgtgtgcataaataatacttccgaattaaattatttaatatttgactgatttcaataactgtgaaaaataaaaaaggtgttgtattgcttgtgagaacttgaactgtttactagttaattgaagaaaaagtgtaacactaaggtgaacttgcttcccttttcactaattttgctaaactttgtaatgcacattcttagcatataactgaacacagttgaaaaattgtgcctgattataatgtatgtataatggtaggtgtttgtgtgtgattcatttttaaagaaatatttttctcaagctcctattactatttgtggttgtattatttcactaatcattagttaagactgtgctagtcttccctgggaaactaagaagagagcttttttatatacagtatattagaattttcctagtagctgaatttctgtattaggtctaaatattactgtatgttatataaagcaggtatgtcaagtgtatagccgtagtctataattcaggaatgctttataaccatcagaagccattatttgcactacatatatgataagtatagacagcaataaaatgttaagatcattttt

SEQ ID NO: 454848 - DNA, 2639 bp, Homo sapiens
gttcacgccctggctggtttggattcgagaggaaaaatcattaaaggatctggagttttcaccccaaaactttaatcgttttgtcccttctttttttttcttgtctttcctccagcagctgcagactacataatgaaaaataacaaaagtgcccatgcgcgaggctgtgcaactaaccacccgacgattgcggggaggaggagtaagagtcggctaagcggcgcccagtgtcctactgcgcctgtgcgccggtggcgtgcgcagaggcctctgggtaggtggctcaaccccgcctctcagttgaggactctgaaggctgtttctgtggcgcttcccctgcgaggatggctaccctggttgtaaacaagctcggagcgggagtagacagtggccggcagggcagccgggggacagctgtagtgaaggtgctagagtgtggagtttgtgaagatgtcttttctttgcaaggagacaaagttccccgtcttttgctttgtggccataccgtctgtcatgactgtctcactcgcctacctcttcatggaagagcaatccgttgcccatttgatcgacaagtaacagacctaggtgattcaggtgtctggggattgaaaaaaaattttgctttattggagcttttggaacgactgcagaatgggcctattggtcagtatggagctgcagaagaatccattgggatatctggagagagcatcattcgttgtgatgaagatgaagctcaccttgcctctgtatattgcactgtgtgtgcaactcatttgtgctctgagtgttctcaagttactcattctacaaagacattagcaaagcacaggcgagttcctctagctgataaacctcatgagaaaactatgtgctctcagcaccaggtgcatgccattgagtttgtttgcttggaagaaggttgtcaaactagcccactcatgtgctgtgtctgcaaagaatatggaaaacaccagggtcacaagcattcagtattggaaccagaagctaatcagatccgagcatcaattttagatatggctcactgcatacggaccttcacagaggaaatctcagattattccagaaaattagttggaattgtgcagcacattgaaggaggagaacaaatcgtggaagatggaattggaatggctcacacagaacatgtaccagggactgcagagaatgcccggtcatgtattcgagcttatttttatgatctacatgaaactctgtgtcgtcaagaagaaatggctctaagtgttgttgatgctcatgttcgtgaaaaattgatttggctcaggcagcaacaagaagatatgactattttgttgtcagaggtttctgcagcctgcctccactgtgaaaagactttgcagcaggatgattgtagagttgtcttggcaaaacaggaaattacaaggttactggaaacattgcagaaacagcagcagcagtttacagaagttgcagatcacattcagttggatgccagcatccctgtcacttttacaaaggataatcgagttcacattggaccaaaaatggaaattcgggtcgttacgttaggattggatggtgctggaaaaactactatcttgtttaagttaaaacaggatgaattcatgcagcccattccaacaattggttttaacgtggaaactgtagaatataaaaatctaaaattcactatttgggatgtaggtggaaaacacaaattaagaccattgtggaaacattattacctcaatactcaagctgttgtgtttgttgtagatagcagtcatagagacagaattagtgaagcacacagcgaacttgcaaagttgttaacggaaaaagaactccgagatgctctgctcctgatttttgctaacaaacaggatgttgctggagcactgtcagtagaagaaatcactgaactactcagtctccataaattatgctgtggccgtagctgtttttcagataatatgtgaccaatatactgggaaagaggtagtcacagagaaagggtaaaaggtcatgctgttacaggtgtagtttgtgtgcataaataatacttccgaattaaattatttaatatttgactgatttcaataactgtgaaaaataaaaaaggtgttgtattgcttgtgagaacttgaactgtttactagttaattgaagaaaaagtgtaacactaaggtgaacttgcttcccttttcactaattttgctaaactttgtaatgcacattcttagcatataactgaacacagttgaaaaattgtgcctgattataatgtatgtataatggtaggtgtttgtgtgtgattcatttttaaagaaatatttttctcaagctcctattactatttgtggttgtattatttcactaatcattagttaagactgtgctagtcttccctgggaaactaagaagagagcttttttatatacagtatattagaattttcctagtagctgaatttctgtattaggtctaaatattactgtatgttatataaagcaggtatgtcaagtgtatagccgtagtctataattcaggaatgctttataaccatcagaagccattatttgcactacatatatgataagtatagacagcaataaaatgttaagatcattttt

SEQ ID NO: 454849 - DNA, 4280 bp, Homo sapiens
gttcacgccctggctggtttggattcgagaggaaaaatcattaaaggatctggagttttcaccccaaaactttaatcgttttgtcccttctttttttttcttgtctttcctccagcagctgcagactacataatgaaaaataacaaaagtgcccatgcgcgaggctgtgcaactaaccacccgacgattgcggggaggaggagtaagagtcggctaagcggcgcccagtgtcctactgcgcctgtgcgccggtggcgtgcgcagaggcctctgggtaggtggctcaaccccgcctctcagttgaggactctgaaggctgtttctgtggcgcttcccctgcgaggatggctaccctggttgtaaacaagctcggagcgggagtagacagtggccggcagggcagccgggggacagctgtagtgaaggtgctagagtgtggagtttgtgaagatgtcttttctttgcaaggagacaaagttccccgtcttttgctttgtggccataccgtctgtcatgactgtctcactcgcctacctcttcatggaagagcaatccgttgcccatttgatcgacaagtaacagacctaggtgattcaggtgtctggggattgaaaaaaaattttgctttattggagcttttggaacgactgcagaatgggcctattggtcagtatggagctgcagaagaatccattgggatatctggagagttctaccaagaataaagtgaaaagaggaagaagattatggaatagtaagaaagatatgtaagcaacagtagagaagaggatgcaaaagtagtcaacagtaaaactcaatgagagaaagaaaaactcgatagcatcattcgttgtgatgaagatgaagctcaccttgcctctgtatattgcactgtgtgtgcaactcatttgtgctctgagtgttctcaagttactcattctacaaagacattagcaaagcacaggcgagttcctctagctgataaacctcatgagaaaactatgtgctctcagcaccaggtgcatgccattgagtttgtttgcttggaagaaggttgtcaaactagcccactcatgtgctgtgtctgcaaagaatatggaaaacaccagggtcacaagcattcagtattggaaccagaagctaatcagatccgagcatcaattttagatatggctcactgcatacggaccttcacagaggaaatctcagattattccagaaaattagttggaattgtgcagcacattgaaggaggagaacaaatcgtggaagatggaattggaatggctcacacagaacatgtaccagggactgcagagaatgcccggtcatgtattcgagcttatttttatgatctacatgaaactctgtgtcgtcaagaagaaatggctctaagtgttgttgatgctcatgttcgtgaaaaattgatttggctcaggcagcaacaagaagatatgactattttgttgtcagaggtttctgcagcctgcctccactgtgaaaagactttgcagcaggatgattgtagagttgtcttggcaaaacaggaaattacaaggttactggaaacattgcagaaacagcagcagcagtttacagaagttgcagatcacattcagttggatgccagcatccctgtcacttttacaaaggataatcgagttcacattggaccaaaaatggaaattcgggtcgttacgttaggattggatggtgctggaaaaactactatcttgtttaagttaaaacaggatgaattcatgcagcccattccaacaattggttttaacgtggaaactgtagaatataaaaatctaaaattcactatttgggatgtaggtggaaaacacaaattaagaccattgtggaaacattattacctcaatactcaagctgttgtgtttgttgtagatagcagtcatagagacagaattagtgaagcacacagcgaacttgcaaagttgttaacggaaaaagaactccgagatgctctgctcctgatttttgctaacaaacaggatgttgctggagcactgtcagtagaagaaatcactgaactactcagtctccataaattatgctgtggccgtagctggtatattcagggctgtgatgctcgaagtggtatgggactgtatgaagggttggactggctctcacggcaacttgtagctgctggagtattggatgttgcttgattttaaaggcagcagttgtttgaagttttgtggttaaaagtaactttgcacatagtatgttttaagaaattatacatctcaaaagatggtaatttaggatgcatatatatatatatatatataaaggaatcttggattgggaattcagtactttgctttaaaaaaattttgtggcagaattaaatttctaattgagcagattagattgaattaaatagaaacttattgaatatacattcttttaaaaagtatatttgttatttaagtttttcagataatatgtgaccaatatactgggaaagaggtagtcacagagaaagggtaagtgaaggtttattctttcagtgaaaaaagaatagccaattgagtgcctaatgagacctctgtgtgaagcaagtgaagtatagctgcttcttttaacctgccttttcactgaatgttggcagcatttagtagtagaaatgacagttgcttaatgaaatagaatccaaactacatatttggataataggattactttatgtttatgttcagagttaacagaacacctttaatgctaagaactataaggtacagaaaattaatactttatatagtgttttattaactttctcctacagcattttgtataaaacacaatgagggagtgaaatgttacccaattaggcttgtcaggttagtaataaactgaacagtaataaaactgtggaagtaattggatctgaatttatgaaagacccatttccaggactgaacctaggtcagagctctaaattggtccttctatttttcaacaaatttaaagtaatatttctttctaatataatattgcatcctttgtgggaatgactataggtaaaatgtagtaagtaacgcagaaccagggttggctttatttaaaagctagtgacctaaatagaaagcgaacttcaagagaagttgtaagtacagtggcaaatgcttattacttacttcaaactgtttcccaaaataagtgcatttattttgacaataaaacttaaggctgttcatgagaaggccttgaaaagttactctagaggaaaaatgtctaaagaaaaaaaaaattcaaaaagtttacattaattattcagtgttgtgagtaaataaaaatgtgtgctctttactgtttttcatttttaaagaatattattatggaagcacgatttatttaaataggtacattgagacttttttttttaatgttctgatacattaggatgaagttaaatcttaaatcttattagttgaattgttgtaaggacagtgatgtctggtaacaagatgtgactttttggtagcactgttgtggttcattcttttcaaatctatttttgtttaaaaacaatacaagttttagaaaacaaagcattaaaaaaaaagcctatcagtattatgggcaatatgtaaataaataaatgtaatatttcatcctttatttttcaggtaaaaggtcatgctgttacaggtgtagtttgtgtgcataaataatacttccgaattaaattatttaatatttgactgatttcaataactgtgaaaaataaaaaaggtgttgtattgcttgtgagaacttgaactgtttactagttaattgaagaaaaagtgtaacactaaggtgaacttgcttcccttttcactaattttgctaaactttgtaatgcacattcttagcatataactgaacacagttgaaaaattgtgcctgattataatgtatgtataatggtaggtgtttgtgtgtgattcatttttaaagaaatatttttctcaagctcctattactatttgtggttgtattatttcactaatcattagttaagactgtgctagtcttccctgggaaactaagaagagagcttttttatatacagtatattagaattttcctagtagctgaatttctgtattaggtctaaatattactgtatgttatataaagcaggtatgtcaagtgtatagccgtagtctataattcaggaatgctttataaccatcagaagccattatttgcactacatatatgataagtatagacagcaataaaatgttaagatcattttt

SEQ ID NO: 454850 - DNA, 1640 bp, Homo sapiens
gttcacgccctggctggtttggattcgagaggaaaaatcattaaaggatctggagttttcaccccaaaactttaatcgttttgtcccttctttttttttcttgtctttcctccagcagctgcagactacataatgaaaaataacaaaagtgcccatgcgcgaggctgtgcaactaaccacccgacgattgcggggaggaggagtaagagtcggctaagcggcgcccagtgtcctactgcgcctgtgcgccggtggcgtgcgcagaggcctctgggtaggtggctcaaccccgcctctcagttgaggactctgaaggctgtttctgtggcgcttcccctgcgaggatggctaccctggttgtaaacaagctcggagcgggagtagacagtggccggcagggcagccgggggacagctgtagtgaaggtgctagagtgtggagtttgtgaagatgtcttttctttgcaaggagacaaagttccccgtcttttgctttgtggccataccgtctgtcatgactgtctcactcgcctacctcttcatggaagagcaatccgttgcccatttgatcgacaagtaacagacctaggtgattcaggtgtctggggattgaaaaaaaattttgctttattggagcttttggaacgactgcagaatgggcctattggtcagtatggagctgcagaagaatccattgggatatctggagagagcatcattcgttgtgatgaagatgaagctcaccttgcctctgtatattgcactgtgtgtgcaactcatttgtgctctgagtgttctcaagttactcattctacaaagacattagcaaagcacaggcgagttcctctagctgataaacctcatgagaaaactatgtgctctcagcaccaggtgcatgccattgagtttgtttgcttggaagaaggttgtcaaactagcccactcatgtgctgtgtctgcaaagaatatggaaaacaccagggtcacaagcattcagtattggaaccagaagctaatcagatccgagcatcaattttagatatggctcactgcatacggaccttcacagaggaaatctcagattattccagaaaattagttggaattgtgcagcacattgaaggaggagaacaaatcgtggaagatggaattggaatggctcacacagaacatgtaccagggactgcagagaatgcccggtcatgtattcgagcttatttttatgatctacatgaaactctgtgtcgtcaagaagaaatggctctaagtgttgttgatgctcatgttcgtgaaaaattgatttggctcaggcagcaacaagaagatatgactattttgttgtcagaggtttctgcagcctgcctccactgtgaaaagactttgcagcagttcccactacagagaaaattgaacagaggaatggatggaacatcacaaattgatcttcacttctgagaacataatttaatcatccatccactctaaacaaattatgcatcatctaaagttcttggcatgatactggatgctgaatatttattcatttagcaaatatgtattgagtagctaacatatgccatgtatttaaaatatatcagtgaacacaataagcaaaaagccataatcttgtgaaattagcat

SEQ ID NO: 454851 - DNA, 2668 bp, Homo sapiens
gttcacgccctggctggtttggattcgagaggaaaaatcattaaaggatctggagttttcaccccaaaactttaatcgttttgtcccttctttttttttcttgtctttcctccagcagctgcagactacataatgaaaaataacaaaagtgcccatgcgcgaggctgtgcaactaaccacccgacgattgcggggaggaggagtaagagtcggctaagcggcgcccagtgtcctactgcgcctgtgcgccggtggcgtgcgcagaggcctctgggtaggtggctcaaccccgcctctcagttgaggactctgaaggctgtttctgtggcgcttcccctgcgaggatggctaccctggttgtaaacaagctcggagcgggagtagacagtggccggcagggcagccgggggacagctgtagtgaaggtgctagagtgtggagtttgtgaagatgtcttttctttgcaaggagacaaagttccccgtcttttgctttgtggccataccgtctgtcatgactgtctcactcgcctacctcttcatggaagagcaatccgttgcccatttgatcgacaagtaacagacctaggtgattcaggtgtctggggattgaaaaaaaattttgctttattggagcttttggaacgactgcagaatgggcctattggtcagtatggagctgcagaagaatccattgggatatctggagagagcatcattcgttgtgatgaagatgaagctcaccttgcctctgtatattgcactgtgtgtgcaactcatttgtgctctgagtgttctcaagttactcattctacaaagacattagcaaagcacaggcgagttcctctagctgataaacctcatgagaaaactatgtgctctcagcaccaggtgcatgccattgagtttgtttgcttggaagaaggttgtcaaactagcccactcatgtgctgtgtctgcaaagaatatggaaaacaccagggtcacaagcattcagtattggaaccagaagctaatcagatccgagcatcaattttagatatggctcactgcatacggaccttcacagaggaaatctcagattattccagaaaattagttggaattgtgcagcacattgaaggaggagaacaaatcgtggaagatggaattggaatggctcacacagaacatgtaccagggactgcagagaatgcccggtcatgtattcgagcttatttttatgatctacatgaaactctgtgtcgtcaagaagaaatggctctaagtgttgttgatgctcatgttcgtgaaaaattgatttggctcaggcagcaacaagaagatatgactattttgttgtcagaggtttctgcagcctgcctccactgtgaaaagactttgcagcaggatgattgtagagttgtcttggcaaaacaggaaattacaaggttactggaaacattgcagaaacagcagcagcagtttacagaagttgcagatcacattcagttggatgccagcatccctgtcacttttacaaaggataatcgagttcacattggaccaaaaatggaaattcgggtcgttacgttaggattggatggtgctggaaaaactactatcttgtttaagttaaaacaggatgaattcatgcagcccattccaacaattggttttaacgtggaaactgtagaatataaaaatctaaaattcactatttgggatgtaggtggaaaacacaaattaagaccattgtggaaacattattacctcaatactcaagctgttgtgtttgttgtagatagcagtcatagagacagaattagtgaagcacacagcgaacttgcaaagttgttaacggaaaaagaactccgagatgctctgctcctgatttttgctaacaaacaggatgttgctggagcactgtcagtagaagaaatcactgaactactcagtctccataaattatgctgtggccgtagctggtatattcagggctgtgatgctcgaagtgtttttcagataatatgtgaccaatatactgggaaagaggtagtcacagagaaagggtaaaaggtcatgctgttacaggtgtagtttgtgtgcataaataatacttccgaattaaattatttaatatttgactgatttcaataactgtgaaaaataaaaaaggtgttgtattgcttgtgagaacttgaactgtttactagttaattgaagaaaaagtgtaacactaaggtgaacttgcttcccttttcactaattttgctaaactttgtaatgcacattcttagcatataactgaacacagttgaaaaattgtgcctgattataatgtatgtataatggtaggtgtttgtgtgtgattcatttttaaagaaatatttttctcaagctcctattactatttgtggttgtattatttcactaatcattagttaagactgtgctagtcttccctgggaaactaagaagagagcttttttatatacagtatattagaattttcctagtagctgaatttctgtattaggtctaaatattactgtatgttatataaagcaggtatgtcaagtgtatagccgtagtctataattcaggaatgctttataaccatcagaagccattatttgcactacatatatgataagtatagacagcaataaaatgttaagatcattttt

SEQ ID NO: 454852 - DNA, 3847 bp, Homo sapiens
gttcacgccctggctggtttggattcgagaggaaaaatcattaaaggatctggagttttcaccccaaaactttaatcgttttgtcccttctttttttttcttgtctttcctccagcagctgcagactacataatgaaaaataacaaaagtgcccatgcgcgaggctgtgcaactaaccacccgacgattgcggggaggaggagtaagagtcggctaagcggcgcccagtgtcctactgcgcctgtgcgccggtggcgtgcgcagaggcctctgggtaggtggctcaaccccgcctctcagttgaggactctgaaggctgtttctgtggcgcttcccctgcgaggatggctaccctggttgtaaacaagctcggagcgggagtagacagtggccggcagggcagccgggggacagctgtagtgaaggtgctagagtgtggagtttgtgaagatgtcttttctttgcaaggagacaaagttccccgtcttttgctttgtggccataccgtctgtcatgactgtctcactcgcctacctcttcatggaagagcaatccgttgcccatttgatcgacaagtaacagacctaggtgattcaggtgtctggggattgaaaaaaaattttgctttattggagcttttggaacgactgcagaatgggcctattggtcagtatggagctgcagaagaatccattgggatatctggagagagcatcattcgttgtgatgaagatgaagctcaccttgcctctgtatattgcactgtgtgtgcaactcatttgtgctctgagtgttctcaagttactcattctacaaagacattagcaaagcacaggcgagttcctctagctgataaacctcatgagaaaactatgtgctctcagcaccaggtgcatgccattgagtttgtttgcttggaagaaggttgtcaaactagcccactcatgtgctgtgtctgcaaagaatatggaaaacaccagggtcacaagcattcagtattggaaccagaagctaatcagatccgagcatcaattttagatatggctcactgcatacggaccttcacagaggaaatctcagattattccagaaaattagttggaattgtgcagcacattgaaggaggagaacaaatcgtggaagatggaattggaatggctcacacagaacatgtaccagggactgcagagaatgcccggtcatgtattcgagcttatttttatgatctacatgaaactctgtgtcgtcaagaagaaatggctctaagtgttgttgatgctcatgttcgtgaaaaattgatttggctcaggcagcaacaagaagatatgactattttgttgtcagaggtttctgcagcctgcctccactgtgaaaagactttgcagcaggatgattgtagagttgtcttggcaaaacaggaaattacaaggttactggaaacattgcagaaacagcagcagcagtttacagaagttgcagatcacattcagttggatgccagcatccctgtcacttttacaaaggataatcgagttcacattggaccaaaaatggaaattcgggtcgttacgttaggattggatggtgctggaaaaactactatcttgtttaagttaaaacaggatgaattcatgcagcccattccaacaattggttttaacgtggaaactgtagaatataaaaatctaaaattcactatttgggatgtaggtggaaaacacaaattaagaccattgtggaaacattattacctcaatactcaagctgttgtgtttgttgtagatagcagtcatagagacagaattagtgaagcacacagcgaacttgcaaagttgttaacggaaaaagaactccgagatgctctgctcctgatttttgctaacaaacaggatgttgctggagcactgtcagtagaagaaatcactgaactactcagtctccataaattatgctgtggccgtagctggtatattcagggctgtgatgctcgaagtggtatgggactgtatgaagggttggactggctctcacggcaacttgtagctgctggagtattggatgttgcttgattttaaaggcagcagttgtttgaagttttgtggttaaaagtaactttgcacatagtatgttttaagaaattatacatctcaaaagatggtaatttaggatgcatatatatatatatatatataaaggaatcttggattgggaattcagtactttgctttaaaaaaattttgtggcagaattaaatttctaattgagcagattagattgaattaaatagaaacttattgaatatacattcttttaaaaagtatatttgttatttaagtttttcagataatatgtgaccaatatactgggaaagaggtagtcacagagaaagggtaagtgaaggtttattctttcagtgaaaaaagaatagccaattgagtgcctaatgagacctctgtgtgaagcaagtgaagtatagctgcttcttttaacctgccttttcactgaatgttggcagcatttagtagtagaaatgacagttgcttaatgaaatagaatccaaactacatatttggataataggattactttatgtttatgttcagagttaacagaacacctttaatgctaagaactataaggtacagaaaattaatactttatatagtgttttattaactttctcctacagcattttgtataaaacacaatgagggagtgaaatgttacccaattaggcttgtcaggttagtaataaactgaacagtaataaaactgtggaagtaattggatctgaatttatgaaagacccatttccaggactgaacctaggtcagagctctaaattggtccttctatttttcaacaaatttaaagtaatatttctttctaatataatattgcatcctttgtgggaatgactataggtaaaatgtagtaagtaacgcagaaccagggttggctttatttaaaagctagtgacctaaatagaaagcgaacttcaagagaagttgtaagtacagtggcaaatgcttattacttacttcaaactgtttcccaaaataagtgcatttattttgacaataaaacttaaggctgttcatgagaaggccttgaaaagttactctagaggaaaaatgtctaaagaaaaaaaaaattcaaaaagtttacattaattattcagtgttgtgagtaaataaaaatgtgtgctctttactgtttttcatttttaaagaatattattatggaagcacgatttatttaaataggtacattgagacttttttttttaatgttctgatacattaggatgaagttaaatcttaaatcttattagttgaattgttgtaaggacagtgatgtctggtaacaagatgtgactttttggtagcactgttgtggttcattcttttcaaatctatttttgtttaaaaacaatacaagttttagaaaacaaagcattaaaaaaaaagcctatcagtattatgggcaatatgtaaataaataaatgtaatatttcatcctttatttttcaggtaaaaggtcatgctgttacaggtgtagtttgtgtgcataaataatacttccgaattaaattatttaatatttgactgatttcaataactgtgaaaaataaaaaaggtgttgtattgcttgtgagaacttgaactgtttactagttaattgaagaaaaagtgtaacactaaggtgaacttgcttcccttttcactaattttgctaaacttttgttaattgcaccatttctttaggcattattaaaacttgaaccaccaaatttgtgttggtattggttggtggtggaatttccttttttttgggttattttttt

SEQ ID NO: 454853 - DNA, 4097 bp, Homo sapiens
gttcacgccctggctggtttggattcgagaggaaaaatcattaaaggatctggagttttcaccccaaaactttaatcgttttgtcccttctttttttttcttgtctttcctccagcagctgcagactacataatgaaaaataacaaaagtgcccatgcgcgaggctgtgcaactaaccacccgacgattgcggggaggaggagtaagagtcggctaagcggcgcccagtgtcctactgcgcctgtgcgccggtggcgtgcgcagaggcctctgggtaggtggctcaaccccgcctctcagttgaggactctgaaggctgtttctgtggcgcttcccctgcgaggatggctaccctggttgtaaacaagctcggagcgggagtagacagtggccggcagggcagccgggggacagctgtagtgaaggtgctagagtgtggagtttgtgaagatgtcttttctttgcaaggagacaaagttccccgtcttttgctttgtggccataccgtctgtcatgactgtctcactcgcctacctcttcatggaagagcaatccgttgcccatttgatcgacaagtaacagacctaggtgattcaggtgtctggggattgaaaaaaaattttgctttattggagcttttggaacgactgcagaatgggcctattggtcagtatggagctgcagaagaatccattgggatatctggagagagcatcattcgttgtgatgaagatgaagctcaccttgcctctgtatattgcactgtgtgtgcaactcatttgtgctctgagtgttctcaagttactcattctacaaagacattagcaaagcacaggcgagttcctctagctgataaacctcatgagaaaactatgtgctctcagcaccaggtgcatgccattgagtttgtttgcttggaagaaggttgtcaaactagcccactcatgtgctgtgtctgcaaagaatatggaaaacaccagggtcacaagcattcagtattggaaccagaagctaatcagatccgagcatcaattttagatatggctcactgcatacggaccttcacagaggaaatctcagattattccagaaaattagttggaattgtgcagcacattgaaggaggagaacaaatcgtggaagatggaattggaatggctcacacagaacatgtaccagggactgcagagaatgcccggtcatgtattcgagcttatttttatgatctacatgaaactctgtgtcgtcaagaagaaatggctctaagtgttgttgatgctcatgttcgtgaaaaattgatttggctcaggcagcaacaagaagatatgactattttgttgtcagaggtttctgcagcctgcctccactgtgaaaagactttgcagcaggatgattgtagagttgtcttggcaaaacaggaaattacaaggttactggaaacattgcagaaacagcagcagcagtttacagaagttgcagatcacattcagttggatgccagcatccctgtcacttttacaaaggataatcgagttcacattggaccaaaaatggaaattcgggtcgttacgttaggattggatggtgctggaaaaactactatcttgtttaagttaaaacaggatgaattcatgcagcccattccaacaattggttttaacgtggaaactgtagaatataaaaatctaaaattcactatttgggatgtaggtggaaaacacaaattaagaccattgtggaaacattattacctcaatactcaagctgttgtgtttgttgtagatagcagtcatagagacagaattagtgaagcacacagcgaacttgcaaagttgttaacggaaaaagaactccgagatgctctgctcctgatttttgctaacaaacaggatgttgctggagcactgtcagtagaagaaatcactgaactactcagtctccataaattatgctgtggccgtagctggtatattcagggctgtgatgctcgaagtggtatgggactgtatgaagggttggactggctctcacggcaacttgtagctgctggagtattggatgttgcttgattttaaaggcagcagttgtttgaagttttgtggttaaaagtaactttgcacatagtatgttttaagaaattatacatctcaaaagatggtaatttaggatgcatatatatatatatatatataaaggaatcttggattgggaattcagtactttgctttaaaaaaattttgtggcagaattaaatttctaattgagcagattagattgaattaaatagaaacttattgaatatacattcttttaaaaagtatatttgttatttaagtttttcagataatatgtgaccaatatactgggaaagaggtagtcacagagaaagggtaagtgaaggtttattctttcagtgaaaaaagaatagccaattgagtgcctaatgagacctctgtgtgaagcaagtgaagtatagctgcttcttttaacctgccttttcactgaatgttggcagcatttagtagtagaaatgacagttgcttaatgaaatagaatccaaactacatatttggataataggattactttatgtttatgttcagagttaacagaacacctttaatgctaagaactataaggtacagaaaattaatactttatatagtgttttattaactttctcctacagcattttgtataaaacacaatgagggagtgaaatgttacccaattaggcttgtcaggttagtaataaactgaacagtaataaaactgtggaagtaattggatctgaatttatgaaagacccatttccaggactgaacctaggtcagagctctaaattggtccttctatttttcaacaaatttaaagtaatatttctttctaatataatattgcatcctttgtgggaatgactataggtaaaatgtagtaagtaacgcagaaccagggttggctttatttaaaagctagtgacctaaatagaaagcgaacttcaagagaagttgtaagtacagtggacaataaaacttaaggctgttcatgagaaggccttgaaaagttactctagaggaaaaatgtctaaagaaaaaaaaaattcaaaaagtttacattaattattcagtgttgtgagtaaataaaaatgtgtgctctttactgtttttcatttttaaagaatattattatggaagcacgatttatttaaataggtacattgagacttttttttttaatgttctgatacattaggatgaagttaaatcttaaatcttattagttgaattgttgtaaggacagtgatgtctggtaacaagatgtgactttttggtagcactgttgtggttcattcttttcaaatctatttttgtttaaaaacaatacaagttttagaaaacaaagcattaaaaaaaaagcctatcagtattatgggcaatatgtaaataaataaatgtaatatttcatcctttatttttcaggtaaaaggtcatgctgttacaggtgtagtttgtgtgcataaataatacttccgaattaaattatttaatatttgactgatttcaataactgtgaaaaataaaaaaggtgttgtattgcttgtgagaacttgaactgtttactagttaattgaagaaaaagtgtaacactaaggtgaacttgcttcccttttcactaattttgctaaactttgtaatgcacattcttagcatataactgaacacagttgaaaaattgtgcctgattataatgtatgtataatggtaggtgtttgtgtgtgattcatttttaaagaaatatttttctcaagctcctattactatttgtggttgtattatttcactaatcattagttaagactgtgctagtcttccctgggaaactaagaagagagcttttttatatacagtatattagaattttcctagtagctgaatttctgtattaggtctaaatattactgtatgttatataaagcaggtatgtcaagtgtatagccgtagtctataattcaggaatgctttataaccatcagaagccattatttgcactacatatatgataagtatagacagcaataaaatgttaagatcattttt

SEQ ID NO: 454854 - DNA, 1027 bp, Homo sapiens
  misc_feature (2)..(3): n is a, c, g, or t
gnnggagtgggggagagagaggagaccaggacagctgctgagacctctaagaagtccagatactaagagcaaagatgtttcaaactgggggcctcattgtcttctacgggctgttagcccagaccatggcccagtttggaggcctgcccgtgcccctggaccagaccctgcccttgaatgtgaatccagccctgcccttgagtcccacaggtcttgcaggaagcttgacaaatgccctcagcaatggcctgctgtctgggggcctgttgggcattctggaaaaccttccgctcctggacatcctgaagcctggaggaggtacttctggtggcctccttgggggactgcttggaaaagtgacgtcagtgattcctggcctgaacaacatcattgacataaaggtcactgacccccagctgctggaacttggccttgtgcagagccctgatggccaccgtctctatgtcaccatccctctcggcataaagctccaagtgaatacgcccctggtcggtgcaagtctgttgaggctggctgtgaagctggacatcactgcagaaatcttagctgtgagagataagcaggagaggatccacctggtccttggtgactgcacccattcccctggaagcctgcaaatttctctgcttgatggacttggccccctccccattcaaggtcttctggacagcctcacagggatcttgaataaagtcctgcctgagttggttcagggcaacgtgtgccctctggtcaatgaggttctcagaggcttggacatcaccctggtgcatgacattgttaacatgctgatccacggactacagtttgtcatcaaggtctaagccttccaggaaggggctggcctctgctgagctgcttcccagtgctcacagatggctggcccatgtgctggaagatgacacagttgccttctctccgaggaacctgccccctctcctttcccaccaggcgtgtgtaacatcccatgtgcctcacctaataaaatggctcttcttctgcatca

SEQ ID NO: 454855 - DNA, 806 bp, Homo sapiens
agctctgtgagctccttgtgtcaaggatagcttttagagaaattcctagaattcacttcacctcctgcctttctgccttgatggtgttttgttctctggaacttttggtcttttccctgtatgggtcatggtgtaagggagattccttgttagaagagaagcagaagctcatcaggccagagcacaggaggatgaacctagcagccccatgtggcaggcactgtgtgccattcctattatgggaccattgggaaggaataaagggctccagagtgggtcttgcccctggtcggtgcaagtctgttgaggctggctgtgaagctggacatcactgcagaaatcttagctgtgagagataagcaggagaggatccacctggtccttggtgactgcacccattcccctggaagcctgcaaatttctctgcttgatggacttggccccctccccattcaaggtcttctggacagcctcacagggatcttgaataaagtcctgcctgagttggttcagggcaacgtgtgccctctggtcaatgaggttctcagaggcttggacatcaccctggtgcatgacattgttaacatgctgatccacggactacagtttgtcatcaaggtctaagccttccaggaaggggctggcctctgctgagctgcttcccagtgctcacagatggctggcccatgtgctggaagatgacacagttgccttctctccgaggaacctgccccctctcctttcccaccaggcgtgtgtaacatcccatgtgcctcacctaataaaatggctcttcttctgcatca

SEQ ID NO: 454856 - DNA, 483 bp, Homo sapiens
ccagcacactcacacacatgcacacattggtggactcaccacacacagacacacacactctcacccagcaccctcacacatatgcacacatcagtggactcaccacacataagtacacgtggatacacagacacactcactcaaacacatgctcacagagccctgactccaggcctgatggcttgcccagggtctcagcctcctcctgtccctctggggcatgagtttgatgatgagtcaatatcagtaacgctcactgaccttgagtctccatcctgattagggtcttcccccaacagaactatttcttgctgctcaatccatttcctctggcccagcttcccagtgctcacagatggctggcccatgtgctggaagatgacacagttgccttctctccgaggaacctgccccctctcctttcccaccaggcgtgtgtaacatcccatgtgcctcacctaataaaatggctcttcttctgca

SEQ ID NO: 454857 - DNA, 1074 bp, Homo sapiens
  misc_feature (2)..(3): n is a, c, g, or t
gnnggagtgggggagagagaggagaccaggacagctgctgagacctctaagaagtccagatactaagagcaaagatgtttcaaactgggggcctcattgtcttctacgggctgttagcccagaccatggcccagtttggaggcctgcccgtgcccctggaccagaccctgcccttgaatgtgaatccagccctgcccttgagtcccacaggtcttgcaggaagcttgacaaatgccctcagcaatggcctgctgtctgggggcctgttgggcattctggaaaaccttccgctcctggacatcctgaagcctggaggaggtacttctggtggcctccttgggggactgcttggaaaagtgacgtcagtgattcctggcctgaacaacatcattgacataaaggtcactgacccccagctgctggaacttggccttgtgcagagccctgatggccaccgtctctatgtcaccatccctctcggcataaagctccaagtgaatacgcccctggtcggtgcaagtctgttgaggctggctgtgaagctggacatcactgcagaaatcttagctgtgagagataagcaggagaggatccacctggtccttggtgactgcacccattcccctggaagcctgcaaatttctctgcttgatggacttggccccctccccattcaaggtcttctggacagcctcacagggatcttgaataaagtcctgcctgagttggttcagggcaacgtgtgccctctggtcaatgaggttctcagaggcttggacatcaccctggtgcatgacattgttaacatgctgatccacggactacagtttgtcatcaaggtctaagccttccaggaaggggctggcctctgctgagctgcccaacagaactatttcttgctgctcaatccatttcctctggcccagcttcccagtgctcacagatggctggcccatgtgctggaagatgacacagttgccttctctccgaggaacctgccccctctcctttcccaccaggcgtgtgtaacatcccatgtgcctcacctaataaaatggctcttcttctgcatca

SEQ ID NO: 454858 - DNA, 1221 bp, Homo sapiens
cctggcagccctgccacccccgccttcggctcccattggctgccacggcctgcagtgggctgcaccagggttcatccatcctccctgggcagagggaataagaggctgcctctgcccaccagtcctgccgcccaggacccgcagcagagacgacgcctgcagcaaggagaccaggaaggggtgagacaaggaagaggatgtctgagctggagaaggccatggtggccctcatcgacgttttccaccaatattctggaagggagggagacaagcacaagctgaagaaatccgaactcaaggagctcatcaacaatgagctttcccatttcttagaggaaatcaaagagcaggaggttgtggacaaagtcatggaaacactggacaatgatggagacggcgaatgtgacttccaggaattcatggcctttgttgccatggttactactgcctgccacgagttctttgaacatgagtgagattagaaagcagccaaacctttcctgtaacagagacggtcatgcaagaaagcagacagcaagggcttgcagcctagtaggagctgagctttccagccgtgttgtagctaattaggaagcttgatttgctttgtgattgaaaaattgaaaacctctttccaaaggctgttttaacggcctgcatcattctttctgctatattaggcctgtgtgtaagctgactggccccagggactcttgttaacagtaacttaggagtcaggtctcagtgataaagcgtgcaccgtgcagcccgccatggccgtgtagaccctaacccggagggaaccctgactacagaaattaccccggggcacccttaaaacttccactacctttaaaaaacaaagccttatccagcattatttgaaaacactgctgttctttaaatgcgttcctcatccatgcagataacagctggttggccggtgtggccctgcaagggcgtggtggcttcggcctgcttcccgggatgcgcctgatcaccaggtgaacgctcagcgctggcagcgctcctggaaaaagcaactccatcagaactcgcaatccgagccagctctgggggctccagcgtggcctccgtgacccatgcgattcaagtcgcggctgcaggatccttgcctccaacgtgcctccagcacatgcggcttccgagggcactaccgggggctctgagccaccgcgagggcctgcgttcaataaaaag

SEQ ID NO: 454859 - DNA, 677 bp, Homo sapiens
gccagcgtgagagggaacatgtgggaactggcccctgcccttgattcctctgcctcaaagttgggatctgaaagccatgtagggctagaagaccctgaggctgttctcccttctgttcatagtgagactcaaaaagccaagtcccagaagttctgaagggctgtgactagaagtgcccaggtccttcagggagctttaagaatgaccccacagaactcaagtttaactaggggttaggtcccagattcagacccaggagtttataaaaatgagctctacttccagttttggtttaaacaggtgtgagccaccgtgcctgacccctgtgtgtcttatagccaaggcagctgttgtacattacacttgacttcttcaggccaagccttcctatcccggagaattgttactctgcatttatgctcttcatcagtgttcaatacccaaatttttcccaccaaaaaaaaaaaaaaaaaaaaaccttcggagggcatctatgccggggggcgggaaaaaaggggtattcgaattgggcccatggggccataaggctggttcccttgagaccacaggttttctttgtaccaaagggggtaaaactctggccgggtctcccctataataggggaggcggtataaatctcagaaaacgccgggtaacccttgttatgaccggaaac

SEQ ID NO: 454860 - DNA, 1223 bp, Homo sapiens
  misc_feature (890)..(890): n is a, c, g, or t
  misc_feature (937)..(937): n is a, c, g, or t
  misc_feature (962)..(962): n is a, c, g, or t
  misc_feature (984)..(984): n is a, c, g, or t
  misc_feature (993)..(993): n is a, c, g, or t
cctggcagccctgccacccccgccttcggctcccattggctgccacggcctgcagtgggctgcaccagggttcatccatcctccctgggcagagggaataagaggctgcctctgcccaccagtcctgccgcccaggacccgcagcagagacgacgcctgcagcaaggagaccaggaaggggtgagacaaggaagaggatgtctgagctggagaaggccatggtggccctcatcgacgttttccaccaatattctggaagggagggagacaagcacaagctgaagaaatccgaactcaaggagctcatcaacaatgagctttcccatttcttagaggaaatcaaagagcaggaggttgtggacaaagtcatggaaacactggacaatgatggagacggcgaatgtgacttccaggaattcatggcctttgttgccatggttactactgcctgccacgagttctttgaacatgagtgagattagaaagcagccaaacctttcctgtaacagagacggtcatgcaagaaagcagacagcaagggcttgcagcctagtaggagctgagctttccagccgtgttgtagctaattaggaagcttgatttgctttgtgattgaaaaattgaaaacctctttccaaaggctgttttaacggcctgcatcattctttctgctatattaggcctgtgtgtaagctgactggccccagggactcttgttaacagtaacttaggagtcaggtctcagtgataaagcgtgcaccgtgcagcccgccatggccgtgtagaccctaacccggagggaaccctgactacagaaattaccccggggcacccttaaaacttccactacctttaaaaaacaaagccttatccagcaaaaaaaaaaaaanaaaaaaaaaaaaaaaaaaaaaaaaaaaaaaaaaaaaaaaaaaaaaanaaaaaaaaaaaaaaaaaaaaaaaanaaaaaaaaaaaaaaaaaaaaanaaaaaaaanaaaaaaaaaaaaaaaaaagagaagacggggccggcccaatgaatagcagccccagccggacgcgacgacacgagggcacccaccacccgccctttgctgtcgacacggccgcgcgcctccaagacgacgcgccaacgacacaaagaacggcgagcagcgcacccctacaacacagaccgcggacaggacaagagcgacgcaccacgaggggacgggacacaaatcctggc

SEQ ID NO: 454861 - DNA, 1315 bp, Homo sapiens
cctggcagccctgccacccccgccttcggctcccattggctgccacggcctgcagtgggctgcaccagggttcatccatcctccctgggcagagggaataagaggctgcctctgcccaccagtcctgccgcccaggacccgcagcagagacgacgcctgcagcaaggagaccaggaaggggtgagacaaggaagaggatgtctgagctggagaaggccatggtggccctcatcgacgttttccaccaatattctggaagggagggagacaagcacaagctgaagaaatccgaactcaaggagctcatcaacaatgagctttcccatttcttagagagatggagtctccctatgttgcccaggctggtctcaaacttcctgtgctcaagttatcctcctgccttagcttcccaaagtgctgggattacaggaaatcaaagagcaggaggttgtggacaaagtcatggaaacactggacaatgatggagacggcgaatgtgacttccaggaattcatggcctttgttgccatggttactactgcctgccacgagttctttgaacatgagtgagattagaaagcagccaaacctttcctgtaacagagacggtcatgcaagaaagcagacagcaagggcttgcagcctagtaggagctgagctttccagccgtgttgtagctaattaggaagcttgatttgctttgtgattgaaaaattgaaaacctctttccaaaggctgttttaacggcctgcatcattctttctgctatattaggcctgtgtgtaagctgactggccccagggactcttgttaacagtaacttaggagtcaggtctcagtgataaagcgtgcaccgtgcagcccgccatggccgtgtagaccctaacccggagggaaccctgactacagaaattaccccggggcacccttaaaacttccactacctttaaaaaacaaagccttatccagcattatttgaaaacactgctgttctttaaatgcgttcctcatccatgcagataacagctggttggccggtgtggccctgcaagggcgtggtggcttcggcctgcttcccgggatgcgcctgatcaccaggtgaacgctcagcgctggcagcgctcctggaaaaagcaactccatcagaactcgcaatccgagccagctctgggggctccagcgtggcctccgtgacccatgcgattcaagtcgcggctgcaggatccttgcctccaacgtgcctccagcacatgcggcttccgagggcactaccgggggctctgagccaccgcgagggcctgcgttcaataaaaag

SEQ ID NO: 454862 - DNA, 987 bp, Homo sapiens
  misc_feature (654)..(654): n is a, c, g, or t
  misc_feature (701)..(701): n is a, c, g, or t
  misc_feature (726)..(726): n is a, c, g, or t
  misc_feature (748)..(748): n is a, c, g, or t
  misc_feature (757)..(757): n is a, c, g, or t
cggacacaaattatcagagtcactcaacttttaatcatgttttgatggtccaaaattccatttaaaaacaaggtcggcaactccttttatctctcttaggaaatcaaagagcaggaggttgtggacaaagtcatggaaacactggacaatgatggagacggcgaatgtgacttccaggaattcatggcctttgttgccatggttactactgcctgccacgagttctttgaacatgagtgagattagaaagcagccaaacctttcctgtaacagagacggtcatgcaagaaagcagacagcaagggcttgcagcctagtaggagctgagctttccagccgtgttgtagctaattaggaagcttgatttgctttgtgattgaaaaattgaaaacctctttccaaaggctgttttaacggcctgcatcattctttctgctatattaggcctgtgtgtaagctgactggccccagggactcttgttaacagtaacttaggagtcaggtctcagtgataaagcgtgcaccgtgcagcccgccatggccgtgtagaccctaacccggagggaaccctgactacagaaattaccccggggcacccttaaaacttccactacctttaaaaaacaaagccttatccagcaaaaaaaaaaaaanaaaaaaaaaaaaaaaaaaaaaaaaaaaaaaaaaaaaaaaaaaaaaanaaaaaaaaaaaaaaaaaaaaaaaanaaaaaaaaaaaaaaaaaaaaanaaaaaaaanaaaaaaaaaaaaaaaaaagagaagacggggccggcccaatgaatagcagccccagccggacgcgacgacacgagggcacccaccacccgccctttgctgtcgacacggccgcgcgcctccaagacgacgcgccaacgacacaaagaacggcgagcagcgcacccctacaacacagaccgcggacaggacaagagcgacgcaccacgaggggacgggacacaaatcctggc

SEQ ID NO: 454863 - DNA, 807 bp, Homo sapiens
gcacgagatggcaacaaaggccatgaattcctggaagtcacgagttctttgaacatgagtgagattagaaagcagccaaacctttcctgtaacagagacggtcatgcaagaaagcagacagcaagggcttgcagcctagtaggagctgagctttccagccgtgttgtagctaattaggaagcttgatttgctttgtgattgaaaaattgaaaacctctttccaaaggctgttttaacggcctgcatcattctttctgctatattaggcctgtgtgtaagctgactggccccagggactcttgttaacagtaacttaggagtcaggtctcagtgataaagcgtgcaccgtgcagcccgccatggccgtgtagaccctaacccggagggaaccctgactacagaaattaccccggggcacccttaaaacttccactacctttaaaaaacaaagccttatccagcattatttgaaaacactgctgttctttaaatgcgttcctcatccatgcagataacagctggttggccggtgtggccctgcaagggcgtggtggcttcggcctgcttcccgggatgcgcctgatcaccaggtgaacgctcagcgctggcagcgctcctggaaaaagcaactccatcagaactcgcaatccgagccagctctgggggctccagcgtggcctccgtgacccatgcgattcaagtcgcggctgcaggatccttgcctccaacgtgcctccagcacatgcggcttccgagggcactaccgggggctctgagccaccgcgagggcctgcgttcaataaaaag

SEQ ID NO: 454864 - DNA, 1167 bp, Homo sapiens
cctggcagccctgccacccccgccttcggctcccattggctgccacggcctgcagtgggctgcaccagggttcatccatcctccctgggcagagggaataagaggctgcctctgcccaccagtcctgccgcccaggacccgcagcagagacgacgcctgcagcaaggagaccaggaaggggtgagacaaggaagaggatgtctgagctggagaaggccatggtggccctcatcgacgttttccaccaatattctggaagggagggagacaagcacaagctgaagaaatccgaactcaaggagctcatcaacaatgagctttcccatttcttagaggaaatcaaagagcaggaggttgtggacaaagtcatggaaacactggacaatgatggagacggcgaatgtgacttccaggaattcatggcctttgttgccatggttactactgcctgccacgagttctttgaacatgagtgagattagaaagcagccaaacctttcctgtaacagagacggtcatgcaagaaagcagacagcaagggcttgcagcctagtaggagctgagctttccagccgtgttgtagctaattaggaagcttgatttgctttgtgattgaaaaattgtaggcctgtgtgtaagctgactggccccagggactcttgttaacagtaacttaggagtcaggtctcagtgataaagcgtgcaccgtgcagcccgccatggccgtgtagaccctaacccggagggaaccctgactacagaaattaccccggggcacccttaaaacttccactacctttaaaaaacaaagccttatccagcattatttgaaaacactgctgttctttaaatgcgttcctcatccatgcagataacagctggttggccggtgtggccctgcaagggcgtggtggcttcggcctgcttcccgggatgcgcctgatcaccaggtgaacgctcagcgctggcagcgctcctggaaaaagcaactccatcagaactcgcaatccgagccagctctgggggctccagcgtggcctccgtgacccatgcgattcaagtcgcggctgcaggatccttgcctccaacgtgcctccagcacatgcggcttccgagggcactaccgggggctctgagccaccgcgagggcctgcgttcaataaaaag

SEQ ID NO: 454865 - DNA, 991 bp, Homo sapiens
atgcaaagttaaaaaaaagaaggaaggaagagaggttccatttgagattctcacaacctcttgttcgacagctcgtgcagattcgggcagaaggcaaagccaagttaaagaatcgaatctcagggagcttatcaacaatgagctttcccatgtctagaggaaatcaaagagcaggaggttgtggacaaagtcatggaaacactggacaatgatggagacggcgaatgtgacttccaggaattcatggcctttgttgccatggttactactgcctgccacgagttctttgaacatgagtgagattagaaagcagccaaacctttcctgtaacagagacggtcatgcaagaaagcagacagcaagggcttgcagcctagtaggagctgagctttccagccgtgttgtagctaattaggaaaacggcctgcatcattctttctgctatattaggcctgtgtgtaagctgactggccccagggactcttgttaacagtaacttaggagtcaggtctcagtgataaagcgtgcaccgtgcagcccgccatggccgtgtagaccctaacccggagggaaccctgactacagaaattaccccggggcacccttaaaacttccactacctttaaaaaacaaagccttatccagcattatttgaaaacactgctgttctttaaatgcgttcctcatccatgcagataacagctggttggccggtgtggccctgcaagggcgtggtggcttcggcctgcttcccgggatgcgcctgatcaccaggtgaacgctcagcgctggcagcgctcctggaaaaagcaactccatcagaactcgcaatccgagccagctctgggggctccagcgtggcctccgtgacccatgcgattcaagtcgcggctgcaggatccttgcctccaacgtgcctccagcacatgcggcttccgagggcactaccgggggctctgagccaccgcgagggcctgcgttcaataaaaag

SEQ ID NO: 454866 - DNA, 880 bp, Homo sapiens
gccgcccaggacccgcagcagagacgacgcctgcagcaaggagaccaggaaggggtgagacaaggaagaggaggtgagaaagagccaggccaagaggacgctcaggaagaaatggttcttttcttttgggtggaacggaatggaggggtagaaactaagtggtagcttaaaaagcccctttaggacaattggcagcatttcagaagtgtcaataggatgatgtgttttaatctccacattactgctgctttgtggacacctgactgcatcagccctagacagctagaggtgtgttttgccataaatcagagaaacgtcaggtttcatggcccagaagtgattgttgacattttcccagcggtactacaaatactgcctcttctgtaactatttgaagagtaaagattttgcttcccactggggctaaaaatgatggagaacctaatgctagtttagtcctatatcataaataaatgcttcccttttctccttatatttcttccaccgccctgggtaagtaactcttcagttttccagtttccctcagtttgaagtgccagggtccccacagccccaggacgccactcagaaattacgtaacaattacaaataaattgggtcaaagaaatcggggttttggtgggttttaactttcctcagtctcacagtttctcagggaggtcgaaccccttctttagagggatcctcacacgctaggtaacttgtctttctaaggagttaaagttcaaaagttctcttgttctcaatattaaaagattaatgtaggacattcaaagaatgtgagaaagaaacggacatttatttccatttctcttaaaagataaactataaaccatcaactatttcttaggtcaaaggg

SEQ ID NO: 454867 - DNA, 1062 bp, Homo sapiens
  misc_feature (890)..(890): n is a, c, g, or t
cctggcagccctgccacccccgccttcggctcccattggctgccacggcctgcagtgggctgcaccagggttcatccatcctccctgggcagagggaataagaggctgcctctgcccaccagtcctgccgcccaggacccgcagcagagacgacgcctgcagcaaggagaccaggaaggggtgagacaaggaagaggatgtctgagctggagaaggccatggtggccctcatcgacgttttccaccaatattctggaagggagggagacaagcacaagctgaagaaatccgaactcaaggagctcatcaacaatgagctttcccatttcttagaggaaatcaaagagcaggaggttgtggacaaagtcatggaaacactggacaatgatggagacggcgaatgtgacttccaggaattcatggcctttgttgccatggttactactgcctgccacgagttctttgaacatgagtgagattagaaagcagccaaacctttcctgtaacagagacggtcatgcaagaaagcagacagcaagggcttgcagcctagtaggagctgagctttccagccgtgttgtagctaattaggaagcttgatttgctttgtgattgaaaaattgaaaacctctttccaaaggctgttttaacggcctgcatcattctttctgctatattaggcctgtgtgtaagctgactggccccagggactcttgttaacagtaacttaggagtcaggtctcagtgataaagcgtgcaccgtgcagcccgccatggccgtgtagaccctaacccggagggaaccctgactacagaaattaccccggggcacccttaaaacttccactacctttaaaaaacaaagccttatccagcaaaaaaaaaaaaanaaaaaaaaaaaaaaaaacccggggggatattagtgggggggggggaaaaaggggatcagaatgggccccagggccaaagcgggtccgggaccagggttctcgggcaacaaggggacaaatgcgggggccccaaaaagggagccgcaaaaatcgcgaaacgcccgttaccgga

SEQ ID NO: 454868 - DNA, 1193 bp, Homo sapiens
  misc_feature (907)..(907): n is a, c, g, or t
  misc_feature (932)..(932): n is a, c, g, or t
  misc_feature (954)..(954): n is a, c, g, or t
  misc_feature (963)..(963): n is a, c, g, or t
cctggcagccctgccacccccgccttcggctcccattggctgccacggcctgcagtgggctgcaccagggttcatccatcctccctgggcagagggaataagaggctgcctctgcccaccagtcctgccgcccaggacccgcagcagagacgacgcctgcagcaaggagaccaggaaggggtgagacaaggaagaggatgtctgagctggagaaggccatggtggccctcatcgacgttttccaccaatattctggaagggagggagacaagcacaagctgaagaaatccgaactcaaggagctcatcaacaatgagctttcccatttcttagaggaaatcaaagagcaggaggttgtggacaaagtcatggaaacactggacaatgatggagacggcgaatgtgacttccaggaattcatggcctttgttgccatggttactactgcctgccacgagttctttgaacatgagtgagattagaaagcagccaaacctttcctgtaacagagacggtcatgcaagaaagcagacagcaagggcttgcagcctagtaggagctgagctttccagccgtgttgtagctaattaggaagcttgatttgctttgtgattgaaaaattgaaaacctctttccaaaggctgttttaacggcctgcatcattctttctgctatattaggcctgtgtgtaagctgactggccccagggactcttgttaacagtaacttaggagtcaggtctcagtgataaagcgtgcaccgtgcagcccgccatggccgtgtagaccctaacccggagggaaccctgactacagaaattaccccggggcacccttaaaacttccactacctttaaaaaacaaagccttatccagcaaaaaaaaaaaaaaaaaaaaaaaaaaaaaanaaaaaaaaaaaaaaaaaaaaaaaanaaaaaaaaaaaaaaaaaaaaanaaaaaaaanaaaaaaaaaaaaaaaaaagagaagacggggccggcccaatgaatagcagccccagccggacgcgacgacacgagggcacccaccacccgccctttgctgtcgacacggccgcgcgcctccaagacgacgcgccaacgacacaaagaacggcgagcagcgcacccctacaacacagaccgcggacaggacaagagcgacgcaccacgaggggacgggacacaaatcctggc

SEQ ID NO: 454869 - DNA, 931 bp, Homo sapiens
cctggcagccctgccacccccgccttcggctcccattggctgccacggcctgcagtgggctgcaccagggttcatccatcctccctgggcagagggaataagaggctgcctctgcccaccagtcctgccgcccaggacccgcagcagagacgacgcctgcagcaaggagaccaggaaggggtgagacaaggaagaggatgtctgagctggagaaggccatggtggccctcatcgacgttttccaccaatattctggaagggagggagacaagcacaagctgaagaaatccgaactcaaggagctcatcaacaatgagctttcccatttcttagaggaaatcaaagagcaggaggttgtggacaaagtcatggaaacactggacaatgatggagacggcgaatgtgacttccaggaattcatggcctttgttgccatggttactactgcctgccacgagttctttgaacatgagtgagattagaaagcagccaaacctttcctgtaacagagacggtcatgcaagaaagcagacagcaagggcttgcagcctagtaggagctgagctttccagccgtgttgtagctaattaggaagcttgatttgctttgtgattgaaaaattgaaaacctctttccaaaggctgttttaacggcctgcatcattctttctgctatattaggcctgtgtgtaagctgactggccccagggactcttgttaacagtaacttaggagtcaggtctcagtgataaagcgtgcaccgtgcagcccgccatggccgtgtagaccctaacccggagggaaccctgactacagaaattaccccggggcacccttaactcactacttaaaaacaacctttcagcaaaaaaaaaaacccggcctttgcgggaaaggttaggccggctagtccgccctgtagggatcgcctg

SEQ ID NO: 454870 - DNA, 618 bp, Homo sapiens
acagggcgtcgccttctcccctcagcacagaggagaggtgacgaatgccacttggtctctgcagcgtctgtagagggaagtctgtaagcgggagtgtcaaccccaattggcagattctctgacacttcaagtctgcaaaggaaaagcaggtacgactcctttatcttggacagtcatcttgtaatgcaggcctgtgggatacaaaggagaccagggaggttatgtgagctctgccaaatctattactactccaggggaaaataaaaccaaattcttgggctagtggaattactgtaggagaaatccagtatgattccatgtgaagaaccaatagcacccttaaattaaagccagatctgccagtgagcctcaggctttaggaactgaagaggtcataaaattgctgttatgtatgtgaaaacggccaaatataccatagaccccagattaggatcagtctggtgcctctgaaaatgtgaattgagaagaactgaaagaaaatctttccctggggagactgcagccgaaacacccttctgacgaatgtgctgacctaatctaagcctcaatttccttcaacaagggatgcatcgctcacttcccttgagttgtgagaat

SEQ ID NO: 454871 - DNA, 435 bp, Homo sapiens
tttatctacttttgcagaagatattgaaattgcaatcatcttgtttttgggggaatggagtcattccatattggctcttgagtatgtctgccaccactctgattctagctggaggctgccagaaatgactgtgccattgaatggagttattaggcaacataaaacggacaagccagaccaagtgtttctgaaagatctatccagcactccgatggccagcaacaacaccgccagcatagcacaagccaggaagctggtagagcagcttaagatggaagccaatatcgacaggataaaggaagttcactgacccctggtctacagcgatggttctcagctcatctgtgcgttcccaacacccagagagctctataaaaggaccaattaccgaaccacacccaaaccaattaaattagaatctcctggggtatgatt

SEQ ID NO: 454872 - DNA, 3652 bp, Homo sapiens
aatggaaatgagagggaaaagaagcaagccgctaacagctaccaagaagaggaggaagtgggagatgcgctgcttcctgtagaaagaacgttgattgaagacaaagctgggtggggactagtccctgggctgcagccgctgctacacatactcacaacgctgccgccgcgctccgtgggcaactcctactactgctgggctgggctgggctgggctgggctgcgccggagctcgcctgcacagatcagctccggagaggggaaaaccacgctcctcggaccaagcctcgggagctaagtgtttctgaaagatctatccagcactccgatggccagcaacaacaccgccagcatagcacaagccaggaagctggtagagcagcttaagatggaagccaatatcgacaggataaaggtgtccaaggcagctgcagatttgatggcctactgtgaagcacatgccaaggaagaccccctcctgacccctgttccggcttcagaaaacccgtttagggagaagaagtttttctgtgccatcctttaagtctttgagaggggcctgaagagcctccgggctcctgggacattgatgtagagtttttagtgaagtgggcacctttctagtccacggcatttgaagagagcgaggagaaccattctggaaactctaggctatgcatgtttaaagatctggtcccctttatgagaatgcaagccgatccacatcctgacttaagagatctgattctgacgaactgcctggaggaggggaatatataaaaataaaattggtgtcacttcttttctgctatcccccagcccccccccccaaaatcctcatgtttctgcttcatattttgaaaaataacaattaaaacagacagctgtactgaggtaagatatgtgtgaccttcttggaatgaatattgtctttagaataccctttgataagctgagctgtcccgtgtagatgcaattcggtttaatggcattgatgtatagtcactgtgcctttctttttctttcttccttctcctctacccctccttccacccctccccattagagtagtgtggagataaggctggactggtctatcagattgaactccaagaatgatcacacaaaatgtttagggagatgttccccgtggtgtatcctcatggtaacaacgacaaaaaatgccggttgtctttgttctcttttcactattcctaacatgtgtacatgatagctttgattctgcaagtaaaagtaaatcctgtgttgtgactggtgctttcatatatttgtgacaatttttgagtaatattgcatgaaaatgtccctatgttacatccattcagaagttttgttgttttactctaaagctgggaaaggaaatgagagggaaaagaccccggagagggaagaaaatctcagtattttgaaaattgagattacttcagagccttagccacacctaaaatacctcctagttaatagtggtataaatgcctcttcaatacgttttccagaatccaaagcattttggtttatccaggacccagggcagcacagctgtcaccaagcaggagagttaaggattcaccatgagctgggaaatgcttttgccatgagtatgagcaaattccctctttccctgaatcatggacattctagattaaaagaacatttttttgtgctcttaacaagaaaaccatggccctcctttgttcaagtatcagaagaaataaacccacagctccagagaaggtgaccattctcagaactccagctattcactctccagggagaaggacctcaaatcgccactctttgggcggcaggtgcggtccccacggccggctctacgaggaagagttctggctcttttgtccactgagatggtcttggtttttcacttaacaaattttttaatggaatctttgtttttgttctccatcttgtttgttagagtctctcggcctttatttacaaattccttgcaactagagcgctccttccccaagatatggtagtgagagtaatttttcattgtagctgtagtctccatcagtaacagcaggccctggaagacttgatcacctttttctgtgtcattttcagtcaaagagggcctctcttacatcttgtttgctttcaaatccccaaatatcatctccatctcccaattaattttattgtctctttcctctctattcgctttctcctgtttttttttttaaaaaaaagcatgaaaaaggaagagaaaaagtttgatatgccaaggacagattttgaaacagacttggtaaatgttttccttagctccttcatgggcatgctggtgaaagaataaatacatccaattaaagctcatgctggggtcggggagaagaggatactgaaacatttgtgaaatgtatgaatgcacttctgtaaccagatacttctgttcttctgttcaaattgtggggtttttgttacagttaggacgcccatgaagatttaggggtgaaaaaaacagcagagtatttattaaactacagcattgtacaattagcttagtaacactatggaataagctaaaacatatcacagtttttacatgggccaaaacatgaattgagtatgtggtcacatgaaaacacggatgaatgaataaaacactctttggtggtgactgaggcatcattagaaggcccagacgatttccactattcacagcatttccttttctcagaaggactctttatatttccatgtaaatctagatctttggagcaattaagatggaattacaatttctagggagcattttaaggaaaatgttttggctttttcataattttatgtcttacagtatggaattataatacgaaaatctttatatgagttttggcttcttggtatttgtacttattcaggggaaaaagtctttcgattacttatgcctctatagagcttaatttcttgagaaattcaacagtcattttcaccagcataattttatcttaaggaataactaataggaaaagtcagcttaattatttaaggccctagtttctacatataatatattcgatagaaatgaaaatctgccgtggaattaactaataagtagtaacaataaacttcatatttagaatgcaaagtctataaagaataattttacatgatcctcaatatcaactccagtttaaaaagtgttatttttaaaacatttgaaaccaagtactgtttaatttcaatcagaagatgcaaatacatactttgatctatgtttgattttgctaataatatttgaaggagattgcctaccaaggacaaaacaataaatttaaaaatcaaacgatttctccatacgctcatagtcacatatggaattttgagaaaataaagcatgctgtctttaggaatttttatacttctttgtctttcttccttaatatttgcttctagctgctcttggcaatgatgaattgttatgtatgcattaatgttttgcagcccaaaagttgttcacatttttcctatataagatctgtggagtgtgtgtttcaaagagagaactacagaaatgttaaagcaggaaaacctgaatgtgatgtgcacattttcatcccacatggacaatgtatgtgttttaataaatggaattttcagattca

SEQ ID NO: 454873 - DNA, 3425 bp, Homo sapiens
aattcgtttttctctctgctttctcaacagccagatctgccagtgagcctcaggctttaggaactgaagagtgtttctgaaagatctatccagcactccgatggccagcaacaacaccgccagcatagcacaagccaggaagctggtagagcagcttaagatggaagccaatatcgacaggataaaggtgtccaaggcagctgcagatttgatggcctactgtgaagcacatgccaaggaagaccccctcctgacccctgttccggcttcagaaaacccgtttagggagaagaagtttttctgtgccatcctttaagtctttgagaggggcctgaagagcctccgggctcctgggacattgatgtagagtttttagtgaagtgggcacctttctagtccacggcatttgaagagagcgaggagaaccattctggaaactctaggctatgcatgtttaaagatctggtcccctttatgagaatgcaagccgatccacatcctgacttaagagatctgattctgacgaactgcctggaggaggggaatatataaaaataaaattggtgtcacttcttttctgctatcccccagcccccccccccaaaatcctcatgtttctgcttcatattttgaaaaataacaattaaaacagacagctgtactgaggtaagatatgtgtgaccttcttggaatgaatattgtctttagaataccctttgataagctgagctgtcccgtgtagatgcaattcggtttaatggcattgatgtatagtcactgtgcctttctttttctttcttccttctcctctacccctccttccacccctccccattagagtagtgtggagataaggctggactggtctatcagattgaactccaagaatgatcacacaaaatgtttagggagatgttccccgtggtgtatcctcatggtaacaacgacaaaaaatgccggttgtctttgttctcttttcactattcctaacatgtgtacatgatagctttgattctgcaagtaaaagtaaatcctgtgttgtgactggtgctttcatatatttgtgacaatttttgagtaatattgcatgaaaatgtccctatgttacatccattcagaagttttgttgttttactctaaagctgggaaaggaaatgagagggaaaagaccccggagagggaagaaaatctcagtattttgaaaattgagattacttcagagccttagccacacctaaaatacctcctagttaatagtggtataaatgcctcttcaatacgttttccagaatccaaagcattttggtttatccaggacccagggcagcacagctgtcaccaagcaggagagttaaggattcaccatgagctgggaaatgcttttgccatgagtatgagcaaattccctctttccctgaatcatggacattctagattaaaagaacatttttttgtgctcttaacaagaaaaccatggccctcctttgttcaagtatcagaagaaataaacccacagctccagagaaggtgaccattctcagaactccagctattcactctccagggagaaggacctcaaatcgccactctttgggcggcaggtgcggtccccacggccggctctacgaggaagagttctggctcttttgtccactgagatggtcttggtttttcacttaacaaattttttaatggaatctttgtttttgttctccatcttgtttgttagagtctctcggcctttatttacaaattccttgcaactagagcgctccttccccaagatatggtagtgagagtaatttttcattgtagctgtagtctccatcagtaacagcaggccctggaagacttgatcacctttttctgtgtcattttcagtcaaagagggcctctcttacatcttgtttgctttcaaatccccaaatatcatctccatctcccaattaattttattgtctctttcctctctattcgctttctcctgtttttttttttaaaaaaaagcatgaaaaaggaagagaaaaagtttgatatgccaaggacagattttgaaacagacttggtaaatgttttccttagctccttcatgggcatgctggtgaaagaataaatacatccaattaaagctcatgctggggtcggggagaagaggatactgaaacatttgtgaaatgtatgaatgcacttctgtaaccagatacttctgttcttctgttcaaattgtggggtttttgttacagttaggacgcccatgaagatttaggggtgaaaaaaacagcagagtatttattaaactacagcattgtacaattagcttagtaacactatggaataagctaaaacatatcacagtttttacatgggccaaaacatgaattgagtatgtggtcacatgaaaacacggatgaatgaataaaacactctttggtggtgactgaggcatcattagaaggcccagacgatttccactattcacagcatttccttttctcagaaggactctttatatttccatgtaaatctagatctttggagcaattaagatggaattacaatttctagggagcattttaaggaaaatgttttggctttttcataattttatgtcttacagtatggaattataatacgaaaatctttatatgagttttggcttcttggtatttgtacttattcaggggaaaaagtctttcgattacttatgcctctatagagcttaatttcttgagaaattcaacagtcattttcaccagcataattttatcttaaggaataactaataggaaaagtcagcttaattatttaaggccctagtttctacatataatatattcgatagaaatgaaaatctgccgtggaattaactaataagtagtaacaataaacttcatatttagaatgcaaagtctataaagaataattttacatgatcctcaatatcaactccagtttaaaaagtgttatttttaaaacatttgaaaccaagtactgtttaatttcaatcagaagatgcaaatacatactttgatctatgtttgattttgctaataatatttgaaggagattgcctaccaaggacaaaacaataaatttaaaaatcaaacgatttctccatacgctcatagtcacatatggaattttgagaaaataaagcatgctgtctttaggaatttttatacttctttgtctttcttccttaatatttgcttctagctgctcttggcaatgatgaattgttatgtatgcattaatgttttgcagcccaaaagttgttcacatttttcctatataagatctgtggagtgtgtgtttcaaagagagaactacagaaatgttaaagcaggaaaacctgaatgtgatgtgcacattttcatcccacatggacaatgtatgtgttttaataaatggaattttcagattca

SEQ ID NO: 454874 - DNA, 3381 bp, Homo sapiens
gatgaggaagcagaagcttttagaggctgagtatcttgcttcatggagcaaggatttgatgccaggacattgggctctaaagccttgggccttgactgactgtaccagactccagtgttggttgtttttgtctccctttccaggtgtccaaggcagctgcagatttgatggcctactgtgaagcacatgccaaggaagaccccctcctgacccctgttccggcttcagaaaacccgtttagggagaagaagtttttctgtgccatcctttaagtctttgagaggggcctgaagagcctccgggctcctgggacattgatgtagagtttttagtgaagtgggcacctttctagtccacggcatttgaagagagcgaggagaaccattctggaaactctaggctatgcatgtttaaagatctggtcccctttatgagaatgcaagccgatccacatcctgacttaagagatctgattctgacgaactgcctggaggaggggaatatataaaaataaaattggtgtcacttcttttctgctatcccccagcccccccccccaaaatcctcatgtttctgcttcatattttgaaaaataacaattaaaacagacagctgtactgaggtaagatatgtgtgaccttcttggaatgaatattgtctttagaataccctttgataagctgagctgtcccgtgtagatgcaattcggtttaatggcattgatgtatagtcactgtgcctttctttttctttcttccttctcctctacccctccttccacccctccccattagagtagtgtggagataaggctggactggtctatcagattgaactccaagaatgatcacacaaaatgtttagggagatgttccccgtggtgtatcctcatggtaacaacgacaaaaaatgccggttgtctttgttctcttttcactattcctaacatgtgtacatgatagctttgattctgcaagtaaaagtaaatcctgtgttgtgactggtgctttcatatatttgtgacaatttttgagtaatattgcatgaaaatgtccctatgttacatccattcagaagttttgttgttttactctaaagctgggaaaggaaatgagagggaaaagaccccggagagggaagaaaatctcagtattttgaaaattgagattacttcagagccttagccacacctaaaatacctcctagttaatagtggtataaatgcctcttcaatacgttttccagaatccaaagcattttggtttatccaggacccagggcagcacagctgtcaccaagcaggagagttaaggattcaccatgagctgggaaatgcttttgccatgagtatgagcaaattccctctttccctgaatcatggacattctagattaaaagaacatttttttgtgctcttaacaagaaaaccatggccctcctttgttcaagtatcagaagaaataaacccacagctccagagaaggtgaccattctcagaactccagctattcactctccagggagaaggacctcaaatcgccactctttgggcggcaggtgcggtccccacggccggctctacgaggaagagttctggctcttttgtccactgagatggtcttggtttttcacttaacaaattttttaatggaatctttgtttttgttctccatcttgtttgttagagtctctcggcctttatttacaaattccttgcaactagagcgctccttccccaagatatggtagtgagagtaatttttcattgtagctgtagtctccatcagtaacagcaggccctggaagacttgatcacctttttctgtgtcattttcagtcaaagagggcctctcttacatcttgtttgctttcaaatccccaaatatcatctccatctcccaattaattttattgtctctttcctctctattcgctttctcctgtttttttttttaaaaaaaagcatgaaaaaggaagagaaaaagtttgatatgccaaggacagattttgaaacagacttggtaaatgttttccttagctccttcatgggcatgctggtgaaagaataaatacatccaattaaagctcatgctggggtcggggagaagaggatactgaaacatttgtgaaatgtatgaatgcacttctgtaaccagatacttctgttcttctgttcaaattgtggggtttttgttacagttaggacgcccatgaagatttaggggtgaaaaaaacagcagagtatttattaaactacagcattgtacaattagcttagtaacactatggaataagctaaaacatatcacagtttttacatgggccaaaacatgaattgagtatgtggtcacatgaaaacacggatgaatgaataaaacactctttggtggtgactgaggcatcattagaaggcccagacgatttccactattcacagcatttccttttctcagaaggactctttatatttccatgtaaatctagatctttggagcaattaagatggaattacaatttctagggagcattttaaggaaaatgttttggctttttcataattttatgtcttacagtatggaattataatacgaaaatctttatatgagttttggcttcttggtatttgtacttattcaggggaaaaagtctttcgattacttatgcctctatagagcttaatttcttgagaaattcaacagtcattttcaccagcataattttatcttaaggaataactaataggaaaagtcagcttaattatttaaggccctagtttctacatataatatattcgatagaaatgaaaatctgccgtggaattaactaataagtagtaacaataaacttcatatttagaatgcaaagtctataaagaataattttacatgatcctcaatatcaactccagtttaaaaagtgttatttttaaaacatttgaaaccaagtactgtttaatttcaatcagaagatgcaaatacatactttgatctatgtttgattttgctaataatatttgaaggagattgcctaccaaggacaaaacaataaatttaaaaatcaaacgatttctccatacgctcatagtcacatatggaattttgagaaaataaagcatgctgtctttaggaatttttatacttctttgtctttcttccttaatatttgcttctagctgctcttggcaatgatgaattgttatgtatgcattaatgttttgcagcccaaaagttgttcacatttttcctatataagatctgtggagtgtgtgtttcaaagagagaactacagaaatgttaaagcaggaaaacctgaatgtgatgtgcacattttcatcccacatggacaatgtatgtgttttaataaatggaattttcagattca

SEQ ID NO: 454875 - DNA, 3578 bp, Homo sapiens
aatggaaatgagagggaaaagaagcaagccgctaacagctaccaagaagaggaggaagtgggagatgcgctgcttcctgtagaaagaacgttgattgaagacaaagctgggtggggactagtccctgggctgcagccgctgctacacatactcacaacgctgccgccgcgctccgtgggcaactcctactactgctgggctgggctgggctgggctgggctgcgccggagctcgcctgcacagatcagctccggagaggggaaaaccacgctcctcggaccaagcctcgggagctaagccagatctgccagtgagcctcaggctttaggaactgaagagtgtttctgaaagatctatccagcactccgatggccagcaacaacaccgccagcatagcacaagccaggaagctggtagagcagcttaagatggaagccaatatcgacaggataaaggtgtccaaggcagctgcagatttgatggcctgaagagcctccgggctcctgggacattgatgtagagtttttagtgaagtgggcacctttctagtccacggcatttgaagagagcgaggagaaccattctggaaactctaggctatgcatgtttaaagatctggtcccctttatgagaatgcaagccgatccacatcctgacttaagagatctgattctgacgaactgcctggaggaggggaatatataaaaataaaattggtgtcacttcttttctgctatcccccagcccccccccccaaaatcctcatgtttctgcttcatattttgaaaaataacaattaaaacagacagctgtactgaggtaagatatgtgtgaccttcttggaatgaatattgtctttagaataccctttgataagctgagctgtcccgtgtagatgcaattcggtttaatggcattgatgtatagtcactgtgcctttctttttctttcttccttctcctctacccctccttccacccctccccattagagtagtgtggagataaggctggactggtctatcagattgaactccaagaatgatcacacaaaatgtttagggagatgttccccgtggtgtatcctcatggtaacaacgacaaaaaatgccggttgtctttgttctcttttcactattcctaacatgtgtacatgatagctttgattctgcaagtaaaagtaaatcctgtgttgtgactggtgctttcatatatttgtgacaatttttgagtaatattgcatgaaaatgtccctatgttacatccattcagaagttttgttgttttactctaaagctgggaaaggaaatgagagggaaaagaccccggagagggaagaaaatctcagtattttgaaaattgagattacttcagagccttagccacacctaaaatacctcctagttaatagtggtataaatgcctcttcaatacgttttccagaatccaaagcattttggtttatccaggacccagggcagcacagctgtcaccaagcaggagagttaaggattcaccatgagctgggaaatgcttttgccatgagtatgagcaaattccctctttccctgaatcatggacattctagattaaaagaacatttttttgtgctcttaacaagaaaaccatggccctcctttgttcaagtatcagaagaaataaacccacagctccagagaaggtgaccattctcagaactccagctattcactctccagggagaaggacctcaaatcgccactctttgggcggcaggtgcggtccccacggccggctctacgaggaagagttctggctcttttgtccactgagatggtcttggtttttcacttaacaaattttttaatggaatctttgtttttgttctccatcttgtttgttagagtctctcggcctttatttacaaattccttgcaactagagcgctccttccccaagatatggtagtgagagtaatttttcattgtagctgtagtctccatcagtaacagcaggccctggaagacttgatcacctttttctgtgtcattttcagtcaaagagggcctctcttacatcttgtttgctttcaaatccccaaatatcatctccatctcccaattaattttattgtctctttcctctctattcgctttctcctgtttttttttttaaaaaaaagcatgaaaaaggaagagaaaaagtttgatatgccaaggacagattttgaaacagacttggtaaatgttttccttagctccttcatgggcatgctggtgaaagaataaatacatccaattaaagctcatgctggggtcggggagaagaggatactgaaacatttgtgaaatgtatgaatgcacttctgtaaccagatacttctgttcttctgttcaaattgtggggtttttgttacagttaggacgcccatgaagatttaggggtgaaaaaaacagcagagtatttattaaactacagcattgtacaattagcttagtaacactatggaataagctaaaacatatcacagtttttacatgggccaaaacatgaattgagtatgtggtcacatgaaaacacggatgaatgaataaaacactctttggtggtgactgaggcatcattagaaggcccagacgatttccactattcacagcatttccttttctcagaaggactctttatatttccatgtaaatctagatctttggagcaattaagatggaattacaatttctagggagcattttaaggaaaatgttttggctttttcataattttatgtcttacagtatggaattataatacgaaaatctttatatgagttttggcttcttggtatttgtacttattcaggggaaaaagtctttcgattacttatgcctctatagagcttaatttcttgagaaattcaacagtcattttcaccagcataattttatcttaaggaataactaataggaaaagtcagcttaattatttaaggccctagtttctacatataatatattcgatagaaatgaaaatctgccgtggaattaactaataagtagtaacaataaacttcatatttagaatgcaaagtctataaagaataattttacatgatcctcaatatcaactccagtttaaaaagtgttatttttaaaacatttgaaaccaagtactgtttaatttcaatcagaagatgcaaatacatactttgatctatgtttgattttgctaataatatttgaaggagattgcctaccaaggacaaaacaataaatttaaaaatcaaacgatttctccatacgctcatagtcacatatggaattttgagaaaataaagcatgctgtctttaggaatttttatacttctttgtctttcttccttaatatttgcttctagctgctcttggcaatgatgaattgttatgtatgcattaatgttttgcagcccaaaagttgttcacatttttcctatataagatctgtggagtgtgtgtttcaaagagagaactacagaaatgttaaagcaggaaaacctgaatgtgatgtgcacattttcatcccacatggacaatgtatgtgttttaataaatggaattttcagattca

SEQ ID NO: 454876 - DNA, 3693 bp, Homo sapiens
aatggaaatgagagggaaaagaagcaagccgctaacagctaccaagaagaggaggaagtgggagatgcgctgcttcctgtagaaagaacgttgattgaagacaaagctgggtggggactagtccctgggctgcagccgctgctacacatactcacaacgctgccgccgcgctccgtgggcaactcctactactgctgggctgggctgggctgggctgggctgcgccggagctcgcctgcacagatcagctccggagaggggaaaaccacgctcctcggaccaagcctcgggagctaagccagatctgccagtgagcctcaggctttaggaactgaagagtgtttctgaaagatctatccagcactccgatggccagcaacaacaccgccagcatagcacaagccaggaagctggtagagcagcttaagatggaagccaatatcgacaggataaaggtgtccaaggcagctgcagatttgatggcctactgtgaagcacatgccaaggaagaccccctcctgacccctgttccggcttcagaaaacccgtttagggagaagaagtttttctgtgccatcctttaagtctttgagaggggcctgaagagcctccgggctcctgggacattgatgtagagtttttagtgaagtgggcacctttctagtccacggcatttgaagagagcgaggagaaccattctggaaactctaggctatgcatgtttaaagatctggtcccctttatgagaatgcaagccgatccacatcctgacttaagagatctgattctgacgaactgcctggaggaggggaatatataaaaataaaattggtgtcacttcttttctgctatcccccagcccccccccccaaaatcctcatgtttctgcttcatattttgaaaaataacaattaaaacagacagctgtactgaggtaagatatgtgtgaccttcttggaatgaatattgtctttagaataccctttgataagctgagctgtcccgtgtagatgcaattcggtttaatggcattgatgtatagtcactgtgcctttctttttctttcttccttctcctctacccctccttccacccctccccattagagtagtgtggagataaggctggactggtctatcagattgaactccaagaatgatcacacaaaatgtttagggagatgttccccgtggtgtatcctcatggtaacaacgacaaaaaatgccggttgtctttgttctcttttcactattcctaacatgtgtacatgatagctttgattctgcaagtaaaagtaaatcctgtgttgtgactggtgctttcatatatttgtgacaatttttgagtaatattgcatgaaaatgtccctatgttacatccattcagaagttttgttgttttactctaaagctgggaaaggaaatgagagggaaaagaccccggagagggaagaaaatctcagtattttgaaaattgagattacttcagagccttagccacacctaaaatacctcctagttaatagtggtataaatgcctcttcaatacgttttccagaatccaaagcattttggtttatccaggacccagggcagcacagctgtcaccaagcaggagagttaaggattcaccatgagctgggaaatgcttttgccatgagtatgagcaaattccctctttccctgaatcatggacattctagattaaaagaacatttttttgtgctcttaacaagaaaaccatggccctcctttgttcaagtatcagaagaaataaacccacagctccagagaaggtgaccattctcagaactccagctattcactctccagggagaaggacctcaaatcgccactctttgggcggcaggtgcggtccccacggccggctctacgaggaagagttctggctcttttgtccactgagatggtcttggtttttcacttaacaaattttttaatggaatctttgtttttgttctccatcttgtttgttagagtctctcggcctttatttacaaattccttgcaactagagcgctccttccccaagatatggtagtgagagtaatttttcattgtagctgtagtctccatcagtaacagcaggccctggaagacttgatcacctttttctgtgtcattttcagtcaaagagggcctctcttacatcttgtttgctttcaaatccccaaatatcatctccatctcccaattaattttattgtctctttcctctctattcgctttctcctgtttttttttttaaaaaaaagcatgaaaaaggaagagaaaaagtttgatatgccaaggacagattttgaaacagacttggtaaatgttttccttagctccttcatgggcatgctggtgaaagaataaatacatccaattaaagctcatgctggggtcggggagaagaggatactgaaacatttgtgaaatgtatgaatgcacttctgtaaccagatacttctgttcttctgttcaaattgtggggtttttgttacagttaggacgcccatgaagatttaggggtgaaaaaaacagcagagtatttattaaactacagcattgtacaattagcttagtaacactatggaataagctaaaacatatcacagtttttacatgggccaaaacatgaattgagtatgtggtcacatgaaaacacggatgaatgaataaaacactctttggtggtgactgaggcatcattagaaggcccagacgatttccactattcacagcatttccttttctcagaaggactctttatatttccatgtaaatctagatctttggagcaattaagatggaattacaatttctagggagcattttaaggaaaatgttttggctttttcataattttatgtcttacagtatggaattataatacgaaaatctttatatgagttttggcttcttggtatttgtacttattcaggggaaaaagtctttcgattacttatgcctctatagagcttaatttcttgagaaattcaacagtcattttcaccagcataattttatcttaaggaataactaataggaaaagtcagcttaattatttaaggccctagtttctacatataatatattcgatagaaatgaaaatctgccgtggaattaactaataagtagtaacaataaacttcatatttagaatgcaaagtctataaagaataattttacatgatcctcaatatcaactccagtttaaaaagtgttatttttaaaacatttgaaaccaagtactgtttaatttcaatcagaagatgcaaatacatactttgatctatgtttgattttgctaataatatttgaaggagattgcctaccaaggacaaaacaataaatttaaaaatcaaacgatttctccatacgctcatagtcacatatggaattttgagaaaataaagcatgctgtctttaggaatttttatacttctttgtctttcttccttaatatttgcttctagctgctcttggcaatgatgaattgttatgtatgcattaatgttttgcagcccaaaagttgttcacatttttcctatataagatctgtggagtgtgtgtttcaaagagagaactacagaaatgttaaagcaggaaaacctgaatgtgatgtgcacattttcatcccacatggacaatgtatgtgttttaataaatggaattttcagattca

SEQ ID NO: 454877 - DNA, 3583 bp, Homo sapiens
agcggagtgccgtgacaggagagaaaagcactcctcctcgataccgtatctccgccaacttaatcacagctgccggtgaaggctcattgaggtaagggaatcgagagaggtaggtgttacatggtatatctcatctaatcacgagcctccatcctgtattgcgcgcatgcaagctatagcaccagacaagggcaatacgacgaaccacccgacgcgagagaaagctttgtgatatcacgccacgccatgtaatcgtactgtgtagaggcccatctcagtcagcaacagcgcatagacccagctgtccactgctgcctgcacaattctgatttgctttcctgtgactgccacagtgcctgggccgacgccgcctgcctggtttccctgctgccgggcttccgatttgcctgctgtcagggcagactgatacgtgttgcctcgtcgtccaatccctctgtagatgctcctagtgctaagaggcggcgtcctctgaagagcctccgggctcctgggacattgatgtagagtttttagtgaagtgggcacctttctagtccacggcatttgaagagagcgaggagaaccattctggaaactctaggctatgcatgtttaaagatctggtcccctttatgagaatgcaagccgatccacatcctgacttaagagatctgattctgacgaactgcctggaggaggggaatatataaaaataaaattggtgtcacttcttttctgctatcccccagcccccccccccaaaatcctcatgtttctgcttcatattttgaaaaataacaattaaaacagacagctgtactgaggtaagatatgtgtgaccttcttggaatgaatattgtctttagaataccctttgataagctgagctgtcccgtgtagatgcaattcggtttaatggcattgatgtatagtcactgtgcctttctttttctttcttccttctcctctacccctccttccacccctccccattagagtagtgtggagataaggctggactggtctatcagattgaactccaagaatgatcacacaaaatgtttagggagatgttccccgtggtgtatcctcatggtaacaacgacaaaaaatgccggttgtctttgttctcttttcactattcctaacatgtgtacatgatagctttgattctgcaagtaaaagtaaatcctgtgttgtgactggtgctttcatatatttgtgacaatttttgagtaatattgcatgaaaatgtccctatgttacatccattcagaagttttgttgttttactctaaagctgggaaaggaaatgagagggaaaagaccccggagagggaagaaaatctcagtattttgaaaattgagattacttcagagccttagccacacctaaaatacctcctagttaatagtggtataaatgcctcttcaatacgttttccagaatccaaagcattttggtttatccaggacccagggcagcacagctgtcaccaagcaggagagttaaggattcaccatgagctgggaaatgcttttgccatgagtatgagcaaattccctctttccctgaatcatggacattctagattaaaagaacatttttttgtgctcttaacaagaaaaccatggccctcctttgttcaagtatcagaagaaataaacccacagctccagagaaggtgaccattctcagaactccagctattcactctccagggagaaggacctcaaatcgccactctttgggcggcaggtgcggtccccacggccggctctacgaggaagagttctggctcttttgtccactgagatggtcttggtttttcacttaacaaattttttaatggaatctttgtttttgttctccatcttgtttgttagagtctctcggcctttatttacaaattccttgcaactagagcgctccttccccaagatatggtagtgagagtaatttttcattgtagctgtagtctccatcagtaacagcaggccctggaagacttgatcacctttttctgtgtcattttcagtcaaagagggcctctcttacatcttgtttgctttcaaatccccaaatatcatctccatctcccaattaattttattgtctctttcctctctattcgctttctcctgtttttttttttaaaaaaaagcatgaaaaaggaagagaaaaagtttgatatgccaaggacagattttgaaacagacttggtaaatgttttccttagctccttcatgggcatgctggtgaaagaataaatacatccaattaaagctcatgctggggtcggggagaagaggatactgaaacatttgtgaaatgtatgaatgcacttctgtaaccagatacttctgttcttctgttcaaattgtggggtttttgttacagttaggacgcccatgaagatttaggggtgaaaaaaacagcagagtatttattaaactacagcattgtacaattagcttagtaacactatggaataagctaaaacatatcacagtttttacatgggccaaaacatgaattgagtatgtggtcacatgaaaacacggatgaatgaataaaacactctttggtggtgactgaggcatcattagaaggcccagacgatttccactattcacagcatttccttttctcagaaggactctttatatttccatgtaaatctagatctttggagcaattaagatggaattacaatttctagggagcattttaaggaaaatgttttggctttttcataattttatgtcttacagtatggaattataatacgaaaatctttatatgagttttggcttcttggtatttgtacttattcaggggaaaaagtctttcgattacttatgcctctatagagcttaatttcttgagaaattcaacagtcattttcaccagcataattttatcttaaggaataactaataggaaaagtcagcttaattatttaaggccctagtttctacatataatatattcgatagaaatgaaaatctgccgtggaattaactaataagtagtaacaataaacttcatatttagaatgcaaagtctataaagaataattttacatgatcctcaatatcaactccagtttaaaaagtgttatttttaaaacatttgaaaccaagtactgtttaatttcaatcagaagatgcaaatacatactttgatctatgtttgattttgctaataatatttgaaggagattgcctaccaaggacaaaacaataaatttaaaaatcaaacgatttctccatacgctcatagtcacatatggaattttgagaaaataaagcatgctgtctttaggaatttttatacttctttgtctttcttccttaatatttgcttctagctgctcttggcaatgatgaattgttatgtatgcattaatgttttgcagcccaaaagttgttcacatttttcctatataagatctgtggagtgtgtgtttcaaagagagaactacagaaatgttaaagcaggaaaacctgaatgtgatgtgcacattttcatcccacatggacaatgtatgtgttttaataaatggaattttcagattca

SEQ ID NO: 454878 - DNA, 1374 bp, Homo sapiens
aatggaaatgagagggaaaagaagcaagccgctaacagctaccaagaagaggaggaagtgggagatgcgctgcttcctgtagaaagaacgttgattgaagacaaagctgggtggggactagtccctgggctgcagccgctgctacacatactcacaacgctgccgccgcgctccgtgggcaactcctactactgctgggctgggctgggctgggctgggctgcgccggagctcgcctgcacagatcagctccggagaggggaaaaccacgctcctcggaccaagcctcgggagctaagccagatctgccagtgagcctcaggctttaggaactgaagagtgtttctgaaagatctatccagcactccgatggccagcaacaacaccgccagcatagcacaagccaggaagctggtagagcagcttaagatggaagccaatatcgacaggataaaggtgtccaaggcagctgcagatttgatggcctactgtgaagcacatgccaaggaagaccccctcctgacccctgttccggcttcagaaaacccgtttagggagaagaagtttttctgtgccatcctttaagtctttgagaggggcctgaagagcctccgggctcctgggacattgatgtagagtttttagtgaagtgggcacctttctagtccacggcatttgaagagagcgaggagaaccattctggaaactctaggctatgcatgtttaaagatctggtcccctttatgagaatgcaagccgatccacatcctgacttaagagatctgattctgacgaactgcctggaggaggggaatatataaaaataaaattggtgtcacttcttttctgctatcccccagcccccccccccaaaatcctcatgtttctgcttcatattttgaaaaataacaattaaaacagacagctgtactgaggtaagatatgtgtgaccttcttggaatgaatattgtctttagaataccctttgataagctgagctgtcccgtgtagatgcaattcggtttaatggcattgatgtatagtcactgtgcctttctttttctttcttccttctcctctacccctccttccacccctccccattagagtagtgtggagataaggctggactggtctatcagattgaactccaagaatgatcacacaaaatgtttagggagatgttccccgtggtgtatcctcatggtaacaacgacaaaaaatgccggttgtctttgttctcttttcactattcctaacatgtgtacatgatagctttgattctgcaagtaaaagtaaatcctgaatgtgatgtgcacattttcatcccacatggacaatgtatgtgttttaataaatggaattttcagattca

SEQ ID NO: 454879 - DNA, 3962 bp, Homo sapiens
cggagtgctgtttttgttgttggtgaaaggtgaggggaacagctgatccgtctgttgggaggacagatatctcaaggccaggatggaagaatcaccactaagccgggcaccatcccgtggtggagtcaactttctcaatgtagcccggacctacatccccaacaccaaggtggaatgtcactacacccttcccccaggcaccatgcccagtgccagtgactggattggcatcttcaaggtggaggctgcctgtgttcgggattaccacacatttgtgtggtcttccgtgcctgaaagtacaactgatggttcccccattcacaccagtgtccagttccaagccagctacctgcccaaaccaggagctcagctctaccagttccgatatgtgaaccgccagggccaggtgtgtgggcagagcccccctttccagttccgagagccaaggcccatggatgaactggtgaccctggaggaggctgatgggggctctgacatcctgctggttgtccccaaggcaactgtgttacagaaccagctcgatgagagccagcaagaacggaatgacctgatgcagctgaagctacagctggagggacaggtgacagagctgaggagccgagtgcaggagctcgagagggctctggcaactgccaggcaggagcacacggagctgatggaacagtacaaggggatttcccggtcccatggggagatcacagaagagagggacatcctgagccggcaacagggagaccatgtggcacgcatcctggagctagaggatgacatccagaccatcagtgagaaagtgctgacgaaggaagtggagctggacaggcttagagacacagtgaaggccctgactcgggaacaagagaagctccttgggcaactgaaagaagtacaagcagacaaggagcaaagtgaggctgagctccaagtggcacaacaggagaaccatcacttaaatttggacctgaaggaggcgaagagctggcaagaggagcagagtgctcaggctcagcgactgaaagacaaggtggcccagatgaaggacaccctaggccaggcccagcagcgggtggccgagctggagcccttgaaggagcagcttcgaggggcccaggagcttgcagcctcaagccagcagaaagccacccttcttggggaggagttggccagcgcagcagcagccagggaccgcaccatagccgaactacaccgcagccgcctggaagtggctgaagttaacggcaggctggctgagctcggtttgcacttgaaggaagaaaaatgccaatggagcaaggagcgggcagggctgctgcagagtgtggaggcagagaaggacaagatcctgaagctgagtgcagagatacttcgattggagaaggcagttcaggaggagaggacccaaaaccaagtgttcaagactgagctggcccgggagaaggattctagcctggtacagttgtcagaaagtaagcgggagctgacagagctgcggtcagccctgcgtgtgctccagaaggaaaaggagcagttacaggaggagaaacaggaattgctagagtacatgagaaagctagaggcccgcctggagaaggtggcagatgagaagtggaatgaggatgccaccacagaggatgaggaggccgctgtggggctgagctgcccggcagctctgacagactcagaggacgagtccccagaagacatgaggctcccaccctatggcctttgtgagcgtggagacccaggctcctctcctgctgggcctcgagaggcttctccccttgttgtcatcagccagccggctcccatttctcctcacctctctgggccagctgaggacagtagctctgactcggaggctgaagatgagaagtcagtcctgatggcagctgtgcagagtgggggtgaggaggccaacttactgcttcctgaactgggcagtgccttctatgacatggccaggtgagttcaaccagcaaggccaggagggaggtgggaggaggtcagagggaaagggcatctgtgtggacagtcaccaggccctgctcccaacccctgcccttcttggcctcagccaagaaaaggagatacaggtatggttaacaaggaaaatgactcactgctccaaatcccagatgccttcaggtaatccctacccctatcttatcaatgcactcagaggtcctgcctttaactggcttctatgttgttctagcaccatcttctgcagagcccaaattgccctgcttcccctctctcctgcctctaccccttccccaaccaccaggtaggtacctagggtcctccggggaggaagggaggtgaccatggcccccagggataggagcagagagaagactgggatccagcatccatctggctacaactgaaatgctttccctcttccctgacttccctgggtaacccttagggaagggaacctatagaggtgggggtttcaggtatcagattgtccccttctgccttcccttttattcccaggttcaagggggcaggcacagggaagagagatttgatcatctagtcccggttttgcctggatgtgagatgggctcagggcagggagggggtgatgctgtcatccttctcggctggagcaggaagatgaaggacgatgtcagactcattttcagcctcattaggcagcagacggagatggagggaggagagcaggaggctgggggatgggctctgcactgcagagaccagcagggactaaagaagagaggacatggggaactggaaaaataagccttccaggattgtggggagaaagacgctgtgggagaggccaggatgctgcattaggcacaggataacctgggaacccaggcacatgggtcctgctctccgaagtctgcaagtcaagaagggaacagagcacgccgaccctctccctttcccctctgtctctcttagtggctttacagtgggtaccctgtcagaaaccagcactgggggccctgccacccccacatggaaggagtgtcctatctgtaaggagcgctttcctgctgagagtgacaaggatgccctggaggaccacatggatggacacttctttttcagcacccaggaccccttcacctttgagtgatcttactccctcgtacatgcacaaatacacactcatgcacacacacactcacacacatgcatacacttaggtttcatgcccattttctatcacactgggctccatgatattctgttccctaagaactgcttctgtgtgccctgttttcatcccaagatttctcacttcatcctctcctacctggctcttttgtcccagggaggggtcctgttcggaagcagtggctgaatttatcccctgaaagtggttttggaggaaccgggatggaggaggccttcccctgtgggaatagaatcgtccactcctagccctggttgcttctgatacacagccactgcacacacacactcacactcacactcccttgtctgatgccccaaagccaattcctggggcaccctaccctctcttatttggagtttccgttggtttacctgagttttctctggggtctgcacagaggcagcagcatggacatcatggcctctcaggtcccttttggttctcagtttcattggttcctctttctgttcccccattgacttctgtgccccaccctagccttttccataaccttaggtattcagtttggaggggttttttgtatttttgaggattcctgtattctgtatcctctcctcgcatctcctcacatggaaagaaataatgtatttgtgccttctgtgaggaatggggggaacaagtggtcccaggtatccccatttccaaggcccccctccctctccaggtccccccacagcaataaaagcttccccctgatatccatccctttgtagtttgaacaaatatatttatatgatatgta

SEQ ID NO: 454880 - DNA, 719 bp, Homo sapiens
cggagtgctgtttttgttgttggtgaaaggtgaggggaacagctgatccgtctgttgggaggacagatatctcaaggccaggatggaagaatcaccactaagccgggcaccatcccgtggtggagtcaactttctcaatgtagcccggacctacatccccaacaccaaggtggaatgtcactacacccttcccccaggcaccatgcccagtgccagtgactggattggcatcttcaaggtggaggctgcctgtgttcgggattaccacacatttgtgtggtcttccgtgcctgaaagtacaactgatggttcccccattcacaccagtgtccagttccaaggtacaagggaagatggaaaattgggagagaggagccaagggagtggaggtttgaaagaaggtagtgggctcagaaacattaaaagttaggcacaaaggacaaggaaaaataaacgaaaataaatataatgagaatatatccaacagcgctcagcagatagagaatcacgggattatcgcagaatcagggacatagaaacagaaggaacttcagagggcatctagtcccctgtcctacccaaagaaggaaaaatgggggagtaaggaagagggaaaggtagaattatgtggtgagaagagggaaagacctgggttcaaatctcacctctaacacttacaagctgtttggccttgggcaaattacataacctccctgtgt

SEQ ID NO: 454881 - DNA, 569 bp, Homo sapiens
ccactgcactccagcctgggcgatggagcaagactctgtctcaagataaaataaaataaaaagtgttaccacagtgtctggtacatggtacgcactcactacatggtaactagcattattatgattatgatagaggggcagtgggtttgggaaagaaaggaaggagagggacaggcagaaaggagggagaagagtatggcctgtgggaggtggagaagagaagaaacagtatatggaacaccgagcaaggggctggggccaaggacagtggattattggggtcctgggtccattcttcttcccacagccagctacctgcccagcccgttggagaagcaacaagaacgcatctagacagactcgccctccctgcgggcgccatttggtttccccaaaccaagagaatattaggtgacggctgtggcaagaattccactttgggcatctgcttctccaacgggctgggacggggaagctactgtgggaaacactctaccttctcttcttctcttaaccgtttctcttcttcctttttccttttttcctcaagttagacctgtgagaccgca

SEQ ID NO: 454882 - DNA, 650 bp, Homo sapiens
tagccttgttctttactgacacattagtgtccctccactttccctttctcttgtcattgttgccactgtagctccatcctgccccccttattcaacccctcagccctttcttccatccatagaaggtagttccatgaccatacctttctccaaccttgggctttcacaggtggaggctgcctgtgttcgggattaccacacatttgtgtggtcttccgtgcctgaaagtacaactgatggttcccccattcacaccagtgtccagttccaaggtacaagggaagatggaaaattgggagagaggagccaagggagtggaggtttgaaagaaggtagtgggctcagaaacattaaaagttaggcacaaaggacaaggaaaaataaacgaaaataaatataatgagaatatatccaacagcgctcagcagatagagaatcacgggattatcgcagaatcagggacatagaaacagaaggaacttcagagggcatctagtcccctgtcctacccaaagaaggaaaaatgggggagtaaggaagagggaaaggtagaattatgtggtgagaagagggaaagacctgggttcaaatctcacctctaacacttacaagctgtttggccttgggcaaattacataacctccctgtgt

SEQ ID NO: 454883 - DNA, 4194 bp, Homo sapiens
cggagtgctgtttttgttgttggtgaaaggtgaggggaacagctgatccgtctgttgggaggacagatatctcaaggccaggatggaagaatcaccactaagccgggcaccatcccgtggtggagtcaactttctcaatgtagcccggacctacatccccaacaccaaggtggaatgtcactacacccttcccccaggcaccatgcccagtgccagtgactggattggcatcttcaaggtggaggctgcctgtgttcgggattaccacacatttgtgtggtcttccgtgcctgaaagtacaactgatggttcccccattcacaccagtgtccagttccaagccagctacctgcccaaaccaggagctcagctctaccagttccgatatgtgaaccgccagggccaggtgtgtgggcagagcccccctttccagttccgagagccaaggcccatggatgaactggtgaccctggaggaggctgatgggggctctgacatcctgctggttgtccccaaggcaactgtgttacagaaccagctcgatgagagccagcaagaacggaatgacctgatgcagctgaagctacagctggagggacaggtgacagagctgaggagccgagtgcaggagctcgagagggctctggcaactgccaggcaggagcacacggagctgatggaacagtacaaggggatttcccggtcccatggggagatcacagaagagagggacatcctgagccggcaacagggagaccatgtggcacgcatcctggagctagaggatgacatccagaccatcagtgagaaagtgctgacgaaggaagtggagctggacaggcttagagacacagtgaaggccctgactcgggaacaagagaagctccttgggcaactgaaagaagtacaagcagacaaggagcaaagtgaggctgagctccaagtggcacaacaggagaaccatcacttaaatttggacctgaaggaggcgaagagctggcaagaggagcagagtgctcaggctcagcgactgaaagacaaggtggcccagatgaaggacaccctaggccaggcccagcagcgggtggccgagctggagcccttgaaggagcagcttcgaggggcccaggagcttgcagcctcaagccagcagaaagccacccttcttggggaggagttggccagcgcagcagcagccagggaccgcaccatagccgaactacaccgcagccgcctggaagtggctgaagttaacggcaggctggctgagctcggtttgcacttgaaggaagaaaaatgccaatggagcaaggagcgggcagggctgctgcagagtgtggaggcagagaaggacaagatcctgaagctgagtgcagagatacttcgattggagaaggcagttcaggaggagaggacccaaaaccaagtgttcaagactgagctggcccgggagaaggattctagcctggtacagttgtcagaaagtaagcgggagctgacagagctgcggtcagccctgcgtgtgctccagaaggaaaaggagcagttacaggaggagaaacaggaattgctagagtacatgagaaagctagaggcccgcctggagaaggtggcagatgagaagtggaatgaggatgccaccacagaggatgaggaggccgctgtggggctgagtccgtgtagccccaatcttgtaacacctcttccccactctacctcccgctgttgaggaaggctccatgtaaccttgctgggagctgcctttgccttctatgtgttttgccttttctttcccagaccctggcccctgtttagtctaatgatacccctcatccagaggagacagctggtccaactcctcacaacacatccttttttcttctctgcctgcttcatctcctacaggctgcccggcagctctgacagactcagaggacgagtccccagaagacatgaggctcccaccctatggcctttgtgagcgtggagacccaggctcctctcctgctgggcctcgagaggcttctccccttgttgtcatcagccagccggctcccatttctcctcacctctctgggccagctgaggacagtagctctgactcggaggctgaagatgagaagtcagtcctgatggcagctgtgcagagtgggggtgaggaggccaacttactgcttcctgaactgggcagtgccttctatgacatggccaggtgagttcaaccagcaaggccaggagggaggtgggaggaggtcagagggaaagggcatctgtgtggacagtcaccaggccctgctcccaacccctgcccttcttggcctcagccaagaaaaggagatacaggtatggttaacaaggaaaatgactcactgctccaaatcccagatgccttcaggtaatccctacccctatcttatcaatgcactcagaggtcctgcctttaactggcttctatgttgttctagcaccatcttctgcagagcccaaattgccctgcttcccctctctcctgcctctaccccttccccaaccaccaggtaggtacctagggtcctccggggaggaagggaggtgaccatggcccccagggataggagcagagagaagactgggatccagcatccatctggctacaactgaaatgctttccctcttccctgacttccctgggtaacccttagggaagggaacctatagaggtgggggtttcaggtatcagattgtccccttctgccttcccttttattcccaggttcaagggggcaggcacagggaagagagatttgatcatctagtcccggttttgcctggatgtgagatgggctcagggcagggagggggtgatgctgtcatccttctcggctggagcaggaagatgaaggacgatgtcagactcattttcagcctcattaggcagcagacggagatggagggaggagagcaggaggctgggggatgggctctgcactgcagagaccagcagggactaaagaagagaggacatggggaactggaaaaataagccttccaggattgtggggagaaagacgctgtgggagaggccaggatgctgcattaggcacaggataacctgggaacccaggcacatgggtcctgctctccgaagtctgcaagtcaagaagggaacagagcacgccgaccctctccctttcccctctgtctctcttagtggctttacagtgggtaccctgtcagaaaccagcactgggggccctgccacccccacatggaaggagtgtcctatctgtaaggagcgctttcctgctgagagtgacaaggatgccctggaggaccacatggatggacacttctttttcagcacccaggaccccttcacctttgagtgatcttactccctcgtacatgcacaaatacacactcatgcacacacacactcacacacatgcatacacttaggtttcatgcccattttctatcacactgggctccatgatattctgttccctaagaactgcttctgtgtgccctgttttcatcccaagatttctcacttcatcctctcctacctggctcttttgtcccagggaggggtcctgttcggaagcagtggctgaatttatcccctgaaagtggttttggaggaaccgggatggaggaggccttcccctgtgggaatagaatcgtccactcctagccctggttgcttctgatacacagccactgcacacacacactcacactcacactcccttgtctgatgccccaaagccaattcctggggcaccctaccctctcttatttggagtttccgttggtttacctgagttttctctggggtctgcacagaggcagcagcatggacatcatggcctctcaggtcccttttggttctcagtttcattggttcctctttctgttcccccattgacttctgtgccccaccctagccttttccataaccttaggtattcagtttggaggggttttttgtatttttgaggattcctgtattctgtatcctctcctcgcatctcctcacatggaaagaaataatgtatttgtgccttctgtgaggaatggggggaacaagtggtcccaggtatccccatttccaaggcccccctccctctccaggtccccccacagcaataaaagcttccccctgatatccatccctttgtagtttgaacaaatatatttatatgatatgta

SEQ ID NO: 454884 - DNA, 3722 bp, Homo sapiens
cggagtgctgtttttgttgttggtgaaaggtgaggggaacagctgatccgtctgttgggaggacagatatctcaaggccaggatggaagaatcaccactaagccgggcaccatcccgtggtggagtcaactttctcaatgtagcccggacctacatccccaacaccaaggtggaatgtcactacacccttcccccaggcaccatgcccagtgccagtgactggattggcatcttcaaggtggaggctgcctgtgttcgggattaccacacatttgtgtggtcttccgtgcctgaaagtacaactgatggttcccccattcacaccagtgtccagttccaagccagctacctgcccaaaccaggagctcagctctaccagttccgatatgtgaaccgccagggccaggtgtgtgggcagagcccccctttccagttccgagagccaaggcccatggatgaactggtgaccctggaggaggctgatgggggctctgacatcctgctggttgtccccaaggcaactgtgttacagaaccagctcgatgagagccagcaagaacggaatgacctgatgcagctgaagctacagctggagggacaggtgacagagctgaggagccgagtgcaggagctcgagagggctctggcaactgccaggcaggagcacacggagctgatggaacagtacaaggggatttcccggtcccatggggagatcacagaagagagggacatcctgagccggcaacagggagaccatgtggcacgcatcctggagctagaggatgacatccagaccatcagtgagaaagtgctgacgaaggaagtggagctggacaggcttagagacacagtgaaggccctgactcgggaacaagagaagctccttgggcaactgaaagaagtacaagcagacaaggagcaaagtgaggctgagctccaagtggcacaacaggagaaccatcacttaaatttggacctgaaggaggcgaagagctggcaagaggagcagagtgctcaggctcagcgactgaaagacaaggtggcccagatgaaggacaccctaggccaggcccagcagcgggtggccgagctggagcccttgaaggagcagcttcgaggggcccaggagcttgcagcctcaagccagcagaaagccacccttcttggggaggagttggccagcgcagcagcagccagggaccgcaccatagccgaactacaccgcagccgcctggaagtggctgaagttaacggcaggctggctgagctcggtttgcacttgaaggaagaaaaatgccaatggagcaaggagcgggcagggctgctgcagagtgtggaggcagagaaggacaagatcctgaagctgagtgcagagatacttcgattggagaaggcagttcaggaggatgaggaggccgctgtggggctgagctgcccggcagctctgacagactcagaggacgagtccccagaagacatgaggctcccaccctatggcctttgtgagcgtggagacccaggctcctctcctgctgggcctcgagaggcttctccccttgttgtcatcagccagccggctcccatttctcctcacctctctgggccagctgaggacagtagctctgactcggaggctgaagatgagaagtcagtcctgatggcagctgtgcagagtgggggtgaggaggccaacttactgcttcctgaactgggcagtgccttctatgacatggccaggtgagttcaaccagcaaggccaggagggaggtgggaggaggtcagagggaaagggcatctgtgtggacagtcaccaggccctgctcccaacccctgcccttcttggcctcagccaagaaaaggagatacaggtatggttaacaaggaaaatgactcactgctccaaatcccagatgccttcaggtaatccctacccctatcttatcaatgcactcagaggtcctgcctttaactggcttctatgttgttctagcaccatcttctgcagagcccaaattgccctgcttcccctctctcctgcctctaccccttccccaaccaccaggtaggtacctagggtcctccggggaggaagggaggtgaccatggcccccagggataggagcagagagaagactgggatccagcatccatctggctacaactgaaatgctttccctcttccctgacttccctgggtaacccttagggaagggaacctatagaggtgggggtttcaggtatcagattgtccccttctgccttcccttttattcccaggttcaagggggcaggcacagggaagagagatttgatcatctagtcccggttttgcctggatgtgagatgggctcagggcagggagggggtgatgctgtcatccttctcggctggagcaggaagatgaaggacgatgtcagactcattttcagcctcattaggcagcagacggagatggagggaggagagcaggaggctgggggatgggctctgcactgcagagaccagcagggactaaagaagagaggacatggggaactggaaaaataagccttccaggattgtggggagaaagacgctgtgggagaggccaggatgctgcattaggcacaggataacctgggaacccaggcacatgggtcctgctctccgaagtctgcaagtcaagaagggaacagagcacgccgaccctctccctttcccctctgtctctcttagtggctttacagtgggtaccctgtcagaaaccagcactgggggccctgccacccccacatggaaggagtgtcctatctgtaaggagcgctttcctgctgagagtgacaaggatgccctggaggaccacatggatggacacttctttttcagcacccaggaccccttcacctttgagtgatcttactccctcgtacatgcacaaatacacactcatgcacacacacactcacacacatgcatacacttaggtttcatgcccattttctatcacactgggctccatgatattctgttccctaagaactgcttctgtgtgccctgttttcatcccaagatttctcacttcatcctctcctacctggctcttttgtcccagggaggggtcctgttcggaagcagtggctgaatttatcccctgaaagtggttttggaggaaccgggatggaggaggccttcccctgtgggaatagaatcgtccactcctagccctggttgcttctgatacacagccactgcacacacacactcacactcacactcccttgtctgatgccccaaagccaattcctggggcaccctaccctctcttatttggagtttccgttggtttacctgagttttctctggggtctgcacagaggcagcagcatggacatcatggcctctcaggtcccttttggttctcagtttcattggttcctctttctgttcccccattgacttctgtgccccaccctagccttttccataaccttaggtattcagtttggaggggttttttgtatttttgaggattcctgtattctgtatcctctcctcgcatctcctcacatggaaagaaataatgtatttgtgccttctgtgaggaatggggggaacaagtggtcccaggtatccccatttccaaggcccccctccctctccaggtccccccacagcaataaaagcttccccctgatatccatccctttgtagtttgaacaaatatatttatatgatatgta

SEQ ID NO: 454885 - DNA, 4032 bp, Homo sapiens
cggagtgctgtttttgttgttggtgaaaggtgaggggaacagctgatccgtctgttggagattagttgctgctttctgatgtcataactcattcctggatacagctgggtcaacaagcttaggagtaggaggacagatatctcaaggccaggatggaagaatcaccactaagccgggcaccatcccgtggtggagtcaactttctcaatgtagcccggacctacatccccaacaccaaggtggaatgtcactacacccttcccccaggcaccatgcccagtgccagtgactggattggcatcttcaaggtggaggctgcctgtgttcgggattaccacacatttgtgtggtcttccgtgcctgaaagtacaactgatggttcccccattcacaccagtgtccagttccaagccagctacctgcccaaaccaggagctcagctctaccagttccgatatgtgaaccgccagggccaggtgtgtgggcagagcccccctttccagttccgagagccaaggcccatggatgaactggtgaccctggaggaggctgatgggggctctgacatcctgctggttgtccccaaggcaactgtgttacagaaccagctcgatgagagccagcaagaacggaatgacctgatgcagctgaagctacagctggagggacaggtgacagagctgaggagccgagtgcaggagctcgagagggctctggcaactgccaggcaggagcacacggagctgatggaacagtacaaggggatttcccggtcccatggggagatcacagaagagagggacatcctgagccggcaacagggagaccatgtggcacgcatcctggagctagaggatgacatccagaccatcagtgagaaagtgctgacgaaggaagtggagctggacaggcttagagacacagtgaaggccctgactcgggaacaagagaagctccttgggcaactgaaagaagtacaagcagacaaggagcaaagtgaggctgagctccaagtggcacaacaggagaaccatcacttaaatttggacctgaaggaggcgaagagctggcaagaggagcagagtgctcaggctcagcgactgaaagacaaggtggcccagatgaaggacaccctaggccaggcccagcagcgggtggccgagctggagcccttgaaggagcagcttcgaggggcccaggagcttgcagcctcaagccagcagaaagccacccttcttggggaggagttggccagcgcagcagcagccagggaccgcaccatagccgaactacaccgcagccgcctggaagtggctgaagttaacggcaggctggctgagctcggtttgcacttgaaggaagaaaaatgccaatggagcaaggagcgggcagggctgctgcagagtgtggaggcagagaaggacaagatcctgaagctgagtgcagagatacttcgattggagaaggcagttcaggaggagaggacccaaaaccaagtgttcaagactgagctggcccgggagaaggattctagcctggtacagttgtcagaaagtaagcgggagctgacagagctgcggtcagccctgcgtgtgctccagaaggaaaaggagcagttacaggaggagaaacaggaattgctagagtacatgagaaagctagaggcccgcctggagaaggtggcagatgagaagtggaatgaggatgccaccacagaggatgaggaggccgctgtggggctgagctgcccggcagctctgacagactcagaggacgagtccccagaagacatgaggctcccaccctatggcctttgtgagcgtggagacccaggctcctctcctgctgggcctcgagaggcttctccccttgttgtcatcagccagccggctcccatttctcctcacctctctgggccagctgaggacagtagctctgactcggaggctgaagatgagaagtcagtcctgatggcagctgtgcagagtgggggtgaggaggccaacttactgcttcctgaactgggcagtgccttctatgacatggccaggtgagttcaaccagcaaggccaggagggaggtgggaggaggtcagagggaaagggcatctgtgtggacagtcaccaggccctgctcccaacccctgcccttcttggcctcagccaagaaaaggagatacaggtatggttaacaaggaaaatgactcactgctccaaatcccagatgccttcaggtaatccctacccctatcttatcaatgcactcagaggtcctgcctttaactggcttctatgttgttctagcaccatcttctgcagagcccaaattgccctgcttcccctctctcctgcctctaccccttccccaaccaccaggtaggtacctagggtcctccggggaggaagggaggtgaccatggcccccagggataggagcagagagaagactgggatccagcatccatctggctacaactgaaatgctttccctcttccctgacttccctgggtaacccttagggaagggaacctatagaggtgggggtttcaggtatcagattgtccccttctgccttcccttttattcccaggttcaagggggcaggcacagggaagagagatttgatcatctagtcccggttttgcctggatgtgagatgggctcagggcagggagggggtgatgctgtcatccttctcggctggagcaggaagatgaaggacgatgtcagactcattttcagcctcattaggcagcagacggagatggagggaggagagcaggaggctgggggatgggctctgcactgcagagaccagcagggactaaagaagagaggacatggggaactggaaaaataagccttccaggattgtggggagaaagacgctgtgggagaggccaggatgctgcattaggcacaggataacctgggaacccaggcacatgggtcctgctctccgaagtctgcaagtcaagaagggaacagagcacgccgaccctctccctttcccctctgtctctcttagtggctttacagtgggtaccctgtcagaaaccagcactgggggccctgccacccccacatggaaggagtgtcctatctgtaaggagcgctttcctgctgagagtgacaaggatgccctggaggaccacatggatggacacttctttttcagcacccaggaccccttcacctttgagtgatcttactccctcgtacatgcacaaatacacactcatgcacacacacactcacacacatgcatacacttaggtttcatgcccattttctatcacactgggctccatgatattctgttccctaagaactgcttctgtgtgccctgttttcatcccaagatttctcacttcatcctctcctacctggctcttttgtcccagggaggggtcctgttcggaagcagtggctgaatttatcccctgaaagtggttttggaggaaccgggatggaggaggccttcccctgtgggaatagaatcgtccactcctagccctggttgcttctgatacacagccactgcacacacacactcacactcacactcccttgtctgatgccccaaagccaattcctggggcaccctaccctctcttatttggagtttccgttggtttacctgagttttctctggggtctgcacagaggcagcagcatggacatcatggcctctcaggtcccttttggttctcagtttcattggttcctctttctgttcccccattgacttctgtgccccaccctagccttttccataaccttaggtattcagtttggaggggttttttgtatttttgaggattcctgtattctgtatcctctcctcgcatctcctcacatggaaagaaataatgtatttgtgccttctgtgaggaatggggggaacaagtggtcccaggtatccccatttccaaggcccccctccctctccaggtccccccacagcaataaaagcttccccctgatatccatccctttgtagtttgaacaaatatatttatatgatatgta

SEQ ID NO: 454886 - DNA, 3928 bp, Homo sapiens
ccactgcactccagcctgggcgatggagcaagactctgtctcaagataaaataaaataaaaagtgttaccacagtgtctggtacatggtacgcactcactacatggtaactagcattattatgattatgatagaggggcagtgggtttgggaaagaaaggaaggagagggacaggcagaaaggagggagaagagtatggcctgtgggaggtggagaagagaagaaacagtatatggaacaccgagcaaggggctggggccaaggacagtggattattggggtcctgggtccattcttcttcccacagccagctacctgcccaaaccaggagctcagctctaccagttccgatatgtgaaccgccagggccaggtgtgtgggcagagcccccctttccagttccgagagccaaggcccatggatgaactggtgaccctggaggaggctgatgggggctctgacatcctgctggttgtccccaaggcaactgtgttacagaaccagctcgatgagagccagcaagaacggaatgacctgatgcagctgaagctacagctggagggacaggtgacagagctgaggagccgagtgcaggagctcgagagggctctggcaactgccaggcaggagcacacggagctgatggaacagtacaaggggatttcccggtcccatggggagatcacagaagagagggacatcctgagccggcaacagggagaccatgtggcacgcatcctggagctagaggatgacatccagaccatcagtgagaaagtgctgacgaaggaagtggagctggacaggcttagagacacagtgaaggccctgactcgggaacaagagaagctccttgggcaactgaaagaagtacaagcagacaaggagcaaagtgaggctgagctccaagtggcacaacaggagaaccatcacttaaatttggacctgaaggaggcgaagagctggcaagaggagcagagtgctcaggctcagcgactgaaagacaaggtggcccagatgaaggacaccctaggccaggcccagcagcgggtggccgagctggagcccttgaaggagcagcttcgaggggcccaggagcttgcagcctcaagccagcagaaagccacccttcttggggaggagttggccagcgcagcagcagccagggaccgcaccatagccgaactacaccgcagccgcctggaagtggctgaagttaacggcaggctggctgagctcggtttgcacttgaaggaagaaaaatgccaatggagcaaggagcgggcagggctgctgcagagtgtggaggcagagaaggacaagatcctgaagctgagtgcagagatacttcgattggagaaggcagttcaggaggagaggacccaaaaccaagtgttcaagactgagctggcccgggagaaggattctagcctggtacagttgtcagaaagtaagcgggagctgacagagctgcggtcagccctgcgtgtgctccagaaggaaaaggagcagttacaggaggagaaacaggaattgctagagtacatgagaaagctagaggcccgcctggagaaggtggcagatgagaagtggaatgaggatgccaccacagaggatgaggaggccgctgtggggctgagctgcccggcagctctgacagactcagaggacgagtccccagaagacatgaggctcccaccctatggcctttgtgagcgtggagacccaggctcctctcctgctgggcctcgagaggcttctccccttgttgtcatcagccagccggctcccatttctcctcacctctctgggccagctgaggacagtagctctgactcggaggctgaagatgagaagtcagtcctgatggcagctgtgcagagtgggggtgaggaggccaacttactgcttcctgaactgggcagtgccttctatgacatggccaggtgagttcaaccagcaaggccaggagggaggtgggaggaggtcagagggaaagggcatctgtgtggacagtcaccaggccctgctcccaacccctgcccttcttggcctcagccaagaaaaggagatacaggtatggttaacaaggaaaatgactcactgctccaaatcccagatgccttcaggtaatccctacccctatcttatcaatgcactcagaggtcctgcctttaactggcttctatgttgttctagcaccatcttctgcagagcccaaattgccctgcttcccctctctcctgcctctaccccttccccaaccaccaggtaggtacctagggtcctccggggaggaagggaggtgaccatggcccccagggataggagcagagagaagactgggatccagcatccatctggctacaactgaaatgctttccctcttccctgacttccctgggtaacccttagggaagggaacctatagaggtgggggtttcaggtatcagattgtccccttctgccttcccttttattcccaggttcaagggggcaggcacagggaagagagatttgatcatctagtcccggttttgcctggatgtgagatgggctcagggcagggagggggtgatgctgtcatccttctcggctggagcaggaagatgaaggacgatgtcagactcattttcagcctcattaggcagcagacggagatggagggaggagagcaggaggctgggggatgggctctgcactgcagagaccagcagggactaaagaagagaggacatggggaactggaaaaataagccttccaggattgtggggagaaagacgctgtgggagaggccaggatgctgcattaggcacaggataacctgggaacccaggcacatgggtcctgctctccgaagtctgcaagtcaagaagggaacagagcacgccgaccctctccctttcccctctgtctctcttagtggctttacagtgggtaccctgtcagaaaccagcactgggggccctgccacccccacatggaaggagtgtcctatctgtaaggagcgctttcctgctgagagtgacaaggatgccctggaggaccacatggatggacacttctttttcagcacccaggaccccttcacctttgagtgatcttactccctcgtacatgcacaaatacacactcatgcacacacacactcacacacatgcatacacttaggtttcatgcccattttctatcacactgggctccatgatattctgttccctaagaactgcttctgtgtgccctgttttcatcccaagatttctcacttcatcctctcctacctggctcttttgtcccagggaggggtcctgttcggaagcagtggctgaatttatcccctgaaagtggttttggaggaaccgggatggaggaggccttcccctgtgggaatagaatcgtccactcctagccctggttgcttctgatacacagccactgcacacacacactcacactcacactcccttgtctgatgccccaaagccaattcctggggcaccctaccctctcttatttggagtttccgttggtttacctgagttttctctggggtctgcacagaggcagcagcatggacatcatggcctctcaggtcccttttggttctcagtttcattggttcctctttctgttcccccattgacttctgtgccccaccctagccttttccataaccttaggtattcagtttggaggggttttttgtatttttgaggattcctgtattctgtatcctctcctcgcatctcctcacatggaaagaaataatgtatttgtgccttctgtgaggaatggggggaacaagtggtcccaggtatccccatttccaaggcccccctccctctccaggtccccccacagcaataaaagcttccccctgatatccatccctttgtagtttgaacaaatatatttatatgatatgta

SEQ ID NO: 454887 - DNA, 3922 bp, Homo sapiens
cggagtgctgtttttgttgttggtgaaaggtgaggggaacagctgatccgtctgttgggaggacagatatctcaaggccaggatggaagaatcaccactaagccgggcaccatcccgtggtggagtcaactttctcaatgtagcccggacctacatccccaacaccaaggtggaatgtcactacacccttcccccaggcaccatgcccagtgccagtgactggattggcatcttcaaggtggaggctgcctgtgttcgggattaccacacatttgtgtggtcttccgtgcctgaaagtacaactgatggttcccccattcacaccagtgtccagttccaagccagctacctgcccaaaccaggagctcagctctaccagttccgatatgtgaaccgccagggccaggtgtgtgggcagagcccccctttccagttccgagagccaaggcccatggatgaactggtgaccctggaggaggctgatgggggctctgacatcctgctggttgtccccaaggcaactgtgttacagaaccagctcgatgagagccagcaagaacggaatgacctgatgcagctgaagctacagctggagggacaggtgacagagctgaggagccgagtgcaggagctcgagagggctctggcaactgccaggcaggagcacacggagctgatggaacagtacaaggggatttcccggtcccatggggagatcacagaagagagggacatcctgagccggcaacagggagaccatgtggcacgcatcctggagctagaggatgacatccagaccatcagtgagaaagtgctgacgaaggaagtggagctggacaggcttagagacacagtgaaggccctgactcgggaacaagagaagctccttgggcaactgaaagaagtacaagcagacaaggagcaaagtgaggctgagctccaagtggcacaacaggagaaccatcacttaaatttggacctgaaggaggcgaagagctggcaagaggagcagagtgctcaggctcagcgactgaaagacaaggtggcccagatgaaggacaccctaggccaggcccagcagcgggtggccgagctggagcccttgaaggagcagcttcgaggggcccaggagcttgcagcctcaagccagcagaaagccacccttcttggggaggagttggccagcgcagcagcagccagggaccgcaccatagccgaactacaccgcagccgcctggaagtggctgaagttaacggcaggctggctgagctcggtttgcacttgaaggaagaaaaatgccaatggagcaaggagcgggcagggctgctgcagagtgtggaggcagagaaggacaagatcctgaagctgagtgcagagatacttcgattggagaaggcagttcaggaggagaggacccaaaaccaagtgttcaagactgagctggcccgggagaaggattctagcctggtacagttgtcagaaagtaagcgggagctgacagagctgcggtcagccctgcgtgtgctccagaaggaaaaggagcagttacaggaggagaaacaggaattgctagagtacatgagaaagctagaggcccgcctggagaaggtggcagatgagaagtggaatgaggatgccaccacagaggatgaggaggccgctgtggggctgagctgcccggcagctctgacagactcagaggacgagtccccagaagacatgaggctcccaccctatggcctttgtgagcgtggagacccaggctcctctcctgctgggcctcgagaggcttctccccttgttgtcatcagccagccggctcccatttctcctcacctctctgggccagctgaggacagtagctctgactcggaggctgaagatgagaagtcagtcctgatggcagctgtgcagagtgggggtgaggaggccaacttactgcttcctgaactgggcagtgccttctatgacatggccaggtgagttcaaccagcaaggccaggagggaggtgggaggaggtcagagggaaagggcatctgtgtggacagtcaccaggccctgctcccaacccctgcccttcttggcctcagccaagaaaaggagatacaggtatggttaacaaggaaaatgactcactgctccaaatcccagatgccttcaggtaatccctacccctatcttatcaatgcactcagaggtcctgcctttaactggcttctatgttgttctagcaccatcttctgcagagcccaaattgccctgcttcccctctctcctgcctctaccccttccccaaccaccaggtaggtacctagggtcctccggggaggaagggaggtgaccatggcccccagggataggagcagagagaagactgggatccagcatccatctggctacaactgaaatgctttccctcttccctgacttccctgggtaacccttagggaagggaacctatagaggtgggggtttcaggtatcagattgtccccttctgccttcccttttattcccaggttcaagggggcaggcacagggaagagagatttgatcatctagtcccggttttgcctggatgtgagatgggctcagggcagggagggggtgatgctgtcatccttctcggctggagcaggaagatgaaggacgatgtcagactcattttcagcctcattaggcagcagacggagatggagggaggagagcaggaggctgggggatgggctctgcactgcagagaccagcagggactaaagaagagaggacatggggaactggaaaaataagccttccaggattgtggggagaaagacgctgtgggagaggccaggatgctgcattaggcacaggataacctgggaacccaggcacatgggtcctgctctccgaagtctgcaagtcaagaagggaacagagcacgccgaccctctccctttcccctctgtctctcttagtggctttacagtgggtaccctgtcagaaaccagcactgggggccctgccacccccacatggaaggagtgtcctatctgtaaggagcgctttcctgctgagagtgacaaggatgccctggaggaccacatggatggacacttctttttcagcacccaggaccccttcacctttgagtgatcttactccctcgtacatgcacaaatacacactcatgcacacacacactcacacacatgcatacacttaggtttcatgcccattttctatcacactgggctccatgatattctgttccctaagaactgcttctgtgtgccctgttttcatcccaagatttctcacttcatcctctcctacctggctcttttgtcccagggaggggtcctgttcggaagcagtggctgaatttatcccctgaaagtggttttggaggaaccgggatggaggaggccttcccctgtgggaatagaatcgtccactcctagccctggttgcttctgatacacagccactgcacacacacactcacactcacactcccttgtctgatgccccaaagccaattcctggggcaccctaccctctcttatttggagtttccgttggtttacctgagttttctctggggtctgcacagaggcagcagcatggacatcatggcctctcaggtcccttttggttctcagtttcattggttcctctttctgttcccccattgacttctgtgccccaccctagccttttccataaccttaggtattcagtttggaggggttttttgtatttttgaggattcctgtattctgtatcctctcctcgcatctcctcacatggaaagaaataatgtatttgtgccttctgtgaggaatggggggaacaagtggtcccaggtatccccatttccaaggcccccctccctctccaggtccccccacagcaataaaagcttccccctgatatcca

SEQ ID NO: 454888 - DNA, 2459 bp, Homo sapiens
cgggttcaagagattcttctgtctcagcctcctgagtagctgggattacaggcacccgccaccacgcccagctaattttttgtatttttagtagagatggggtttcaccatgttggccaggctggtctggaacttctgacctcaggtgatccgcccacctcggcctcccaaatcatgccgagattgcaggcatgagccactgcacctggccttgtgttgttttttcaaaacgcctctcctgcctcactcttcctaagcccctcaggtcactgtcctagccttggctgctcttcccatacctgtcccaatgtgctgctcccccatcttgggacaccaccccaaagcccaaccctgtctctttggcatccaggaggctgaagatgagaagtcagtcctgatggcagctgtgcagagtgggggtgaggaggccaacttactgcttcctgaactgggcagtgccttctatgacatggccaggtgagttcaaccagcaaggccaggagggaggtgggaggaggtcagagggaaagggcatctgtgtggacagtcaccaggccctgctcccaacccctgcccttcttggcctcagccaagaaaaggagatacaggtatggttaacaaggaaaatgactcactgctccaaatcccagatgccttcaggtaatccctacccctatcttatcaatgcactcagaggtcctgcctttaactggcttctatgttgttctagcaccatcttctgcagagcccaaattgccctgcttcccctctctcctgcctctaccccttccccaaccaccaggtaggtacctagggtcctccggggaggaagggaggtgaccatggcccccagggataggagcagagagaagactgggatccagcatccatctggctacaactgaaatgctttccctcttccctgacttccctgggtaacccttagggaagggaacctatagaggtgggggtttcaggtatcagattgtccccttctgccttcccttttattcccaggttcaagggggcaggcacagggaagagagatttgatcatctagtcccggttttgcctggatgtgagatgggctcagggcagggagggggtgatgctgtcatccttctcggctggagcaggaagatgaaggacgatgtcagactcattttcagcctcattaggcagcagacggagatggagggaggagagcaggaggctgggggatgggctctgcactgcagagaccagcagggactaaagaagagaggacatggggaactggaaaaataagccttccaggattgtggggagaaagacgctgtgggagaggccaggatgctgcattaggcacaggataacctgggaacccaggcacatgggtcctgctctccgaagtctgcaagtcaagaagggaacagagcacgccgaccctctccctttcccctctgtctctcttagtggctttacagtgggtaccctgtcagaaaccagcactgggggccctgccacccccacatggaaggagtgtcctatctgtaaggagcgctttcctgctgagagtgacaaggatgccctggaggaccacatggatggacacttctttttcagcacccaggaccccttcacctttgagtgatcttactccctcgtacatgcacaaatacacactcatgcacacacacactcacacacatgcatacacttaggtttcatgcccattttctatcacactgggctccatgatattctgttccctaagaactgcttctgtgtgccctgttttcatcccaagatttctcacttcatcctctcctacctggctcttttgtcccagggaggggtcctgttcggaagcagtggctgaatttatcccctgaaagtggttttggaggaaccgggatggaggaggccttcccctgtgggaatagaatcgtccactcctagccctggttgcttctgatacacagccactgcacacacacactcacactcacactcccttgtctgatgccccaaagccaattcctggggcaccctaccctctcttatttggagtttccgttggtttacctgagttttctctggggtctgcacagaggcagcagcatggacatcatggcctctcaggtcccttttggttctcagtttcattggttcctctttctgttcccccattgacttctgtgccccaccctagccttttccataaccttaggtattcagtttggaggggttttttgtatttttgaggattcctgtattctgtatcctctcctcgcatctcctcacatggaaagaaataatgtatttgtgccttctgtgaggaatggggggaacaagtggtcccaggtatccccatttccaaggcccccctccctctccaggtccccccacagcaataaaagcttccccctgatatccatccctttgtagtttgaacaaatatatttatatgatatgta

SEQ ID NO: 454889 - DNA, 4012 bp, Homo sapiens
cggagtgctgtttttgttgttggtgaaaggtgaggggaacagctgatccgtctgttgggaggacagatatctcaaggccaggatggaagaatcaccactaagccgggcaccatcccgtggtggagtcaactttctcaatgtagcccggacctacatccccaacaccaaggtggaatgtcactacacccttcccccaggcaccatgcccagtgccagtgactggattggcatcttcaaggtggaggctgcctgtgttcgggattaccacacatttgtgtggtcttccgtgcctgaaagtacaactgatggttcccccattcacaccagtgtccagttccaagccagctacctgcccaaaccaggagctcagctctaccagttccgatatgtgaaccgccagggccaggtgtgtgggcagagcccccctttccagttccgagagccaaggcccatggatgaactggtgaccctggaggaggctgatgggggctctgacatcctgctggttgtccccaaggcaactgtgttacagaaccagctcgatgagagccagcaagaacggaatgacctgatgcagctgaagctacagctggagggacaggtgacagagctgaggagccgagtgcaggagctcgagagggctctggcaactgccaggcaggagcacacggagctgatggaacagtacaaggggatttcccggtcccatggggagatcacagaagagagggacatcctgagccggcaacagggagaccatgtggcacgcatcctggagctagaggatgacatccagaccatcagtgagaaagtgctgacgaaggaagtggagctggacaggcttagagacacagtgaaggccctgactcgggaacaagagaagctccttgggcaactgaaagaagtacaagcagacaaggagcaaagtgaggctgagctccaagtggcacaacaggagaaccatcacttaaatttggacctgaaggaggcgaagagctggcaagaggagcagagtgctcaggctcagcgactgaaagacaaggtggcccagatgaaggacaccctaggccaggcccagcagcgggtggccgagctggagcccttgaaggagcagcttcgaggggcccaggagcttgcagcctcaagccagcagaaagccacccttcttggggaggagttggccagcgcagcagcagccagggaccgcaccatagccgaactacaccgcagccgcctggaagtggctgaagttaacggcaggctggctgagctcggtttgcacttgaaggaagaaaaatgccaatggagcaaggagcgggcagggctgctgcagagtgtggaggcagagaaggacaagatcctgaagctgagtgcagagatacttcgattggagaaggcagttcaggaggagaggacccaaaaccaagtgttcaagactgagctggcccgggagaaggattctagcctggtacagttgtcagaaagtaagcgggagctgacagagctgcggtcagccctgcgtgtgctccagaaggaaaaggagcagttacaggaggagaaacaggaattgctagagtacatgagaaagctagaggcccgcctggagaaggtggcagatgagaagtggaatgaggatgccaccacagaggatgaggaggccgctgtggggctgagctgcccggcagctctgacagactcagaggacgagtccccagaagacatgaggctcccaccctatggcctttgtgagcgtggagacccaggctcctctcctgctgggcctcgagaggcttctccccttgttgtcatcagccagccggctcccatttctcctcacctctctgggccagctgaggacagtagctctgactcggaggctgaagatgagaagtcagtcctgatggcagctgtgcagagtgggggtgaggaggccaacttactgcttcctgaactgggcagtgccttctatgacatggccaggtgagttcaaccagcaaggccaggagggaggtgggaggaggtcagagggaaagggcatctgtgtggacagtcaccaggccctgctcccaacccctgcccttcttggcctcagccaagaaaaggagatacaggtatggttaacaaggaaaatgactcactgctccaaatcccagatgccttcaggtaatccctacccctatcttatcaatgcactcagaggtcctgcctttaactggcttctatgttgttctagcaccatcttctgcagagcccaaattgccctgcttcccctctctcctgcctctaccccttccccaaccaccaggtaggtacctagggtcctccggggaggaagggaggtgaccatggcccccagggataggagcagagagaagactgggatccagcatccatctggctacaactgaaatgctttccctcttccctgacttccctgggtaacccttagggaagggaacctatagaggtgggggtttcaggtatcagattgtccccttctgccttcccttttattcccaggttcaagggggcaggcacagggaagagagatttgatcatctagtcccggttttgcctggatgtgagatgggctcagggcagggagggggtgatgctgtcatccttctcggctggagcaggaagatgaaggacgatgtcagactcattttcagcctcattaggcagcagacggagatggagggaggagagcaggaggctgggggatgggctctgcactgcagagaccagcagggactaaagaagagaggacatggggaactggaaaaataagccttccaggattgtggggagaaagacgctgtgggagaggccaggatgctgcattaggcacaggataacctgggaacccaggcacatgggtcctgctctccgaagtctgcaagtcaagaagggaacagagcacgccgaccctctccctttcccctctgtctctcttagtggctttacagtgggtaccctgtcagaaaccagcactgggggccctgccacccccacatggaaggagtgtcctatctgtaaggagcgctttcctgctgagagtgacaaggatgccctggaggaccacatggatggacacttctttttcagcacccaggaccccttcacctttgagtgatcttactccctcgtacatgcacaaatacacactcatgcacacacacactcacacacatgcatacacttaggtttcatgcccattttctatcacactgggctccatgatattctgttccctaagaactgcttctgtgtgccctgttttcatcccaagatttctcacttcatcctctcctacctggctcttttgtcccagggaggggtcctgttcggaagcagtggctgaatttatcccctgaaagtggttttggaggaaccgggatggaggaggccttcccctgtgggaatagaatcgtccactcctagccctggttgcttctgatacacagccactgcacacacacactcacactcacactcccttgtctgatgccccaaagccaattcctggggcaccctaccctctcttatttggagtttccgttggtttacctgagttttctctggggtctgcacagaggcagcagcatggacatcatggcctctcaggtcccttttggttctcagtttcattggttcctctttctgttcccccattgacttctgtgccccaccctagccttttccataaccttaggtattcagtttggaggggttttttgtatttttgaggattcctgtattctgtatcctctcctcgcatctcctcacatggaaagaaataatgtatttgtgccttctgtgaggaatggggggaacaagtggtcccaggtatccccatttccaaggcccccctccctctccaggtccccccacagcaataaaagcttccccctgatatccaaaaaacaaaatcctttcctttacctctcatctctccttcatcacctctccttcctctttcctcctcccccccctctctctccctcctcct

SEQ ID NO: 454890 - DNA, 3630 bp, Homo sapiens
cggagtgctgtttttgttgttggtgaaaggtgaggggaacagctgatccgtctgttgggaggacagatatctcaaggccaggatggaagaatcaccactaagccgggcaccatcccgtggtggagtcaactttctcaatgtagcccggacctacatccccaacaccaaggtggaatgtcactacacccttcccccaggcaccatgcccagtgccagtgactggattggcatcttcaaggtggaggctgcctgtgttcgggattaccacacatttgtgtggtcttccgtgcctgaaagtacaactgatggttcccccattcacaccagtgtccagttccaagccagctacctgcccaaaccaggagctcagctctaccagttccgatatgtgaaccgccagggccaggtgtgtgggcagagcccccctttccagttccgagagccaaggcccatggatgaactggtgaccctggaggaggctgatgggggctctgacatcctgctggttgtccccaaggcaactgtgttacagaaccagctcgatgagagccagcaagaacggaatgacctgatgcagctgaagctacagctggagggacaggtgacagagctgaggagccgagtgcaggagctcgagagggctctggcaactgccaggcaggagcacacggagctgatggaacagtacaaggggatttcccggtcccatggggagatcacagaagagagggacatcctgagccggcaacagggagaccatgtggcacgcatcctggagctagaggatgacatccagaccatcagtgagaaagtgctgacgaaggaagtggagctggacaggcttagagacacagtgaaggccctgactcgggaacaagagaagctccttgggcaactgaaagaagtacaagcagacaaggagcaaagtgaggctgagctccaagtggcacaacaggagaaccatcacttaaatttggacctgaaggaggcgaagagctggcaagaggagcagagtgctcaggctcagcgactgaaagacaaggtggcccagatgaaggacaccctaggccaggcccagcagcgggtggccgagctggagcccttgaaggagcagcttcgaggggcccaggagcttgcagcctcaagccagcagaaagccacccttcttggggaggagttggccagcgcagcagcagccagggaccgcaccatagccgaactacaccgcagccgcctggaagtggctgaagttaacggcaggctggctgagctcggtttgcacttgaaggaagaaaaatgccaatggagcaaggagcgggcagggctgctgcagagtgtggaggcagagaaggacaagatcctgaagctgagtgcagagatacttcgattggagaaggcagttcaggaggagaggacccaaaaccaagtgttcaagactgagctggcccgggagaaggattctagcctggtacagttgtcagaaagtaagcgggagctgacagagctgcggtcagccctgcgtgtgctccagaaggaaaaggagcagttacaggaggagaaacaggaattgctagagtacatgagaaagctagaggcccgcctggagaaggtggcagatgagaagtggaatgaggatgccaccacagaggatgaggaggccgctgtggggctgagctgcccggcagctctgacagactcagaggacgagtccccagaagacatgaggctcccaccctatggcctttgtgagcgtggagacccaggctcctctcctgctgggcctcgagaggcttctccccttgttgtcatcagccagccggctcccatttctcctcacctctctgggccagctgaggacagtagctctgactcggaggctgaagatgagaagtcagtcctgatggcagctgtgcagagtgggggtgaggaggccaacttactgcttcctgaactgggcagtgccttctatgacatggccaggtgagttcaaccagcaaggccaggagggaggtgggaggaggtcagagggaaagggcatctgtgtggacagtcaccaggccctgctcccaacccctgcccttcttggcctcagccaagaaaaggagatacaggtatggttaacaaggaaaatgactcactgctccaaatcccagatgccttcaggtaatccctacccctatcttatcaatgcactcagaggtcctgcctttaactggcttctatgttgttctagcaccatcttctgcagagcccaaattgccctgcttcccctctctcctgcctctaccccttccccaaccaccaggtaggtacctagggtcctccggggaggaagggaggtgaccatggcccccagggataggagcagagagaagactgggatccagcatccatctggctacaactgaaatgctttccctcttccctgacttccctgggtaacccttagggaagggaacctatagaggtgggggtttcaggtatcagattgtccccttctgccttcccttttattcccaggttcaagggggcaggcacagggaagagagatttgatcatctagtcccggttttgcctggatgtgagatgggctcagggcagggagggggtgatgctgtcatccttctcggctggagcaggaagatgaaggacgatgtcagactcattttcagcctcattaggcagcagacggagatggagggaggagagcaggaggctgggggatgggctctgcactgcagagaccagcagggactaaagaagagaggacatggggaactggaaaaataagccttccaggattgtggggagaaagacgctgtgggagaggccaggatgctgcattaggcacaggataacctgggaacccaggcacatgggtcctgctctccgaagtctgcaagtcaagaagggaacagagcacgccgaccctctccctttcccctctgtctctcttagtggctttacagtgggtaccctgtcagaaaccagcactgggggccctgccacccccacatggaaggagtgtcctatctgtaaggagcgctttcctgctgagagtgacaaggatgccctggaggaccacatggatggacacttctttttcagcacccaggaccccttcacctttgagtgatcttactccctcgtacatgcacaaatacacactcatgcacacacacactcacacacatgcatacacttaggtttcatgcccattttctatcacactgggctccatgatattctgttccctaagaactgcttctgtgtgccctgttttcatcccaagatttctcacttcatcctctcctacctggctcttttgtcccagggaggggtcctgttcggaagcagtggctgaatttatcccctgaaagtggttttggaggaaccgggatggaggaggccttcccctgtgggaatagaatcgtccactcctagccctggttgcttctgatacacagccactgcacacacacactcacactcacactcccttgtctgatgccccaaagccaattcctggggcaccctaccctccctctccaggtccccccacagcaataaaagcttccccctgatatccatccctttgtagtttgaacaaatatatttatatgatatgta

SEQ ID NO: 454891 - DNA, 1300 bp, Homo sapiens
cggagtgctgtttttgttgttggtgaaaggtgaggggaacagctgatccgtctgttgggaggacagatatctcaaggccaggatggaagaatcaccactaagccgggcaccatcccgtggtggagtcaactttctcaatgtagcccggacctacatccccaacaccaaggtggaatgtcactacacccttcccccaggcaccatgcccagtgccagtgactggattggcatcttcaaggtggaggctgcctgtgttcgggattaccacacatttgtgtggtcttccgtgcctgaaagtacaactgatggttcccccattcacaccagtgtccagttccaagccagctacctgcccaaaccaggagctcagctctaccagttccgatatgtgaaccgccagggccaggtgtgtgggcagagcccccctttccagttccgagagccaaggcccatggatgaactggtgaccctggaggaggctgatgggggctctgacatcctgctggttgtccccaaggcaactgtgttacagaaccagctcgatgagagccagcaagaacggaatgacctgatgcagctgaagctacagctggagggacaggtgacagagctgaggagccgagtgcaggagctcgagagggctctggcaactgccaggcaggagcacacggagctgatggaacagtacaaggggatttcccggtcccatggggagatcacagaagagagggacatcctgagccggcaacagggagaccatgtggcacgcatcctggagctagaggatgacatccagaccatcagtgagaaagtgctgacgaaggaagtggagctggacaggcttagagacaaggtagagccgagctcggctctagcttgtctgacttcatctacctgcgtcatgttcctctgcgcagagtccgacgtgtacactttgctgcaggtgttgtgtctggccctggtttggatcctcaagtcaacggtggctgctatcatttttccagtgatgatcttggcactggtagctgtcagaaaaaggcgtggactacctcttctcccagcatgacctcagcttcctggatgatgtcattccagacaaggacaccgaccaagaaggcggatgacgatgacatgggaagacgacgacgggaagtctggacggtgagcaggatgattctgtctgcccatactcagatgaagtccatgtcttaaatccattggcgtcatgtacagcagcttcctagcgaagcaacttctgggagaagatacatatcttgacgcagggtcatgtgtaagtctt

SEQ ID NO: 454892 - DNA, 1481 bp, Homo sapiens
  misc_feature (1417)..(1417): n is a, c, g, or t
cggagtgctgtttttgttgttggtgaaaggtgaggggaacagctgatccgtctgttgggaggacagatatctcaaggccaggatggaagaatcaccactaagccgggcaccatcccgtggtggagtcaactttctcaatgtagcccggacctacatccccaacaccaaggtggaatgtcactacacccttcccccaggcaccatgcccagtgccagtgactggattggcatcttcaaggtggaggctgcctgtgttcgggattaccacacatttgtgtggtcttccgtgcctgaaagtacaactgatggttcccccattcacaccagtgtccagttccaagccagctacctgcccaaaccaggagctcagctctaccagttccgatatgtgaaccgccagggccaggtgtgtgggcagagcccccctttccagttccgagagccaaggcccatggatgaactggtgaccctggaggaggctgatgggggctctgacatcctgctggttgtccccaaggcaactgtgttacagaaccagctcgatgagagccagcaagaacggaatgacctgatgcagctgaagctacagctggagggacaggtgacagagctgaggagccgagtgcaggagctcgagagggctctggcaactgccaggcaggagcacacggagctgatggaacagtacaaggtgggagctgggccaggtaggggacagggcctggctgctcacccagcatccaaaatctgaacccagtgaagagggtgaaggagagatgttagtgggcttttacaatggttctggcatcaaggaaataggtttaaggggtagtggctgggattaaacttgatgtgacaagagacatgttccaaacgtgtaatgagactcagttctttgaacataggaatgctggggtaaggtggaggtggccacgttgataggtaagggaatgttcccttacagtttctttttcaaggaaggcaatgtgatagccaggtggaagcagtcagaccctggtgtgctcttcctaagcctttgttccaccacttgagagatgagtcccaacctcccttttcttctgggggaaacttaatttcaggggatttcccggtcccatggggagatcacagaagagagggacatcctgagccggcaacagggagaccatgtggcacgcatcctggagctagaggatgacatccagaccatcagtgagaaagtgctgacgaaggaagtggagctggacaggtgaggggagtccactgaccccgtcacttcctctcccttccatgacccccgcactccagccccctctctcaggcaagcagacctgctgtctgcctcacacgctttctctttccctctcaccctcactcaagctagttactggggatacccttttctgccgagctctcncccgtcttgcccgatcctcctgttgtattccgtccccctcttatatcatgatcctcacctgctt

SEQ ID NO: 454893 - DNA, 442 bp, Homo sapiens
gtgttcttggtttgtgaaggactctgtgcttaactctcactgccccctcagcaactgcagctttctgccgaggccttggcccggtcattcttgtccagtttgataggttcaggaaattcgttgtattgactccactcctctttctgttcccccattgacttctgtgccccaccctagccttttccataaccttaggtattcagtttggaggggttttttgtatttttgaggattcctgtattctgtatcctctcctcgcatctcctcacatggaaagaaataatgtatttgtgccttctgtgaggaatggggggaacaagtggtcccaggtatccccatttccaaggcccccctccctctccaggtccccccacagcaataaaagcttccccctgatatccatccctttgtagtttgaacaaatatatttatatgatatgta

SEQ ID NO: 454894 - DNA, 472 bp, Homo sapiens
gaagaatgttaggttctttttgaactatctcccctttcctcaacgttaaatatacatttccacttcttggggccccttacttcccactttctagtctgttccctgccctggggtggggctttcctggctccaggcccccacattccatctccccacccccaccacgttcctgctaagcgcctcactccacccttgaagttgccgcctccagaattcttgacttcctggaataataagtcaagggacagaacctgtctttccttatatcctccccttccctttgtctcttggatgccagcagaagctttctgcttccctagaattcatgggggtaggcagctcagagagatgaaaagagctgagagctcaggagcctaaggatttgggctcagttcccctcgacccccagccatattctagctctgaaaactcaaccattcctttcagagattagttgctgctttctgatgtc

SEQ ID NO: 454895 - DNA, 489 bp, Homo sapiens
agacaggatggggacggacttggaaggccagacctacgtcctagagactaagagtgatacctcaaaaatgtcccgtaaccctcagggactagaaaccaggtatgccttatctccaggtgtagtggcaggggctgtgagtgtgtggtgctggagctgtggggggaaggaggtggactggaaagactttaggctatcaaccctttctttcataggaggacagatatctcaaggccaggatggaagaatcaccactaagccgggcaccatcccgtggtggagtcaactttctcaatgtagcccggacctacatccccaacaccaaggtggaatgtcactacacccttcccccaggcaccatgcccagtgccagtgactggattggcatcttcaaggtatctctggaaccccttttggcttaggtttatgggctgtgagttggttggaataaggggaatgattgggctcttggattctcaacctcaggttgat

SEQ ID NO: 454896 - DNA, 2984 bp, Homo sapiens
cggagtgctgtttttgttgttggtgaaaggtgaggggaacagctgatccgtctgttgggaggacagatatctcaaggccaggatggaagaatcaccactaagccgggcaccatcccgtggtggagtcaactttctcaatgtagcccggacctacatccccaacaccaaggtggaatgtcactacacccttcccccaggcaccatgcccagtgccagtgactggattggcatcttcaaggtggaggctgcctgtgttcgggattaccacacatttgtgtggtcttccgtgcctgaaagtacaactgatggttcccccattcacaccagtgtccagttccaagccagctacctgcccaaaccaggagctcagctctaccagttccgatatgtgaaccgccagggccaggtgtgtgggcagagcccccctttccagttccgagagccaaggcccatggatgaactggtgaccctggaggaggctgatgggggctctgacatcctgctggttgtccccaaggcaactgtgttacagaaccagctcgatgagagccagcaagaacggaatgacctgatgcagctgaagctacagctggagggacaggtgacagagctgaggagccgagtgcaggagctcgagagggctctggcaactgccaggcaggagcacacggagctgatggaacagtacaaggggatttcccggtcccatggggagatcacagaagagagggacatcctgagccggcaacagggagaccatgtggcacgcatcctggagctagaggatgacatccagaccatcagtgagaaagtgctgacgaaggaagtggagctggacaggcttagagacacagtgaaggccctgactcgggaacaagagaagctccttgggcaactgaaagaagtacaagcagacaaggagcaaagtgaggctgagctccaagtggcacaacaggagaaccatcacttaaatttggacctgaaggaggcgaagagctggcaagaggagcagagtgctcaggctcagcgactgaaagacaaggtggcccagatgaaggacaccctaggccaggcccagcagcgggtggccgagctggagcccttgaaggagcagcttcgaggggcccaggagcttgcagcctcaagccagcagaaagccacccttcttggggaggagttggccagcgcagcagcagccagggaccgcaccatagccgaactacaccgcagccgcctggaagtggctgaagttaacggcaggctggctgagctcggtttgcacttgaaggaagaaaaatgccaatggagcaaggagcgggcagggctgctgcagagtgtggaggcagagaaggacaagatcctgaagctgagtgcagagatacttcgattggagaaggcagttcaggaggagaggacccaaaaccaagtgttcaagactgagctggcccgggagaaggattctagcctggtacagttgtcagaaagtaagcgggagctgacagagctgcggtcagccctgcgtgtgctccagaaggaaaaggagcagttacaggaggagaaacaggaattgctagagtacatgagaaagctagaggcccgcctggagaaggtggcagatgagaagtggaatgaggatgccaccacagaggatgaggaggccgctgtggggctgagctgcccggcagctctgacagactcagaggacgagtccccagaagacatgaggctcccaccctatggcctttgtgagcgtggagacccaggctcctctcctgctgggcctcgagaggcttctccccttgttgtcatcagccagccggctcccatttctcctcacctctctgggccagctgaggacagtagctctgactcggaggctgaagatgagaagtcagtcctgatggcagctgtgcagagtgggggtgaggaggccaacttactgcttcctgaactgggcagtgccttctatgacatggccagtggctttacagtgggtaccctgtcagaaaccagcactgggggccctgccacccccacatggaaggagtgtcctatctgtaaggagcgctttcctgctgagagtgacaaggatgccctggaggaccacatggatggacacttctttttcagcacccaggaccccttcacctttgagtgatcttactccctcgtacatgcacaaatacacactcatgcacacacacactcacacacatgcatacacttaggtttcatgcccattttctatcacactgggctccatgatattctgttccctaagaactgcttctgtgtgccctgttttcatcccaagatttctcacttcatcctctcctacctggctcttttgtcccagggaggggtcctgttcggaagcagtggctgaatttatcccctgaaagtggttttggaggaaccgggatggaggaggccttcccctgtgggaatagaatcgtccactcctagccctggttgcttctgatacacagccactgcacacacacactcacactcacactcccttgtctgatgccccaaagccaattcctggggcaccctaccctctcttatttggagtttccgttggtttacctgagttttctctggggtctgcacagaggcagcagcatggacatcatggcctctcaggtcccttttggttctcagtttcattggttcctctttctgttcccccattgacttctgtgccccaccctagccttttccataaccttaggtattcagtttggaggggttttttgtatttttgaggattcctgtattctgtatcctctcctcgcatctcctcacatggaaagaaataatgtatttgtgccttctgtgaggaatggggggaacaagtggtcccaggtatccccatttccaaggcccccctccctctccaggtccccccacagcaataaaagcttccccctgatatccatccctttgtagtttgaacaaatatatttatatgatatgta

SEQ ID NO: 454897 - DNA, 2950 bp, Homo sapiens
ccgatacgccccggatttaccgggcatgaaccgtgaccgggcaccgctagcatccgtctgttgggaggacagatatctcaaggccaggatggaagaatcaccactaagccgggcaccatcccgtggtggagtcaactttctcaatgtagcccggacctacatccccaacaccaaggtggaatgtcactacacccttcccccaggcaccatgcccagtgccagtgactggattggcatcttcaaggtggaggctgcctgtgttcgggattaccacacatttgtgtggtcttccgtgcctgaaagtacaactgatggttcccccattcacaccagtgtccagttccaagccagctacctgcccaaaccaggagctcagctctaccagttccgatatgtgaaccgccagggccaggtgtgtgggcagagcccccctttccagttccgagagccaaggcccatggatgaactggtgaccctggaggaggctgatgggggctctgacatcctgctggttgtccccaaggcaactgtgttacagaaccagctcgatgagagccagcaagaacggaatgacctgatgcagctgaagctacagctggagggacaggtgacagagctgaggagccgagtgcaggagctcgagagggctctggcaactgccaggcaggagcacacggagctgatggaacagtacaaggggatttcccggtcccatggggagatcacagaagagagggacatcctgagccggcaacagggagaccatgtggcacgcatcctggagctagaggatgacatccagaccatcagtgagaaagtgctgacgaaggaagtggagctggacaggcttagagacacagtgaaggccctgactcgggaacaagagaagctccttgggcaactgaaagaagtacaagcagacaaggagcaaagtgaggctgagctccaagtggcacaacaggagaaccatcacttaaatttggacctgaaggaggcgaagagctggcaagaggagcagagtgctcaggctcagcgactgaaagacaaggtggcccagatgaaggacaccctaggccaggcccagcagcgggtggccgagctggagcccttgaaggagcagcttcgaggggcccaggagcttgcagcctcaagccagcagaaagccacccttcttggggaggagttggccagcgcagcagcagccagggaccgcaccatagccgaactacaccgcagccgcctggaagtggctgaagttaacggcaggctggctgagctcggtttgcacttgaaggaagaaaaatgccaatggagcaaggagcgggcagggctgctgcagagtgtggaggcagagaaggacaagatcctgaagctgagtgcagagatacttcgattggagaaggcagttcaggaggagaggacccaaaaccaagtgttcaagactgagctggcccgggagaaggattctagcctggtacagttgtcagaaagtaagcgggagctgacagagctgcggtcagccctgcgtgtgctccagaaggaaaaggagcagttacaggaggagaaacaggaattgctagagtacatgagaaagctagaggcccgcctggagaaggtggcagatgagaagtggaatgaggatgccaccacagaggatgaggaggccgctgtggggctgagctgcccggcagctctgacagactcagaggacgagtccccagaagacatgaggctcccaccctatggcctttgtgagcgtggagacccaggctcctctcctgctgggcctcgagaggcttctccccttgttgtcatcagccagccggctcccatttctcctcacctctctgggccagctgaggacagtagctctgactcggaggctgaagatgagaagtcagtcctgatggcagctgtgcagagtgggggtgaggaggccaacttactgcttcctgaactgggcagtgccttctatgacatggccagtggctttacagtgggtaccctgtcagaaaccagcactgggggccctgccacccccacatggaaggagtgtcctatctgtaaggagcgctttcctgctgagagtgacaaggatgccctggaggaccacatggatggacacttctttttcagcacccaggaccccttcacctttgagtgatcttactccctcgtacatgcacaaatacacactcatgcacacacacactcacacacatgcatacacttaggtttcatgcccattttctatcacactgggctccatgatattctgttccctaagaactgcttctgtgtgccctgttttcatcccaagatttctcacttcatcctctcctacctggctcttttgtcccagggaggggtcctgttcggaagcagtggctgaatttatcccctgaaagtggttttggaggaaccgggatggaggaggccttcccctgtgggaatagaatcgtccactcctagccctggttgcttctgatacacagccactgcacacacacactcacactcacactcccttgtctgatgccccaaagccaattcctggggcaccctaccctctcttatttggagtttccgttggtttacctgagttttctctggggtctgcacagaggcagcagcatggacatcatggcctctcaggtcccttttggttctcagtttcattggttcctctttctgttcccccattgacttctgtgccccaccctagccttttccataaccttaggtattcagtttggaggggttttttgtatttttgaggattcctgtattctgtatcctctcctcgcatctcctcacatggaaagaaataatgtatttgtgccttctgtgaggaatggggggaacaagtggtcccaggtatccccatttccaaggcccccctccctctccaggtccccccacagcaataaaagcttccccctgatatcca

SEQ ID NO: 454898 - DNA, 3824 bp, Homo sapiens
cggagtgctgtttttgttgttggtgaaaggtgaggggaacagctgatccgtctgttgggaggacagatatctcaaggccaggatggaagaatcaccactaagccgggcaccatcccgtggtggagtcaactttctcaatgtagcccggacctacatccccaacaccaaggtggaatgtcactacacccttcccccaggcaccatgcccagtgccagtgactggattggcatcttcaaggtggaggctgcctgtgttcgggattaccacacatttgtgtggtcttccgtgcctgaaagtacaactgatggttcccccattcacaccagtgtccagttccaagccagctacctgcccaaaccaggagctcagctctaccagttccgatatgtgaaccgccagggccaggtgtgtgggcagagcccccctttccagttccgagagccaaggcccatggatgaactggtgaccctggaggaggctgatgggggctctgacatcctgctggttgtccccaaggcaactgtgttacagaaccagctcgatgagagccagcaagaacggaatgacctgatgcagctgaagctacagctggagggacaggtgacagagctgaggagccgagtgcaggagctcgagagggctctggcaactgccaggcaggagcacacggagctgatggaacagtacaaggggatttcccggtcccatggggagatcacagaagagagggacatcctgagccggcaacagggagaccatgtggcacgcatcctggagctagaggatgacatccagaccatcagtgagaaagtgctgacgaaggaagtggagctggacaggcttagagacacagtgaaggccctgactcgggaacaagagaagctccttgggcaactgaaagaagtacaagcagacaaggagcaaagtgaggctgagctccaagtggcacaacaggagaaccatcacttaaatttggacctgaaggaggcgaagagctggcaagaggagcagagtgctcaggctcagcgactgaaagacaaggtggcccagatgaaggacaccctaggccaggcccagcagcgggtggccgagctggagcccttgaaggagcagcttcgaggggcccaggagcttgcagcctcaagccagcagaaagccacccttcttggggaggagttggccagcgcagcagcagccagggaccgcaccatagccgaactacaccgcagccgcctggaagtggctgaagttaacggcaggctggctgagctcggtttgcacttgaaggaagaaaaatgccaatggagcaaggagcgggcagggctgctgcagagtgtggaggcagagaaggacaagatcctgaagctgagtgcagagatacttcgattggagaaggcagttcaggaggagaggacccaaaaccaagtgttcaagactgagctggcccgggagaaggattctagcctggtacagttgtcagaaagtaagcgggagctgacagagctgcggtcagccctgcgtgtgctccagaaggaaaaggagcagttacaggaggagaaacaggaattgctagagtacatgagaaagctagaggcccgcctggagaaggtggcagatgagaagtggaatgaggatgccaccacagaggatgaggaggccgctgtggggctgagctgcccggcagctctgacagactcagaggacgagtccccagaagacatgaggctcccaccctatggcctttgtgagcgtggagacccaggctcctctcctgctgggcctcgagaggcttctccccttgttgtcatcagccagccggctcccatttctcctcacctctctgggccagctgaggacagtagctctgactcggaggctgaagatgagaagtcagtcctgatggcagctgtgcagagtgggggtgaggaggccaacttactgcttcctgaactgggcagtgccttctatgacatggccaggtgagttcaaccagcaaggccaggagggaggtgggaggaggtcagagggaaagggcatctgtgtggacagtcaccaggccctgctcccaacccctgcccttcttggcctcagccaagaaaaggagatacaggtatggttaacaaggaaaatgactcactgctccaaatcccagatgccttcaggtaatccctacccctatcttatcaatgcactcagaggtcctgcctttaactggcttctatgttgttctagcaccatcttctgcagagcccaaattgccctgcttcccctctctcctgcctctaccccttccccaaccaccaggtaggtacctagggtcctccggggaggaagggaggtgaccatggcccccagggataggagcagagagaagactgggatccagcatccatctggctacaactgaaatgctttccctcttccctgacttccctgggtaacccttagggaagggaacctatagaggtgggggtttcaggtatcagattgtccccttctgccttcccttttattcccaggttcaagggggcaggcacagggaagagagatttgatcatctagtcccggttttgcctggatgtgagatgggtctgcactgcagagaccagcagggactaaagaagagaggacatggggaactggaaaaataagccttccaggattgtggggagaaagacgctgtgggagaggccaggatgctgcattaggcacaggataacctgggaacccaggcacatgggtcctgctctccgaagtctgcaagtcaagaagggaacagagcacgccgaccctctccctttcccctctgtctctcttagtggctttacagtgggtaccctgtcagaaaccagcactgggggccctgccacccccacatggaaggagtgtcctatctgtaaggagcgctttcctgctgagagtgacaaggatgccctggaggaccacatggatggacacttctttttcagcacccaggaccccttcacctttgagtgatcttactccctcgtacatgcacaaatacacactcatgcacacacacactcacacacatgcatacacttaggtttcatgcccattttctatcacactgggctccatgatattctgttccctaagaactgcttctgtgtgccctgttttcatcccaagatttctcacttcatcctctcctacctggctcttttgtcccagggaggggtcctgttcggaagcagtggctgaatttatcccctgaaagtggttttggaggaaccgggatggaggaggccttcccctgtgggaatagaatcgtccactcctagccctggttgcttctgatacacagccactgcacacacacactcacactcacactcccttgtctgatgccccaaagccaattcctggggcaccctaccctctcttatttggagtttccgttggtttacctgagttttctctggggtctgcacagaggcagcagcatggacatcatggcctctcaggtcccttttggttctcagtttcattggttcctctttctgttcccccattgacttctgtgccccaccctagccttttccataaccttaggtattcagtttggaggggttttttgtatttttgaggattcctgtattctgtatcctctcctcgcatctcctcacatggaaagaaataatgtatttgtgccttctgtgaggaatggggggaacaagtggtcccaggtatccccatttccaaggcccccctccctctccaggtccccccacagcaataaaagcttccccctgatatccatccctttgtagtttgaacaaatatatttatatgatatgta

SEQ ID NO: 454899 - DNA, 4371 bp, Homo sapiens
cggagtgctgtttttgttgttggtgaaaggtgaggggaacagctgatccgtctgttgggaggacagatatctcaaggccaggatggaagaatcaccactaagccgggcaccatcccgtggtggagtcaactttctcaatgtagcccggacctacatccccaacaccaaggtggaatgtcactacacccttcccccaggcaccatgcccagtgccagtgactggattggcatcttcaaggtggaggctgcctgtgttcgggattaccacacatttgtgtggtcttccgtgcctgaaagtacaactgatggttcccccattcacaccagtgtccagttccaagccagctacctgcccaaaccaggagctcagctctaccagttccgatatgtgaaccgccagggccaggtgtgtgggcagagcccccctttccagttccgagagccaaggcccatggatgaactggtgaccctggaggaggctgatgggggctctgacatcctgctggttgtccccaaggcaactgtgttacagaaccagctcgatgagagccagcaagaacggaatgacctgatgcagctgaagctacagctggagggacaggtgacagagctgaggagccgagtgcaggagctcgagagggctctggcaactgccaggcaggagcacacggagctgatggaacagtacaaggtgggagctgggccaggtaggggacagggcctggctgctcacccagcatccaaaatctgaacccagtgaagagggtgaaggagagatgttagtgggcttttacaatggttctggcatcaaggaaataggtttaaggggtagtggctgggattaaacttgatgtgacaagagacatgttccaaacgtgtaatgagactcagttctttgaacataggaatgctggggtaaggtggaggtggccacgttgataggtaagggaatgttcccttacagtttctttttcaaggaaggcaatgtgatagccaggtggaagcagtcagaccctggtgtgctcttcctaagcctttgttccaccacttgagagatgagtcccaacctcccttttcttctgggggaaacttaatttcaggggatttcccggtcccatggggagatcacagaagagagggacatcctgagccggcaacagggagaccatgtggcacgcatcctggagctagaggatgacatccagaccatcagtgagaaagtgctgacgaaggaagtggagctggacaggcttagagacacagtgaaggccctgactcgggaacaagagaagctccttgggcaactgaaagaagtacaagcagacaaggagcaaagtgaggctgagctccaagtggcacaacaggagaaccatcacttaaatttggacctgaaggaggcgaagagctggcaagaggagcagagtgctcaggctcagcgactgaaagacaaggtggcccagatgaaggacaccctaggccaggcccagcagcgggtggccgagctggagcccttgaaggagcagcttcgaggggcccaggagcttgcagcctcaagccagcagaaagccacccttcttggggaggagttggccagcgcagcagcagccagggaccgcaccatagccgaactacaccgcagccgcctggaagtggctgaagttaacggcaggctggctgagctcggtttgcacttgaaggaagaaaaatgccaatggagcaaggagcgggcagggctgctgcagagtgtggaggcagagaaggacaagatcctgaagctgagtgcagagatacttcgattggagaaggcagttcaggaggagaggacccaaaaccaagtgttcaagactgagctggcccgggagaaggattctagcctggtacagttgtcagaaagtaagcgggagctgacagagctgcggtcagccctgcgtgtgctccagaaggaaaaggagcagttacaggaggagaaacaggaattgctagagtacatgagaaagctagaggcccgcctggagaaggtggcagatgagaagtggaatgaggatgccaccacagaggatgaggaggccgctgtggggctgagctgcccggcagctctgacagactcagaggacgagtccccagaagacatgaggctcccaccctatggcctttgtgagcgtggagacccaggctcctctcctgctgggcctcgagaggcttctccccttgttgtcatcagccagccggctcccatttctcctcacctctctgggccagctgaggacagtagctctgactcggaggctgaagatgagaagtcagtcctgatggcagctgtgcagagtgggggtgaggaggccaacttactgcttcctgaactgggcagtgccttctatgacatggccaggtgagttcaaccagcaaggccaggagggaggtgggaggaggtcagagggaaagggcatctgtgtggacagtcaccaggccctgctcccaacccctgcccttcttggcctcagccaagaaaaggagatacaggtatggttaacaaggaaaatgactcactgctccaaatcccagatgccttcaggtaatccctacccctatcttatcaatgcactcagaggtcctgcctttaactggcttctatgttgttctagcaccatcttctgcagagcccaaattgccctgcttcccctctctcctgcctctaccccttccccaaccaccaggtaggtacctagggtcctccggggaggaagggaggtgaccatggcccccagggataggagcagagagaagactgggatccagcatccatctggctacaactgaaatgctttccctcttccctgacttccctgggtaacccttagggaagggaacctatagaggtgggggtttcaggtatcagattgtccccttctgccttcccttttattcccaggttcaagggggcaggcacagggaagagagatttgatcatctagtcccggttttgcctggatgtgagatgggctcagggcagggagggggtgatgctgtcatccttctcggctggagcaggaagatgaaggacgatgtcagactcattttcagcctcattaggcagcagacggagatggagggaggagagcaggaggctgggggatgggctctgcactgcagagaccagcagggactaaagaagagaggacatggggaactggaaaaataagccttccaggattgtggggagaaagacgctgtgggagaggccaggatgctgcattaggcacaggataacctgggaacccaggcacatgggtcctgctctccgaagtctgcaagtcaagaagggaacagagcacgccgaccctctccctttcccctctgtctctcttagtggctttacagtgggtaccctgtcagaaaccagcactgggggccctgccacccccacatggaaggagtgtcctatctgtaaggagcgctttcctgctgagagtgacaaggatgccctggaggaccacatggatggacacttctttttcagcacccaggaccccttcacctttgagtgatcttactccctcgtacatgcacaaatacacactcatgcacacacacactcacacacatgcatacacttaggtttcatgcccattttctatcacactgggctccatgatattctgttccctaagaactgcttctgtgtgccctgttttcatcccaagatttctcacttcatcctctcctacctggctcttttgtcccagggaggggtcctgttcggaagcagtggctgaatttatcccctgaaagtggttttggaggaaccgggatggaggaggccttcccctgtgggaatagaatcgtccactcctagccctggttgcttctgatacacagccactgcacacacacactcacactcacactcccttgtctgatgccccaaagccaattcctggggcaccctaccctctcttatttggagtttccgttggtttacctgagttttctctggggtctgcacagaggcagcagcatggacatcatggcctctcaggtcccttttggttctcagtttcattggttcctctttctgttcccccattgacttctgtgccccaccctagccttttccataaccttaggtattcagtttggaggggttttttgtatttttgaggattcctgtattctgtatcctctcctcgcatctcctcacatggaaagaaataatgtatttgtgccttctgtgaggaatggggggaacaagtggtcccaggtatccccatttccaaggcccccctccctctccaggtccccccacagcaataaaagcttccccctgatatccatccctttgtagtttgaacaaatatatttatatgatatgta

SEQ ID NO: 454900 - DNA, 3968 bp, Homo sapiens
ccgatacgccccggatttaccgggcatgaaccgtgaccgggcaccgctagcatccgtctgttgggaggacagatatctcaaggccaggatggaagaatcaccactaagccgggcaccatcccgtggtggagtcaactttctcaatgtagcccggacctacatccccaacaccaaggtggaatgtcactacacccttcccccaggcaccatgcccagtgccagtgactggattggcatcttcaaggtggaggctgcctgtgttcgggattaccacacatttgtgtggtcttccgtgcctgaaagtacaactgatggttcccccattcacaccagtgtccagttccaagccagctacctgcccaaaccaggagctcagctctaccagttccgatatgtgaaccgccagggccaggtgtgtgggcagagcccccctttccagttccgagagccaaggcccatggatgaactggtgaccctggaggaggctgatgggggctctgacatcctgctggttgtccccaaggcaactgtgttacagaaccagctcgatgagagccagcaagaacggaatgacctgatgcagctgaagctacagctggagggacaggtgacagagctgaggagccgagtgcaggagctcgagagggctctggcaactgccaggcaggagcacacggagctgatggaacagtacaaggggatttcccggtcccatggggagatcacagaagagagggacatcctgagccggcaacagggagaccatgtggcacgcatcctggagctagaggatgacatccagaccatcagtgagaaagtgctgacgaaggaagtggagctggacaggcttagagacacagtgaaggccctgactcgggaacaagagaagctccttgggcaactgaaagaagtacaagcagacaaggagcaaagtgaggctgagctccaagtggcacaacaggagaaccatcacttaaatttggacctgaaggaggcgaagagctggcaagaggagcagagtgctcaggctcagcgactgaaagacaaggtggcccagatgaaggacaccctaggccaggcccagcagcgggtggccgagctggagcccttgaaggagcagcttcgaggggcccaggagcttgcagcctcaagccagcagaaagccacccttcttggggaggagttggccagcgcagcagcagccagggaccgcaccatagccgaactacaccgcagccgcctggaagtggctgaagttaacggcaggctggctgagctcggtttgcacttgaaggaagaaaaatgccaatggagcaaggagcgggcagggctgctgcagagtgtggaggcagagaaggacaagatcctgaagctgagtgcagagatacttcgattggagaaggcagttcaggaggagaggacccaaaaccaagtgttcaagactgagctggcccgggagaaggattctagcctggtacagttgtcagaaagtaagcgggagctgacagagctgcggtcagccctgcgtgtgctccagaaggaaaaggagcagttacaggaggagaaacaggaattgctagagtacatgagaaagctagaggcccgcctggagaaggtggcagatgagaagtggaatgaggatgccaccacagaggatgaggaggccgctgtggggctgagctgcccggcagctctgacagactcagaggacgagtccccagaagacatgaggctcccaccctatggcctttgtgagcgtggagacccaggctcctctcctgctgggcctcgagaggcttctccccttgttgtcatcagccagccggctcccatttctcctcacctctctgggccagctgaggacagtagctctgactcggaggctgaagatgagaagtcagtcctgatggcagctgtgcagagtgggggtgaggaggccaacttactgcttcctgaactgggcagtgccttctatgacatggccaggtgagttcaaccagcaaggccaggagggaggtgggaggaggtcagagggaaagggcatctgtgtggacagtcaccaggccctgctcccaacccctgcccttcttggcctcagccaagaaaaggagatacaggtatggttaacaaggaaaatgactcactgctccaaatcccagatgccttcaggtaatccctacccctatcttatcaatgcactcagaggtcctgcctttaactggcttctatgttgttctagcaccatcttctgcagagcccaaattgccctgcttcccctctctcctgcctctaccccttccccaaccaccaggtaggtacctagggtcctccggggaggaagggaggtgaccatggcccccagggataggagcagagagaagactgggatccagcatccatctggctacaactgaaatgctttccctcttccctgacttccctgggtaacccttagggaagggaacctatagaggtgggggtttcaggtatcagattgtccccttctgccttcccttttattcccaggttcaagggggcaggcacagggaagagagatttgatcatctagtcccggttttgcctggatgtgagatgggctcagggcagggagggggtgatgctgtcatccttctcggctggagcaggaagatgaaggacgatgtcagactcattttcagcctcattaggcagcagacggagatggagggaggagagcaggaggctgggggatgggctctgcactgcagagaccagcagggactaaagaagagaggacatggggaactggaaaaataagccttccaggattgtggggagaaagacgctgtgggagaggccaggatgctgcattaggcacaggataacctgggaacccaggcacatgggtcctgctctccgaagtctgcaagtcaagaagggaacagagcacgccgaccctctccctttcccctctgtctctcttagtggctttacagtgggtaccctgtcagaaaccagcactgggggccctgccacccccacatggaaggagtgtcctatctgtaaggagcgctttcctgctgagagtgacaaggatgccctggaggaccacatggatggacacttctttttcagcacccaggaccccttcacctttgagtgatcttactccctcgtacatgcacaaatacacactcatgcacacacacactcacacacatgcatacacttaggtttcatgcccattttctatcacactgggctccatgatattctgttccctaagaactgcttctgtgtgccctgttttcatcccaagatttctcacttcatcctctcctacctggctcttttgtcccagggaggggtcctgttcggaagcagtggctgaatttatcccctgaaagtggttttggaggaaccgggatggaggaggccttcccctgtgggaatagaatcgtccactcctagccctggttgcttctgatacacagccactgcacacacacactcacactcacactcccttgtctgatgccccaaagccaattcctggggcaccctaccctctcttatttggagtttccgttggtttacctgagttttctctggggtctgcacagaggcagcagcatggacatcatggcctctcaggtcccttttggttctcagtttcattggttcctctttctgttcccccattgacttctgtgccccaccctagccttttccataaccttaggtattcagtttggaggggttttttgtatttttgaggattcctgtattctgtatcctctcctcgcatctcctcacatggaaagaaataatgtatttgtgccttctgtgaggaatggggggaacaagtggtcccaggtatccccatttccaaggcccccctccctctccaggtccccccacagcaataaaagcttccccctgatatccatccctttgtagtttgaacaaatatatttatatgatatgta

SEQ ID NO: 454901 - DNA, 2652 bp, Homo sapiens
gcacgagtttttctcaaatactcatgcattacttctataaataaaaagttttaaagtttgtttgcttttcactatccccatattggcattaaagagagccagtttatcaggcagcatttgaggtaaggaatgtccgtctctgggaccctatagatcctgggtaccagattacactcatctttctgacttaatttccagagtggatagcagcccctacctaagcacagccccctcattgggcaataagtcagcaacagcaatgctggccacacctcgtgccgaattcggcacgagagaaggtggcagatgagaagtggaatgaggatgccaccacagaggatgaggaggccgctgtggggctgagctgcccggcagctctgacagactcagaggacgagtccccagaagacatgaggctcccaccctatggcctttgtgagcgtggagacccaggctcctctcctgctgggcctcgagaggcttctccccttgttgtcatcagccagccggctcccatttctcctcacctctctgggccagctgaggacagtagctctgactcggaggctgaagatgagaagtcagtcctgatggcagctgtgcagagtgggggtgaggaggccaacttactgcttcctgaactgggcagtgccttctatgacatggccaggtgagttcaaccagcaaggccaggagggaggtgggaggaggtcagagggaaagggcatctgtgtggacagtcaccaggccctgctcccaacccctgcccttcttggcctcagccaagaaaaggagatacaggtatggttaacaaggaaaatgactcactgctccaaatcccagatgccttcaggtaatccctacccctatcttatcaatgcactcagaggtcctgcctttaactggcttctatgttgttctagcaccatcttctgcagagcccaaattgccctgcttcccctctctcctgcctctaccccttccccaaccaccaggtaggtacctagggtcctccggggaggaagggaggtgaccatggcccccagggataggagcagagagaagactgggatccagcatccatctggctacaactgaaatgctttccctcttccctgacttccctgggtaacccttagggaagggaacctatagaggtgggggtttcaggtatcagattgtccccttctgccttcccttttattcccaggttcaagggggcaggcacagggaagagagatttgatcatctagtcccggttttgcctggatgtgagatgggctcagggcagggagggggtgatgctgtcatccttctcggctggagcaggaagatgaaggacgatgtcagactcattttcagcctcattaggcagcagacggagatggagggaggagagcaggaggctgggggatgggctctgcactgcagagaccagcagggactaaagaagagaggacatggggaactggaaaaataagccttccaggattgtggggagaaagacgctgtgggagaggccaggatgctgcattaggcacaggataacctgggaacccaggcacatgggtcctgctctccgaagtctgcaagtcaagaagggaacagagcacgccgaccctctccctttcccctctgtctctcttagtggctttacagtgggtaccctgtcagaaaccagcactgggggccctgccacccccacatggaaggagtgtcctatctgtaaggagcgctttcctgctgagagtgacaaggatgccctggaggaccacatggatggacacttctttttcagcacccaggaccccttcacctttgagtgatcttactccctcgtacatgcacaaatacacactcatgcacacacacactcacacacatgcatacacttaggtttcatgcccattttctatcacactgggctccatgatattctgttccctaagaactgcttctgtgtgccctgttttcatcccaagatttctcacttcatcctctcctacctggctcttttgtcccagggaggggtcctgttcggaagcagtggctgaatttatcccctgaaagtggttttggaggaaccgggatggaggaggccttcccctgtgggaatagaatcgtccactcctagccctggttgcttctgatacacagccactgcacacacacactcacactcacactcccttgtctgatgccccaaagccaattcctggggcaccctaccctctcttatttggagtttccgttggtttacctgagttttctctggggtctgcacagaggcagcagcatggacatcatggcctctcaggtcccttttggttctcagtttcattggttcctctttctgttcccccattgacttctgtgccccaccctagccttttccataaccttaggtattcagtttggaggggttttttgtatttttgaggattcctgtattctgtatcctctcctcgcatctcctcacatggaaagaaataatgtatttgtgccttctgtgaggaatggggggaacaagtggtcccaggtatccccatttccaaggcccccctccctctccaggtccccccacagcaataaaagcttccccctgatatccatccctttgtagtttgaacaaatatatttatatgatatgta

SEQ ID NO: 454902 - DNA, 3849 bp, Homo sapiens
cggagtgctgtttttgttgttggtgaaaggtgaggggaacagctgatccgtctgttgggaggacagatatctcaaggccaggatggaagaatcaccactaagccgggcaccatcccgtggtggagtcaactttctcaatgtagcccggacctacatccccaacaccaaggtggaatgtcactacacccttcccccaggcaccatgcccagtgccagtgactggattggcatcttcaaggtggaggctgcctgtgttcgggattaccacacatttgtgtggtcttccgtgcctgaaagtacaactgatggttcccccattcacaccagtgtccagttccaagccagctacctgcccaaaccaggagctcagctctaccagttccgatatgtgaaccgccagggccaggtgtgtgggcagagcccccctttccagttccgagagccaaggcccatggatgaactggtgaccctggaggaggctgatgggggctctgacatcctgctggttgtccccaaggcaactgtgttacagaaccagctcgatgagagccagcaagaacggaatgacctgatgcagctgaagctacagctggagggacaggtgacagagctgaggagccgagtgcaggagctcgagagggctctggcaactgccaggcaggagcacacggagctgatggaacagtacaaggggatttcccggtcccatggggagatcacagaagagagggacatcctgagccggcaacagggagaccatgtggcacgcatcctggagctagaggatgacatccagaccatcagtgagaaagtgctgacgaaggaagtggagctggacaggcttagagacacagtgaaggccctgactcgggaacaagagaagctccttgggcaactgaaagaagtacaagcagacaaggagcaaagtgaggctgagctccaagtggcacaacaggagaaccatcacttaaatttggacctgaaggaggcgaagagctggcaagaggagcagagtgctcaggctcagcgactgaaagacaaggtggcccagatgaaggacaccctaggccaggcccagcagcgggtggccgagctggagcccttgaaggagcagcttcgaggggcccaggagcttgcagcctcaagccagcagaaagccacccttcttggggaggagttggccagcgcagcagcagccagggaccgcaccatagccgaactacaccgcagccgcctggaagtggctgaagttaacggcaggctggctgagctcggtttgcacttgaaggaagaaaaatgccaatggagcaaggagcgggcagggctgctgcagagtgtggaggcagagaaggacaagatcctgaagctgagtgcagagatacttcgattggagaaggcagttcaggaggagaggacccaaaaccaagtgttcaagactgagctggcccgggagaaggattctagcctggtacagttgtcagaaagtaagcgggagctgacagagctgcggtcagccctgcgtgtgctccagaaggaaaaggagcagttacaggaggagaaacaggaattgctagagtacatgagaaagctagaggcccgcctggagaaggtggcagatgagaagtggaatgaggatgccaccacagaggatgaggaggccgctgtggggctgagctgcccggcagctctgacagactcagaggacgagtccccagaagacatgaggctcccaccctatggcctttgtgagcgtggagacccaggctcctctcctgctgggcctcgagaggcttctccccttgttgtcatcagccagccggctcccatttctcctcacctctctgggccagctgaggacagtagctctgactcggaggctgaagatgagaagtcagtcctgatggcagctgtgcagagtgggggtgaggaggccaacttactgcttcctgaactgggcagtgccttctatgacatggccaggtgagttcaaccagcaaggccaggagggaggtgggaggaggtcagagggaaagggcatctgtgtggacagtcaccaggccctgctcccaacccctgcccttcttggcctcagccaagaaaaggagatacaggtatggttaacaaggaaaatgactcactgctccaaatcccagatgccttcaggtaatccctacccctatcttatcaatgcactcagaggtcctgcctttaactggcttctatgttgttctagcaccatcttctgcagagcccaaattgccctgcttcccctctctcctgcctctaccccttccccaaccaccaggtaggtacctagggtcctccggggaggaagggaggtgaccatggcccccagggataggagcagagagaagactgggatccagcatccatctggctacaactgaaatgctttccctcttccctgacttccctgggtaacccttagggaagggaacctatagaggtgggggtttcaggtatcagattgtccccttctgccttcccttttattcccaggttcaagggggcaggcacagggaagagagatttgatcatctagtcccggttttgcctggatgtgagatgggctcagggcagggagggggtgatgctgtcatccttctcggctggagcaggaagatgaaggacgatgtcagactcattttcagcctcattaggcagcagacggagatggagggaggagagcaggaggctgggggatgggctctgcactgcagagaccagcagggactaaagaagagaggacatggggaactggaaaaataagccttccaggattgtggggagaaagacgctgtgggagaggccaggatgctgcattaggcacaggataacctgggaacccaggcacatgggtcctgctctccgaagtctgcaagtcaagaagggaacagagcacgccgaccctctccctttcccctctgtctctcttagtggctttacagtgggtaccctgtcagaaaccagcactgggggccctgccacccccacatggaaggagtgtcctatctgtaaggagcgctttcctgctgagagtgacaaggatgccctggaggaccacatggatggacacttctttttcagcacccaggaccccttcacctttgagtgatcttactccctcgtacatgcacaaatacacactcatgcacacacacactcacacacatgcatacacttaggtttcatgcccattttctatcacactgggctccatgatattctgttccctaagaactgcttctgtgtgccctgttttcatcccaagatttctcacttcatcctctcctacctggctcttttgtcccagggaggggtcctgttcggaagcagtggctgaatttatcccctgaaagtggttttggaggaaccgggatggaggaggccttcccctgtgggaatagaatcgtccactcctagccctggttgcttctgatacacagccactgcacacacacactcacactcacactcccttgtctgatgccccaaagccaattcctggggcaccctaccctctcttatttggagtttccattgacttctgtgccccaccctagccttttccataaccttaggtattcagtttggaggggttttttgtatttttgaggattcctgtattctgtatcctctcctcgcatctcctcacatggaaagaaataatgtatttgtgccttctgtgaggaatggggggaacaagtggtcccaggtatccccatttccaaggcccccctccctctccaggtccccccacagcaataaaagcttccccctgatatccatccctttgtagtttgaacaaatatatttatatgatatgta

SEQ ID NO: 454903 - DNA, 1481 bp, Homo sapiens
cggagtgctgtttttgttgttggtgaaaggtgaggggaacagctgatccgtctgttgggaggacagatatctcaaggccaggatggaagaatcaccactaagccgggcaccatcccgtggtggagtcaactttctcaatgtagcccggacctacatccccaacaccaaggtggaatgtcactacacccttcccccaggcaccatgcccagtgccagtgactggattggcatcttcaaggtggaggctgcctgtgttcgggattaccacacatttgtgtggtcttccgtgcctgaaagtacaactgatggttcccccattcacaccagtgtccagttccaagccagctacctgcccaaaccaggagctcagctctaccagttccgatatgtgaaccgccagggccaggtgtgtgggcagagcccccctttccagttccgagagccaaggcccatggatgaactggtgaccctggaggaggctgatgggggctctgacatcctgctggttgtccccaaggcaactgtgttacagaaccagctcgatgagagccagcaagaacggaatgacctgatgcagctgaagctacagctggagggacaggtgacagagctgaggagccgagtgcaggagctcgagagggctctggcaactgccaggcaggagcacacggagctgatggaacagtacaaggggatttcccggtcccatggggagatcacagaagagagggacatcctgagccggcaacagggagaccatgtggcacgcatcctggagctagaggatgacatccagaccatcagtgagaaagtgctgacgaaggaagtggagctggacaggtgaggggagtccactgaccccgtcacttcctctcccttccatgacccccgcactccagccccctctctcaggcaagcagacctgctgtctgcctcacacgctttctctttccctctcaccctcactcaagctagttactggggatacccttttctgccgagctctctaccatctttccaaatgctattctgtattcctccacttcagaaataatcatagttaccacttattgtacagcaaaagctgagcaagagctaggagtggaggatttggaagaagagaatggatggaagtcagtgcaagataagagaggatggatttcagatgtggccacaggaaagataagattagactgtgttcttactattaagaaacattataactggtgatccaggaatgttatggaatctctgccctggaaaaaaaagatgcaaatcataaactcttagcactgggattgtaagatatgtatgagggtatgtaagaggtcaccctcaggaggcagcctctttaacatttgacagctgtcatttttgtatctcttgtattgagccaaactctcctctcctataacttaccagggggtcctgagacctctggagccacacagaataaatttctttcttcttccagaaaattg

SEQ ID NO: 454904 - DNA, 682 bp, Homo sapiens
cggagtgctgtttttgttgttggtgaaaggtgaggggaacagctgatccgtctgttgggaggacagatatctcaaggccaggatggaagaatcaccactaagccgggcaccatcccgtggtggagtcaactttctcaatgtagcccggacctacatccccaacaccaaggtggaatgtcactacacccttcccccaggcaccatgcccagtgccagtgactggattggcatcttcaaggtggaggctgcctgtgttcgggattaccacacatttgtgtggtcttccgtgcctgaaagtacaactgatggttcccccattcacaccagtgtccagttccaagccagctacctgcccaaaccaggagctcagctctaccagttccgatatgtgaaccgccagggccaggtgatgttatcgcccaacacatgtatatacatacagcaaaattactgataactgaaggaagtttattgaagtacagagtaagcaggcccagtagtccataggaaccaggcagaaaacgttagcaagtagctgtaagactagggcatattgaagccctggagaacagagttgctttatttgttaactttttatcgaagtgcaaatatacaaaaatgtgcaagaaatagatcattaactccggactcctcgcactgtcccaagcttcttcccactact

SEQ ID NO: 454905 - DNA, 4074 bp, Homo sapiens
gaagtgacgcgccccgggtttgttgacagcggaggcggcggcggctgcaggctccgagccgtaggagccggatcgggggaggggccgggcccaggagcctcagccccgccggcagccctaagggcaaggcagtggctctgccaatgatcctgtgagtattcaggaatcactgttgcccctggggatccttgtcctggagtggcccacctgcttgcccccagcatggcgtccgacactcccgagtcgctgatggccctctgtactgacttctgcttgcgcaacctggatggcaccctgggctacctgctggacaaggagaccctgcggctacatccggacatcttcttgcccagcgagatctgtgaccggctcgtcaatgagtatgtggagctggtgaacgctgcctgtaacttcgagccacacgagagcttcttcagcctcttttcggacccccgcagcacccgcctcacgcggatccacctccgtgaggacctggtgcaggaccaggacctggaggccatccgcaagcaggacctggtggagctgtacctgactaactgcgagaagctgtccgccaagagcctgcagacactgaggagcttcagccacaccctggtgtccttgagcctcttcggctgtacaaacattttctatgaggaggagaacccagggggctgtgaagatgagtacctcgtcaaccccacctgccaggtgctggttaaggatttcaccttcgagggcttcagccgcctccgcttcctcaacttgggccgcatgattgattgggtccctgtggagtccctgctgcggccgcttaactccctggctgccttggacctctcaggcattcagacgagcgacgccgccttcctcacccagtggaaagacagcctggtgtccctcgtcctctacaacatggacctgtccgacgaccacatccgggtcatcgtgcagctgcacaagctgcgacacctggacatctcccgagaccgcctctccagctactacaagttcaagctgactcgggaggtgctgagcctctttgtgcagaagctggggaacctaatgtccctggacatctctggccacatgatcctagagaactgcagcatctccaagatggaagaggaagcggggcagaccagcattgagccttccaagagcagcatcatacctttccgggctctgaagaggccgctgcagttcctcgggctctttgagaactctctgtgccgcctcacgcacattccagcctacaaagtaagtggtgacaaaaacgaagagcaggtgctgaatgccatcgaggcctacacggagcaccggcctgagatcacctcgcgggccatcaacttgctttttgacatcgcccgcatcgagcgttgcaaccagctgctgcgggccctgaagctggtcatcacggccctcaagtgccacaaatatgacaggaacattcaagtgacaggcagcgccgctctcttctacctaacaaattccgagtaccgctcagagcagagtgtgaagctgcgccggcaggttatccaggtggtgctgaatggcatggaatcctaccaggaggtgacggtgcagcggaactgctgcctgacgctctgcaacttcagcatccccgaggagctggaattccagtaccgccgggtcaacgagctcctgctcagcatcctcaaccccacgcggcaggacgagtctatccagcggatcgccgtgcacctgtgcaatgccctggtctgccaggtagacaacgaccacaaggaggccgtgggcaagatgggctttgtcgtgaccatgctgaagctgattcagaagaagctgctggacaagacatgtgaccaggtcatggagttctcctggagtgccctgtggaacatcacagatgaaactcctgacaactgcgagatgttcctcaatttcaacggcatgaagctcttcctggactgcctgaaggaattcccagagaagcaggaactgcataggaatatgctaggacttttggggaatgtggcagaagtgaaggagctgaggcctcaactaatgacttcccagttcatcagcgtcttcagcaacctgttggagagcaaggccgatgggatcgaggtttcctacaatgcctgcggcgtcctctcccacatcatgtttgatggacccgaggcctggggcgtctgtgagccccagcgtgaggaggtggaggaacgcatgtgggctgccatccagagctgggacataaactctcggagaaacatcaattacaggtcatttgaaccaattctccgcctccttccccagggaatctctcctgtcagccagcactgggcaacctgggccctgtataacctcgtgtctgtctacccggacaagtactgccctctgctgatcaaagaaggggggatgccccttctgagggacataattaagatggcgaccgcacggcaggagaccaaggaaatggcccgcaaggtgattgagcactgcagtaactttaaagaggagaacatggacacgtctagatagaggcctccgtccccatggccgccaccgctctggaccacaggcggggaggaagcatgctcaagcagcccagcgggcgggccccttccgagggagcctcccacggagtgaagagacatgggggacttttgcacaaccgacgcttttccttaatgttagtgagatatatatatattatatatatatattttttttttggttaggaagtgtgaagttttgtgtgtatgatttctgtgcaaaaacaaaagcaacactcctgagtccttgcagcttccttggccattctcaaacccactcagccttcatcgctgacacacacactcctaccccaaccagactaaatgcctataacgctgtgagtgtccagtccttgtccaggaaactcagatcccggcctggcttcctttcatgagaggagcaggccttggacagcgtatcgagcatcctgacccactgcccctgcctgagaacgccatctcggctcccgggcacagctgatggggtttggggattagaacttaccccactgggtctcccaaaagccttggtgctcccggctgtgggccatctggggcaggaaagtgagccattcctaggctgaggtccaggcagccctgcccctgaagaccctctaggagcagggcacccagtggccctgctgctgtccagccaggcctgcctgaggccacgctgctatggaggctgcctcctagtctcccaccaggtcccaggctgtggaaagccccagcccagggatggtcagaactcgggggcagattccactgccccttctgccaaacacatccagaacctgccctcagccctggaagctagcatcttctggggccaggggcttgcttcctcgctccatagccctcaactgcccaggcgctcccaccagcagaactgagcctgcctcctcctcccagcctgccccgctgcccagaggaccccacgcctctcagaggcagaggtcccatgccagcctttgacccacaacggccacacagccgcctccagaccagcactcggactgccctgcagtggccgcttgggcctccctggcggtcccgccctgccctaggctttaccttggaagcctgagaggcgccggctctcttgctcctccatcgatggacactgcattgcttctcatcggacacttgtggagcgcaggggcctggggagcagcgctaaccctggaggcagcctttgggtgatggctttttcttcccttttcctcccgcgggcctgttttcaggtgttcctagcatttctgcctccaggcaggacggcaggggtgagcagctttgggagagacacctggcctttttctcctggagcctctccctcccggccctgggaagtgggcgcagccctgtgttcccccagcttggcagatgggctgcatgcggcgctcccttccttcccacgctcagcggccccggccagaccctggcagacttcacacctcattgctttaccccctggggcctggggaaatgtctgtactttgggaagtcacagaaatacatttttgtgcaaaatggaaaa

SEQ ID NO: 454906 - DNA, 4307 bp, Homo sapiens
gaagtgacgcgccccgggtttgttgacagcggaggcggcggcggctgcaggctccgagccgtaggagccggatcgggggaggggccgggcccaggagcctcagccccgccggcagccctaagggcaaggtaaccgccacggggtccccgtcgcgaccccctccctcccggagctcccgtccccgggatcccaagctccgccccgccgacccccgtctcccctggaccccggctctagcctgacgagatccccaacctcctgaggtgctctggccccggattctcccgggctgcattctctgctcctcctcgcctgcgaacatcacgtccgcttcccgacgctgagggcagccccgtccagggcagtggctctgccaatgatcctgtgagtattcaggaatcactgttgcccctggggatccttgtcctggagtggcccacctgcttgcccccagcatggcgtccgacactcccgagtcgctgatggccctctgtactgacttctgcttgcgcaacctggatggcaccctgggctacctgctggacaaggagaccctgcggctacatccggacatcttcttgcccagcgagatctgtgaccggctcgtcaatgagtatgtggagctggtgaacgctgcctgtaacttcgagccacacgagagcttcttcagcctcttttcggacccccgcagcacccgcctcacgcggatccacctccgtgaggacctggtgcaggaccaggacctggaggccatccgcaagcaggacctggtggagctgtacctgactaactgcgagaagctgtccgccaagagcctgcagacactgaggagcttcagccacaccctggtgtccttgagcctcttcggctgtacaaacattttctatgaggaggagaacccagggggctgtgaagatgagtacctcgtcaaccccacctgccaggtgctggttaaggatttcaccttcgagggcttcagccgcctccgcttcctcaacttgggccgcatgattgattgggtccctgtggagtccctgctgcggccgcttaactccctggctgccttggacctctcaggcattcagacgagcgacgccgccttcctcacccagtggaaagacagcctggtgtccctcgtcctctacaacatggacctgtccgacgaccacatccgggtcatcgtgcagctgcacaagctgcgacacctggacatctcccgagaccgcctctccagctactacaagttcaagctgactcgggaggtgctgagcctctttgtgcagaagctggggaacctaatgtccctggacatctctggccacatgatcctagagaactgcagcatctccaagatggaagaggaagcggggcagaccagcattgagccttccaagagcagcatcatacctttccgggctctgaagaggccgctgcagttcctcgggctctttgagaactctctgtgccgcctcacgcacattccagcctacaaagtaagtggtgacaaaaacgaagagcaggtgctgaatgccatcgaggcctacacggagcaccggcctgagatcacctcgcgggccatcaacttgctttttgacatcgcccgcatcgagcgttgcaaccagctgctgcgggccctgaagctggtcatcacggccctcaagtgccacaaatatgacaggaacattcaagtgacaggcagcgccgctctcttctacctaacaaattccgagtaccgctcagagcagagtgtgaagctgcgccggcaggttatccaggtggtgctgaatggcatggaatcctaccaggaggtgacggtgcagcggaactgctgcctgacgctctgcaacttcagcatccccgaggagctggaattccagtaccgccgggtcaacgagctcctgctcagcatcctcaaccccacgcggcaggacgagtctatccagcggatcgccgtgcacctgtgcaatgccctggtctgccaggtagacaacgaccacaaggaggccgtgggcaagatgggctttgtcgtgaccatgctgaagctgattcagaagaagctgctggacaagacatgtgaccaggtcatggagttctcctggagtgccctgtggaacatcacagatgaaactcctgacaactgcgagatgttcctcaatttcaacggcatgaagctcttcctggactgcctgaaggaattcccagagaagcaggaactgcataggaatatgctaggacttttggggaatgtggcagaagtgaaggagctgaggcctcaactaatgacttcccagttcatcagcgtcttcagcaacctgttggagagcaaggccgatgggatcgaggtttcctacaatgcctgcggcgtcctctcccacatcatgtttgatggacccgaggcctggggcgtctgtgagccccagcgtgaggaggtggaggaacgcatgtgggctgccatccagagctgggacataaactctcggagaaacatcaattacaggtcatttgaaccaattctccgcctccttccccagggaatctctcctgtcagccagcactgggcaacctgggccctgtataacctcgtgtctgtctacccggacaagtactgccctctgctgatcaaagaaggggggatgccccttctgagggacataattaagatggcgaccgcacggcaggagaccaaggaaatggcccgcaaggtgattgagcactgcagtaactttaaagaggagaacatggacacgtctagatagaggcctccgtccccatggccgccaccgctctggaccacaggcggggaggaagcatgctcaagcagcccagcgggcgggccccttccgagggagcctcccacggagtgaagagacatgggggacttttgcacaaccgacgcttttccttaatgttagtgagatatatatatattatatatatatattttttttttggttaggaagtgtgaagttttgtgtgtatgatttctgtgcaaaaacaaaagcaacactcctgagtccttgcagcttccttggccattctcaaacccactcagccttcatcgctgacacacacactcctaccccaaccagactaaatgcctataacgctgtgagtgtccagtccttgtccaggaaactcagatcccggcctggcttcctttcatgagaggagcaggccttggacagcgtatcgagcatcctgacccactgcccctgcctgagaacgccatctcggctcccgggcacagctgatggggtttggggattagaacttaccccactgggtctcccaaaagccttggtgctcccggctgtgggccatctggggcaggaaagtgagccattcctaggctgaggtccaggcagccctgcccctgaagaccctctaggagcagggcacccagtggccctgctgctgtccagccaggcctgcctgaggccacgctgctatggaggctgcctcctagtctcccaccaggtcccaggctgtggaaagccccagcccagggatggtcagaactcgggggcagattccactgccccttctgccaaacacatccagaacctgccctcagccctggaagctagcatcttctggggccaggggcttgcttcctcgctccatagccctcaactgcccaggcgctcccaccagcagaactgagcctgcctcctcctcccagcctgccccgctgcccagaggaccccacgcctctcagaggcagaggtcccatgccagcctttgacccacaacggccacacagccgcctccagaccagcactcggactgccctgcagtggccgcttgggcctccctggcggtcccgccctgccctaggctttaccttggaagcctgagaggcgccggctctcttgctcctccatcgatggacactgcattgcttctcatcggacacttgtggagcgcaggggcctggggagcagcgctaaccctggaggcagcctttgggtgatggctttttcttcccttttcctcccgcgggcctgttttcaggtgttcctagcatttctgcctccaggcaggacggcaggggtgagcagctttgggagagacacctggcctttttctcctggagcctctccctcccggccctgggaagtgggcgcagccctgtgttcccccagcttggcagatgggctgcatgcggcgctcccttccttcccacgctcagcggccccggccagaccctggcagacttcacacctcattgctttaccccctggggcctggggaaatgtctgtactttgggaagtcacagaaatacatttttgtgcaaaatggaaaa

SEQ ID NO: 454907 - DNA, 4263 bp, Homo sapiens
gaagtgacgcgccccgggtttgttgacagcggaggcggcggcggctgcaggctccgagccgtaggagccggatcgggggaggggccgggcccaggagcctcagccccgccggcagccctaagggcaaggcagtggctctgccaatgatcctgtgagtattcaggaatcactgttgcccctggggatccttgtcctggagtggcccacctgcttgcccccagcatggcgtccgacactcccgagtcgctgatggccctctgtactgacttctgcttgcgcaacctggatggcaccctgggctacctgctggacaaggagaccctgcggctacatccggacatcttcttgcccagcgagatctgtgaccggctcgtcaatgagtatgtggagctggtgaacgctgcctgtaacttcgagccacacgagagcttcttcagcctcttttcggacccccgcagcacccgcctcacgcggatccacctccgtgaggacctggtgcaggaccaggacctggaggccatccgcaagcaggacctggtggagctgtacctgactaactgcgagaagctgtccgccaagagcctgcagacactgaggagcttcagccacaccctggtgtccttgagcctcttcggctgtacaaacattttctatgaggaggagaacccagggggctgtgaagatgagtacctcgtcaaccccacctgccaggtgctggttaaggatttcaccttcgagggcttcagccgcctccgcttcctcaacttgggccgcatgattgattgggtccctgtggagtccctgctgcggccgcttaactccctggctgccttggacctctcaggcattcagacgagcgacgccgccttcctcacccagtggaaagacagcctggtgtccctcgtcctctacaacatggacctgtccgacgaccacatccgggtcatcgtgcagctgcacaagctgcgacacctggacatctcccgagaccgcctctccagctactacaagttcaagctgactcgggaggtgctgagcctctttgtgcagaagctggggaacctaatgtccctggacatctctggccacatgatcctagagaactgcagcatctccaagatggaagaggaagcggggcagaccagcattgagccttccaagagcagcatcatacctttccgggctctgaagaggccgctgcagttcctcgggctctttgagaactctctgtgccgcctcacgcacattccagcctacaaagtaagtggtgacaaaaacgaagagcaggtgctgaatgccatcgaggcctacacggagcaccggcctgagatcacctcgcgggccatcaacttgctttttgacatcgcccgcatcgagcgttgcaaccagctgctgcgggccctgaagctggtcatcacggccctcaagtgccacaaatatgacaggaacattcaagtgacaggcagcgccgctctcttctacctaacaaattccgagtaccgctcagagcagagtgtgaagctgcgccggcaggttatccaggtggtgctgaatggcatggaatcctaccaggaggtgacggtgcagcggaactgctgcctgacgctctgcaacttcagcatccccgaggagctggaattccagtaccgccgggtcaacgagctcctgctcagcatcctcaaccccacgcggcaggacgagtctatccagcggatcgccgtgcacctgtgcaatgccctggtctgccaggtagacaacgaccacaaggaggccgtgggcaagatgggctttgtcgtgaccatgctgaagctgattcagaagaagctgctggacaagacatgtgaccaggtcatggagttctcctggagtgccctgtggaacatcacagatgaaactcctgacaactgcgagatgttcctcaatttcaacggcatgaagctcttcctggactgcctgaaggaattcccagagaagcaggaactgcataggaatatgctaggacttttggggaatgtggcagaagtgaaggagctgaggcctcaactaatgacttcccagttcatcagcgtcttcagcaacctgttggagagcaaggccgatgggatcgaggtttcctacaatgcctgcggcgtcctctcccacatcatgtttgatggacccgaggcctggggcgtctgtgagccccagcgtgaggaggtggaggaacgcatgtgggctgccatccagagctgggacataaactctcggagaaacatcaattacaggtcatttgaaccaattctccgcctccttccccagggaatctctcctgtcagccagcactgggcaacctgggccctgtataacctcgtgtctgtctacccggacaagtactgccctctgctgatcaaagaaggggggatgccccttctgagggacataattaagatggcgaccgcacggcaggagaccaaggaaatggcccgcaaggtgattgagcactgcagtaactttaaagaggagaacatggacacgtctagatagaggcctccgtccccatggccgccaccgctctggaccacaggcggggaggaagcatgctcaagcagcccagcgggcgggccccttccgagggagcctcccacggagtgaagagacatgggggacttttgcacaaccgacgcttttccttaatgttagtgagatatatatatattatatatatatattttttttttggttaggaagtgtgaagttttgtgtgtatgatttctgtgcaaaaacaaaagcaacactcctgagtccttgcagcttccttggccattctcaaacccactcagccttcatcgctgacacacacactcctaccccaaccagactaaatgcctataacgctgtgagtgtccagtccttgtccaggaaactcagatcccggcctggcttcctttcatgagaggagcaggccttggacagcgtatcgagcatcctgacccactgcccctgcctgagaacgccatctcggctcccgggcacagctgatggggtttggggattagaacttaccccactgggtctcccaaaagccttggtgctcccggctgtgggccatctggggcaggaaagtgagccattcctaggctgaggtccaggcagccctgcccctgaagaccctctaggagcagggcacccagtggccctgctgctgtccagccaggcctgcctgaggccacgctgctatggaggctgcctcctagtctcccaccaggtcccaggctgtggaaagccccagcccagggatggtcagaactcgggggcagattccactgccccttctgccaaacacatccagaacctgccctcagccctggaagctagcatcttctggggccaggggcttgcttcctcgctccatagccctcaactgcccaggcgctcccaccagcagaactgagcctgcctcctcctcccagcctgccccgctgcccagaggaccccacgcctctcagaggcagaggtcccatgccagcctttgacccacaacggccacacagccgcctccagaccagcactcggactgccctgcagtggccgcttgggcctccctggcggtcccgccctgccctaggctttaccttggaagcctgagaggcgccggctctcttgctcctccatcgatggacactgcattgcttctcatcggacacttgtggagcgcaggggcctggggagcagcgctaaccctggaggcagcctttgggtgatggctttttcttcccttttcctcccgcgggcctgttttcaggtgttcctagcatttctgcctccaggcaggacggcaggggtgagcagctttgggagagacacctggcctttttctcctggagcctctccctcccggccctgggaagtgggcgcagccctgtgttcccccagcttggcagatgggctgcatgcggcgctcccttccttcccacgctcagcggccccggccagaccctggcagacttcacacctcattgctttaccccctggggcctggggaaatgtctgtactttgggaagtcacagaaatacatttttgtgcaaaatggaaaaaaaaaaaaaaaaaaaaaacacaacccacacacacaacaccccaggcgcacacaacaaaaacagcgatagccacgaacacaacgaataaaaagaaggacgccaccaagagctaccaaaaacaggacacgataccgcccacgatgaccaggagacaacacgggcggaaaaaacatcggcaagaaccccaac

SEQ ID NO: 454908 - DNA, 4055 bp, Homo sapiens
gaagtgacgcgccccgggtttgttgacagcggaggcggcggcggctgcaggctccgagccgtaggagccggatcgggggaggggccgggcccaggagcctcagccccgccggcagccctaagggcaaggtaaccgccacggggtccccgtcgcgaccccctccctcccggagctcccgtccccgggatcccaagctccgccccgccgacccccgtctcccctggaccccggctctagcctgacgagatccccaacctcctgaggtgctctggccccggattctcccgggctgcattctctgctcctcctcgcctgcgaacatcacgtccgcttcccgacgctgagggcagccccgtccagggtatgtggagctggtgaacgctgcctgtaacttcgagccacacgagagcttcttcagcctcttttcggacccccgcagcacccgcctcacgcggatccacctccgtgaggacctggtgcaggaccaggacctggaggccatccgcaagcaggacctggtggagctgtacctgactaactgcgagaagctgtccgccaagagcctgcagacactgaggagcttcagccacaccctggtgtccttgagcctcttcggctgtacaaacattttctatgaggaggagaacccagggggctgtgaagatgagtacctcgtcaaccccacctgccaggtgctggttaaggatttcaccttcgagggcttcagccgcctccgcttcctcaacttgggccgcatgattgattgggtccctgtggagtccctgctgcggccgcttaactccctggctgccttggacctctcaggcattcagacgagcgacgccgccttcctcacccagtggaaagacagcctggtgtccctcgtcctctacaacatggacctgtccgacgaccacatccgggtcatcgtgcagctgcacaagctgcgacacctggacatctcccgagaccgcctctccagctactacaagttcaagctgactcgggaggtgctgagcctctttgtgcagaagctggggaacctaatgtccctggacatctctggccacatgatcctagagaactgcagcatctccaagatggaagaggaagcggggcagaccagcattgagccttccaagagcagcatcatacctttccgggctctgaagaggccgctgcagttcctcgggctctttgagaactctctgtgccgcctcacgcacattccagcctacaaagtaagtggtgacaaaaacgaagagcaggtgctgaatgccatcgaggcctacacggagcaccggcctgagatcacctcgcgggccatcaacttgctttttgacatcgcccgcatcgagcgttgcaaccagctgctgcgggccctgaagctggtcatcacggccctcaagtgccacaaatatgacaggaacattcaagtgacaggcagcgccgctctcttctacctaacaaattccgagtaccgctcagagcagagtgtgaagctgcgccggcaggttatccaggtggtgctgaatggcatggaatcctaccaggaggtgacggtgcagcggaactgctgcctgacgctctgcaacttcagcatccccgaggagctggaattccagtaccgccgggtcaacgagctcctgctcagcatcctcaaccccacgcggcaggacgagtctatccagcggatcgccgtgcacctgtgcaatgccctggtctgccaggtagacaacgaccacaaggaggccgtgggcaagatgggctttgtcgtgaccatgctgaagctgattcagaagaagctgctggacaagacatgtgaccaggtcatggagttctcctggagtgccctgtggaacatcacagatgaaactcctgacaactgcgagatgttcctcaatttcaacggcatgaagctcttcctggactgcctgaaggaattcccagagaagcaggaactgcataggaatatgctaggacttttggggaatgtggcagaagtgaaggagctgaggcctcaactaatgacttcccagttcatcagcgtcttcagcaacctgttggagagcaaggccgatgggatcgaggtttcctacaatgcctgcggcgtcctctcccacatcatgtttgatggacccgaggcctggggcgtctgtgagccccagcgtgaggaggtggaggaacgcatgtgggctgccatccagagctgggacataaactctcggagaaacatcaattacaggtcatttgaaccaattctccgcctccttccccagggaatctctcctgtcagccagcactgggcaacctgggccctgtataacctcgtgtctgtctacccggacaagtactgccctctgctgatcaaagaaggggggatgccccttctgagggacataattaagatggcgaccgcacggcaggagaccaaggaaatggcccgcaaggtgattgagcactgcagtaactttaaagaggagaacatggacacgtctagatagaggcctccgtccccatggccgccaccgctctggaccacaggcggggaggaagcatgctcaagcagcccagcgggcgggccccttccgagggagcctcccacggagtgaagagacatgggggacttttgcacaaccgacgcttttccttaatgttagtgagatatatatatattatatatatatattttttttttggttaggaagtgtgaagttttgtgtgtatgatttctgtgcaaaaacaaaagcaacactcctgagtccttgcagcttccttggccattctcaaacccactcagccttcatcgctgacacacacactcctaccccaaccagactaaatgcctataacgctgtgagtgtccagtccttgtccaggaaactcagatcccggcctggcttcctttcatgagaggagcaggccttggacagcgtatcgagcatcctgacccactgcccctgcctgagaacgccatctcggctcccgggcacagctgatggggtttggggattagaacttaccccactgggtctcccaaaagccttggtgctcccggctgtgggccatctggggcaggaaagtgagccattcctaggctgaggtccaggcagccctgcccctgaagaccctctaggagcagggcacccagtggccctgctgctgtccagccaggcctgcctgaggccacgctgctatggaggctgcctcctagtctcccaccaggtcccaggctgtggaaagccccagcccagggatggtcagaactcgggggcagattccactgccccttctgccaaacacatccagaacctgccctcagccctggaagctagcatcttctggggccaggggcttgcttcctcgctccatagccctcaactgcccaggcgctcccaccagcagaactgagcctgcctcctcctcccagcctgccccgctgcccagaggaccccacgcctctcagaggcagaggtcccatgccagcctttgacccacaacggccacacagccgcctccagaccagcactcggactgccctgcagtggccgcttgggcctccctggcggtcccgccctgccctaggctttaccttggaagcctgagaggcgccggctctcttgctcctccatcgatggacactgcattgcttctcatcggacacttgtggagcgcaggggcctggggagcagcgctaaccctggaggcagcctttgggtgatggctttttcttcccttttcctcccgcgggcctgttttcaggtgttcctagcatttctgcctccaggcaggacggcaggggtgagcagctttgggagagacacctggcctttttctcctggagcctctccctcccggccctgggaagtgggcgcagccctgtgttcccccagcttggcagatgggctgcatgcggcgctcccttccttcccacgctcagcggccccggccagaccctggcagacttcacacctcattgctttaccccctggggcctggggaaatgtctgtactttgggaagtcacagaaatacatttttgtgcaaaatggaaaa

SEQ ID NO: 454909 - DNA, 2982 bp, Homo sapiens
gaagtgacgcgccccgggtttgttgacagcggaggcggcggcggctgcaggctccgagccgtaggagccggatcgggggaggggccgggcccaggagcctcagccccgccggcagccctaagggcaaggcagtggctctgccaatgatcctgtgagtattcaggaatcactgttgcccctggggatccttgtcctggagtggcccacctgcttgcccccagcatggcgtccgacactcccgagtcgctgatggccctctgtactgacttctgcttgcgcaacctggatggcaccctgggctacctgctggacaaggagaccctgcggctacatccggacatcttcttgcccagcgagatctgtgaccggctcgtcaatgagtatgtggagctggtgaacgctgcctgtaacttcgagccacacgagagcttcttcagcctcttttcggacccccgcagcacccgcctcacgcggatccacctccgtgaggacctggtgcaggaccaggacctggaggccatccgcaagcaggacctggtggagctgtacctgactaactgcgagaagctgtccgccaagagcctgcagacactgaggagcttcagccacaccctggtgtccttgagcctcttcggctgtacaaacattttctatgaggaggagaacccagggggctgtgaagatgagtacctcgtcaaccccacctgccaggtgctggttaaggatttcaccttcgagggcttcagccgcctccgcttcctcaacttgggccgcatgattgattgggtccctgtggagtccctgctgcggccgcttaactccctggctgccttggacctctcaggcattcagacgagcgacgccgccttcctcacccagtggaaagacagcctggtgtccctcgtcctctacaacatggacctgtccgacgaccacatccgggtcatcgtgcagctgcacaagctgcgacacctggacatctcccgagaccgcctctccagctactacaagttcaagctgactcgggaggtgctgagcctctttgtgcagaagctggggaacctaatgtccctggacatctctggccacatgatcctagagaactgcagcatctccaagatggaagaggaagcggggcagaccagcattgagccttccaagagcagcatcatacctttccgggctctgaagaggccgctgcagttcctcgggctctttgagaactctctgtgccgcctcacgcacattccagcctacaaagtaagtggtgacaaaaacgaagagcaggtgctgaatgccatcgaggcctacacggagcaccggcctgagatcacctcgcgggccatcaacttgctttttgacatcgcccgcatcgagcgttgcaaccagctgctgcgggccctgaagctggtcatcacggccctcaagtgccacaaatatgacaggaacattcaagtgacaggcagcgccgctctcttctacctaacaaattccgagtaccgctcagagcagagtgtgaagctgcgccggcaggttatccaggtggtgctgaatggcatggaatcctaccaggaggtgacggtgcagcggaactgctgcctgacgctctgcaacttcagcatccccgaggagctggaattccagtaccgccgggtcaacgagctcctgctcagcatcctcaaccccacgcggcaggacgagtctatccagcggatcgccgtgcacctgtgcaatgccctggtctgccaggtagacaacgaccacaaggaggccgtgggcaagatgggctttgtcgtgaccatgctgaagctgattcagaagaagctgctggacaagacatgtgaccaggtcatggagttctcctggagtgccctgtggaacatcacagatgaaactcctgacaactgcgagatgttcctcaatttcaacggcatgaagctcttcctggactgcctgaaggaattcccagagaagcaggaactgcataggaatatgctaggacttttggggaatgtggcagaagtgaaggagctgaggcctcaactaatgacttcccagttcatcagcgtcttcagcaacctgttggagagcaaggccgatgggatcgaggtttcctacaatgcctgcggcgtcctctcccacatcatgtttgatggacccgaggcctggggcgtctgtgagccccagcgtgaggaggtggaggaacgcatgtgggctgccatccagagctgggacataaactctcggagaaacatcaattacaggtcatttgaaccaattctccgcctccttccccagggaatctctcctgtcagccagcactgggcaacctgggccctgtataacctcgtgtctgtctacccggacaagtactgccctctgctgatcaaagaaggggggatgccccttctgagggacataattaagatggcgaccgcacggcaggagaccaaggaaatggcccgcaaggtgattgagcactgcagtaactttaaagaggagaacatggacacgtctagatagaggcctccgtccccatggccgccaccgctctggaccacaggcggggaggaagcatgctcaagcagcccagcgggcgggccccttccgagggagcctcccacggagtgaagagacatgggggacttttgcacaaccgacgcttttcctcccgcgggcctgttttcaggtgttcctagcatttctgcctccaggcaggacggcaggggtgagcagctttgggagagacacctggcctttttctcctggagcctctccctcccggccctgggaagtgggcgcagccctgtgttcccccagcttggcagatgggctgcatgcggcgctcccttccttcccacgctcagcggccccggccagaccctggcagacttcacacctcattgctttaccccctggggcctggggaaatgtctgtactttgggaagtcacagaaatacatttttgtgcaaaatggaaaa

SEQ ID NO: 454910 - DNA, 2549 bp, Homo sapiens
ctagaggatccccacgggcgatccgctggatagactcgtcctgccgcgtggggtgagggatgctgagcaggagctcgttgacccggcggtactggaattccagctcctcggggatgctgaagttgcagagcgtcaggcagcagttccgctgcaccgtcacctcctggtaggacgagtctatccagcggatcgccgtgcacctgtgcaatgccctggtctgccaggtagacaacgaccacaaggaggccgtgggcaagatgggctttgtcgtgaccatgctgaagctgattcagaagaagctgctggacaagacatgtgaccaggtcatggagttctcctggagtgccctgtggaacatcacagatgaaactcctgacaactgcgagatgttcctcaatttcaacggcatgaagctcttcctggactgcctgaaggaattcccagagaagcaggaactgcataggaatatgctaggacttttggggaatgtggcagaagtgaaggagctgaggcctcaactaatgacttcccagttcatcagcgtcttcagcaacctgttggagagcaaggccgatgggatcgaggtttcctacaatgcctgcggcgtcctctcccacatcatgtttgatggacccgaggcctggggcgtctgtgagccccagcgtgaggaggtggaggaacgcatgtgggctgccatccagagctgggacataaactctcggagaaacatcaattacaggtcatttgaaccaattctccgcctccttccccagggaatctctcctgtcagccagcactgggcaacctgggccctgtataacctcgtgtctgtctacccggacaagtactgccctctgctgatcaaagaaggggggatgccccttctgagggacataattaagatggcgaccgcacggcaggagaccaaggaaatggcccgcaaggtgattgagcactgcagtaactttaaagaggagaacatggacacgtctagatagaggcctccgtccccatggccgccaccgctctggaccacaggcggggaggaagcatgctcaagcagcccagcgggcgggccccttccgagggagcctcccacggagtgaagagacatgggggacttttgcacaaccgacgcttttccttaatgttagtgagatatatatatattatatatatatattttttttttggttaggaagtgtgaagttttgtgtgtatgatttctgtgcaaaaacaaaagcaacactcctgagtccttgcagcttccttggccattctcaaacccactcagccttcatcgctgacacacacactcctaccccaaccagactaaatgcctataacgctgtgagtgtccagtccttgtccaggaaactcagatcccggcctggcttcctttcatgagaggagcaggccttggacagcgtatcgagcatcctgacccactgcccctgcctgagaacgccatctcggctcccgggcacagctgatggggtttggggattagaacttaccccactgggtctcccaaaagccttggtgctcccggctgtgggccatctggggcaggaaagtgagccattcctaggctgaggtccaggcagccctgcccctgaagaccctctaggagcagggcacccagtggccctgctgctgtccagccaggcctgcctgaggccacgctgctatggaggctgcctcctagtctcccaccaggtcccaggctgtggaaagccccagcccagggatggtcagaactcgggggcagattccactgccccttctgccaaacacatccagaacctgccctcagccctggaagctagcatcttctggggccaggggcttgcttcctcgctccatagccctcaactgcccaggcgctcccaccagcagaactgagcctgcctcctcctcccagcctgccccgctgcccagaggaccccacgcctctcagaggcagaggtcccatgccagcctttgacccacaacggccacacagccgcctccagaccagcactcggactgccctgcagtggccgcttgggcctccctggcggtcccgccctgccctaggctttaccttggaagcctgagaggcgccggctctcttgctcctccatcgatggacactgcattgcttctcatcggacacttgtggagcgcaggggcctggggagcagcgctaaccctggaggcagcctttgggtgatggctttttcttcccttttcctcccgcgggcctgttttcaggtgttcctagcatttctgcctccaggcaggacggcaggggtgagcagctttgggagagacacctggcctttttctcctggagcctctccctcccggccctgggaagtgggcgcagccctgtgttcccccagcttggcagatgggctgcatgcggcgctcccttccttcccacgctcagcggccccggccagaccctggcagacttcacacctcattgctttaccccctggggcctggggaaatgtctgtactttgggaagtcacagaaatacatttttgtgcaaaatggaaaa

SEQ ID NO: 454911 - DNA, 2154 bp, Homo sapiens
acatatcaacggcacaaggccggaattggactgccggaggaattcccagagaagcaggaactgcataggaatatgctaggacttttggggaatgtggcagaagtgaaggagctgaggcctcaactaatgacttcccagttcatcagcgtcttcagcaacctgttggagagcaaggccgatgggatcgaggtttcctacaatgcctgcggcgtcctctcccacatcatgtttgatggacccgaggcctggggcgtctgtgagccccagcgtgaggaggtggaggaacgcatgtgggctgccatccagagctgggacataaactctcggagaaacatcaattacaggtcatttgaaccaattctccgcctccttccccagggaatctctcctgtcagccagcactgggcaacctgggccctgtataacctcgtgtctgtctacccggacaagtactgccctctgctgatcaaagaaggggggatgccccttctgagggacataattaagatggcgaccgcacggcaggagaccaaggaaatggcccgcaaggtgattgagcactgcagtaactttaaagaggagaacatggacacgtctagatagaggcctccgtccccatggccgccaccgctctggaccacaggcggggaggaagcatgctcaagcagcccagcgggcgggccccttccgagggagcctcccacggagtgaagagacatgggggacttttgcacaaccgacgcttttccttaatgttagtgagatatatatatattatatatatatattttttttttggttaggaagtgtgaagttttgtgtgtatgatttctgtgcaaaaacaaaagcaacactcctgagtccttgcagcttccttggccattctcaaacccactcagccttcatcgctgacacacacactcctaccccaaccagactaaatgcctataacgctgtgagtgtccagtccttgtccaggaaactcagatcccggcctggcttcctttcatgagaggagcaggccttggacagcgtatcgagcatcctgacccactgcccctgcctgagaacgccatctcggctcccgggcacagctgatggggtttggggattagaacttaccccactgggtctcccaaaagccttggtgctcccggctgtgggccatctggggcaggaaagtgagccattcctaggctgaggtccaggcagccctgcccctgaagaccctctaggagcagggcacccagtggccctgctgctgtccagccaggcctgcctgaggccacgctgctatggaggctgcctcctagtctcccaccaggtcccaggctgtggaaagccccagcccagggatggtcagaactcgggggcagattccactgccccttctgccaaacacatccagaacctgccctcagccctggaagctagcatcttctggggccaggggcttgcttcctcgctccatagccctcaactgcccaggcgctcccaccagcagaactgagcctgcctcctcctcccagcctgccccgctgcccagaggaccccacgcctctcagaggcagaggtcccatgccagcctttgacccacaacggccacacagccgcctccagaccagcactcggactgccctgcagtggccgcttgggcctccctggcggtcccgccctgccctaggctttaccttggaagcctgagaggcgccggctctcttgctcctccatcgatggacactgcattgcttctcatcggacacttgtggagcgcaggggcctggggagcagcgctaaccctggaggcagcctttgggtgatggctttttcttcccttttcctcccgcgggcctgttttcaggtgttcctagcatttctgcctccaggcaggacggcaggggtgagcagctttgggagagacacctggcctttttctcctggagcctctccctcccggccctgggaagtgggcgcagccctgtgttcccccagcttggcagatgggctgcatgcggcgctcccttccttcccacgctcagcggccccggccagaccctggcagacttcacacctcattgctttaccccctggggcctggggaaatgtctgtactttgggaagtcacagaaatacatttttgtgcaaaatggaaaa

SEQ ID NO: 454912 - DNA, 2143 bp, Homo sapiens
cgaaaaattatggcttaggtacgaggctgggtggtttaatcggccggaactgcataggaatatgctaggacttttggggaatgtggcagaagtgaaggagctgaggcctcaactaatgacttcccagttcatcagcgtcttcagcaacctgttggagagcaaggccgatgggatcgaggtttcctacaatgcctgcggcgtcctctcccacatcatgtttgatggacccgaggcctggggcgtctgtgagccccagcgtgaggaggtggaggaacgcatgtgggctgccatccagagctgggacataaactctcggagaaacatcaattacaggtcatttgaaccaattctccgcctccttccccagggaatctctcctgtcagccagcactgggcaacctgggccctgtataacctcgtgtctgtctacccggacaagtactgccctctgctgatcaaagaaggggggatgccccttctgagggacataattaagatggcgaccgcacggcaggagaccaaggaaatggcccgcaaggtgattgagcactgcagtaactttaaagaggagaacatggacacgtctagatagaggcctccgtccccatggccgccaccgctctggaccacaggcggggaggaagcatgctcaagcagcccagcgggcgggccccttccgagggagcctcccacggagtgaagagacatgggggacttttgcacaaccgacgcttttccttaatgttagtgagatatatatatattatatatatatattttttttttggttaggaagtgtgaagttttgtgtgtatgatttctgtgcaaaaacaaaagcaacactcctgagtccttgcagcttccttggccattctcaaacccactcagccttcatcgctgacacacacactcctaccccaaccagactaaatgcctataacgctgtgagtgtccagtccttgtccaggaaactcagatcccggcctggcttcctttcatgagaggagcaggccttggacagcgtatcgagcatcctgacccactgcccctgcctgagaacgccatctcggctcccgggcacagctgatggggtttggggattagaacttaccccactgggtctcccaaaagccttggtgctcccggctgtgggccatctggggcaggaaagtgagccattcctaggctgaggtccaggcagccctgcccctgaagaccctctaggagcagggcacccagtggccctgctgctgtccagccaggcctgcctgaggccacgctgctatggaggctgcctcctagtctcccaccaggtcccaggctgtggaaagccccagcccagggatggtcagaactcgggggcagattccactgccccttctgccaaacacatccagaacctgccctcagccctggaagctagcatcttctggggccaggggcttgcttcctcgctccatagccctcaactgcccaggcgctcccaccagcagaactgagcctgcctcctcctcccagcctgccccgctgcccagaggaccccacgcctctcagaggcagaggtcccatgccagcctttgacccacaacggccacacagccgcctccagaccagcactcggactgccctgcagtggccgcttgggcctccctggcggtcccgccctgccctaggctttaccttggaagcctgagaggcgccggctctcttgctcctccatcgatggacactgcattgcttctcatcggacacttgtggagcgcaggggcctggggagcagcgctaaccctggaggcagcctttgggtgatggctttttcttcccttttcctcccgcgggcctgttttcaggtgttcctagcatttctgcctccaggcaggacggcaggggtgagcagctttgggagagacacctggcctttttctcctggagcctctccctcccggccctgggaagtgggcgcagccctgtgttcccccagcttggcagatgggctgcatgcggcgctcccttccttcccacgctcagcggccccggccagaccctggcagacttcacacctcattgctttaccccctggggcctggggaaatgtctgtactttgggaagtcacagaaatacatttttgtgcaaaatggaaaa

SEQ ID NO: 454913 - DNA, 1056 bp, Homo sapiens
actactaagcgcgcgccccgtcgacccactgggtctcccaaaagccttggtgctcccggctgtgggccatctggggcaggaaagtgagccattcctaggctgaggtccaggcagccctgcccctgaagaccctctaggagcagggcacccagtggccctgctgctgtccagccaggcctgcctgaggccacgctgctatggaggctgcctcctagtctcccaccaggtcccaggctgtggaaagccccagcccagggatggtcagaactcgggggcagattccactgccccttctgccaaacacatccagaacctgccctcagccctggaagctagcatcttctggggccaggggcttgcttcctcgctccatagccctcaactgcccaggcgctcccaccagcagaactgagcctgcctcctcctcccagcctgccccgctgcccagaggaccccacgcctctcagaggcagaggtcccatgccagcctttgacccacaacggccacacagccgcctccagaccagcactcggactgccctgcagtggccgcttgggcctccctggcggtcccgccctgccctaggctttaccttggaagcctgagaggcgccggctctcttgctcctccatcgatggacactgcattgcttctcatcggacacttgtggagcgcaggggcctggggagcagcgctaaccctggaggcagcctttgggtgatggctttttcttcccttttcctcccgcgggcctgttttcaggtgttcctagcatttctgcctccaggcaggacggcaggggtgagcagctttgggagagacacctggcctttttctcctggagcctctccctcccggccctgggaagtgggcgcagccctgtgttcccccagcttggcagatgggctgcatgcggcgctcccttccttcccacgctcagcggccccggccagaccctggcagacttcacacctcattgctttaccccctggggcctggggaaatgtctgtactttgggaagtcacagaaatacatttttgtgcaaaatggaaaa

SEQ ID NO: 454914 - DNA, 214 bp, Homo sapiens
aaaactatacatttgtgttttatgcattcttctgtatgaatatttcacatttttaaaaaacattttttagagaagacttgtatagcctcctcttccagaaaaccgggctggactgccacaactctggatgagctcatacctctagatagttcctagagccctgctcctgagtctgaccctgaatgtgccccacttgtgtcctgtcccggcccag

SEQ ID NO: 454915 - DNA, 422 bp, Homo sapiens
gtgggggtgggagttcttcagccccagcactctagcagactcttgtccctgcctgcagaccatgctgaagctgattcagaagaagctgctggacaagacagtaagtcaagtcttcacgaagccacgctaccctttccccacctcgcaaggggcctgggctgcccctgggggaggtctgtgttttgtcaggggcccccctccccgggtaccaggagccttggctgagccctgccctgccctcacagtgtgaccaggtcatggagttctcctggagtgccctgtggaacatcacagatgaaactcctgacaactgcgagatgttcctcaatttcaacggcatgaagctcttcctggactgcctgaaggtagtgtccacctcctgcagcagcagctgcctcagctgcccacatggcccctcttct

SEQ ID NO: 454916 - DNA, 468 bp, Homo sapiens
gggggaggtctgtgttttgtcaggggcccccctccccgggtaccaggagccttggctgagccctgccctgccctcacagtgtgaccaggtcatggagttctcctggagtgccctgtggaacatcacagatgaaactcctgacaactgcgagatgttcctcaatttcaacggcatgaagctcttcctggactgcctgaaggtagtgtccacctcctgcagcagcagctgcctcagctgcccacatggcccctcttctgtccctaggctccccaccaaccaaatccgcagcacccctcacccatgcttcctggagaagggcagtggggacagactcaggcccacccacccaggatttgctgctgacagaagctccagacccagatggcctggtggggcctcctgagagcccccactcccagggaaagcccctccctgtctcctcggccgttgttctcaggctgcccacag

SEQ ID NO: 454917 - DNA, 4042 bp, Homo sapiens
cttggattctggatcagctcccaaaagggatgacacaaagtatagggaaatccaacagggtgaggttgcaaccggagggccaagggagcccgacaggcagtggctctgccaatgatcctgtgagtattcaggaatcactgttgcccctggggatccttgtcctggagtggcccacctgcttgcccccagcatggcgtccgacactcccgagtcgctgatggccctctgtactgacttctgcttgcgcaacctggatggcaccctgggctacctgctggacaaggagaccctgcggctacatccggacatcttcttgcccagcgagatctgtgaccggctcgtcaatgagtatgtggagctggtgaacgctgcctgtaacttcgagccacacgagagcttcttcagcctcttttcggacccccgcagcacccgcctcacgcggatccacctccgtgaggacctggtgcaggaccaggacctggaggccatccgcaagcaggacctggtggagctgtacctgactaactgcgagaagctgtccgccaagagcctgcagacactgaggagcttcagccacaccctggtgtccttgagcctcttcggctgtacaaacattttctatgaggaggagaacccagggggctgtgaagatgagtacctcgtcaaccccacctgccaggtgctggttaaggatttcaccttcgagggcttcagccgcctccgcttcctcaacttgggccgcatgattgattgggtccctgtggagtccctgctgcggccgcttaactccctggctgccttggacctctcaggcattcagacgagcgacgccgccttcctcacccagtggaaagacagcctggtgtccctcgtcctctacaacatggacctgtccgacgaccacatccgggtcatcgtgcagctgcacaagctgcgacacctggacatctcccgagaccgcctctccagctactacaagttcaagctgactcgggaggtgctgagcctctttgtgcagaagctggggaacctaatgtccctggacatctctggccacatgatcctagagaactgcagcatctccaagatggaagaggaagcggggcagaccagcattgagccttccaagagcagcatcatacctttccgggctctgaagaggccgctgcagttcctcgggctctttgagaactctctgtgccgcctcacgcacattccagcctacaaagtaagtggtgacaaaaacgaagagcaggtgctgaatgccatcgaggcctacacggagcaccggcctgagatcacctcgcgggccatcaacttgctttttgacatcgcccgcatcgagcgttgcaaccagctgctgcgggccctgaagctggtcatcacggccctcaagtgccacaaatatgacaggaacattcaagtgacaggcagcgccgctctcttctacctaacaaattccgagtaccgctcagagcagagtgtgaagctgcgccggcaggttatccaggtggtgctgaatggcatggaatcctaccaggaggtgacggtgcagcggaactgctgcctgacgctctgcaacttcagcatccccgaggagctggaattccagtaccgccgggtcaacgagctcctgctcagcatcctcaaccccacgcggcaggacgagtctatccagcggatcgccgtgcacctgtgcaatgccctggtctgccaggtagacaacgaccacaaggaggccgtgggcaagatgggctttgtcgtgaccatgctgaagctgattcagaagaagctgctggacaagacatgtgaccaggtcatggagttctcctggagtgccctgtggaacatcacagatgaaactcctgacaactgcgagatgttcctcaatttcaacggcatgaagctcttcctggactgcctgaaggaattcccagagaagcaggaactgcataggaatatgctaggacttttggggaatgtggcagaagtgaaggagctgaggcctcaactaatgacttcccagttcatcagcgtcttcagcaacctgttggagagcaaggccgatgggatcgaggtttcctacaatgcctgcggcgtcctctcccacatcatgtttgatggacccgaggcctggggcgtctgtgagccccagcgtgaggaggtggaggaacgcatgtgggctgccatccagagctgggacataaactctcggagaaacatcaattacaggtcatttgaaccaattctccgcctccttccccagggaatctctcctgtcagccagcactgggcaacctgggccctgtataacctcgtgtctgtctacccggacaagtactgccctctgctgatcaaagaaggggggatgccccttctgagggacataattaagatggcgaccgcacggcaggagaccaaggaaatggcccgcaaggtgattgagcactgcagtaactttaaagaggagaacatggacacgtctagatagaggcctccgtccccatggccgccaccgctctggaccacaggcggggaggaagcatgctcaagcagcccagcgggcgggccccttccgagggagcctcccacggagtgaagagacatgggggacttttgcacaaccgacgcttttccttaatgttagtgagatatatatatattatatatatatattttttttttggttaggaagtgtgaagttttgtgtgtatgatttctgtgcaaaaacaaaagcaacactcctgagtccttgcagcttccttggccattctcaaacccactcagccttcatcgctgacacacacactcctaccccaaccagactaaatgcctataacgctgtgagtgtccagtccttgtccaggaaactcagatcccggcctggcttcctttcatgagaggagcaggccttggacagcgtatcgagcatcctgacccactgcccctgcctgagaacgccatctcggctcccgggcacagctgatggggtttggggattagaacttaccccactgggtctcccaaaagccttggtgctcccggctgtgggccatctggggcaggaaagtgagccattcctaggctgaggtccaggcagccctgcccctgaagaccctctaggagcagggcacccagtggccctgctgctgtccagccaggcctgcctgaggccacgctgctatggaggctgcctcctagtctcccaccaggtcccaggctgtggaaagccccagcccagggatggtcagaactcgggggcagattccactgccccttctgccaaacacatccagaacctgccctcagccctggaagctagcatcttctggggccaggggcttgcttcctcgctccatagccctcaactgcccaggcgctcccaccagcagaactgagcctgcctcctcctcccagcctgccccgctgcccagaggaccccacgcctctcagaggcagaggtcccatgccagcctttgacccacaacggccacacagccgcctccagaccagcactcggactgccctgcagtggccgcttgggcctccctggcggtcccgccctgccctaggctttaccttggaagcctgagaggcgccggctctcttgctcctccatcgatggacactgcattgcttctcatcggacacttgtggagcgcaggggcctggggagcagcgctaaccctggaggcagcctttgggtgatggctttttcttcccttttcctcccgcgggcctgttttcaggtgttcctagcatttctgcctccaggcaggacggcaggggtgagcagctttgggagagacacctggcctttttctcctggagcctctccctcccggccctgggaagtgggcgcagccctgtgttcccccagcttggcagatgggctgcatgcggcgctcccttccttcccacgctcagcggccccggccagaccctggcagacttcacacctcattgctttaccccctggggcctggggaaatgtctgtactttgggaagtcacagaaatacatttttgtgcaaaatggaaaa

SEQ ID NO: 454918 - DNA, 3739 bp, Homo sapiens
gaagtgacgcgccccgggtttgttgacagcggaggcggcggcggctgcaggctccgagccgtaggagccggatcgggggaggggccgggcccaggagcctcagccccgccggcagccctaagggcaaggcagtggctctgccaatgatcctgtgagtattcaggaatcactgttgcccctggggatccttgtcctggagtggcccacctgcttgcccccagcatggcgtccgacactcccgagtcgctgatggccctctgtactgacttctgcttgcgcaacctggatggcaccctgggctacctgctggacaaggagaccctgcggctacatccggacatcttcttgcccagcgagatctgtgaccggctcgtcaatgagtatgtggagctggtgaacgctgcctgtaacttcgagccacacgagagcttcttcagcctcttttcggacccccgcagcacccgcctcacgcggatccacctccgtgaggacctggtgcaggaccaggacctggaggccatccgcaagcaggacctggtggagctgtacctgactaactgcgagaagctgtccgccaagagcctgcagacactgaggagcttcagccacaccctggtgtccttgagcctcttcggctgtacaaacattttctatgaggaggagaacccagggggctgtgaagatgagtacctcgtcaaccccacctgccaggtgctggttaaggatttcaccttcgagggcttcagccgcctccgcttcctcaacttgggccgcatgattgattgggtccctgtggagtccctgctgcggccgcttaactccctggctgccttggacctctcaggcattcagacgagcgacgccgccttcctcacccagtggaaagacagcctggtgtccctcgtcctctacaacatggacctgtccgacgaccacatccgggtcatcgtgcagctgcacaagctgcgacacctggacatctcccgagaccgcctctccagctactacaagttcaagctgactcgggaggtgctgagcctctttgtgcagaagctggggaacctaatgtccctggacatctctggccacatgatcctagagaactgcagcatctccaagatggaagaggaagcggggcagaccagcattgagccttccaagagcagcatcatacctttccgggctctgaagaggccgctgcagttcctcgggctctttgagaactctctgtgccgcctcacgcacattccagcctacaaagtaagtggtgacaaaaacgaagagcaggtgctgaatgccatcgaggcctacacggagcaccggcctgagatcacctcgcgggccatcaacttgctttttgacatcgcccgcatcgagcgttgcaaccagctgctgcgggccctgaagctggtcatcacggccctcaagtgccacaaatatgacaggaacattcaagtgacaggcagcgccgctctcttctacctaacaaattccgagtaccgctcagagcagagtgtgaagctgcgccggcaggttatccaggtggtgctgaatggcatggaatcctaccaggaggtgacggtgcagcggaactgctgcctgacgctctgcaacttcagcatccccgaggagctggaattccagtaccgccgggtcaacgagctcctgctcagcatcctcaaccccacgcggcaggacgagtctatccagcggatcgccgtgcacctgtgcaatgccctggtctgccaggtagacaacgaccacaaggaggccgtgggcaagatgggctttgtcgtgaccatgctgaagctgattcagaagaagctgctggacaagacatgtgaccaggtcatggagttctcctggagtgccctgtggaacatcacagatgaaactcctgacaactgcgagatgttcctcaatttcaacggcatgaagctcttcctggactgcctgaaggaattcccagagaagcaggaactgcataggaatatgctaggacttttggggaatgtggcagaagtgaaggagctgaggcctcaactaatgacttcccagttcatcagcgtcttcagcaacctgttggagagcaaggccgatgggatcgaggtttcctacaatgcctgcggcgtcctctcccacatcatgtttgatggacccgaggcctggggcgtctgtgagccccagcgtgaggaggtggaggaacgcatgtgggctgccatccagagctgggacataaactctcggagaaacatcaattacaggtcatttgaaccaattctccgcctccttccccagggaatctctcctgtcagccagcactgggcaacctgggccctgtataacctcgtgtctgtctacccggacaagtactgccctctgctgatcaaagaaggggggatgccccttctgagggacataattaagatggcgaccgcacggcaggagaccaaggaaatggcccgcaaggtgattgagcactgcagtaactttaaagaggagaacatggacacgtctagatagaggcctccgtccccatggccgccaccgctctggaccacaggcggggaggaagcatgctcaagcagcccagcgggcgggccccttccgagggagcctcccacggagtgaagagacatgggggacttttgcacaaccgacgcttttccttaatgttagtgagatatatatatattatatatatatattttttttttggttaggaagtgtgaagttttgtgtgtatgatttctgtgcaaaaacaaaagcaacactcctgagtccttgcagcttccttggccattctcaaacccactcagccttcatcgctgacacacacactcctaccccaaccagactaaatgcctataacgctgtgagtgtccagtccttgtccaggaaactcagatcccggcctggcttcctttcatgagaggagcaggccttggacagcgtatcgagcatcctgacccactgcccctgcctgagaacgccatctcggctcccgggcacagctgatggggtttggggattagaacttaccccactgggtctcccaaaagccttggtgctcccggctgtgggccatctggggcaggaaagtgagccattcctaggctgaggtccaggcagccctgcccctgaagaccctctaggagcagggcacccagtggccctgctgctgtccagccaggcctgcctgaggccacgctgctatggaggctgcctcctagtctcccaccaggtcccaggctgtggaaagccccagcccagggatggtcagaactcgggggcagattccactgccccttctgccaaacacatccagaacctgccctcagccctggaagctagcatcttctggggccaggggcttgcttcctcgctccatagccctcaactgcccaggcgctcccaccagcagaactgagcctgcctcctcctcccagcctgccccgctgcccagaggaccccacgcctctcagaggcagaggtcccatgccagcctttgacccacaacggccacacagccgcctccagaccagcctggccaacacagtgaaaccccatctctgctaaaaatacaaaaattagccaggcatggtggtgggcacctgtaatcccagccccttgggaggctgaggcaggagaatcacttgaacctggaaggcggaggttgcagtgagccaagaactcgccactgcactccagcctgggcaacagagtgatactccatctc

SEQ ID NO: 454919 - DNA, 3485 bp, Homo sapiens
gaagtgacgcgccccgggtttgttgacagcggaggcggcggcggctgcaggctccgagccgtaggagccggatcgggggagggggctgtgaagatgagtacctcgtcaaccccacctgccaggtgctggttaaggatttcaccttcgagggcttcagccgcctccgcttcctcaacttgggccgcatgattgattgggtccctgtggagtccctgctgcggccgcttaactccctggctgccttggacctctcaggcattcagacgagcgacgccgccttcctcacccagtggaaagacagcctggtgtccctcgtcctctacaacatggacctgtccgacgaccacatccgggtcatcgtgcagctgcacaagctgcgacacctggacatctcccgagaccgcctctccagctactacaagttcaagctgactcgggaggtgctgagcctctttgtgcagaagctggggaacctaatgtccctggacatctctggccacatgatcctagagaactgcagcatctccaagatggaagaggaagcggggcagaccagcattgagccttccaagagcagcatcatacctttccgggctctgaagaggccgctgcagttcctcgggctctttgagaactctctgtgccgcctcacgcacattccagcctacaaagtaagtggtgacaaaaacgaagagcaggtgctgaatgccatcgaggcctacacggagcaccggcctgagatcacctcgcgggccatcaacttgctttttgacatcgcccgcatcgagcgttgcaaccagctgctgcgggccctgaagctggtcatcacggccctcaagtgccacaaatatgacaggaacattcaagtgacaggcagcgccgctctcttctacctaacaaattccgagtaccgctcagagcagagtgtgaagctgcgccggcaggttatccaggtggtgctgaatggcatggaatcctaccaggaggtgacggtgcagcggaactgctgcctgacgctctgcaacttcagcatccccgaggagctggaattccagtaccgccgggtcaacgagctcctgctcagcatcctcaaccccacgcggcaggacgagtctatccagcggatcgccgtgcacctgtgcaatgccctggtctgccaggtagacaacgaccacaaggaggccgtgggcaagatgggctttgtcgtgaccatgctgaagctgattcagaagaagctgctggacaagacatgtgaccaggtcatggagttctcctggagtgccctgtggaacatcacagatgaaactcctgacaactgcgagatgttcctcaatttcaacggcatgaagctcttcctggactgcctgaaggaattcccagagaagcaggaactgcataggaatatgctaggacttttggggaatgtggcagaagtgaaggagctgaggcctcaactaatgacttcccagttcatcagcgtcttcagcaacctgttggagagcaaggccgatgggatcgaggtttcctacaatgcctgcggcgtcctctcccacatcatgtttgatggacccgaggcctggggcgtctgtgagccccagcgtgaggaggtggaggaacgcatgtgggctgccatccagagctgggacataaactctcggagaaacatcaattacaggtcatttgaaccaattctccgcctccttccccagggaatctctcctgtcagccagcactgggcaacctgggccctgtataacctcgtgtctgtctacccggacaagtactgccctctgctgatcaaagaaggggggatgccccttctgagggacataattaagatggcgaccgcacggcaggagaccaaggaaatggcccgcaaggtgattgagcactgcagtaactttaaagaggagaacatggacacgtctagatagaggcctccgtccccatggccgccaccgctctggaccacaggcggggaggaagcatgctcaagcagcccagcgggcgggccccttccgagggagcctcccacggagtgaagagacatgggggacttttgcacaaccgacgcttttccttaatgttagtgagatatatatatattatatatatatattttttttttggttaggaagtgtgaagttttgtgtgtatgatttctgtgcaaaaacaaaagcaacactcctgagtccttgcagcttccttggccattctcaaacccactcagccttcatcgctgacacacacactcctaccccaaccagactaaatgcctataacgctgtgagtgtccagtccttgtccaggaaactcagatcccggcctggcttcctttcatgagaggagcaggccttggacagcgtatcgagcatcctgacccactgcccctgcctgagaacgccatctcggctcccgggcacagctgatggggtttggggattagaacttaccccactgggtctcccaaaagccttggtgctcccggctgtgggccatctggggcaggaaagtgagccattcctaggctgaggtccaggcagccctgcccctgaagaccctctaggagcagggcacccagtggccctgctgctgtccagccaggcctgcctgaggccacgctgctatggaggctgcctcctagtctcccaccaggtcccaggctgtggaaagccccagcccagggatggtcagaactcgggggcagattccactgccccttctgccaaacacatccagaacctgccctcagccctggaagctagcatcttctggggccaggggcttgcttcctcgctccatagccctcaactgcccaggcgctcccaccagcagaactgagcctgcctcctcctcccagcctgccccgctgcccagaggaccccacgcctctcagaggcagaggtcccatgccagcctttgacccacaacggccacacagccgcctccagaccagcactcggactgccctgcagtggccgcttgggcctccctggcggtcccgccctgccctaggctttaccttggaagcctgagaggcgccggctctcttgctcctccatcgatggacactgcattgcttctcatcggacacttgtggagcgcaggggcctggggagcagcgctaaccctggaggcagcctttgggtgatggctttttcttcccttttcctcccgcgggcctgttttcaggtgttcctagcatttctgcctccaggcaggacggcaggggtgagcagctttgggagagacacctggcctttttctcctggagcctctccctcccggccctgggaagtgggcgcagccctgtgttcccccagcttggcagatgggctgcatgcggcgctcccttccttcccacgctcagcggccccggccagaccctggcagacttcacacctcattgctttaccccctggggcctggggaaatgtctgtactttgggaagtcacagaaatacatttttgtgcaaaatggaaaa

SEQ ID NO: 454920 - DNA, 2682 bp, Homo sapiens
gaagtgacgcgccccgggtttgttgacagcggaggcggcggcggctgcaggctccgagccgtaggagccggatcgggggaggggccgggcccaggagcctcagccccgccggcagccctaagggcaaggcagtggctctgccaatgatcctgtgagtattcaggaatcactgttgcccctggggatccttgtcctggagtggcccacctgcttgcccccagcatggcgtccgacactcccgagtcgctgatggccctctgtactgacttctgcttgcgcaacctggatggcaccctgggctacctgctggacaaggagaccctgcggctacatccggacatcttcttgcccagcgagatctgtgaccggctcgtcaatgagtatgtggagctggtgaacgctgcctgtaacttcgagccacacgagagcttcttcagcctcttttcggacccccgcagcacccgcctcacgcggatccacctccgtgaggacctggtgcaggaccaggacctggaggccatccgcaagcaggacctggtggagctgtacctgactaactgcgagaagctgtccgccaagagcctgcagacactgaggagcttcagccacaccctggtgtccttgagcctcttcggctgtacaaacattttctatgaggaggagaacccagggggctgtgaagatgagtacctcgtcaaccccacctgccaggtgctggttaaggatttcaccttcgagggcttcagccgcctccgcttcctcaacttgggccgcatgattgattgggtccctgtggagtccctgctgcggccgcttaactccctggctgccttggacctctcaggcattcagacgagcgacgccgccttcctcacccagtggaaagacagcctggtgtccctcgtcctctacaacatggacctgtccgacgaccacatccgggtcatcgtgcagctgcacaagctgcgacacctggacatctcccgagaccgcctctccagctactacaagttcaagctgactcgggaggtgctgagcctctttgtgcagaagctggggaacctaatgtccctggacatctctggccacatgatcctagagaactgcagcatctccaagatggaagaggaagcggggcagaccagcattgagccttccaagagcagcatcatacctttccgggctctgaagaggccgctgcagttcctcgggctctttgagaactctctgtgccgcctcacgcacattccagcctacaaagtaagtggtgacaaaaacgaagagcaggtgctgaatgccatcgaggcctacacggagcaccggcctgagatcacctcgcgggccatcaacttgctttttgacatcgcccgcatcgagcgttgcaaccagctgctgcgggccctgaagctggtcatcacggccctcaagtgccacaaatatgacaggaacattcaagtgacaggcagcgccgctctcttctacctaacaaattccgagtaccgctcagagcagagtgtgaagctgcgccggcaggttatccaggtggtgctgaatggcatggaatcctaccaggaggtgacggtgcagcggaactgctgcctgacgctctgcaacttcagcatccccgaggagctggaattccagtaccgccgggtcaacgagctcctgctcagcatcctcaaccccacgcggcaggacgagtctatccagcggatcgccgtgcacctgtgcaatgccctggtctgccaggtagacaacgaccacaaggaggccgtgggcaagatgggctttgtcgtgaccatgctgaagctgattcagaagaagctgctggacaagacatgtgaccaggtcatggagttctcctggagtgccctgtggaacatcacagatgaaactcctgacaactgcgagatgttcctcaatttcaacggcatgaagctcttcctggactgcctgaaggaattcccagagaagcaggaactgcataggaatatgctaggacttttggggaatgtggcagaagtgaaggagctgaggcctcaactaatgacttcccagttcatcagcgtcttcagcaacctgttggagagcaaggccgatgggatcgaggtttcctacaatgcctgcggcgtcctctcccacatcatgtttgatggacccgaggcctggggcgtctgtgagccccagcgtgaggaggtggaggaacgcatgtgggctgccatccagagctgggacataaactctcggagaaacatcaattacaggtcatttgaaccaattctccgcctccttccccagggaatctctcctgtcagccagcactgggcaacctgggccctgtataacctcgtgtctgtctacccggacaagtactgccctctgctgatcaaagaaggggggatgccccttctgagggacataattaagatggcgaccgcacggcaggagaccaaggaaatggcccgcaaggtgattgagcactgcagtaactttaaagaggagaacatggacacgtctagatagaggcctccgtccccatggccgccaccgctctggaccacgctcagcggccccggccagaccctggcagacttcacacctcattgctttaccccctggggcctggggaaatgtctgtactttgggaagtcacagaaatacatttttgtgcaaaatggaaaa

SEQ ID NO: 454921 - DNA, 1533 bp, Homo sapiens
gaagtgacgcgccccgggtttgttgacagcggaggcggcggcggctgcaggctccgagccgtaggagccggatcgggggaggggccgggcccaggagcctcagccccgccggcagccctaagggcaaggcagtggctctgccaatgatcctgtgagtattcaggaatcactgttgcccctggggatccttgtcctggagtggcccacctgcttgcccccagcatggcgtccgacactcccgagtcgctgatggccctctgtactgacttctgcttgcgcaacctggatggcaccctgggctacctgctggacaaggagaccctgcggctacatccggacatcttcttgcccagcgagatctgtgaccggctcgtcaatgagtatgtggagctggtgaacgctgcctgtaacttcgagccacacgagagcttcttcagcctcttttcggacccccgcagcacccgcctcacgcggatccacctccgtgaggacctggtgcaggaccaggacctggaggccatccgcaagcaggacctggtggagctgtacctgactaactgcgagaagctgtccgccaagagcctgcagacactgaggagcttcagccacaccctggtgtccttgagcctcttcggctgtacaaacattttctatgaggaggagaacccagggggctgtgaagatgagtacctcgtcaaccccacctgccaggtgctggttaaggatttcaccttcgagggcttcagccgcctccgcttcctcaacttgggccgcatgattgattgggtccctgtggagtccctgctgcggccgcttaactccctggctgccttggacctctcaggcattcagacgagcgacgccgccttcctcacccagtggaaagacagcctggtgtccctcgtcctctacaacatggacctgtccgacgaccacatccgggtcatcgtgcagctgcacaagctgcgacacctggacatctcccgagaccgcctctccagctactacaagttcaagctgactcgggaggtgctgagcctctttgtgcagaagctggggaacctaatgtccctggacatctctggccacatgatcctagagaactgcagcatctccaagatggaagaggaagcggggcagaccagcattgagccttccaagagcagcatcatacctttccgggctctgaagaggccgctgcagttcctcgggctctttgagaactctctgtgccgcctcacgcacattccagcctacaaagtaagtggtgacaaaaacgaagagcaggtgctgaatgccatcgaggcctacacggagcaccggcctgagatcacctcgcgggccatcaacttgctttttgacatcgcccgcatcgagcgttgcaaccagctgctgcgggccctgaagctggtcatcacggccctcaagtgccacaaatatgacaggaacattcaagtgacaggcagcgccgctctcttctacctaacaaagtgctcgagaaaccgtcgaattcgataagatccggtagagtca

SEQ ID NO: 454922 - DNA, 832 bp, Homo sapiens
  misc_feature (821)..(822): n is a, c, g, or t
  misc_feature (825)..(825): n is a, c, g, or t
gaagtgacgcgccccgggtttgttgacagcggaggcggcggcggctgcaggctccgagccgtaggagccggatcgggggaggggccgggcccaggagcctcagccccgccggcagccctaagggcaaggcagtggctctgccaatgatcctgtgagtattcaggaatcactgttgcccctggggatccttgtcctggagtggcccacctgcttgcccccagcatggcgtccgacactcccgagtcgctgatggccctctgtactgacttctgcttgcgcaacctggatggcaccctgggctacctgctggacaaggagaccctgcggctacatccggacatcttcttgcccagcgagatctgtgaccggctcgtcaatgagtatgtggagctggtgaacgctgcctgtaacttcgagccacacgagagcttcttcagcctcttttcggacccccgcagcacccgcctcacgcggatccacctccgtgaggacctggtgcaggaccaggacctggaggccatccgcaagcaggacctggtggagctgtacctgactaactgcgagaagctgtccgccaagagcctgcagacactgaggagcttcagccacaccctggtgtccttgagcctcttcggctgtacaaacattttctatgaggaggagaacccagggggctgtgaagatgagtacctgcttcccccgtcgtcggagccgctgcgtgtggcgatggtacagtcagagacggcccccgcgctataaacagcgccaggcgcatggtcgtcggtaggcgcttagattaccggcgcacggcggggccgcannagnctatatt

SEQ ID NO: 454923 - DNA, 4768 bp, Homo sapiens
gcacgcgcctgaagcacaaagcagatagctaggaatgaaccatccctgggagtatgtggaaacaacggaggagctctgacttcccaactgtcccattctatgggcgaaggaactgctcctgacttcagtggttaagggcagaattgaaaataattctggaggaagataagaatgattcctgcgcgactgcaccgggactacaaagggcttgtcctgctgggaatcctcctggggactctgtgggagaccggatgcacccagatacgctattcagttccggaagagctggagaaaggctctagggtgggcgacatctccagggacctggggctggagccccgggagctcgcggagcgcggagtccgcatcatccccagaggtaggacgcagcttttcgccctgaatccgcgcagcggcagcttggtcacggcgggcaggatagaccgggaggagctctgtatgggggccatcaagtgtcaattaaatctagacattctgatggaggataaagtgaaaatatatggagtagaagtagaagtaagggacattaacgacaatgcgccttactttcgtgaaagtgaattagaaataaaaattagtgaaaatgcagccactgagatgcggttccctctaccccacgcctgggatccggatatcgggaagaactctctgcagagctacgagctcagcccgaacactcacttctccctcatcgtgcaaaatggagccgacggtagtaagtaccccgaattggtgctgaaacgcgccctggaccgcgaagaaaaggctgctcaccacctggtccttacggcctccgacgggggcgacccggtgcgcacaggcaccgcgcgcatccgcgtgatggttctggatgcgaacgacaacgcaccagcgtttgctcagcccgagtaccgcgcgagcgttccggagaatctggccttgggcacgcagctgcttgtagtcaacgctaccgaccctgacgaaggagtcaatgcggaagtgaggtattccttccggtatgtggacgacaaggcggcccaagttttcaaactagattgtaattcagggacaatatcaacaataggggagttggaccacgaggagtcaggattctaccagatggaagtgcaagcaatggataatgcaggatattctgcgcgagccaaagtcctgatcactgttctggacgtgaacgacaatgccccagaagtggtcctcacctctctcgccagctcggttcccgaaaactctcccagagggacattaattgcccttttaaatgtaaatgaccaagattctgaggaaaacggacaggtgatctgtttcatccaaggaaatctgccctttaaattagaaaaatcttacggaaattactatagtttagtcacagacatagtcttggatagggaacaggttcctagctacaacatcacagtgaccgccactgaccggggaaccccgcccctatccacggaaactcatatctcgctgaacgtggcagacaccaacgacaacccgccggtcttccctcaggcctcctattccgcttatatcccagagaacaatcccagaggagtttccctcgtctctgtgaccgcccacgaccccgactgtgaagagaacgcccagatcacttattccctggctgagaacaccatccaaggggcaagcctatcgtcctacgtgtccatcaactccgacactggggtactgtatgcgctgagctccttcgactacgagcagttccgagacttgcaagtgaaagtgatggcgcgggacaacgggcacccgcccctcagcagcaacgtgtcgttgagcctgttcgtgctggaccagaacgacaatgcgcccgagatcctgtaccccgccctccccacggacggttccactggcgtggagctggctccccgctccgcagagcccggctacctggtgaccaaggtggtggcggtggacagagactccggccagaacgcctggctgtcctaccgtctgctcaaggccagcgagccgggactcttctcggtgggtctgcacacgggcgaggtgcgcacggcgcgagccctgctggacagagacgcgctcaagcagagcctcgtagtggccgtccaggaccacggccagccccctctctccgccactgtcacgctcaccgtggccgtggccgacagcatcccccaagtcctggcggacctcggcagcctcgagtctccagctaactctgaaacctcagacctcactctgtacctggtggtagcggtggccgcggtctcctgcgtcttcctggccttcgtcatcttgctgctggcgctcaggctgcggcgctggcacaagtcacgcctgctgcaggcttcaggaggcggcttgacaggagcgccggcgtcgcactttgtgggcgtggacggggtgcaggctttcctgcagacctattcccacgaggtttccctcaccacggactcgcggaagagtcacctgatcttcccccagcccaactatgcagacatgctcgtcagccaggagagctttgaaaaaagcgagccccttttgctgtcaggtgattcggtattttctaaagacagtcatgggttaattgagcaagccccgcccaacacggactggcgtttctctcaggcccagagacccggcaccagcggctcccaaaatggcgatgacaccggcacctggcccaacaaccagtttgacacagagatgctgcaagccatgatcttggcgtccgccagtgaagctgctgatgggagctccaccctgggagggggtgccggcaccatgggattgagcgcccgctacggaccccagttcaccctgcagcacgtgcccgactaccgccagaatgtctacatcccaggcagcaatgccacactgaccaacgcagctggcaagcgggatggcaaggccccagcaggtggcaatggcaacaagaagaagtcgggcaagaaggagaagaagtaacatggaggccaggccaagagccacagggcggcctctccccaaccagcccagcttctccttacctgcacccaggcctcagagtttcagggctaacccccagaatactggtaggggccaaggccatgctccccttgggaaacagaaacaagtgcccagtcagcacctaccccttcccccccagggggttgaatatgcaaaagcagttccgctgggaacccccatccaatcaactgctgtacccatgggggtagtggggttactgtagacaccaagaaccatttgccacaccccgtttagttacagctgaactcctccatcttccaaatcaatcaggcccatccatcccatgcctccctcctccccaccccactccaacagttcctctttcccgagtaaggtggttggggtgttgaagtaccaagtaacctacaagcctcctagttctgaaaagttggaagggcatcatgacctcttggcctctcctttgattctcaatcttcccccaaagcatggtttggtgccagccccttcacctccttccagagcccaagatcaatgctcaagttttggaggacatgatcaccatccccatggtactgatgcttgctggatttagggagggcattttgctaccaagcctcttcccaacgccctggggaccagtcttctgttttgtttttcattgtttgacgtttccactgcatgccttgacttcccccacctcctcctcaaacaagagactccactgcatgttccaagacagtatggggtggtaagataaggaagggaagtgtgtggatgtggatggtgggggcatggacaaagcttgacacatcaagttatcaaggccttggaggaggctctgtatgtcctcaggggactgacaacatcctccagattccagccataaaccaataactaggctggacccttcccactacataatagggctcagcccaggcagccagctttgggctgagctaacaggaccaatggattaaactggcatttcagtccaaggaagctcgaagcaggtttaggaccaggtccccttgagaggtcagaggggcctctgtgggtgctgggtactccagaggtgccactggtggaagggtcagcggagccccagcaggaagggtgggccagccaggccattcttagtccctgggttggggaggcagggagctagggcagggaccaaatgaacagaaagtctcagcccaggatggggcttcttcaacagggcccctgccctcctgaagcctcagtccttcaccttgccaggtgccgtttctcttccgtgaaggccactgcccaggtccccagtgcgccccctagtggccatagcctggttaaagttccccagtgcctccttgtgcatagaccttcttctcccacccccttctgcccctgggtccccggccatccagcggggctgccagagaaccccagacctgcccttacagtagtgtagcgccccctccctctttcggctggtgtagaatagccagtagtgtagtgcggtgtgcttttacgtgatggcgggtgggcagcgggcggcgggctccgcgcagccgtctgtccttgatctgcccgcggcggcccgtgttgtgttttgtgctgtgtccacgcgctaaggcgaccccctcccccgtactgacttctcctataagcgcttctcttcgcatagtcacgtagctcccaccccaccctcttcctgtgtctcacgcaagttttatactctaatatttatatggctttttttcttcgacaaaaaaataataaaacgtttcttctg

SEQ ID NO: 454924 - DNA, 4753 bp, Homo sapiens
ctcccacacagaggctcccggctgcgcagaccttgcccagcacaccagattgccagctccgagacccgggactcctcctgtcctgggccgaatgctcttttagcgcggtagagtgcactttctccaactggaaaagcggggacccagcgagaacccgagcgaacgatgggagggagctgcgcgcagaggcgccgggccggcccgcggcaggtactatttcctttgctgctgcctttgttctaccccacgctgtgtgagccgatccgctactcgattccggaggagctggccaagggctcggtggtggggaacctcgctaaggatctagggcttagtgtcctggatgtgtcggctcgcgagctgcgagtgagcgcggagaagctgcacttcagcgtagacgcgcagagcggggacttacttgtgaaggaccgaatagaccgtgagcaaatatgcaaagagagaagaagatgtgagttgcaattggaagctgtggtggaaaatcctttaaatatttttcatgtcattgtggtgattgaggatgttaatgaccacgcccctcaattccggaaagatgaaataaacttagaaatcagtgaatccgtcagcctggggatgggaacaattcttgagtctgcagaagatcctgatattagtatgaattcgctgagcaaataccaactaagtcctaacgagtatttctcattggtggagaaagacaatcctgatggtggcaaatatccagaattagtattgcagaagactctggaccgagaaacgcagagcgctcaccacttggtactgaccgccttagatggtggggaccctccccgaagcggtactgctcagataagaatcctggtaatagatgccaatgacaaccccccagtgttcagccaggacgtgtacagggttagccttcgggaagacgtgcctccaggcacctccatcctgagagtgaaggccactgaccaggacgagggcatcaactcagagatcacttattccttctttggtgtggctgacaaagctcagcacgtgttctctctggattacactacaggaaacattctaactcagcagcctttggattttgaagaagtagaaagatatacgataaacatagaagcaaaagaccgaggatctctctcaacacggtgtaaagtaattgtagaagttgtagacgaaaacgacaacagcccagaaataatcatcacgtcactctctgatcagattatggaggattcccctccaggagtggttgttgccctcttcaaaacacgggaccaagactcaggggaaaatggggaagtcaggtgtagcttaagtagaggtgttccatttaagattcattcttcttctaataattactacaagctagtaacagatgaggccctggatcgggagcagaccccagagtacaacgtcaccatcgcagccacagacaggggcaagcctccgttatcctccagcaaaaccataaccctgcacattactgacgtcaatgacaacgcgccggttttcggacagtcagcctacctggtccacgtgccagaaaacaaccagccgggtgcctccatagcgcaagtcagtgcctctgacccagacttcgggctcaacggccgtgtctcctactctctcattgccagcgacctggagtcacgaacgctgtcgtcctacgtgtccgtgagcgcgcagagcggggtggtgttcgcgcagcgcgccttcgaccacgagcagctgcgcaccttcgagctcacgctgcaggcccgcgaccagggctcgcccgcgctcagcgccaatgtgagcctgcgcgtgttggtgggcgaccgtaacgacaacgcaccgcgggtgctgtaccctgcgctgggtcccgacggctccgcgctcttcgacacagtgccgcgggccgcgcagccaggctacctggtgaccaaggtggtggccgtggacgcggactcggggcacaatgcctggctgtcctaccacgtggtgcaggccagtgagcccgggctcttcagcctggggctgcgaacaggcgaggtgcgcatggtgcgtgctttgggtgacaaggactcggtccgccagcgcctgctagtcgctgtaagagatggaggacagccacccctttcagccactgccacgctgcacctggtgttcgcagatagcttgcaagaggtactgccggatttcagcgaccatcccacaccctctgactcccaggctgagatgcagttttacctggtggtggccttggccttgatttctgtgctctttctcctcgcggtgattctagctattgctctacgcctgcgacagtctttcagccctactgcaggagactgctttgagtcagttctctgctccaagtccggacctgtgggtccccccaactacagtgagggaacgttgccctatgcctataatttttgtgtgcctggggatcaaatgaatccagaatttaattttttcacatctgttgatcattgtccagccacacaagataacctcaacaaagatagcatgctactggctagcattttaactcccagcgttgaagcagataagaagattcttaaacagcaagccccgcccaacacggactggcgtttctctcaggcccagagacccggcaccagcggctcccaaaatggcgatgacaccggcacctggcccaacaaccagtttgacacagagatgctgcaagccatgatcttggcgtccgccagtgaagctgctgatgggagctccaccctgggagggggtgccggcaccatgggattgagcgcccgctacggaccccagttcaccctgcagcacgtgcccgactaccgccagaatgtctacatcccaggcagcaatgccacactgaccaacgcagctggcaagcgggatggcaaggccccagcaggtggcaatggcaacaagaagaagtcgggcaagaaggagaagaagtaacatggaggccaggccaagagccacagggcggcctctccccaaccagcccagcttctccttacctgcacccaggcctcagagtttcagggctaacccccagaatactggtaggggccaaggccatgctccccttgggaaacagaaacaagtgcccagtcagcacctaccccttcccccccagggggttgaatatgcaaaagcagttccgctgggaacccccatccaatcaactgctgtacccatgggggtagtggggttactgtagacaccaagaaccatttgccacaccccgtttagttacagctgaactcctccatcttccaaatcaatcaggcccatccatcccatgcctccctcctccccaccccactccaacagttcctctttcccgagtaaggtggttggggtgttgaagtaccaagtaacctacaagcctcctagttctgaaaagttggaagggcatcatgacctcttggcctctcctttgattctcaatcttcccccaaagcatggtttggtgccagccccttcacctccttccagagcccaagatcaatgctcaagttttggaggacatgatcaccatccccatggtactgatgcttgctggatttagggagggcattttgctaccaagcctcttcccaacgccctggggaccagtcttctgttttgtttttcattgtttgacgtttccactgcatgccttgacttcccccacctcctcctcaaacaagagactccactgcatgttccaagacagtatggggtggtaagataaggaagggaagtgtgtggatgtggatggtgggggcatggacaaagcttgacacatcaagttatcaaggccttggaggaggctctgtatgtcctcaggggactgacaacatcctccagattccagccataaaccaataactaggctggacccttcccactacataatagggctcagcccaggcagccagctttgggctgagctaacaggaccaatggattaaactggcatttcagtccaaggaagctcgaagcaggtttaggaccaggtccccttgagaggtcagaggggcctctgtgggtgctgggtactccagaggtgccactggtggaagggtcagcggagccccagcaggaagggtgggccagccaggccattcttagtccctgggttggggaggcagggagctagggcagggaccaaatgaacagaaagtctcagcccaggatggggcttcttcaacagggcccctgccctcctgaagcctcagtccttcaccttgccaggtgccgtttctcttccgtgaaggccactgcccaggtccccagtgcgccccctagtggccatagcctggttaaagttccccagtgcctccttgtgcatagaccttcttctcccacccccttctgcccctgggtccccggccatccagcggggctgccagagaaccccagacctgcccttacagtagtgtagcgccccctccctctttcggctggtgtagaatagccagtagtgtagtgcggtgtgcttttacgtgatggcgggtgggcagcgggcggcgggctccgcgcagccgtctgtccttgatctgcccgcggcggcccgtgttgtgttttgtgctgtgtccacgcgctaaggcgaccccctcccccgtactgacttctcctataagcgcttctcttcgcatagtcacgtagctcccaccccaccctcttcctgtgtctcacgcaagttttatactctaatatttatatggctttttttcttcgacaaaaaaataataaaacgtttcttctg

SEQ ID NO: 454925 - DNA, 4758 bp, Homo sapiens
cagggcagccccagctcagactccccagcgccagcctttacaccgcttcctcctcggaaaaagaagaattttttcttgaactggaactgcaactaaagtccgttcggagatccaaaaatctgcaatacagaggttatttgtaacccggcgtctccaggctggtgagcaagctgaggagagcaagagggatggggagcggcgccggggagctgggccgggctgagaggctgccagtgctctttctcttcctgctgtctttgttctgcccggcgctctgtgagcagatccgctacaggattcccgaggaaatgcccaagggctccgtagtggggaacctcgccacggacctggggttcagcgtccaggagttaccgactcgaaaactgcgcgtcagttcggagaagccttacttcaccgtgagcgcagagagcggggagttgcttgtgagcagcaggctagacagggaggagatatgcgggaagaagccagcttgtgctctggaatttgaggctgttgctgaaaatccactgaacttttatcacgtgaatgtggagatcgaggacattaatgaccacacgccaaaattcacgcaaaattcctttgagctgcaaataagtgagtctgcacagcctggcacacgatttatattaggatctgcccatgatgcggatattggtagcaacacactgcagaattaccaactcagtcccagtgatcatttctcactgataaataaagagaaatcagatggcagtaaataccctgagatggtattgaagacacctttggacagagaaaagcagaaatcctaccacttgactttgactgccttggactttggagctccacccctaagcagcactgcacagatacacgttctagtgactgatgccaatgataatgctccagtgttcagtcaagacgtatacagggtgagcctttcagaaaacgtgtacccggggaccacggtgctacaggtgactgccacggaccaggatgagggtgtcaatgccgagattactttctctttcagtgaagctagccagatcacccaatttgacctgaactctaacaccggggaaattactgttttaaatacattagattttgaagaagtcaaagaatattccatagttttggaagcaagggacggtggaggaatgattgcgcaatgcacagtggaggtagaagtcatagatgaaaatgacaacgccccagaagtgatattccagtctctacccaacctaattatggaggacgccgagctgggaacacatattgctttgctcaaagtccgtgacaaggattccagacacaatggagaagtgacttgtaaattggaaggtgatgttccatttaaaatattaacttcttcaagaaacacgtataaattagtgacagatgctgttctagaccgcgagcagaatccagagtacaatataaccgttacggcaacagatcggggcaagcctcccctctcctccagttccagcatcaccctgcacattggtgatgtaaatgacaacgctccggttttctcacagtcttcctatatagtccacgtggccgagaacaacccgcctggagcctctatttcacaagtcagggcttctgatccggacttggggcccaacggccaagtctcttactgcatcatggccagtgacctggagcagcgggagctgtcatcctacgtgtccataagcgcggagagcggggtggtgttcgcgcagcgcgccttcgaccacgagcagctgcgcgccttcgaactcacactgcaggcccgcgaccagggctcgccagcgctcagcgcgaacgtgagcctgcgcgtgttagtggacgaccgcaacgacaatgcgccacgggtgctgtaccccgcgctgggtcccgacggctctgcgctcttcgatatggtgccgcacgctgcagagcctggctacttggtgaccaaggtagtggcggtggacgcagactcaggacacaacgcctggctgtcctaccacgtgctgcaggctagcgagcccgggctcttcagcctggggctgcgcacgggcgaagtgcgcacagcgcgtgccttaggcgacagggacgccgtccgccagcgccttctggtcgccgtgcgtgacggtggacagccaccactctcggccactgccacgttgcacctggtcttcgccgacagcttgcaggaggtgctgccggatatcactgaccgccccgacccctctgacctccaggctgagctgcagttttacctagtggtggccttggccttgatctcagtgctcttcctcgtggccatgattctggccattgccttgcgcctgcgacgctcctccagccccgcctcctggagctgcttccagcctggtctctgtgttaaatccgaatccgtggttccccccaactacagcgaggggactttgccttattcctacaatctatgtgttgcacatacaggaaagacggagtttaatttcctaaaatgtagtgagcagttgagttcaggacaagacatactttgcggtgattcatctggggccttatttccactttgtaattccagtgaattgacttcccatcagcaagccccgcccaacacggactggcgtttctctcaggcccagagacccggcaccagcggctcccaaaatggcgatgacaccggcacctggcccaacaaccagtttgacacagagatgctgcaagccatgatcttggcgtccgccagtgaagctgctgatgggagctccaccctgggagggggtgccggcaccatgggattgagcgcccgctacggaccccagttcaccctgcagcacgtgcccgactaccgccagaatgtctacatcccaggcagcaatgccacactgaccaacgcagctggcaagcgggatggcaaggccccagcaggtggcaatggcaacaagaagaagtcgggcaagaaggagaagaagtaacatggaggccaggccaagagccacagggcggcctctccccaaccagcccagcttctccttacctgcacccaggcctcagagtttcagggctaacccccagaatactggtaggggccaaggccatgctccccttgggaaacagaaacaagtgcccagtcagcacctaccccttcccccccagggggttgaatatgcaaaagcagttccgctgggaacccccatccaatcaactgctgtacccatgggggtagtggggttactgtagacaccaagaaccatttgccacaccccgtttagttacagctgaactcctccatcttccaaatcaatcaggcccatccatcccatgcctccctcctccccaccccactccaacagttcctctttcccgagtaaggtggttggggtgttgaagtaccaagtaacctacaagcctcctagttctgaaaagttggaagggcatcatgacctcttggcctctcctttgattctcaatcttcccccaaagcatggtttggtgccagccccttcacctccttccagagcccaagatcaatgctcaagttttggaggacatgatcaccatccccatggtactgatgcttgctggatttagggagggcattttgctaccaagcctcttcccaacgccctggggaccagtcttctgttttgtttttcattgtttgacgtttccactgcatgccttgacttcccccacctcctcctcaaacaagagactccactgcatgttccaagacagtatggggtggtaagataaggaagggaagtgtgtggatgtggatggtgggggcatggacaaagcttgacacatcaagttatcaaggccttggaggaggctctgtatgtcctcaggggactgacaacatcctccagattccagccataaaccaataactaggctggacccttcccactacataatagggctcagcccaggcagccagctttgggctgagctaacaggaccaatggattaaactggcatttcagtccaaggaagctcgaagcaggtttaggaccaggtccccttgagaggtcagaggggcctctgtgggtgctgggtactccagaggtgccactggtggaagggtcagcggagccccagcaggaagggtgggccagccaggccattcttagtccctgggttggggaggcagggagctagggcagggaccaaatgaacagaaagtctcagcccaggatggggcttcttcaacagggcccctgccctcctgaagcctcagtccttcaccttgccaggtgccgtttctcttccgtgaaggccactgcccaggtccccagtgcgccccctagtggccatagcctggttaaagttccccagtgcctccttgtgcatagaccttcttctcccacccccttctgcccctgggtccccggccatccagcggggctgccagagaaccccagacctgcccttacagtagtgtagcgccccctccctctttcggctggtgtagaatagccagtagtgtagtgcggtgtgcttttacgtgatggcgggtgggcagcgggcggcgggctccgcgcagccgtctgtccttgatctgcccgcggcggcccgtgttgtgttttgtgctgtgtccacgcgctaaggcgaccccctcccccgtactgacttctcctataagcgcttctcttcgcatagtcacgtagctcccaccccaccctcttcctgtgtctcacgcaagttttatactctaatatttatatggctttttttcttcgacaaaaaaataataaaacgtttcttctg

SEQ ID NO: 454926 - DNA, 4594 bp, Homo sapiens
atggcgagtccacctaggggctggggctgcggagagctgctgctgcccttcatgctcctggggacgctgtgcgagccaggatccgggcagatccgctactcgatgccggaggagctggacaaaggctccttcgtcggcaacatagccaaggaccttgggctggagccccaggagctggcggagcgcggagtccgcatcgtctccagaggtaggacgcagctttttgccctgaacccgcgaagcggcagcttggtcaccgcgggcaggatagaccgggaggagctctgcgctcagagcccactgtgtgtggtgaactttaacatcttggttgagaacaaaatgaaaatttatggagtagaagtagaaataatcgatattaatgataacttcccgcgtttccgggatgaagagttaaaagtaaaagttaatgaaaatgcggctgcagggacacggttagtgcttcccttcgcgcgggatgcggatgtgggtgtgaactctctccggagttaccagctcagctccaatctgcacttctctctggatgtggtaagcggaactgatggacaaaagtatccggagctggtgttggaacagcccctagaccgcgagaaagagactgttcacgacctcctcctcacagctttagatggcggagacccggtactctccggcaccacgcacatccgtgttacggtcctcgacgcaaacgacaatgcgcccctgttcaccccatccgagtacagcgtgagtgttccagagaacatacctgtgggcactcggctgctcatgctaaccgccacggatccagatgagggaataaacgggaaattgacctactcttttcgcaatgaagaagaaaaaatttcggagactttccaacttgattccaacctgggggaaatctcaactctacaatcactggactatgaagaatccagattctacctcatggaagtggtagctcaggatggaggcgctcttgttgccagcgctaaggtggtggtcacagtacaggacgtgaatgacaatgcccccgaagtgatcctcacctctctgaccagttcgatctctgaagactgtcttcccggaactgtaatcgcgctgtttagcgtacatgatggtgattctggagaaaatggtgagattgcatgctctattcctaggaatttgccttttaaattggagaagtcagttgataattactatcacctattaacaactagggacctggacagagaagagacttcagattataatatcactttaaccgtcatggaccatggaaccccgcccctctctacagaaagccacatccccttgaaagtagcagacgttaatgacaacccacccaatttccctcaagcctcctactccacctctgtcacagaaaacaatcccagaggtgtctctatcttctctgtgacagcccatgaccccgacagcggcgacaacgctcgagtcacctactccctggctgaagacacatttcagggggcgcccttgtcctcctatgtatccattaactctgacaccggtgtcctgtatgctctgagatccttcgactatgagcagttgagagacctacagttgtgggtgacagccagcgacagtgggaaccctccacttagcagcaacgtgtcgctgagcctgtttgtgctggaccagaacgacaatacgcctgagatcctgtaccccgccctccccacagacggttccacgggcgtggagctggcgcctcgctccgcagaacctggctacctggtgaccaaggtggtagcggtggacaaagattcaggccagaacgcctggctgtcctaccgcctgcttaaggccagcgagccaggactctttgcggttgggctgcacacgggcgaggtgcgcacagcgcgagccctgctggacagagacgcgctcaagcagagcctcgtggtggccgtcgaagaccatggccagccccctctgtcagccaccttcacggtcaccgttgccgtggccgacaggatccctgacatcctggctgacctaggcagtatcaagacccccattgaccctgaggatctggacctcacactctatcttgtggtggcagtggctgcagtctcctgcgtcttcctggccttcgtcatcgtgctgctggtgctcagactgaggcgctggcacaagtcacgcctgcttcaggctgaaggcagcaggttggcgggtgtgcccgcctcgcactttgtgggcgtggatggggttcgggctttcctgcagacctattcccacgaggtctccctcaccgcggactcgaggaagagtcacctgatctttccccagcccaactacgcagacacgctccttagtgaagagagctgtgagaaaagcgagcctcttctgatgtctgataaggtagatgcaaacaaagaagaacggcgagttcagcaagccccgcccaacacggactggcgtttctctcaggcccagagacccggcaccagcggctcccaaaatggcgatgacaccggcacctggcccaacaaccagtttgacacagagatgctgcaagccatgatcttggcgtccgccagtgaagctgctgatgggagctccaccctgggagggggtgccggcaccatgggattgagcgcccgctacggaccccagttcaccctgcagcacgtgcccgactaccgccagaatgtctacatcccaggcagcaatgccacactgaccaacgcagctggcaagcgggatggcaaggccccagcaggtggcaatggcaacaagaagaagtcgggcaagaaggagaagaagtaacatggaggccaggccaagagccacagggcggcctctccccaaccagcccagcttctccttacctgcacccaggcctcagagtttcagggctaacccccagaatactggtaggggccaaggccatgctccccttgggaaacagaaacaagtgcccagtcagcacctaccccttcccccccagggggttgaatatgcaaaagcagttccgctgggaacccccatccaatcaactgctgtacccatgggggtagtggggttactgtagacaccaagaaccatttgccacaccccgtttagttacagctgaactcctccatcttccaaatcaatcaggcccatccatcccatgcctccctcctccccaccccactccaacagttcctctttcccgagtaaggtggttggggtgttgaagtaccaagtaacctacaagcctcctagttctgaaaagttggaagggcatcatgacctcttggcctctcctttgattctcaatcttcccccaaagcatggtttggtgccagccccttcacctccttccagagcccaagatcaatgctcaagttttggaggacatgatcaccatccccatggtactgatgcttgctggatttagggagggcattttgctaccaagcctcttcccaacgccctggggaccagtcttctgttttgtttttcattgtttgacgtttccactgcatgccttgacttcccccacctcctcctcaaacaagagactccactgcatgttccaagacagtatggggtggtaagataaggaagggaagtgtgtggatgtggatggtgggggcatggacaaagcttgacacatcaagttatcaaggccttggaggaggctctgtatgtcctcaggggactgacaacatcctccagattccagccataaaccaataactaggctggacccttcccactacataatagggctcagcccaggcagccagctttgggctgagctaacaggaccaatggattaaactggcatttcagtccaaggaagctcgaagcaggtttaggaccaggtccccttgagaggtcagaggggcctctgtgggtgctgggtactccagaggtgccactggtggaagggtcagcggagccccagcaggaagggtgggccagccaggccattcttagtccctgggttggggaggcagggagctagggcagggaccaaatgaacagaaagtctcagcccaggatggggcttcttcaacagggcccctgccctcctgaagcctcagtccttcaccttgccaggtgccgtttctcttccgtgaaggccactgcccaggtccccagtgcgccccctagtggccatagcctggttaaagttccccagtgcctccttgtgcatagaccttcttctcccacccccttctgcccctgggtccccggccatccagcggggctgccagagaaccccagacctgcccttacagtagtgtagcgccccctccctctttcggctggtgtagaatagccagtagtgtagtgcggtgtgcttttacgtgatggcgggtgggcagcgggcggcgggctccgcgcagccgtctgtccttgatctgcccgcggcggcccgtgttgtgttttgtgctgtgtccacgcgctaaggcgaccccctcccccgtactgacttctcctataagcgcttctcttcgcatagtcacgtagctcccaccccaccctcttcctgtgtctcacgcaagttttatactctaatatttatatggctttttttcttcgacaaaaaaataataaaacgtttcttctg

SEQ ID NO: 454927 - DNA, 4789 bp, Homo sapiens
acagcacaagggggtggaggtttggccctaaagcttcaggacaccaaagaaattcagtcgaacagcccaccagttctctccatagggacctgggtcccgtgaatgctggttatctcacaccctgaggaataaagattggaatccgcactggatgctggaagttgactcggagaaaattgcgacaggagggaaatggcggctctgcaaaagttgccacactgcagaaagctggtcctgctgtgcttccttttggcgaccctgtgggaggccagggccgggcagattcgctattctgtgcgggaagagatcgacagaggctccttcgtaggcaacatcgccaaggacttgggtttggagcccctggcactggcagagcagggagtccgcatcgtctccagaggtaggtcccagctctttgctctgaacccgcgaagcggcagcttggtcactgcgaacaggatagaccgggaggagctctgcgctcagagcgcaccctgtctgttgaattttaacattctgctggaggataaattgactatttattcagtagaggtggaaataacagatattaacgataatgcccctcgctttggagtagaggaactggagctaaaaatcagtgaaaccactacgccaggattccggattcctcttaagaatgcgcatgatgcagacgtaggtgagaacgcccttcagaagtacgcactcaacccaaatgaccacttctccctggacgtgcgaaggggagctgatgggaacaagtacccagaactggtgctggagcgctctctggaccgcgaggaagaggctgttcaccacctcgttctcgtggcttctgatgggggtgacccagtgctatctggcacctcccgcatctgcgtgaaggtcctggatgcgaacgacaatgcgcctgtttttacacagcccgagtaccgcataagcattccggagaatacgctcgtgggcacccggatactcacggtgaccgccactgacgcagatgagggctactacgctcaagtggtatattttctagagaaaagccctggagaaacctcagaggtatttgagcttaagtcaacatctggagaactgacaatcataaaagatctagattatgaggatgctacattccatgaaattgatattgaagctcaggatggtccgggccttctaaccagagcgaaggttatcgtcacggttctggatgtgaatgacaatgccccagaattttacatgacatctgctactagctcagtttctgaagactctcttccaggaaccataattgggctttttaatgtacatgatagagactctgggcagaacgcattcaccacctgttcactccccgaggatcttccttttaagttagaaaagtcagtagacaattactaccgactggttacaaccagagcccttgacagggaacagttttccttttacaacatcactctaaccgctaaagatggagggaacccctccctgtccacggatgctcacattttgctccaggtggcagacatcaacgacaacgcacccgccttctcccgcacatcctactccacctacattcccgaaaacaaccccagaggagcctctgtcttctcagtgacggcccatgaccccgacagcaacgacaatgctcatgtaacttactctttcgcggaggacactgttcagggggcacccttatcctcttacatctctatcaactccgacactggagtactctatgcactgcgctcctttgattatgagcagttgcgagacttgcaagtgtgggtgatagcgcgggacagcgggaaccctccactcagtagcaatgtatcattaagcctgttcgtgctggaccagaacgacaacgcgcccgagatcctgtaccctgccttccccacagacggttccactggcgtggagctggcgccccgctccgcagagcccggctacctggtgaccaaggtggtggcggtggacagagactcgggccagaacgcctggctgtcttaccacctgctcaaggccagcgagccgggactcttctcggtgggtctgcacacgggcgaggtgcgcacggcgcgagccctgctggacagagacgcgctcaagcagagcctcgtggtggccatccaggaccacggccagccccctctctccgccactgtcacgctcaccgtggccgtggccgacaggatccccgacatcctggccgacctgggcagcctcgagccctccgccatacccaacgattcggacctcactctgtacctggtggtggcggtggccgcggtctcctgcgtcttcctggccttcgtcatcgtgttgctggcgcacaggctgcggcgctggcacaagtcacgcctgctgcaggcttcaggaggcagcttgacaggcatgcagagctcgcactttgtgggcgtggacggggttcgggctttcctgcagacctattcccacgaggtctccctcactgcggactcgcggaagagccacctgattttcccccagcccaactatgcggacacgctcatcagccaggagagctgtgagaaaaaggattttttatcagcgcctcaatctctactcgaagaagaaagagaagaaacgttttctcagcaagccccgcccaacacggactggcgtttctctcaggcccagagacccggcaccagcggctcccaaaatggcgatgacaccggcacctggcccaacaaccagtttgacacagagatgctgcaagccatgatcttggcgtccgccagtgaagctgctgatgggagctccaccctgggagggggtgccggcaccatgggattgagcgcccgctacggaccccagttcaccctgcagcacgtgcccgactaccgccagaatgtctacatcccaggcagcaatgccacactgaccaacgcagctggcaagcgggatggcaaggccccagcaggtggcaatggcaacaagaagaagtcgggcaagaaggagaagaagtaacatggaggccaggccaagagccacagggcggcctctccccaaccagcccagcttctccttacctgcacccaggcctcagagtttcagggctaacccccagaatactggtaggggccaaggccatgctccccttgggaaacagaaacaagtgcccagtcagcacctaccccttcccccccagggggttgaatatgcaaaagcagttccgctgggaacccccatccaatcaactgctgtacccatgggggtagtggggttactgtagacaccaagaaccatttgccacaccccgtttagttacagctgaactcctccatcttccaaatcaatcaggcccatccatcccatgcctccctcctccccaccccactccaacagttcctctttcccgagtaaggtggttggggtgttgaagtaccaagtaacctacaagcctcctagttctgaaaagttggaagggcatcatgacctcttggcctctcctttgattctcaatcttcccccaaagcatggtttggtgccagccccttcacctccttccagagcccaagatcaatgctcaagttttggaggacatgatcaccatccccatggtactgatgcttgctggatttagggagggcattttgctaccaagcctcttcccaacgccctggggaccagtcttctgttttgtttttcattgtttgacgtttccactgcatgccttgacttcccccacctcctcctcaaacaagagactccactgcatgttccaagacagtatggggtggtaagataaggaagggaagtgtgtggatgtggatggtgggggcatggacaaagcttgacacatcaagttatcaaggccttggaggaggctctgtatgtcctcaggggactgacaacatcctccagattccagccataaaccaataactaggctggacccttcccactacataatagggctcagcccaggcagccagctttgggctgagctaacaggaccaatggattaaactggcatttcagtccaaggaagctcgaagcaggtttaggaccaggtccccttgagaggtcagaggggcctctgtgggtgctgggtactccagaggtgccactggtggaagggtcagcggagccccagcaggaagggtgggccagccaggccattcttagtccctgggttggggaggcagggagctagggcagggaccaaatgaacagaaagtctcagcccaggatggggcttcttcaacagggcccctgccctcctgaagcctcagtccttcaccttgccaggtgccgtttctcttccgtgaaggccactgcccaggtccccagtgcgccccctagtggccatagcctggttaaagttccccagtgcctccttgtgcatagaccttcttctcccacccccttctgcccctgggtccccggccatccagcggggctgccagagaaccccagacctgcccttacagtagtgtagcgccccctccctctttcggctggtgtagaatagccagtagtgtagtgcggtgtgcttttacgtgatggcgggtgggcagcgggcggcgggctccgcgcagccgtctgtccttgatctgcccgcggcggcccgtgttgtgttttgtgctgtgtccacgcgctaaggcgaccccctcccccgtactgacttctcctataagcgcttctcttcgcatagtcacgtagctcccaccccaccctcttcctgtgtctcacgcaagttttatactctaatatttatatggctttttttcttcgacaaaaaaataataaaacgtttcttctg

SEQ ID NO: 454928 - DNA, 4736 bp, Homo sapiens
gctgcgcagacctttcccagcacagcggattgccagctccgagacccgggactcctcctgtcctgggccgaatgctcttttagcgcggtagagtgcactttctccaactggaaaagcggggacccagcgagaacccgagcgaacgatgggagggagctgcgcgcagaggcgccgggccggcccgcggcaggtgctatttcctttgctgctgcctttgttctaccccaccctgagtgagccgatccgctactcgattccggaggagctggccaagggctcggtggtggggaacctcgctaaggatctagggctcagtgtcctggatgtgtcggctcgcaagctgcgagtgagcgcggagaagctgcacttcagcgtagacgcggagagcggggacttacttgtgaagaaccgaatagaccgtgagcaaatatgcaaagagagaagaagatgtgagttgcaattggaagctgtggtggaaaatcctttaaatatttttcatgtcattgtggtgattgaggatgttaatgaccacgcccctcaatttgataaaaaggaaatacatttagaaattttcgaatctgcatccgctggtacacgactatcgcttgaccctgccacggatcctgatataaacataaactcaattaaagattataagataaactctaatccttatttttcattaatggttagagttaattccgatggtggcaaatacccagagttatctctggagaaactcctagaccgggaagaacagagatctcatagcttgatattgactgccttggacggaggggacccaccaagaagtgccaccgctcacatagaaatttctgtcaaggataccaatgataaccccccggttttcagcagagacgaatatagaattagtcttagtgaaaatctgccccctgggtcccctgtgttgcaagtgacagccactgaccaggatgagggggtcaatgctgagataaactactacttccgaagcactgcccagagcacaaaacatatgttctcattggatgagaaaacaggtatgattaagaataaccagtcatttgattttgaagatgtagaaaggtacaccatggaagtggaagcgaaggacggaggtggtctctctacccagtgtaaagtaatcatagaaatccttgatgaaaacgacaacagcccagaaataatcatcacttctctctctgatcagattttggagaattcacctccaggaatggttgttgccctcttcaaaacacgggatctggatttcggaggaaatggagaagtcaggtgtaatatagaaacagacattccattcaagatttattcttcttccaataactactacaaactggtgacagatggagccctggaccgagagcagacaccagaatacaatgtcaccatcgtagccactgacaggggcaagccgcctctttcttccagtagaagcatcaccttgtatgtcgctgacatcaacgacaacgccccagttttcgaccagacgtcctacgtggtccacgtggccgagaacaacccgccaggagcctccattgcgcaagtgagcgcctctgacccggatttggggctcaatggccacatctcctactctatagtggcgagtgacctagagcccctggcggtgtcgtcatacgtgtcagtgagcgcgcagagcggggtggtgttcgcgcagcgcgcctttgatcacgagcagctgcgcgccttcgcgctcacgctgcaggcccgcgaccacggctcgcccacgctcagcgccaacgtgagcctgcgcgtgttggtgggagaccgcaatgacaacgcaccgcgggtgctgtacccagctctgggtcctgacggctccgcgttcttcgatatggtacctcgctctgcagagcccggctacctagtgactaaggtggtagcggtggacgccgactcgggacacaacgcctggctgtcctaccacgtgctgcaggccagtgagcccggactcttcagcctggggctgcgcactggggaggtgcgcacggctcgagccttaggcgacagggacgcagcccgccagcgcctgctggtcgctgtgcgtgacggtggacagccgccactctctgccaccgccacgcttcatctggtcttcgcagacaacttgcaagagatactgccagacctcagcgaccgccctgtactctctgacccccaggctgaactgcagttttacctggtggtggccttggccttaatctcagtgctcttcctcctcgccgtgattctggccattgccttgcgcctgcgacgctctctcagccctgctacttgggactgcttccatcctggtctctgtgtcaagtctggacctgtagttccccccaactacagtgaggggactttgccttattcttataatctgtgcattgcacatacgggtacaaaagagtttaatttcctaaaatgcagtgtgcccctacattccaatgaagacatggtttgcagtgtttctcctggagccttaattccacctcatggtggggaggatttgacttcacatcctgagactctgacttcgcaagccccgcccaacacggactggcgtttctctcaggcccagagacccggcaccagcggctcccaaaatggcgatgacaccggcacctggcccaacaaccagtttgacacagagatgctgcaagccatgatcttggcgtccgccagtgaagctgctgatgggagctccaccctgggagggggtgccggcaccatgggattgagcgcccgctacggaccccagttcaccctgcagcacgtgcccgactaccgccagaatgtctacatcccaggcagcaatgccacactgaccaacgcagctggcaagcgggatggcaaggccccagcaggtggcaatggcaacaagaagaagtcgggcaagaaggagaagaagtaacatggaggccaggccaagagccacagggcggcctctccccaaccagcccagcttctccttacctgcacccaggcctcagagtttcagggctaacccccagaatactggtaggggccaaggccatgctccccttgggaaacagaaacaagtgcccagtcagcacctaccccttcccccccagggggttgaatatgcaaaagcagttccgctgggaacccccatccaatcaactgctgtacccatgggggtagtggggttactgtagacaccaagaaccatttgccacaccccgtttagttacagctgaactcctccatcttccaaatcaatcaggcccatccatcccatgcctccctcctccccaccccactccaacagttcctctttcccgagtaaggtggttggggtgttgaagtaccaagtaacctacaagcctcctagttctgaaaagttggaagggcatcatgacctcttggcctctcctttgattctcaatcttcccccaaagcatggtttggtgccagccccttcacctccttccagagcccaagatcaatgctcaagttttggaggacatgatcaccatccccatggtactgatgcttgctggatttagggagggcattttgctaccaagcctcttcccaacgccctggggaccagtcttctgttttgtttttcattgtttgacgtttccactgcatgccttgacttcccccacctcctcctcaaacaagagactccactgcatgttccaagacagtatggggtggtaagataaggaagggaagtgtgtggatgtggatggtgggggcatggacaaagcttgacacatcaagttatcaaggccttggaggaggctctgtatgtcctcaggggactgacaacatcctccagattccagccataaaccaataactaggctggacccttcccactacataatagggctcagcccaggcagccagctttgggctgagctaacaggaccaatggattaaactggcatttcagtccaaggaagctcgaagcaggtttaggaccaggtccccttgagaggtcagaggggcctctgtgggtgctgggtactccagaggtgccactggtggaagggtcagcggagccccagcaggaagggtgggccagccaggccattcttagtccctgggttggggaggcagggagctagggcagggaccaaatgaacagaaagtctcagcccaggatggggcttcttcaacagggcccctgccctcctgaagcctcagtccttcaccttgccaggtgccgtttctcttccgtgaaggccactgcccaggtccccagtgcgccccctagtggccatagcctggttaaagttccccagtgcctccttgtgcatagaccttcttctcccacccccttctgcccctgggtccccggccatccagcggggctgccagagaaccccagacctgcccttacagtagtgtagcgccccctccctctttcggctggtgtagaatagccagtagtgtagtgcggtgtgcttttacgtgatggcgggtgggcagcgggcggcgggctccgcgcagccgtctgtccttgatctgcccgcggcggcccgtgttgtgttttgtgctgtgtccacgcgctaaggcgaccccctcccccgtactgacttctcctataagcgcttctcttcgcatagtcacgtagctcccaccccaccctcttcctgtgtctcacgcaagttttatactctaatatttatatggctttttttcttcgacaaaaaaataataaaacgtttcttctg

SEQ ID NO: 454929 - DNA, 4594 bp, Homo sapiens
atggcggcgcctcctgctcgcccagaccacacccggctgctccagatctgccttctcctgggggttctggtggaaatcagggccgaacagattctctactcggtgtttgaggagcaggaagaaggctcagtggtgggcaacatcgccaaggacctggggttggcgccccgggagctggcggagcgcggagtccgcatcgtctccagaggtaggacgcagcttttcgccctgaacccgcgcagcggcaccttggtcaccgcgggtaggatagacagggaggagctctgcgacagatctccaaactgtgtgacaaacctggagattcttctagaagatacagtgaagattttgcgggtagaggtggaaataatcgatgttaatgataacccacccagttttgggacagaacagagggaaataaaagttgctgaaaatgaaaatcctggggcaagatttcctcttcctgaagcttttgatccggatgtaggtgtaaactccctgcagggttaccagctcaactcaaacggttacttttccctggacgtgcaaagtggggccgatgggattaagtacccagagctggtgctggaacgcgctctagatcgcgaggaagaggcggttcaccacctcgttctcacggccttcgatggaggtgacccggttcgctctggcactgccaggattctcataatacttgtggataccaacgataatgctcccgtgttcactcagcccgagtaccacgtaagtgttcgtgagaacgttcctgtaggcactcggctactcaccgtaaaagccactgatccagatgaaggagccaatggagacgtgacgtattctttccggaaagtaagagacaaaatatcacagctatttcagttgaattctctgagtggggatataacaatattggggggtctagattatgaggactctggattctatgacatagatgtagaagcccatgatgggcctggtctccgagctagaagcaaggtactggtgacagttctggatgaaaatgacaacgcaccagaagtcacagttacatctctcaccagctcagtccaggaatcttcttccccgggtacagtaattgcacttttcaacgtgcatgacagtgactcaggaggaaatggcctagtcacatgttctattccagataatctgccattcacacttgaaaagacctatggaaattattatcggttgttgacacacagaacactggacagggaagaagtctcagaatataacatcactgtaactgccactgaccagggaactcctccactgtctacagaaactcatatttcactgcaagtgatggacatcaatgacaacccacccactttccctcatgcttcctactctgcttacattcctgaaaacaaccccagaggagcctccatcttatctatgactgctcaagaccctgacagtggtgacaatgcccgaatcacttactccctggccgaagacaccttccagggtgcacctctgtcctcctatgtctccatcaactccaatacagggatcctatatgctctttgctccttcgactatgagcagtttagagacctgcagctgctgatgacagccagtgacagtggagaccctccactcagcagcaatgtgtcactgagcctctttgtgctggaccagaacgacaatgtccctgagatcctgtaccccaccttccctactgatggctccactggtgtggagctggcaccccgctccgcagattccggctacctggtgaccaaagtggtggcagtggacagagactcaggtcagaatgcctggctgtcctacagcctactcaagtccagcgagccgggactatttgcagtggggctgcacacaggcgaggtgcgcaccgcacgggccctgctggacagagacgcgctcaagcagaggcttgtagtggtcgtccaggaccatggccagccccctctctcggccaccgtcacactcactgtggctgtggccgacagcatcccagatgtcctggctgacttgggcagcctcaagccttcagcagacccagacgactcgggcctcacactctatctcgtggtggcagtggccgctgtctcctgcgtcttcctggcttttgtcacggtgctgctagcactcaagctgagacgctggcacaagtcacgcctgcttcacgctgaaggcagcaggttggcaggtgtgcctgcctcgcactttgtgggcgtggacggggttcgggctttcctgcagacctattcccacgaggtctccctcaccgcggactcgcggaagagtcacctgatcttctcccaacccagctatgcagacacgctcatcagccgggagagttgtgagaaaagcgagcctcttctgataactcaggatttacttgaaacaaaaggagaccctaatcttcagcaagccccgcccaacacggactggcgtttctctcaggcccagagacccggcaccagcggctcccaaaatggcgatgacaccggcacctggcccaacaaccagtttgacacagagatgctgcaagccatgatcttggcgtccgccagtgaagctgctgatgggagctccaccctgggagggggtgccggcaccatgggattgagcgcccgctacggaccccagttcaccctgcagcacgtgcccgactaccgccagaatgtctacatcccaggcagcaatgccacactgaccaacgcagctggcaagcgggatggcaaggccccagcaggtggcaatggcaacaagaagaagtcgggcaagaaggagaagaagtaacatggaggccaggccaagagccacagggcggcctctccccaaccagcccagcttctccttacctgcacccaggcctcagagtttcagggctaacccccagaatactggtaggggccaaggccatgctccccttgggaaacagaaacaagtgcccagtcagcacctaccccttcccccccagggggttgaatatgcaaaagcagttccgctgggaacccccatccaatcaactgctgtacccatgggggtagtggggttactgtagacaccaagaaccatttgccacaccccgtttagttacagctgaactcctccatcttccaaatcaatcaggcccatccatcccatgcctccctcctccccaccccactccaacagttcctctttcccgagtaaggtggttggggtgttgaagtaccaagtaacctacaagcctcctagttctgaaaagttggaagggcatcatgacctcttggcctctcctttgattctcaatcttcccccaaagcatggtttggtgccagccccttcacctccttccagagcccaagatcaatgctcaagttttggaggacatgatcaccatccccatggtactgatgcttgctggatttagggagggcattttgctaccaagcctcttcccaacgccctggggaccagtcttctgttttgtttttcattgtttgacgtttccactgcatgccttgacttcccccacctcctcctcaaacaagagactccactgcatgttccaagacagtatggggtggtaagataaggaagggaagtgtgtggatgtggatggtgggggcatggacaaagcttgacacatcaagttatcaaggccttggaggaggctctgtatgtcctcaggggactgacaacatcctccagattccagccataaaccaataactaggctggacccttcccactacataatagggctcagcccaggcagccagctttgggctgagctaacaggaccaatggattaaactggcatttcagtccaaggaagctcgaagcaggtttaggaccaggtccccttgagaggtcagaggggcctctgtgggtgctgggtactccagaggtgccactggtggaagggtcagcggagccccagcaggaagggtgggccagccaggccattcttagtccctgggttggggaggcagggagctagggcagggaccaaatgaacagaaagtctcagcccaggatggggcttcttcaacagggcccctgccctcctgaagcctcagtccttcaccttgccaggtgccgtttctcttccgtgaaggccactgcccaggtccccagtgcgccccctagtggccatagcctggttaaagttccccagtgcctccttgtgcatagaccttcttctcccacccccttctgcccctgggtccccggccatccagcggggctgccagagaaccccagacctgcccttacagtagtgtagcgccccctccctctttcggctggtgtagaatagccagtagtgtagtgcggtgtgcttttacgtgatggcgggtgggcagcgggcggcgggctccgcgcagccgtctgtccttgatctgcccgcggcggcccgtgttgtgttttgtgctgtgtccacgcgctaaggcgaccccctcccccgtactgacttctcctataagcgcttctcttcgcatagtcacgtagctcccaccccaccctcttcctgtgtctcacgcaagttttatactctaatatttatatggctttttttcttcgacaaaaaaataataaaacgtttcttctg

SEQ ID NO: 454930 - DNA, 4597 bp, Homo sapiens
atggcggctcagccgaggggcggggactacagaggattcttcctgctctccatcctcctggggaccccctgggaagcctgggcaggacgtattctctactccgtgtcggaggagacggacaaagggtcctttgtgggagacatcgccaaggacctggggctggagccccgggagctggcggagcgcggagtccgcatcatctccagaggtaggacgcagcttttcgccctgaaccagcgcagcggcagcttggtcactgcgggcaggatagaccgggaagagatctgcgctcagagtgcgcggtgtctggtaaactttaacatcctgatggaagataaaatgaatctttaccctatagacgtggaaataatagatattaatgacaacgttccaagattcttgacggaagaaataaatgtaaaaataatggagaatacagctcctggggttcggtttccgttaagcgaggctggggatccagatgtgggcacgaactccctccagagttaccagctcagccccaatcgccacttctccctggctgtgcaaagtggagacgatgaaactaagtacccggaactggtgctggagcgggtgctggaccgggaggaagagcgggttcaccacctggtcctcacagcctctgatggcggcgacccgccccgatccagcaccgcccacatccaggtgacagtggtggatgtgaatgaccacacgcctgtcttctctctgcctcagtaccaagtaactgtccccgagaatgtgccagtgggtacaagactgctcacggtacatgctatcgacctggacgagggagtcaatggggaagtgacatattcttttcggaaaataactcctaaacttccaaagatgtttcatctgaactcgcttacaggagaaatatcaactttagaaggattagattatgaagaaactgccttctatgaaatggaggttcaggctcaagatggtcctggtagtctgacaaaggcaaaagtactgatcacagttttagatgtaaatgataatgctccagaagtgactatgacgtctttaagtagctcaatccctgaagacacacctcttgggacagtcattgctcttttctacctacaagacagagattctggaaagaatggtgaggtgacctgcaccattccagaaaacctaccttttaaattagaaaaatcaatagataattattatagattggtcacaaccaaaaacttggaccgggaaacactctctttgtataacatcacactgaaagccacagatggtggaactcctcccttgtccagggaaactcacatattcatgcaggtggcagacaccaacgataacccacccaccttcccccactcatcctactcagtctacatcgctgagaacaaccccagaggggcctccattttcttagtgactgcacaggaccacgacagtgaggataatgcccagatcacttattccttggccgaagacaccatccagggggctccagtgtcctcctatgtctccataaactctgacactggagtcctgtacgcgctgcaatcctttgattatgagcagttgagagaactacaactaagagtgactgcacatgacagcggggacccgcctctcagcagcaacatgtcactgagcctgttcgtgctggaccagaatgacaacccgcccgagatcctgtacccggccctccccacagatggttctactggcatggagctggcaccccgctccgcagagcccggctacctggtgaccaaggtggtggcggtggacaaagattcaggccagaacgcctggctgtcatacctcctgcttaaggccagcgagccaggactctttgcggttgggctgtacacgggcgaggtgcgcacggctcgggccctgctggacagagatgccctcaagcagagcctcgtggtggccgtccaggaccacggtcagcctcctctgtcagccaccgtcacactcaccgtggctgtggctgacagcatccccgaagtcttggccgacctgggcagccttgagccctccgacggtccttacaactatgacctcacgttgtacctggtggtggcggtggccacagtctcctgcgtcttcctagccttcgtcctcgtactgctggcgctcaggctgcggcgctggcacaagtcacgcctgctgcaggcttcagaaggtggcttggcgaacgtgcccacctcgcactttgtgggcatggacggggtgcaggctttcctgcagacctattcccatgaggtctccctcaccgcggactctcggaagagtcacctgatcttcccccagcccaactatgtagacatgctcatcagccaggagagctgtgagaaaaatgattctttgctaacatccgtagattttcaggaatgtaaagaaaacctgccaagtattcagcaagccccgcccaacacggactggcgtttctctcaggcccagagacccggcaccagcggctcccaaaatggcgatgacaccggcacctggcccaacaaccagtttgacacagagatgctgcaagccatgatcttggcgtccgccagtgaagctgctgatgggagctccaccctgggagggggtgccggcaccatgggattgagcgcccgctacggaccccagttcaccctgcagcacgtgcccgactaccgccagaatgtctacatcccaggcagcaatgccacactgaccaacgcagctggcaagcgggatggcaaggccccagcaggtggcaatggcaacaagaagaagtcgggcaagaaggagaagaagtaacatggaggccaggccaagagccacagggcggcctctccccaaccagcccagcttctccttacctgcacccaggcctcagagtttcagggctaacccccagaatactggtaggggccaaggccatgctccccttgggaaacagaaacaagtgcccagtcagcacctaccccttcccccccagggggttgaatatgcaaaagcagttccgctgggaacccccatccaatcaactgctgtacccatgggggtagtggggttactgtagacaccaagaaccatttgccacaccccgtttagttacagctgaactcctccatcttccaaatcaatcaggcccatccatcccatgcctccctcctccccaccccactccaacagttcctctttcccgagtaaggtggttggggtgttgaagtaccaagtaacctacaagcctcctagttctgaaaagttggaagggcatcatgacctcttggcctctcctttgattctcaatcttcccccaaagcatggtttggtgccagccccttcacctccttccagagcccaagatcaatgctcaagttttggaggacatgatcaccatccccatggtactgatgcttgctggatttagggagggcattttgctaccaagcctcttcccaacgccctggggaccagtcttctgttttgtttttcattgtttgacgtttccactgcatgccttgacttcccccacctcctcctcaaacaagagactccactgcatgttccaagacagtatggggtggtaagataaggaagggaagtgtgtggatgtggatggtgggggcatggacaaagcttgacacatcaagttatcaaggccttggaggaggctctgtatgtcctcaggggactgacaacatcctccagattccagccataaaccaataactaggctggacccttcccactacataatagggctcagcccaggcagccagctttgggctgagctaacaggaccaatggattaaactggcatttcagtccaaggaagctcgaagcaggtttaggaccaggtccccttgagaggtcagaggggcctctgtgggtgctgggtactccagaggtgccactggtggaagggtcagcggagccccagcaggaagggtgggccagccaggccattcttagtccctgggttggggaggcagggagctagggcagggaccaaatgaacagaaagtctcagcccaggatggggcttcttcaacagggcccctgccctcctgaagcctcagtccttcaccttgccaggtgccgtttctcttccgtgaaggccactgcccaggtccccagtgcgccccctagtggccatagcctggttaaagttccccagtgcctccttgtgcatagaccttcttctcccacccccttctgcccctgggtccccggccatccagcggggctgccagagaaccccagacctgcccttacagtagtgtagcgccccctccctctttcggctggtgtagaatagccagtagtgtagtgcggtgtgcttttacgtgatggcgggtgggcagcgggcggcgggctccgcgcagccgtctgtccttgatctgcccgcggcggcccgtgttgtgttttgtgctgtgtccacgcgctaaggcgaccccctcccccgtactgacttctcctataagcgcttctcttcgcatagtcacgtagctcccaccccaccctcttcctgtgtctcacgcaagttttatactctaatatttatatggctttttttcttcgacaaaaaaataataaaacgtttcttctg

SEQ ID NO: 454931 - DNA, 4593 bp, Homo sapiens
atgaccaattgcctgagtttccgaaatggcagaggactggccctgctgtgcgcgctcctggggacgctgtgcgaaacaggatccggtcagatccgctactcggtgtctgaggagctagataaaggttccttcgtgggcaacatcgctaacgacctggggctagagccccgggagctggcggagcgcggagtccgcatcgtctccagaggtaggacgcagcttttctctctgaatccgcaaagcggcagcttggtcaccgcggagaggatagaccgggaggagctctgcgctcagatcccgctgtgtctggtaaaaattaacattctggttgaggataaattgaaaatttttgaagtagaaatagaaattaaagatattaatgataatgctcctaatttcccaacagaggaattggaaataaaaattggtgaactaacggttcctggaacccgatttccaattaaaactgcttttgacccagatgtaggcattaactccctgcagaactacaagcttagccccaatgactacttctctctggctgtgaatagcgtctctgagggggccaagtatccagagctggtgctggagcgggccctggaccgtgagaaaaaagaaattcaccagcttgtcctggttgcctctgatggtggcgaccctgtccactctggcaacttgcacatccaagtgatagtcctggatgcaaatgacaacccaccaatgtttactcagcctgagtaccgtgtgagtgtttgggagaacgtgcctgtgggtacccggctgctcacggtgaatgccactgaccctgacgagggattcaatgctcaagtgtcttatattctagataaaatgcctgggaaaatcgctgagattttccatcttaactcagtgagtggagaagtatcaatattaaaaagtctagattatgaggatgccatgttctatgaaattaaaattgaagcacaggatggaccaggtcttctttcaagagccaagattctagtcacggttctggatgtgaatgacaatgctccagaaattacaatcacgtctctcacaagctcagtcccagaagagggcaccgttggaagagaaattgctcttatcgacgtgcatgaccgagattctgggcagaatgggcaggttgaagtttttgtcctgggaaatctgccatttaagttagaaaaatcaatagatcaatattaccgcttagtgacggccacatccctggaccgcgaacaaatatcagaatataacattagtctgagagcctcagatgggggaagcccgccactgtccacagaaactcacatcaccctgcatgtgattgacatcaatgacaacccacccaccttccctcatttatcctactccgcctacattccagaaaacaaccccagaggagcctccatcttctcagtgacagcccaggacccagatagcaacaacaacgcccgcatcacttatgcattgaccgaggacactctccagggggcgcccctgtcctccttcgtctctatcaactccaacactggcgtcctatacgcgctgagatccttcgactacgagcaatttagagacttaaagctactggtgacagccagcgacagcgggaaccctccactcagcagcaacgtgtcgctgaacctgttcgtgctggaccagaacgacaacgcgcccgagatcctgtaccccgccctccccacagacggttccactggcgtggagctggcgcctcgctccgcagagcccggctacctggtgaccaaggtggtggcggtggacagagactcgggccagaacgcctggctgtcctaccgcctgctcaaggccagcgagccgggactcttctcggtgggtctgcacacgggcgaggtgcgcacggcgcgagccctgctggacagagacgcgctcaagcagagcctcgtggtggccgtccaggaccacggccagccccctctctccgccactgtcacgctcaccgtggccgtggccgacaggatccccgacatcctggccgacctgggcagcctcgagccctccgccaaacccaacgattcggacctcactctgtacctggtggtggcggtggccgcggtctcctgcgtcttcctggccttcgtcatcgtgctgctggcgctcaggctgcggcgctggcacaagtcacgcctgctgcaggcttcgggaggcggcttggcgagtacgcccggctcgcactttgtgggcgcggacggggttcgggctttcctgcagacctattcccacgaggtctccctcactgcggactcgcggaagagccacctgattttcccccagcccaactatgcggacacgctcatcagccaggagagctgtgagaaaagcgagcctcttctgataactcaggatttacttgaaatgaaaggagattccaacctactcaagccccgcccaacacggactggcgtttctctcaggcccagagacccggcaccagcggctcccaaaatggcgatgacaccggcacctggcccaacaaccagtttgacacagagatgctgcaagccatgatcttggcgtccgccagtgaagctgctgatgggagctccaccctgggagggggtgccggcaccatgggattgagcgcccgctacggaccccagttcaccctgcagcacgtgcccgactaccgccagaatgtctacatcccaggcagcaatgccacactgaccaacgcagctggcaagcgggatggcaaggccccagcaggtggcaatggcaacaagaagaagtcgggcaagaaggagaagaagtaacatggaggccaggccaagagccacagggcggcctctccccaaccagcccagcttctccttacctgcacccaggcctcagagtttcagggctaacccccagaatactggtaggggccaaggccatgctccccttgggaaacagaaacaagtgcccagtcagcacctaccccttcccccccagggggttgaatatgcaaaagcagttccgctgggaacccccatccaatcaactgctgtacccatgggggtagtggggttactgtagacaccaagaaccatttgccacaccccgtttagttacagctgaactcctccatcttccaaatcaatcaggcccatccatcccatgcctccctcctccccaccccactccaacagttcctctttcccgagtaaggtggttggggtgttgaagtaccaagtaacctacaagcctcctagttctgaaaagttggaagggcatcatgacctcttggcctctcctttgattctcaatcttcccccaaagcatggtttggtgccagccccttcacctccttccagagcccaagatcaatgctcaagttttggaggacatgatcaccatccccatggtactgatgcttgctggatttagggagggcattttgctaccaagcctcttcccaacgccctggggaccagtcttctgttttgtttttcattgtttgacgtttccactgcatgccttgacttcccccacctcctcctcaaacaagagactccactgcatgttccaagacagtatggggtggtaagataaggaagggaagtgtgtggatgtggatggtgggggcatggacaaagcttgacacatcaagttatcaaggccttggaggaggctctgtatgtcctcaggggactgacaacatcctccagattccagccataaaccaataactaggctggacccttcccactacataatagggctcagcccaggcagccagctttgggctgagctaacaggaccaatggattaaactggcatttcagtccaaggaagctcgaagcaggtttaggaccaggtccccttgagaggtcagaggggcctctgtgggtgctgggtactccagaggtgccactggtggaagggtcagcggagccccagcaggaagggtgggccagccaggccattcttagtccctgggttggggaggcagggagctagggcagggaccaaatgaacagaaagtctcagcccaggatggggcttcttcaacagggcccctgccctcctgaagcctcagtccttcaccttgccaggtgccgtttctcttccgtgaaggccactgcccaggtccccagtgcgccccctagtggccatagcctggttaaagttccccagtgcctccttgtgcatagaccttcttctcccacccccttctgcccctgggtccccggccatccagcggggctgccagagaaccccagacctgcccttacagtagtgtagcgccccctccctctttcggctggtgtagaatagccagtagtgtagtgcggtgtgcttttacgtgatggcgggtgggcagcgggcggcgggctccgcgcagccgtctgtccttgatctgcccgcggcggcccgtgttgtgttttgtgctgtgtccacgcgctaaggcgaccccctcccccgtactgacttctcctataagcgcttctcttcgcatagtcacgtagctcccaccccaccctcttcctgtgtctcacgcaagttttatactctaatatttatatggctttttttcttcgacaaaaaaataataaaacgtttcttctg

SEQ ID NO: 454932 - DNA, 4570 bp, Homo sapiens
atggggagcggcgccggggagctgggccgggctgagaggctgccagtgctctttctcttcctgctgtctttgttctgcccggcgctctgtgagcagatccgctacaggattcccgaggaaatgcccaagggctccgtagtggggaacctcgccacggacctggggttcagcgtccaggagttaccgactcgaaaactgcgcgtcagttcggagaagccttacttcaccgtgagcgcagagagcggggagttgcttgtgagcagcaggctagacagggaggagatatgcgggaagaagccagcttgtgctctggaatttgaggctgttgctgaaaatccactgaacttttatcacgtgaatgtggagatcgaggacattaatgaccacacgccaaaattcacgcaaaattcctttgagctgcaaataagtgagtctgcacagcctggcacaagatttatactagaagtagcagaagatgcagatattggcttaaactctctgcagaagtataaactctctcttaacccaagtttctcattaataattaaggagaaacaggatggtagtaaatacccggaactggcactggagaaaaccttagaccgggaacaacagagttaccatcgtttagtcctgactgccttggacggtggacatccacccctaagcggcaccactgagctccggatccaggtaaccgacgccaatgataatcccccggtattcaaccgagacgtgtacagagtcagccttcgggaaaacgtgccaccaggcaccactgtgttgcaagtgtcagccactgaccaagacgagggcatcaactcagaaattacttattccttctacagaaccgggcaaatctttagtctgaattcaaagagcggagaaattaccactcaaaagaaactggattttgaagagaccaaggaatattcaatggttgtagaagggagggatggtggtggactggttgcacaatgtacagttgaaattaatattcaagatgaaaatgacaatagcccagaagttacattccattctctacttgaaatgattctggaaaacgcggtgcctggaacactaattgctttgatcaaaatacatgaccaagattctggggaaaatggggaggttaattgtcaattacaaggcgaagtcccttttaagattatctcttcatccaaaaattcgtataagttggtaacagatggaaccctagaccgagagcaaaccccggagtacaatgtcaccatcacagccacagacaggggcaagccgcccctctcctccagcataagcgtcatcctacatatcagagacgtcaacgataacgctccggttttccaccaggcgtcctacttagtcagtgtacccgaaaacaaccctcctggggcctccatcgcgcaagtctgcgcctcggacctggacttggggttgaacggccaagtctcctactctatcatggccagcgacctagagcctctggcactggcctcttacgtgtccatgagcgcgcaaagtggggtggtgttcgcgcagcgcgcctttgactacgagcagctgcgcaccttcgaactcacactacaggcccgcgaccagggctcgcctgcgctcagcgcaaacgtgagcctgcgcgtgttggtgggcgaccgaaacgacaacgcaccgcgggtgctgtaccccgcgctgggtcccgacggctctgcgctcttcgatatggtgccgcgcgctgcagagcccggctacctggtgaccaaggtagtggccgtggacgcagactcaggacacaacgcctggctgtcctaccacgtgctgcaggctagcgagcccgggctcttcagcctggggctgcgcacaggagaggtgcgcacagcgcgtgccttgggcgacagggacgcggcccgccagcgcctgctggttgctgtgcgtgatggtggacagccgccactctccgccaccgccacgctgcacttggtctttgctgacagcttgcaggaggtgctgccggatatcactgaccgccctgtaccctctgacccccaggctgagctgcagttttacctagtggtggccttggccttgatctcagtgctcttcctcctggccgtgattctggccgttgccttgcgcctgcgacgctcctccagccctgccgcctggagctgcttccaacctggtctctgtgtcaagtctggacctgtggttccccccaactacagtcaggggactttgccttattcctacaacctatgtgttgcacatacaggaaagacggagtttaatttcctaaaatgtagtgagcaattgagttcaggacaagacatactttgtggtgattcatctggggccttatttccactttgtaattccagcgagtcgacttcccatcctgagttgcaagccccgcccaacacggactggcgtttctctcaggcccagagacccggcaccagcggctcccaaaatggcgatgacaccggcacctggcccaacaaccagtttgacacagagatgctgcaagccatgatcttggcgtccgccagtgaagctgctgatgggagctccaccctgggagggggtgccggcaccatgggattgagcgcccgctacggaccccagttcaccctgcagcacgtgcccgactaccgccagaatgtctacatcccaggcagcaatgccacactgaccaacgcagctggcaagcgggatggcaaggccccagcaggtggcaatggcaacaagaagaagtcgggcaagaaggagaagaagtaacatggaggccaggccaagagccacagggcggcctctccccaaccagcccagcttctccttacctgcacccaggcctcagagtttcagggctaacccccagaatactggtaggggccaaggccatgctccccttgggaaacagaaacaagtgcccagtcagcacctaccccttcccccccagggggttgaatatgcaaaagcagttccgctgggaacccccatccaatcaactgctgtacccatgggggtagtggggttactgtagacaccaagaaccatttgccacaccccgtttagttacagctgaactcctccatcttccaaatcaatcaggcccatccatcccatgcctccctcctccccaccccactccaacagttcctctttcccgagtaaggtggttggggtgttgaagtaccaagtaacctacaagcctcctagttctgaaaagttggaagggcatcatgacctcttggcctctcctttgattctcaatcttcccccaaagcatggtttggtgccagccccttcacctccttccagagcccaagatcaatgctcaagttttggaggacatgatcaccatccccatggtactgatgcttgctggatttagggagggcattttgctaccaagcctcttcccaacgccctggggaccagtcttctgttttgtttttcattgtttgacgtttccactgcatgccttgacttcccccacctcctcctcaaacaagagactccactgcatgttccaagacagtatggggtggtaagataaggaagggaagtgtgtggatgtggatggtgggggcatggacaaagcttgacacatcaagttatcaaggccttggaggaggctctgtatgtcctcaggggactgacaacatcctccagattccagccataaaccaataactaggctggacccttcccactacataatagggctcagcccaggcagccagctttgggctgagctaacaggaccaatggattaaactggcatttcagtccaaggaagctcgaagcaggtttaggaccaggtccccttgagaggtcagaggggcctctgtgggtgctgggtactccagaggtgccactggtggaagggtcagcggagccccagcaggaagggtgggccagccaggccattcttagtccctgggttggggaggcagggagctagggcagggaccaaatgaacagaaagtctcagcccaggatggggcttcttcaacagggcccctgccctcctgaagcctcagtccttcaccttgccaggtgccgtttctcttccgtgaaggccactgcccaggtccccagtgcgccccctagtggccatagcctggttaaagttccccagtgcctccttgtgcatagaccttcttctcccacccccttctgcccctgggtccccggccatccagcggggctgccagagaaccccagacctgcccttacagtagtgtagcgccccctccctctttcggctggtgtagaatagccagtagtgtagtgcggtgtgcttttacgtgatggcgggtgggcagcgggcggcgggctccgcgcagccgtctgtccttgatctgcccgcggcggcccgtgttgtgttttgtgctgtgtccacgcgctaaggcgaccccctcccccgtactgacttctcctataagcgcttctcttcgcatagtcacgtagctcccaccccaccctcttcctgtgtctcacgcaagttttatactctaatatttatatggctttttttcttcgacaaaaaaataataaaacgtttcttctg

SEQ ID NO: 454933 - DNA, 4594 bp, Homo sapiens
atgaagattcagaaaaagctgactggctgcagcaggctgatgcttctgtgtctttctctggagctgctgttggaagctggggctgggaatattcactactcagtgccggaagagacagacaaaggttccttcgtaggcaacatcgccaaggacctagggctgcaaccccaggagctggcagatggcggagtccgcatcgtctccagaggtaggatgccgcttttcgctctgaatcctagaagtggcagcttgatcaccgcgcgcaggatagaccgggaggagctctgcgctcagagcatgccgtgtctcgtgagttttaatatccttgttgaggataaaatgaagctttttcctgttgaagtagaaataattgatattaatgacaacactccccaattccagttagaggaactggagtttaaaatgaatgaaataacgactccaggtaccagagtctcattgccttttgggcaagaccttgatgtgggtatgaactcactccagagctaccaactcagctctaaccctcatttctccctggatgtgcaacagggagccgatgggcctcaacatccagagatggtgctgcagagtcccttagacagagaagaagaagctgtccaccacctcatcctcacagcttctgatgggggtgaaccagtccgttcagggaccctcagaatttacattcaggtggtggatgcaaatgacaatcctccagcatttactcaggcacaataccatataaatgtccccgaaaacgtgccgctgggtactcagctgctcatggtaaatgccactgaccctgatgagggagccaatggggaagtaacgtactcctttcacaatgtagaccacagagtggcccaaatatttcgtttagattcttacacaggagaaatatcaaataaagaaccactagatttcgaagaatacaaaatgtattcaatggaagttcaagcccaggatggtgcggggctcatggctaaagttaaggtactgatcaaagttttggatgtaaatgataatgccccagaagtgaccatcacctctgtcaccactgcagttccagaaaactttcctcctgggaccataattgctcttatcagtgtgcatgaccaggactcaggagacaatggctacaccacatgtttcattcctggaaatttaccctttaaattggaaaagttagttgataattattaccgtttagtgactgaaagaacactggacagagaacttatctctgggtacaacatcacaataacagcaatagaccaaggaactccagctctatctactgaaactcacatttcactactagtgacagatatcaatgacaactccccagtcttccatcaggactcctactctgcctacattcccgaaaacaaccccagaggagcctccatcttctctgtgagggcccacgacttggacagcaatgagaatgcacaaatcacttactccctaatagaggacactatccagggggcacccctatctgcctacctctccatcaactccgacactggggtcctgtatgcgctgcgatccttcgactatgagcagttccgggacatgcaactgaaagtgatggcgcgggacagtggggatccgcccctcagcagcaacgtgtctctcagcctattcctgctggaccagaacgacaacgcgcccgagatcctgtaccccgccctccccacagatggttctaccggcgtggagctggcgcccctctccgcagagcccggctacctggtgaccaaggtggtggcggtggacagagactcgggccagaacgcctggctgtcctaccgcctgctcaaggccagcgagccgggactcttctcggtgggtctgcacacgggcgaggtgcgcacggcgcgagccctgctggacagagacgcgctcaagcagagtctcgtggtggccgtccaggaccacggccagcccccgctctccgccactgtcacgctcaccgtggccgtggccgacaggatctccgacatcctggccgacctgggcagcctcgagccctccgccaaacccaacgattcggacctcactctgtacctggtggtggcggcggccgcggtctcctgcgtcttcctggccttcgtcatcgtgctgctggcgcacaggctgcggcgctggcacaagtcacgtctgctacaggcttcgggaggcggcttagcgagcatgcccggttcgcactttgtgggcgtggacggggttcgggctttcctgcagacctattcccacgaggtctccctcactgcggactcgcggaagagccacctgattttcccccagcccaactatgcggacacactcatcagccaggagagctgtgagaaaaagggttttctatcagcaccccagtctttacttgaagacaaaaaggaaccattttctcagcaagccccgcccaacacggactggcgtttctctcaggcccagagacccggcaccagcggctcccaaaatggcgatgacaccggcacctggcccaacaaccagtttgacacagagatgctgcaagccatgatcttggcgtccgccagtgaagctgctgatgggagctccaccctgggagggggtgccggcaccatgggattgagcgcccgctacggaccccagttcaccctgcagcacgtgcccgactaccgccagaatgtctacatcccaggcagcaatgccacactgaccaacgcagctggcaagcgggatggcaaggccccagcaggtggcaatggcaacaagaagaagtcgggcaagaaggagaagaagtaacatggaggccaggccaagagccacagggcggcctctccccaaccagcccagcttctccttacctgcacccaggcctcagagtttcagggctaacccccagaatactggtaggggccaaggccatgctccccttgggaaacagaaacaagtgcccagtcagcacctaccccttcccccccagggggttgaatatgcaaaagcagttccgctgggaacccccatccaatcaactgctgtacccatgggggtagtggggttactgtagacaccaagaaccatttgccacaccccgtttagttacagctgaactcctccatcttccaaatcaatcaggcccatccatcccatgcctccctcctccccaccccactccaacagttcctctttcccgagtaaggtggttggggtgttgaagtaccaagtaacctacaagcctcctagttctgaaaagttggaagggcatcatgacctcttggcctctcctttgattctcaatcttcccccaaagcatggtttggtgccagccccttcacctccttccagagcccaagatcaatgctcaagttttggaggacatgatcaccatccccatggtactgatgcttgctggatttagggagggcattttgctaccaagcctcttcccaacgccctggggaccagtcttctgttttgtttttcattgtttgacgtttccactgcatgccttgacttcccccacctcctcctcaaacaagagactccactgcatgttccaagacagtatggggtggtaagataaggaagggaagtgtgtggatgtggatggtgggggcatggacaaagcttgacacatcaagttatcaaggccttggaggaggctctgtatgtcctcaggggactgacaacatcctccagattccagccataaaccaataactaggctggacccttcccactacataatagggctcagcccaggcagccagctttgggctgagctaacaggaccaatggattaaactggcatttcagtccaaggaagctcgaagcaggtttaggaccaggtccccttgagaggtcagaggggcctctgtgggtgctgggtactccagaggtgccactggtggaagggtcagcggagccccagcaggaagggtgggccagccaggccattcttagtccctgggttggggaggcagggagctagggcagggaccaaatgaacagaaagtctcagcccaggatggggcttcttcaacagggcccctgccctcctgaagcctcagtccttcaccttgccaggtgccgtttctcttccgtgaaggccactgcccaggtccccagtgcgccccctagtggccatagcctggttaaagttccccagtgcctccttgtgcatagaccttcttctcccacccccttctgcccctgggtccccggccatccagcggggctgccagagaaccccagacctgcccttacagtagtgtagcgccccctccctctttcggctggtgtagaatagccagtagtgtagtgcggtgtgcttttacgtgatggcgggtgggcagcgggcggcgggctccgcgcagccgtctgtccttgatctgcccgcggcggcccgtgttgtgttttgtgctgtgtccacgcgctaaggcgaccccctcccccgtactgacttctcctataagcgcttctcttcgcatagtcacgtagctcccaccccaccctcttcctgtgtctcacgcaagttttatactctaatatttatatggctttttttcttcgacaaaaaaataataaaacgtttcttctg

SEQ ID NO: 454934 - DNA, 4588 bp, Homo sapiens
atgggaaatagctccggatggaggggcccagcagggcagaggcgaatgctatttctcttcctgctctctttgttagaccaggttctctccgaaccgatccgctacgctattcccgaggagctggacaggggctcgctggtagggaacctcgccaaggacctggggtttggcgtgggggatttacctactaggaacctgcgggttattgcagagaagaaattctttaccgtgagccccgaaaatgggaacttacttgtgagcgaccgtatagaccgagaggagatttgtggcaagaagtcgacgtgtgttctggaatttgaaatggttgctgaaaagcctttaaacttttttcatgtaactgtgctgatccaggatattaacgacaacccaccgacctttagccaaaatatcactgagctggaaatcagcgaactggctctcactggagccacatttgccctggaatctgcgcaagatcctgatgtaggtgtcaattcgctgcagcagtactacctcagccctgatccgcacttctctttgattcagaaggagaacctggatggcagtaggtacccagagctagtactgaaagcacccctggacagggaagagcagccacatcaccacctggtcctcacagctgtggatgggggcgagccctccagaagctgtaccacccagatcagggtaattgtcgcagatgcaaatgataaccccccagtatttactcaggacatgtacagggtcaatgttgcagagaacctgcccgctggctcctccgtattaaaagtgatggccattgacatggatgagggcatcaatgccgaaatcatctatgccttcatcaatattggcaaggaagtgagacaactgttcaagctggacagtaaaacgggggaactcaccactattggagaactggactttgaagagagagatagctacacaattggggtggaagcaaaggatggtggacatcacactgcatattgtaaagtacagatagatatttcagatgaaaatgacaatgccccggagataaccctggcttctgaatcccaacatatacaagaagatgctgagctggggactgccgttgccctgatcaaaacacatgatctagattctggatttaatggagaaatcctatgccaactaaaaggaaacttcccctttaaaatcgttcaagataccaaaaacacatacaggttggtgacagatggagccctggaccgggagcagatcccagaatacaatgtgacgatcacagctaccgacaaaggcaatccaccgctctcctccagcaagaccatcactctgcacatccttgatgtcaacgacaacgttcccgttttccaccaggcctcctacaccgtgcatgtagctgagaacaatccgcctggagcctccattgcgcatgtcagagcctcggatcccgacttgggacctaatggccttgtctcctactacatcgtggccagtgacctggagccgcgggagctgtcgtcctacgtgtccgtgagcgcgcggagcggggtggtgttcgcgcagcgagccttcgaccacgagcagctgcgtgccttcgagctcactctgcaggcccgcgaccagggctcgcctacgctcagcgccaacgtgagcctgcgcgtgttggtggacgaccgcaacgacaatgcaccgctggtgctgtacccagctctggggcccgaaggctctgcgctcttcgatatggtgccgcgctctgcagagcctggctacctggtgaccaaggtggtggcggtggacgcagactcgggatacaacgcctggctgtcctaccacattgtgcaggccagcgagcccgggctgttcagcctgggcctgcgcacgggtgaggtgcgcacggcgcgtaccttgggcgacagggaggccgcccgccagcgcctgctggtcactgtgcgtgatggaggacagcagcctctttcagccaccgtcatgctgcacctaatcttcgcagatagcttgcaagagatacaacctgaccttagcgaccgccccactccctctgaccctcaggcggagctacagtttcacctagtagtggcgttggccttgatctcagtgctcttcctcctcgcggtgattctggcaatctccctgcgcctgcgatgctcctccagacccgccactgagggctactttcagcctggtgtctgcttcaagactgtacctggagttctccccacctacagcgaaaggactttgccttattcctacaatccgtgtgctgcctcacattcctcaaacaccgagtttaaatttctcaatataaaggctgaaaatgctgcaccacaagatcttctatgtgatgaagcctcttggtttgaaagtaatgacaatccagaaatgccttctaattcaggcaatttgcaaaagcaagccccgcccaacacggactggcgtttctctcaggcccagagacccggcaccagcggctcccaaaatggcgatgacaccggcacctggcccaacaaccagtttgacacagagatgctgcaagccatgatcttggcgtccgccagtgaagctgctgatgggagctccaccctgggagggggtgccggcaccatgggattgagcgcccgctacggaccccagttcaccctgcagcacgtgcccgactaccgccagaatgtctacatcccaggcagcaatgccacactgaccaacgcagctggcaagcgggatggcaaggccccagcaggtggcaatggcaacaagaagaagtcgggcaagaaggagaagaagtaacatggaggccaggccaagagccacagggcggcctctccccaaccagcccagcttctccttacctgcacccaggcctcagagtttcagggctaacccccagaatactggtaggggccaaggccatgctccccttgggaaacagaaacaagtgcccagtcagcacctaccccttcccccccagggggttgaatatgcaaaagcagttccgctgggaacccccatccaatcaactgctgtacccatgggggtagtggggttactgtagacaccaagaaccatttgccacaccccgtttagttacagctgaactcctccatcttccaaatcaatcaggcccatccatcccatgcctccctcctccccaccccactccaacagttcctctttcccgagtaaggtggttggggtgttgaagtaccaagtaacctacaagcctcctagttctgaaaagttggaagggcatcatgacctcttggcctctcctttgattctcaatcttcccccaaagcatggtttggtgccagccccttcacctccttccagagcccaagatcaatgctcaagttttggaggacatgatcaccatccccatggtactgatgcttgctggatttagggagggcattttgctaccaagcctcttcccaacgccctggggaccagtcttctgttttgtttttcattgtttgacgtttccactgcatgccttgacttcccccacctcctcctcaaacaagagactccactgcatgttccaagacagtatggggtggtaagataaggaagggaagtgtgtggatgtggatggtgggggcatggacaaagcttgacacatcaagttatcaaggccttggaggaggctctgtatgtcctcaggggactgacaacatcctccagattccagccataaaccaataactaggctggacccttcccactacataatagggctcagcccaggcagccagctttgggctgagctaacaggaccaatggattaaactggcatttcagtccaaggaagctcgaagcaggtttaggaccaggtccccttgagaggtcagaggggcctctgtgggtgctgggtactccagaggtgccactggtggaagggtcagcggagccccagcaggaagggtgggccagccaggccattcttagtccctgggttggggaggcagggagctagggcagggaccaaatgaacagaaagtctcagcccaggatggggcttcttcaacagggcccctgccctcctgaagcctcagtccttcaccttgccaggtgccgtttctcttccgtgaaggccactgcccaggtccccagtgcgccccctagtggccatagcctggttaaagttccccagtgcctccttgtgcatagaccttcttctcccacccccttctgcccctgggtccccggccatccagcggggctgccagagaaccccagacctgcccttacagtagtgtagcgccccctccctctttcggctggtgtagaatagccagtagtgtagtgcggtgtgcttttacgtgatggcgggtgggcagcgggcggcgggctccgcgcagccgtctgtccttgatctgcccgcggcggcccgtgttgtgttttgtgctgtgtccacgcgctaaggcgaccccctcccccgtactgacttctcctataagcgcttctcttcgcatagtcacgtagctcccaccccaccctcttcctgtgtctcacgcaagttttatactctaatatttatatggctttttttcttcgacaaaaaaataataaaacgtttcttctg

SEQ ID NO: 454935 - DNA, 4309 bp, Homo sapiens
agaatgggctctaggcgccgctgctcaccaatcagggaatgggaagctgcgcgccattgagtccctccctcccccgcctctaccacacaaagcggaatgagatggatactcacagatcctgacactggagacttagaagtattttccttcgctttctgatatattttggatgtagtcggcctaggacttcatagatacataagccgattcacaaccaaccagctcgagaaaccgcggaatatcggcttagagcctgccatggcgaatcggctacagcgcggggaccgcagtcggctgctgctgctgctgtgcattttcctggggacgctgcgggggttccgggccaggcagatccgatattcggtgccagaagagaccgaaaagggctccttcgtgggcaatatctccaaggacctggggctggagccccgggagctggcgaagcgcggagtccgcatcgtctccagagggaagacacagcttttcgctgtgaatccgcgaagcggcagcttgatcacggcaggcaggatagaccgggaggagctctgtgagacggtgtcctcctgttttttaaatatggaacttctcgtggaagacaccttgaagatttacggagtggaggtggaaataatagatattaatgataacgcccccagcttccaggaggacgaagtggagataaaagtcagtgagcacgcaattcctggggcgcgatttgctcttcctaatgctagggatccagatgtgggcgtgaactccctccagagctaccagctcagccctaataattacttttccttgcaactgcggggcagaacggatggggccaagaatccagagctagtactggagggaagcctggaccgagagaaagaggctgctcacctgctcctcctcacagctttagatggaggcgatcccatccgaaagggcgcagttcccattcgtgtggtggtcctcgatgtaaatgatcacatcccaatgtttacacagtccgtatatcgcgtgagtgttccagaaaacatcagctccggaactcgggtgctgatggttaatgcaacggatccagacgagggaatcaacggggaagtaatgtattcatttcggaacatggaaagcaaggcttctgaaatattccaattggattcacaaactggagaagttcaagtacgggggtctctggattttgaaaaatatagattctatgagatggaaattcaaggccaagatggtggaggtctctttaccaccacgacgatgttgatcactgttgtggatgtgaatgataacgctccagaaataactatcacctcttctattaattcaattctggaaaactctcctccaggtacagtgattgctcttctaaatgtgcaagatcaagattctggagaaaatggtcaagtctcctgttttattcctaaccacctgccttttaaattagaaaagacttatggaaattattacaaattgataacaagcagagtgctggacagggagttggtccagagctacaatataacgttgacagccacagaccagggaagcccgcctttgtctgcagaaactcatgtctggctgaatgtggcagatgacaacgataaccctcccgtttttcctcactcctcttactctgcctacattcccgaaaacaaccccaggggtgcctccatcttctcagtgaccgccctcgacccggacagcaaacagaatgccctggtcacttactctctgacggatgacactgtccagggggtgcctctgtcctcctatgtctctattaactccaacactggtgttctctatgccctacaatccttcgactatgagcagtttcgagacttagaactgagagtgatagcacgtgacagcggggacccgcccctcagcagcaacgtgtcgctgagcctgttcgtgctggaccagaacgacaatgcgcccgagatcctgtaccctgccctccccacagacggctccactggcgtggagctggcgccccgctctgcggaacctggctacctggtgaccaaggtggttgcggtggacaaagattcaggccagaacgcctggctgtcctatcgcctgcttaaggccagcgagccgggactcttcgcggtgggggagcacacgggcgagcaagccccgcccaacacggactggcgtttctctcaggcccagagacccggcaccagcggctcccaaaatggcgatgacaccggcacctggcccaacaaccagtttgacacagagatgctgcaagccatgatcttggcgtccgccagtgaagctgctgatgggagctccaccctgggagggggtgccggcaccatgggattgagcgcccgctacggaccccagttcaccctgcagcacgtgcccgactaccgccagaatgtctacatcccaggcagcaatgccacactgaccaacgcagctggcaagcgggatggcaaggccccagcaggtggcaatggcaacaagaagaagtcgggcaagaaggagaagaagtaacatggaggccaggccaagagccacagggcggcctctccccaaccagcccagcttctccttacctgcacccaggcctcagagtttcagggctaacccccagaatactggtaggggccaaggccatgctccccttgggaaacagaaacaagtgcccagtcagcacctaccccttcccccccagggggttgaatatgcaaaagcagttccgctgggaacccccatccaatcaactgctgtacccatgggggtagtggggttactgtagacaccaagaaccatttgccacaccccgtttagttacagctgaactcctccatcttccaaatcaatcaggcccatccatcccatgcctccctcctccccaccccactccaacagttcctctttcccgagtaaggtggttggggtgttgaagtaccaagtaacctacaagcctcctagttctgaaaagttggaagggcatcatgacctcttggcctctcctttgattctcaatcttcccccaaagcatggtttggtgccagccccttcacctccttccagagcccaagatcaatgctcaagttttggaggacatgatcaccatccccatggtactgatgcttgctggatttagggagggcattttgctaccaagcctcttcccaacgccctggggaccagtcttctgttttgtttttcattgtttgacgtttccactgcatgccttgacttcccccacctcctcctcaaacaagagactccactgcatgttccaagacagtatggggtggtaagataaggaagggaagtgtgtggatgtggatggtgggggcatggacaaagcttgacacatcaagttatcaaggccttggaggaggctctgtatgtcctcaggggactgacaacatcctccagattccagccataaaccaataactaggctggacccttcccactacataatagggctcagcccaggcagccagctttgggctgagctaacaggaccaatggattaaactggcatttcagtccaaggaagctcgaagcaggtttaggaccaggtccccttgagaggtcagaggggcctctgtgggtgctgggtactccagaggtgccactggtggaagggtcagcggagccccagcaggaagggtgggccagccaggccattcttagtccctgggttggggaggcagggagctagggcagggaccaaatgaacagaaagtctcagcccaggatggggcttcttcaacagggcccctgccctcctgaagcctcagtccttcaccttgccaggtgccgtttctcttccgtgaaggccactgcccaggtccccagtgcgccccctagtggccatagcctggttaaagttccccagtgcctccttgtgcatagaccttcttctcccacccccttctgcccctgggtccccggccatccagcggggctgccagagaaccccagacctgcccttacagtagtgtagcgccccctccctctttcggctggtgtagaatagccagtagtgtagtgcggtgtgcttttacgtgatggcgggtgggcagcgggcggcgggctccgcgcagccgtctgtccttgatctgcccgcggcggcccgtgttgtgttttgtgctgtgtccacgcgctaaggcgaccccctcccccgtactgacttctcctataagcgcttctcttcgcatagtcacgtagctcccaccccaccctcttcctgtgtctcacgcaagttttatactctaatatttatatggctttttttcttcgacaaaaaaataataaaacgtttcttctg

SEQ ID NO: 454936 - DNA, 2663 bp, Homo sapiens
aaagtgcccaggctacagagacaccctgaagccacagaaagacaaaggaaccggttgaaacacacaacgtgtccagtgaggactttgcagaattctgtaaccagactacaatggccgctcaaaggaatcgctcaaaggaatcaaaggattgcagcgggctggtcctgctctgccttttcttcgggattccatgggaggctggagcccggcagatctcctactcaattcctgaggaattagagaaaggctctttcgtgggcaacatctccaaggacttgggtctggcgccccgggagctggcggagcgcggagtccgcatagtctccagaggtaggacgcagcttttctctctgaacccgcgcagcggcagcttgatcaccgcgggcaggatagaccgggaggagctctgcgctcagagcgcgcggtgcgtggtgagttttaatatccttgtggaagacagggtgaaactttttgggatagaaatagaagtaactgatatcaatgacaatgctccaaaattccaagcagaaaatctagacgtaaaaattaatgaaaatgtcgctgcgggaatgcgttttcctctcccggaagctattgatccggatgtgggcgtgaactccctgcagagctatcagctcagccccaataagcacttctccctaagagttcagagccgtgccaatggcgtcaagtacccggagctggtactggagcactccctagatcgcgaggaagaggccattcaccacctggtcctcaccgcctccgacgggggtgaccctctccgatctggcactgtccttgtcagtgtgactgtcttcgatgcaaatgacaacgcgccggtcttcaccttgccagaataccgagtgagtgttcctgagaatttgcctgtgggcactcagctgctgacagtcacagccaccgacagggacgaaggtgccaatggagaagtgacatattcattccgaaaattacctgacacgcaattgttgaagttccaactaaacaaatatactggagaaataaaaatatcagaaaatctagattatgaagaaaccggtttctatgaaatagaaatacaagcagaagatggaggagcatatcttgcaactgcaaaagtgttgattacagtagaagatgtaaatgacaacagtccagagctgaccatcacgtctctatttagtccagtgactgaagattcacctctgggaacagtcgtagcccttttaaatgtgcatgatttagactctgagcagaatggacaggtaacctgttccattttggcgtatctaccatttaaattagaaaagtccattgacagttattacagattggtgatacacagagcccttgacagggaacaggtatcctcttacaatatcacagtgacagccacagatgggggaagtcctcctctatcaacggaagctcactttatgctacaagtggcagatatcaatgacaacccacctaccttctctcaagtctcctactttacctatatcccagagaacaacgccaggggtgcctccatcttctcagtgacagcgctggacccggacagcaaagagaatgcccagattatttactccctggctgaagacaccatccagggggtacctctgtcctcatacatatccatcaactcagacactggcgtcctgtatgcactcagatccttcgactatgagcagtttcatgagctacagatgcaggtgacagccagcgacagcggggatcctccactcagcagcaacgtgtcgttgagcctgtttgtgctggaccagaacgacaatgcgcccgagatcctgtaccccgccctccccacagacggttccacaggcgtggagctggcgccccgctccgcagagcccggctacctggtgaccaaggtggtggcggtggacagagactccggccagaacgcctggctgtcctaccgtctgctcaaggccagcgagccgggactcttcgcggtgggggagcacacgggcgaggtgcgcacggcgcgagccctgctggacagagacgcgctcaagcaaagcctcgtagtggccgtccaggaccacggccagccccctctctccgccactgtcacgctcaccgtggccgtggccgacagcatcccccaagtcctggcggacctcggcagcttcgagtctccagctaactctgaaacctcagacctcactctgtacctggtggtagcggtggccgcggtctcctgcgtcttcctggccttcgtcatcgtgctgctggcgcacaggctgcggcgctggcacaagtcacgcctgctgcaggcttcaggaggcggcttgacaggtgtgtccggctcgcactttgtgggcgtggacggggttcgggctttcctgcagacctattcccacgaggtctctctcaccgcggactcgcgaaagagtcacctgatcttcccccagcccaattatgcggacacgctcatcagccaggagagctgtgagaaaaacgatcctttgtctttgttagatgattcgaagtttcctatagaggataccccattggttccagtgagttttattttcatttttacttttgttaaaaaaaaaaagattggtttttactttgaagtttgcggcatgatggtggaaagtgtaaatgctaaaacactgatgagtagaatttga

SEQ ID NO: 454937 - DNA, 2735 bp, Homo sapiens
ctcccacacagaggctcccggctgcgcagaccttgcccagcacaccagattgccagctccgagacccgggactcctcctgtcctgggccgaatgctcttttagcgcggtagagtgcactttctccaactggaaaagcggggacccagcgagaacccgagcgaacgatgggagggagctgcgcgcagaggcgccgggccggcccgcggcaggtactatttcctttgctgctgcctttgttctaccccacgctgtgtgagccgatccgctactcgattccggaggagctggccaagggctcggtggtggggaacctcgctaaggatctagggcttagtgtcctggatgtgtcggctcgcgagctgcgagtgagcgcggagaagctgcacttcagcgtagacgcgcagagcggggacttacttgtgaaggaccgaatagaccgtgagcaaatatgcaaagagagaagaagatgtgagttgcaattggaagctgtggtggaaaatcctttaaatatttttcatgtcattgtggtgattgaggatgttaatgaccacgcccctcaattccggaaagatgaaataaacttagaaatcagtgaatccgtcagcctggggatgggaacaattcttgagtctgcagaagatcctgatattagtatgaattcgctgagcaaataccaactaagtcctaacgagtatttctcattggtggagaaagacaatcctgatggtggcaaatatccagaattagtattgcagaagactctggaccgagaaacgcagagcgctcaccacttggtactgaccgccttagatggtggggaccctccccgaagcggtactgctcagataagaatcctggtaatagatgccaatgacaaccccccagtgttcagccaggacgtgtacagggttagccttcgggaagacgtgcctccaggcacctccatcctgagagtgaaggccactgaccaggacgagggcatcaactcagagatcacttattccttctttggtgtggctgacaaagctcagcacgtgttctctctggattacactacaggaaacattctaactcagcagcctttggattttgaagaagtagaaagatatacgataaacatagaagcaaaagaccgaggatctctctcaacacggtgtaaagtaattgtagaagttgtagacgaaaacgacaacagcccagaaataatcatcacgtcactctctgatcagattatggaggattcccctccaggagtggttgttgccctcttcaaaacacgggaccaagactcaggggaaaatggggaagtcaggtgtagcttaagtagaggtgttccatttaagattcattcttcttctaataattactacaagctagtaacagatgaggccctggatcgggagcagaccccagagtacaacgtcaccatcgcagccacagacaggggcaagcctccgttatcctccagcaaaaccataaccctgcacattactgacgtcaatgacaacgcgccggttttcggacagtcagcctacctggtccacgtgccagaaaacaaccagccgggtgcctccatagcgcaagtcagtgcctctgacccagacttcgggctcaacggccgtgtctcctactctctcattgccagcgacctggagtcacgaacgctgtcgtcctacgtgtccgtgagcgcgcagagcggggtggtgttcgcgcagcgcgccttcgaccacgagcagctgcgcaccttcgagctcacgctgcaggcccgcgaccagggctcgcccgcgctcagcgccaatgtgagcctgcgcgtgttggtgggcgaccgtaacgacaacgcaccgcgggtgctgtaccctgcgctgggtcccgacggctccgcgctcttcgacacagtgccgcgggccgcgcagccaggctacctggtgaccaaggtggtggccgtggacgcggactcggggcacaatgcctggctgtcctaccacgtggtgcaggccagtgagcccgggctcttcagcctggggctgcgaacaggcgaggtgcgcatggtgcgtgctttgggtgacaaggactcggtccgccagcgcctgctagtcgctgtaagagatggaggacagccacccctttcagccactgccacgctgcacctggtgttcgcagatagcttgcaagaggtactgccggatttcagcgaccatcccacaccctctgactcccaggctgagatgcagttttacctggtggtggccttggccttgatttctgtgctctttctcctcgcggtgattctagctattgctctacgcctgcgacagtctttcagccctactgcaggagactgctttgagtcagttctctgctccaagtccggacctgtgggtccccccaactacagtgagggaacgttgccctatgcctataatttttgtgtgcctggggatcaaatgaatccagaatttaattttttcacatctgttgatcattgtccagccacacaagataacctcaacaaagatagcatgctactggctagcattttaactcccagcgttgaagcagataagaagattcttaaacaggtaagtatttaaaaatgtatttaatcctttttatattacaatatgccaatatattccaatatagtggtattattttaagattctagataacttcttcatagagttcgcaaaatataggtcaaatttatggttatcattattaaaacaaaagttta

SEQ ID NO: 454938 - DNA, 3117 bp, Homo sapiens
agaatgggctctaggcgccgctgctcaccaatcagggaatgggaagctgcgcgccattgagtccctccctcccccgcctctaccacacaaagcggaatgagatggatactcacagatcctgacactggagacttagaagtattttccttcgctttctgatatattttggatgtagtcggcctaggacttcatagatacataagccgattcacaaccaaccagctcgagaaaccgcggaatatcggcttagagcctgccatggcgaatcggctacagcgcggggaccgcagtcggctgctgctgctgctgtgcattttcctggggacgctgcgggggttccgggccaggcagatccgatattcggtgccagaagagaccgaaaagggctccttcgtgggcaatatctccaaggacctggggctggagccccgggagctggcgaagcgcggagtccgcatcgtctccagagggaagacacagcttttcgctgtgaatccgcgaagcggcagcttgatcacggcaggcaggatagaccgggaggagctctgtgagacggtgtcctcctgttttttaaatatggaacttctcgtggaagacaccttgaagatttacggagtggaggtggaaataatagatattaatgataacgcccccagcttccaggaggacgaagtggagataaaagtcagtgagcacgcaattcctggggcgcgatttgctcttcctaatgctagggatccagatgtgggcgtgaactccctccagagctaccagctcagccctaataattacttttccttgcaactgcggggcagaacggatggggccaagaatccagagctagtactggagggaagcctggaccgagagaaagaggctgctcacctgctcctcctcacagctttagatggaggcgatcccatccgaaagggcgcagttcccattcgtgtggtggtcctcgatgtaaatgatcacatcccaatgtttacacagtccgtatatcgcgtgagtgttccagaaaacatcagctccggaactcgggtgctgatggttaatgcaacggatccagacgagggaatcaacggggaagtaatgtattcatttcggaacatggaaagcaaggcttctgaaatattccaattggattcacaaactggagaagttcaagtacgggggtctctggattttgaaaaatatagattctatgagatggaaattcaaggccaagatggtggaggtctctttaccaccacgacgatgttgatcactgttgtggatgtgaatgataacgctccagaaataactatcacctcttctattaattcaattctggaaaactctcctccaggtacagtgattgctcttctaaatgtgcaagatcaagattctggagaaaatggtcaagtctcctgttttattcctaaccacctgccttttaaattagaaaagacttatggaaattattacaaattgataacaagcagagtgctggacagggagttggtccagagctacaatataacgttgacagccacagaccagggaagcccgcctttgtctgcagaaactcatgtctggctgaatgtggcagatgacaacgataaccctcccgtttttcctcactcctcttactctgcctacattcccgaaaacaaccccaggggtgcctccatcttctcagtgaccgccctcgacccggacagcaaacagaatgccctggtcacttactctctgacggatgacactgtccagggggtgcctctgtcctcctatgtctctattaactccaacactggtgttctctatgccctacaatccttcgactatgagcagtttcgagacttagaactgagagtgatagcacgtgacagcggggacccgcccctcagcagcaacgtgtcgctgagcctgttcgtgctggaccagaacgacaatgcgcccgagatcctgtaccctgccctccccacagacggctccactggcgtggagctggcgccccgctctgcggaacctggctacctggtgaccaaggtggttgcggtggacaaagattcaggccagaacgcctggctgtcctatcgcctgcttaaggccagcgagccgggactcttcgcggtgggggagcacacgggcgaggtgcgtacagcgcgggcactgctggacagagacgcgctcaagcagagcctcgtggtggccgtccaggaccacggccagccccctctctcggccaccgtcacgctcaccgtggctgtggccgacagcatccccgaagtcctggcggacctcggcagcctcgagtctctggctaactctgaaacctcagacctctcgctgtacttggtggtggcggtggccgcagtctcctgcatcttcctggtctttgtcatcgtgctgctggcactcaggctgtggcgctggcataagtcacgcctgctgcaggcttctgaaggcgggttggcaggtatgcccacgtcacattttgtaggcgtggacggggtacaggctttcctgcaaacctattcccacgaggtctctctcattgcggactcgcagaagagtcacctgattttcccccagcccaactatggggacacgctcatcagccaggagagctgtgagaaaagcgagccactcttgatagctgaagactcagctatcattttaggcaaatgtgacccgacaagtaatcaggtgagatttatttctctgcctcctaattgttggtgtcttggcacaagtcttttaaggagatgttttttgagcctgttatgaaaactgtttggggggggggtggggcggcatatatttagttcatatatatttagagcaatacatgtgagttttactttgcctttcatgagattacgataatctttcagaacgtttttgtgaaagtcatttttcaatcttggcatattttcttttgatttcaaaggggccattcaactatgctggtttggtttgaagtaagttgaattttagtattatttttctattatcagtgtatgaggctctcaatttattatatatagatacaaattaatgattcacaaacactttttatttccatttcaattttgctgtgccttcactgatttgtagttatattccaccatt

SEQ ID NO: 454939 - DNA, 2529 bp, Homo sapiens
atggcggcgcctcctgctcgcccagaccacacccggctgctccagatctgccttctcctgggggttctggtggaaatcagggccgaacagattctctactcggtgtttgaggagcaggaagaaggctcagtggtgggcaacatcgccaaggacctggggttggcgccccgggagctggcggagcgcggagtccgcatcgtctccagaggtaggacgcagcttttcgccctgaacccgcgcagcggcaccttggtcaccgcgggtaggatagacagggaggagctctgcgacagatctccaaactgtgtgacaaacctggagattcttctagaagatacagtgaagattttgcgggtagaggtggaaataatcgatgttaatgataacccacccagttttgggacagaacagagggaaataaaagttgctgaaaatgaaaatcctggggcaagatttcctcttcctgaagcttttgatccggatgtaggtgtaaactccctgcagggttaccagctcaactcaaacggttacttttccctggacgtgcaaagtggggccgatgggattaagtacccagagctggtgctggaacgcgctctagatcgcgaggaagaggcggttcaccacctcgttctcacggccttcgatggaggtgacccggttcgctctggcactgccaggattctcataatacttgtggataccaacgataatgctcccgtgttcactcagcccgagtaccacgtaagtgttcgtgagaacgttcctgtaggcactcggctactcaccgtaaaagccactgatccagatgaaggagccaatggagacgtgacgtattctttccggaaagtaagagacaaaatatcacagctatttcagttgaattctctgagtggggatataacaatattggggggtctagattatgaggactctggattctatgacatagatgtagaagcccatgatgggcctggtctccgagctagaagcaaggtactggtgacagttctggatgaaaatgacaacgcaccagaagtcacagttacatctctcaccagctcagtccaggaatcttcttccccgggtacagtaattgcacttttcaacgtgcatgacagtgactcaggaggaaatggcctagtcacatgttctattccagataatctgccattcacacttgaaaagacctatggaaattattatcggttgttgacacacagaacactggacagggaagaagtctcagaatataacatcactgtaactgccactgaccagggaactcctccactgtctacagaaactcatatttcactgcaagtgatggacatcaatgacaacccacccactttccctcatgcttcctactctgcttacattcctgaaaacaaccccagaggagcctccatcttatctatgactgctcaagaccctgacagtggtgacaatgcccgaatcacttactccctggccgaagacaccttccagggtgcacctctgtcctcctatgtctccatcaactccaatacagggatcctatatgctctttgctccttcgactatgagcagtttagagacctgcagctgctgatgacagccagtgacagtggagaccctccactcagcagcaatgtgtcactgagcctctttgtgctggaccagaacgacaatgtccctgagatcctgtaccccaccttccctactgatggctccactggtgtggagctggcaccccgctccgcagattccggctacctggtgaccaaagtggtggcagtggacagagactcaggtcagaatgcctggctgtcctacagcctactcaagtccagcgagccgggactatttgcagtggggctgcacacaggcgaggtgcgcaccgcacgggccctgctggacagagacgcgctcaagcagaggcttgtagtggtcgtccaggaccatggccagccccctctctcggccaccgtcacactcactgtggctgtggccgacagcatcccagatgtcctggctgacttgggcagcctcaagccttcagcagacccagacgactcgggcctcacactctatctcgtggtggcagtggccgctgtctcctgcgtcttcctggcttttgtcacggtgctgctagcactcaagctgagacgctggcacaagtcacgcctgcttcacgctgaaggcagcaggttggcaggtgtgcctgcctcgcactttgtgggcgtggacggggttcgggctttcctgcagacctattcccacgaggtctccctcaccgcggactcgcggaagagtcacctgatcttctcccaacccagctatgcagacacgctcatcagccgggagagttgtgagaaaagcgagcctcttctgataactcaggatttacttgaaacaaaaggagaccctaatcttcaggtgagtcaatcttataatagatcataccacactgaaatatagacaaagagttgtgtaaatgtctctcattttatatgtaatatatcaaataaagttgcctcttttaat

SEQ ID NO: 454940 - DNA, 2442 bp, Homo sapiens
atggcgagtccacctaggggctggggctgcggagagctgctgctgcccttcatgctcctggggacgctgtgcgagccaggatccgggcagatccgctactcgatgccggaggagctggacaaaggctccttcgtcggcaacatagccaaggaccttgggctggagccccaggagctggcggagcgcggagtccgcatcgtctccagaggtaggacgcagctttttgccctgaacccgcgaagcggcagcttggtcaccgcgggcaggatagaccgggaggagctctgcgctcagagcccactgtgtgtggtgaactttaacatcttggttgagaacaaaatgaaaatttatggagtagaagtagaaataatcgatattaatgataacttcccgcgtttccgggatgaagagttaaaagtaaaagttaatgaaaatgcggctgcagggacacggttagtgcttcccttcgcgcgggatgcggatgtgggtgtgaactctctccggagttaccagctcagctccaatctgcacttctctctggatgtggtaagcggaactgatggacaaaagtatccggagctggtgttggaacagcccctagaccgcgagaaagagactgttcacgacctcctcctcacagctttagatggcggagacccggtactctccggcaccacgcacatccgtgttacggtcctcgacgcaaacgacaatgcgcccctgttcaccccatccgagtacagcgtgagtgttccagagaacatacctgtgggcactcggctgctcatgctaaccgccacggatccagatgagggaataaacgggaaattgacctactcttttcgcaatgaagaagaaaaaatttcggagactttccaacttgattccaacctgggggaaatctcaactctacaatcactggactatgaagaatccagattctacctcatggaagtggtagctcaggatggaggcgctcttgttgccagcgctaaggtggtggtcacagtacaggacgtgaatgacaatgcccccgaagtgatcctcacctctctgaccagttcgatctctgaagactgtcttcccggaactgtaatcgcgctgtttagcgtacatgatggtgattctggagaaaatggtgagattgcatgctctattcctaggaatttgccttttaaattggagaagtcagttgataattactatcacctattaacaactagggacctggacagagaagagacttcagattataatatcactttaaccgtcatggaccatggaaccccgcccctctctacagaaagccacatccccttgaaagtagcagacgttaatgacaacccacccaatttccctcaagcctcctactccacctctgtcacagaaaacaatcccagaggtgtctctatcttctctgtgacagcccatgaccccgacagcggcgacaacgctcgagtcacctactccctggctgaagacacatttcagggggcgcccttgtcctcctatgtatccattaactctgacaccggtgtcctgtatgctctgagatccttcgactatgagcagttgagagacctacagttgtgggtgacagccagcgacagtgggaaccctccacttagcagcaacgtgtcgctgagcctgtttgtgctggaccagaacgacaatacgcctgagatcctgtaccccgccctccccacagacggttccacgggcgtggagctggcgcctcgctccgcagaacctggctacctggtgaccaaggtggtagcggtggacaaagattcaggccagaacgcctggctgtcctaccgcctgcttaaggccagcgagccaggactctttgcggttgggctgcacacgggcgaggtgcgcacagcgcgagccctgctggacagagacgcgctcaagcagagcctcgtggtggccgtcgaagaccatggccagccccctctgtcagccaccttcacggtcaccgttgccgtggccgacaggatccctgacatcctggctgacctaggcagtatcaagacccccattgaccctgaggatctggacctcacactctatcttgtggtggcagtggctgcagtctcctgcgtcttcctggccttcgtcatcgtgctgctggtgctcagactgaggcgctggcacaagtcacgcctgcttcaggctgaaggcagcaggttggcgggtgtgcccgcctcgcactttgtgggcgtggatggggttcgggctttcctgcagacctattcccacgaggtctccctcaccgcggactcgaggaagagtcacctgatctttccccagcccaactacgcagacacgctccttagtgaagagagctgtgagaaaagcgagcctcttctgatgtctgataaggtagatgcaaacaaagaagaacggcgagttcaggttagttttctctttcggtaa

SEQ ID NO: 454941 - DNA, 2637 bp, Homo sapiens
atggggcccaagacactcccacagctcgctgggaaatggcaagtgctgtgcatgttgtccttgtgctgctggggctgggtgtctgggcagcttcgttactcagtggtggaggagtctgagccggggacgctggtggggaatgttgctcaggatctgggcttaaagatgacagatctgttgagccggcggctgcaattgggctctgaggagaatgggcgctatttttccctgagcttgatgagtggtgccctggcagtgaatcaaaagattgaccgagaaagcctatgtggagccagcaccagctgcctgctgccagtgcaggtggtgactgaacaccccctggagctaatccgtgtagaggtagagatcctggatctcaatgacaactctcctagctttgccacccctgagcgagagatgcgcatctcagaatcagcagcatctggggcacgattcccactggacagtgcccaggatccggatgtgggcaccaatactgtgagcttttacactctaagccccaacagccacttctctctgaatgtgaagaccctaaaagatgggaagccattcccagagctggtgctagagcagcagctggatcgtgaagcccaggcaagacatcagctggtgcttactgctgtggatggggggaccccagcccgctcagggaccacccttatctctgtcatcgtgctggacatcaatgataatgctccaaccttccaatcctcagttctacgtgtgggaatcccagagaatgcacccattggtactctgctgctccgcctcaatgccactgatccagacgagggcaccaacggccaactagactattcttttggagaccacacatctgaggcagtgcggaacctctttggcctagaccctagcagtggggcaatccatgtgttgggtcccatagactttgaggagtcacgtttctatgaaattcatgcaagagcccgtgaccagggacagcctgccatggagggccactgtgtgattcaagtggatgtgggggatgtcaatgacaatgccccagaggtgctattggcctctttggccaaccctgtcctagagagcacaccagtgggcacagtagtggggttgtttaatgtgcgagaccgggactcaggtagaaatggtgaagtgagccttgatatctctccggacctgccatttcagattaagccttctgagaaccactactcgctgctaaccagccagcctttggaccgggaggccacatcccactatatcatcgagctgctggccagcgatgctggttcaccttccctacacaaacatctcaccatcaggctcaacatttcagatgtcaatgacaatgcaccccgcttcaaccagcagctttacactgcttacatcctagaaaaccggcctccgggctcccttctttgcactgtggctgcctcagatccagacactggggataatgcccgcctcacctactccattgtaggaaatcaggttcagggagccccagcctcctcctttgtgtatgtcaacccagaggatggacggatctttgcccagcgtacctttgactatgaattgctgcagatgctgcagattgtggtgggggttcgagactccggctctcccccattgcatgccaacacatctctgcatgtgtttgtcctagacgagaatgataatgccccagctgtgctgcacccacggccagactgggaacactcagccccccagcgtctccctcgctctgctcctcctggctccttggtcaccaaggtgacagccgtggatgctgatgcaggccacaatgcgtggctctcctactcactgttgccacagtccacagccccaggactgttcctcgtgtctacacacactggtgaggtgcgcacagcccgggccttactggaggatgactctgacacccagcaggtggtggtcctggtgagggacaatggtgacccttcactctcctccacagccacagtgctgctggttctggaggatgaggaccctgaggaaatgcccaaatccagtgacttcctcatacaccctcctgagcgttcagaccttaccctttacctcattgtggctctagcgaccgtcagtctcttatccctagtcaccttcacctttctgtcagcgaagtgccttcagggaaacgcagacggggacgggggtggagggcagtgctgcaggcgccaggactcaccctccccggacttctataagcagtccagccccaacctgcaggtgagctcggacggcacgctcaagtacatggaggtgacgctgcggcccacagactcgcagagccactgctacaggacgtgcttttcaccggcctcggacggcagtgacttcacttttctaagacccctcagcgttcagcagcccacagctctggcgctggagcctgacgccatccggtcccgctctaatacgctgcgggagcggagccaggtgaggggctcggcgccgccccgggcgacccctgggggcggcactggagaagccgcccgtcctcataagggattgaacttgcatccactcctctccggccggcttggtcgctggctgcgctccacccgattctcgggatcattggaccgtttgcgcgaaaccagagtggccgattaa

SEQ ID NO: 454942 - DNA, 2487 bp, Homo sapiens
atggcagctccaaccaaatgccagctccgcggaagattagtcctgctatgctcgctcctggggatgctatgggaggccagggccagtcagattcgctactcagtgcctgaagagacagaaaagggctatattgtgggcaacatctccaaggacctggctctggagccccgggagctggcggagcgccgagtccgcatcgtctctagaggtaggacgcagcttttctctctgaacccgcgcagcggcaccttggtcaccgcgggtaggatagaccgggaggagctctgtgctcagagcccgcggtgtctggtgaactttaaagtcctggttgaagacagagtgaaactgtacggaatagaaatagaagtaactgatattaacgacagcgccccaaagttccaggccgaaagtctggaagtaaaaattaacgaaatcgcggttcctggagcacgttatccacttccagaagctattgatccggatgttggcgtgaactccctccagagctaccagctcagccccaatcaccacttctccctgaacgtgcagactggagacaatggagccataaacccagagctggtgctggagcgcgccctggacagggaggaggcaactgcccaccacctggtcctcacggcctcggatggcggcgagccgcgtcgctccagcacagtgcgcatccatgtgacagtgttggatacaaatgataatgccccggtttttgctcaacggatttaccgagttaaagtccttgagaacgtgcccccaggcacctggctgcttactgcaacagccagcgacctggatgagggaatcaacggaaaagtggcatacaaattctggaaaattaatgaaaaacaatctctgctattccagcttaatgaaaatactggggaaatatcaacagcaaaaagtctagattatgaagaatgttcattttatgaaatggaaatacaagctgaagatggtgggggattgaaagggtggacaaaagtgctcatttcggtggaagatgtaaatgacaatagacctgaagtgaccattacatctctgtttagcccagtgagagaagacgcacctcagggaacagtaattcttcttttcaatgctcatgaccgagactccgggaagaatggtcaagttgtctgttctatccaggagaatctatcttttacattagaaaattcagaagaagattattacagattgttgacggcccaaattcttgaccgagaaaaagcctcagaatataatatcacggtgactgcaacagacagaggaactccgcccctgtccacagaaattcacatcaccctgcaagtgactgacatcaatgataatccacctgctttctctcaagcctcctactcagtctacctcccggaaaacaacgccagaggtacttccatcttctccgtgattgcctatgaccctgatagcaatgagaattctagagttatttactccttggcagaggataccatccaagggtctcctctctccacctatgtctctattaactcagacactggtgtgctgtatgctctgtgctcctttgactatgagcagtttagagatttgcaaatgcaggtgacggcaagtgacagtggaagcccaccacttagcagcaatgtgtcattgagactgtttgttttggaccagaatgacaatgccccagaaatcctgtaccctgccctccccactgatggttctactggtgtggagctggcaccccgctctgcagagcctggctacctggtgaccaaggtggtggcagtggacagagactcaggccagaatgcttggctctcctaccgcctattcaaggccagtgagccagggctcttctcggtggggctgcacacaggtgaagtgcgcacagctcgggccctgctagatagagatgcgctcaaacagagccttgtggtggctgtacaggaccatggccagccccctctctcggccactgtcacgctcacagtagccatagctgacagcatcccagacatcctggctgacctgggcagtcttcagatccctgcagacctggaggcctcagaccttaccctctacctcgttgtggctgtggcagtcgtctcctgtgtcttcctcaccttcgttatcacgctgctggccctcaggctgaggcactggcactcctcgcatctgctgcgggctaccagtgatgggttggctggtgtgcccacctcacactttgtgggtgtagatggggttcgagctttcctacagacctattctcaggagttctccctcaccgctgactcaaggaagagtcacctgatcttcccccagcccaactatgcagacacactcatcagccagcagagctgtgagaaaaatgagcctttgtgcgtctctgttgattccaagtttcctatagaagacacccctttggttccggtgagttcattttttttctttctttcttttctttttttgttttttgttttgttttgtttttga

SEQ ID NO: 454943 - DNA, 2433 bp, Homo sapiens
atgcagagagccagagaagccgaaatgatgaaaagtcaggtactgtttcccttcctgctgtctttgttctgcggggccatctcccagcagatccgatacacgattccagaggagctagccaacggctcacgggtggggaaacttgccaaggatctggggctcagtgtccgggagttgccaactcgaaaactgcgggttagtgcagaggattatttcaacgttagtttggagagcggggatttgttagtgaacggtaggatagatcgagagaagatttgcggaaggaaacttgagtgtgcactagaattcgaaacggtcgctgaaaacccaatgaatgttttccacgtggttgttgtaatccaagatattaatgacaatgcaccacgtttcgttgcaaaaggcattgacttagaaatttgtgagtcagccttacccggggtaaaattctctctggattctgctcaagatgcagatgtggaaggcaattcactgaagttatacaccatcaaccccaatcaatacttctctctgtcaacgaaggaaagtcctgatggaagtaaatatccggtattactgctggaaaaacctctagacagggaacatcagagctctcatcgcttaatcctgactgccatggatggcggggacccgcctctaagcggcaccacccatatctggatccgagttacggatgccaatgataatgctcccgtgtttagccaggaggtatacagggttagcctccaagaaaacgtaccgtggggaacctccgtgctgcgggtgatggccacagaccaggatgagggcattaatgcagagatcacctatgccttcctcaattccccaataagtaccagcctcttcaatctcaatccaaatactggcgacatcacaaccaatggcacattggattttgaagagacaagtagatatgtgttgagtgtggaagctaaggatggaggagtacacacagctcactgtaatgttcaaatagaaattgttgacgagaatgacaatgccccagaggtgacattcatgtccttctctaaccagattccagaggattcagaccttggaactgtaatagccctcataaaagtgcgagacaaggattctgggcaaaatggcatggtgacatgctatactcaggaagaagttcctttcaaattagaatccacctcgaagaattattacaagctggtgattgctggagccctaaaccgggagcagacagcagactacaacgtcacaatcatagccaccgacaagggcaaaccagccctttcctccaggacaagcatcaccctgcacatctccgacatcaacgacaatgcacctgttttccatcaggcctcctatgtggtccacgtgtctgagaacaacccacctggcgcctccattgcacaagtaagcgcctccgacccggatttgggacccaacggcagagtctcctactctattctggccagtgacctggagccgcgggagctgttgtcctacgtgtccgtgagcccgcagagcggggtggtgttcgcgcagcgcgccttcgaccacgagcagctgcgcgccttcgagctcacactgcaggccagggaccagggctcccccgcgctcagcgccaacgtgagcctgcgcgtgttggtgggcgacctcaatgacaatgcgccacgggtgctgtaccccgcgctggggcctgatggctccgccctcttcgatatggtgccacgcgccgcagagcccggctacctggtgaccaaggtggtggcggtggacgcagactcaggacacaacgcttggctgtcctaccacgtgctgcaggccagcgagcccgggctcttcagcctggggttgcgcacgggtgaggtgcgcacagcgcgtgccttgggcgacagggacgcggcccgccagcgcctgctggtcgctgtgcgtgatggaggacagccgccactctccgccaccgccacgctgcacctaatcttcgcggatagcctgcaagaggtattgccagacctcagcgaccgccctgagccctctgacccccagacggaactgcagttttacctggttgtggccttggccttgatctcagtgctctttctcctcgcggtgattctagcgatcgccctgcgcctgcgacgttcctccagcctcgacactgagggctgctttcaaaccggtctctgctccaagtctgggcccggggttcctcccaaccacagcgaggggactttgccctattcctacaatctatgtattgcctctcattctgcaaagacagagtttaattctctcaacctgacaccggaaatggctccccctcaggatctgctgtgtgatgatccttctatggttgtatgtgccagtaatgaagatcacaaaatcgcttatgacccttctttgtcttcgcacgtgagtttctgcaaatctagttaa

SEQ ID NO: 454944 - DNA, 2472 bp, Homo sapiens
atgaagattcagaaaaagctgactggctgcagcaggctgatgcttctgtgtctttctctggagctgctgttggaagctggggctgggaatattcactactcagtgccggaagagacagacaaaggttccttcgtaggcaacatcgccaaggacctagggctgcaaccccaggagctggcagatggcggagtccgcatcgtctccagaggtaggatgccgcttttcgctctgaatcctagaagtggcagcttgatcaccgcgcgcaggatagaccgggaggagctctgcgctcagagcatgccgtgtctcgtgagttttaatatccttgttgaggataaaatgaagctttttcctgttgaagtagaaataattgatattaatgacaacactccccaattccagttagaggaactggagtttaaaatgaatgaaataacgactccaggtaccagagtctcattgccttttgggcaagaccttgatgtgggtatgaactcactccagagctaccaactcagctctaaccctcatttctccctggatgtgcaacagggagccgatgggcctcaacatccagagatggtgctgcagagtcccttagacagagaagaagaagctgtccaccacctcatcctcacagcttctgatgggggtgaaccagtccgttcagggaccctcagaatttacattcaggtggtggatgcaaatgacaatcctccagcatttactcaggcacaataccatataaatgtccccgaaaacgtgccgctgggtactcagctgctcatggtaaatgccactgaccctgatgagggagccaatggggaagtaacgtactcctttcacaatgtagaccacagagtggcccaaatatttcgtttagattcttacacaggagaaatatcaaataaagaaccactagatttcgaagaatacaaaatgtattcaatggaagttcaagcccaggatggtgcggggctcatggctaaagttaaggtactgatcaaagttttggatgtaaatgataatgccccagaagtgaccatcacctctgtcaccactgcagttccagaaaactttcctcctgggaccataattgctcttatcagtgtgcatgaccaggactcaggagacaatggctacaccacatgtttcattcctggaaatttaccctttaaattggaaaagttagttgataattattaccgtttagtgactgaaagaacactggacagagaacttatctctgggtacaacatcacaataacagcaatagaccaaggaactccagctctatctactgaaactcacatttcactactagtgacagatatcaatgacaactccccagtcttccatcaggactcctactctgcctacattcccgaaaacaaccccagaggagcctccatcttctctgtgagggcccacgacttggacagcaatgagaatgcacaaatcacttactccctaatagaggacactatccagggggcacccctatctgcctacctctccatcaactccgacactggggtcctgtatgcgctgcgatccttcgactatgagcagttccgggacatgcaactgaaagtgatggcgcgggacagtggggatccgcccctcagcagcaacgtgtctctcagcctattcctgctggaccagaacgacaacgcgcccgagatcctgtaccccgccctccccacagatggttctaccggcgtggagctggcgcccctctccgcagagcccggctacctggtgaccaaggtggtggcggtggacagagactcgggccagaacgcctggctgtcctaccgcctgctcaaggccagcgagccgggactcttctcggtgggtctgcacacgggcgaggtgcgcacggcgcgagccctgctggacagagacgcgctcaagcagagtctcgtggtggccgtccaggaccacggccagcccccgctctccgccactgtcacgctcaccgtggccgtggccgacaggatctccgacatcctggccgacctgggcagcctcgagccctccgccaaacccaacgattcggacctcactctgtacctggtggtggcggcggccgcggtctcctgcgtcttcctggccttcgtcatcgtgctgctggcgcacaggctgcggcgctggcacaagtcacgtctgctacaggcttcgggaggcggcttagcgagcatgcccggttcgcactttgtgggcgtggacggggttcgggctttcctgcagacctattcccacgaggtctccctcactgcggactcgcggaagagccacctgattttcccccagcccaactatgcggacacactcatcagccaggagagctgtgagaaaaagggttttctatcagcaccccagtctttacttgaagacaaaaaggaaccattttctcaggtaaacttttgtgatgaatgtatcagctatctagagaaaaataattcttga

SEQ ID NO: 454945 - DNA, 2457 bp, Homo sapiens
atggcgcctccgcagaggcatccgcagcgcagcgagcaggtcctgctcctcacgctcctggggacgctgtggggggccgcggcagcgcagatccgctactctattcccgaggagctggagaaaggctccttcgtaggcaacatcgtcaaggatctgggactggagccccaggagttggcggagcacggagtccgcatcgtctccagaggtaggatgcagcttttctctctgaatccgcgaaacggcagcttggtcaccgcgggtaggatagaccgcgaggagctctgtgctcagagcccgcggtgtctggtgagttttaacatccttgtcgaggataaactgaatctttatcccgtggaagtggaaatagtggacattaatgacaatacaccccgattcttaaaggaagaattggaagtgaaaattctcgaaaacgcagctccatcctctcgttttccactaatggaggtctatgaccctgatgtgggaatgaactcccttcagggatttaagctcagtggtaatagtcacttctcagtggacgtgcaaagcgaagcccatgggcccaagtacccggagctggtgctggagggcacactggaccgggaaggagaagccgtttaccgcctggtccttactgccatggatggcggcgaccctgtccgctcaagcgtcgcccaaattctggtaacagttctagatgtgaatgacaacactccaatgtttactcagcctgtctaccgtgtaagtgttcctgaaaacctgccagtaggcacaccagtgttggcagtgactgccaccgaccaggatgaaggagtccacggggaagtaacttattcctttgtgaagattacagaaaagatctcacaaattttctgtttgaatgttttgactggagaaatttcaacttctgcaaatctagactatgaggactcgagtttttatgagctgggtgttgaagcccgggatgggccaggtcttcgagacagagcgaaagtcttaataactatcttggatgtcaatgataatgtaccagaagtggttgttacatctggaagcagaacaattgctgaaagtgcacctccaggaacagtaatcgccctttttcaagtgttcgatcgagactctggcctgaatggcctggtaacctgttccatcccgagaagtctcccatttgaattggaaaaatcagttggcaattattatcgattagtgacaaatgcagctctagaccgggaagaggtattcttgtacaacatcactgtgacagccacggacaaaggaacaccacctctgtctacagaaacaatcatctctctaaatgtggcagacaccaacgacaacccgcccaccttcccccattcatcctactcagtctatgtccttgaaaacaaccccaggggtgcctccatcttctctgtgaatgcactggaccctgacgtggaccagaacgcccaagtctcctactcactggcagaagacaccctccagggggcgcccctgtcctcctacgtgtccatcaactccgacactgggattctgtacgccctgcgctccttcgactatgagcagttgagagacctacagctgtgggtgacagccagcgacagcggggacccgcctcttagcagcaacgtgtcactgagcctgtttgtgctggaccagaatgacaatgcgcccgagatcctgtaccccgccctccccacagacggttccactggcgtggagctggcgccccgctccgcagagcccggctacctggtgaccaaggtggtggcggtggacagagactcgggccagaacgcctggctgtcctaccgcctgctcaaggccagcgagccaggacttttctcagtgggcctgcacacgggcgaggtgcgcacggcgcgcgccctgctggacagagacgcgctcaagcagagcctagtggtggccgtccaggaccacggccagccccctctctccgccactgtcacgctcaccgtggccgtggccgacaggatccccgacatcctggccgacctgggcagcctcgagccctccgccaaacccaacgattcggacctcactctgtacctggtggtggcggtggccgcggtctcctgcgtcttcctggccttcgtcatcgtgctgctggcgctcagactgcagcgctggcacaagtcacgcctgctgcaggcttcgggaggtggcttagcgagcatgcccggctcgcactttgtgggcgtggaaggggttcgggctttcctgcagacctattcccacgaggtctcactcactgcagactcgcgtaagagtcatctgattttcccccagcccaactatgccgacacgcttatcaaccaggagagctatgagaaaagcgagcctcttctgataactcaggatttacttgaaacgaaaggagaacccaggcaacttcaggtgagtttctttccgcctaagcgggaagagtaa

SEQ ID NO: 454946 - DNA, 1537 bp, Homo sapiens
atggggcccaagacactcccacagctcgctgggaaatggcaagtgctgtgcatgttgtccttgtgctgctggggctgggtgtctgggcagcttcgttactcagtggtggaggagtctgagccggggacgctggtggggaatgttgctcaggatctgggcttaaagatgacagatctgttgagccggcggctgcaattgggctctgaggagaatgggcgctatttttccctgagcttgatgagtggtgccctggcagtgaatcaaaagattgaccgagaaagcctatgtggagccagcaccagctgcctgctgccagtgcaggtggtgactgaacaccccctggagctaatccgtgtagaggtagagatcctggatctcaatgacaactctcctagctttgccacccctgagcgagagatgcgcatctcagaatcagcagcatctggggcacgattcccactggacagtgcccaggatccggatgtgggcaccaatactgtgagcttttacactctaagccccaacagccacttctctctgaatgtgaagaccctaaaagatgggaagccattcccagagctggtgctagagcagcagctggatcgtgaagcccaggcaagacatcagctggtgcttactgctgtggatggggggaccccagcccgctcagggaccacccttatctctgtcatcgtgctggacatcaatgataatgctccaaccttccaatcctcagttctacgtgtgggaatcccagagaatgcacccattggtactctgctgctccgcctcaatgccactgatccagacgagggcaccaacggccaactagactattcttttggagaccacacatctgaggcagtgcggaacctctttggcctagaccctagcagtggggcaatccatgtgttgggtcccatagactttgaggagtcacgtttctatgaaattcatgcaagagcccgtgaccagggacagcctgccatggagggccactgtgtgattcaagtggatgtgggggatgtcaatgacaatgccccagaggtgctattggcctctttggccaaccctgtcctagagagcacaccagtgggcacagtagtggggttgtttaatgtgcgagaccgggactcaggtagaaatggtgaagtgagccttgatatctctccggacctgccatttcagattaagccttctgagaaccactactcgctgctaaccagccagcctttggaccgggaggccacatcccactatatcatcgagctgctggccagcgatgctggttcaccttccctacacaaacatctcaccatcaggctcaacatttcagatgtcaatgacaatgcaccccaccacaatctgcagcatctgcagcaattcatagtcaaaggtacgctgggcaaagatccgtccatcctctgggttgacatacacaaaggaggaggctggggctccctgaacctgatttcctacaatggagtaggtgaggcgggcattatccccagtgtctggatctgaggcagccacagtg

SEQ ID NO: 454947 - DNA, 4462 bp, Homo sapiens
  misc_feature (1)..(1): n is a, c, g, or t
nctacgtaccatttcatagcttgattcctagagtaaaacgcattactgctcctagcgcgggtggtgtctggagctagccgaagattctttgaggtgaaccgggagaccggagagatgtttgtgaacgaccgtctggatcgagaggagctgtgtgggacactgccctcttgcactgtaactctggagttggtagtggagaacccgctggagctgttcagcgtggaagtggtgatccaggacatcaacgacaacaatcctgctttccctacccaggaaatgaaattggagattagcgaggccgtggctccggggacgcgctttccgctcgagagcgcgcacgatcccgatgtgggaagcaactctttacaaacctatgagctgagccgaaatgaatactttgcgcttcgcgtgcagacgcgggaggacagcaccaagtacgcggagctggtgttggagcgcgccctggaccgagaacgggagcctagtctccagttagtgctgacggcgttggacggagggaccccagctctctccgccagcctgcctattcacatcaaggtgctggacgcgaatgacaatgcgcctgtcttcaaccagtccttgtaccgggcgcgcgtcctggaggatgcaccctccggcacgcgcgtggtacaagtccttgcaacggatctggatgaaggccccaacggtgaaattatttactccttcggcagccacaaccgcgccggcgtgcggcaactattcgccttagaccttgtaaccgggatgctgacaatcaagggtcggctggacttcgaggacaccaaactccatgagatttacatccaggccaaagacaagggcgccaatcccgaaggagcacattgcaaagtgttggtggaggttgtggatgtgaatgacaacgccccggagatcacagtcacctccgtgtacagcccagtacccgaggatgcccctctggggactgtcatcgctttgctcagtgtgactgacctggatgctggcgagaacgggctggtgacctgcgaagttccaccgggtctccctttcagccttacttcttccctcaagaattacttcactttgaaaaccagtgcagacctggatcgggagactgtgccagaatacaacctcagcatcaccgcccgagacgccggaaccccttccctctcagcccttacaatagtgcgtgttcaagtgtccgacatcaatgacaaccctccacaatcttctcaatcttcctacgacgtttacattgaagaaaacaacctccccggggctccaatactaaacctaagtgtctgggaccccgacgccccgcagaatgctcggctttctttctttctcttggagcaaggagctgaaaccgggctagtgggtcgctatttcacaataaatcgtgacaatggcatagtgtcatccttagtgcccctagactatgaggatcggcgggaatttgaattaacagctcatatcagcgatgggggcaccccggtcctagccaccaacatcagcgtgaacatatttgtcactgatcgcaatgacaatgccccccaggtcctatatcctcggccaggtgggagctcggtggagatgctgcctcgaggtacctcagctggccacctagtgtcacgggtggtaggctgggacgcggatgcagggcacaatgcctggctctcctacagtctcttgggatcccctaaccagagcctttttgccatagggctgcacactggtcaaatcagtactgcccgtccagtccaagacacagattcacccaggcagactctcacggtcttgatcaaagacaatggggagccttcgctctccaccactgctaccctcactgtgtcagtaaccgaggactctcctgaagcccgagccgagttcccctctggctctgccccccgggagcagaaaaaaaatctcaccttttatctacttctttctctaatcctggtttctgtggggtttgtggtcacagtgttcggagtaatcatattcaaagtttacaagtggaagcagtctagagacctataccgagccccggtgagctcactgtaccgaacaccagggccctccttgcacgcggacgccgtgcggggaggcctgatgtcgccgcacctttaccatcaggtgtatctcaccacggactcccgccgcagcgacccgctgctgaagaaacctggtgcagccagtccactggccagccgccagaacacgctgcggagctgtgatccggtgttctataggcaggtgttgggtgcagagagcgcccctcccggacagcaagccccgcccaacacggactggcgtttctctcaggcccagagacccggcaccagcggctcccaaaatggcgatgacaccggcacctggcccaacaaccagtttgacacagagatgctgcaagccatgatcttggcgtccgccagtgaagctgctgatgggagctccaccctgggagggggtgccggcaccatgggattgagcgcccgctacggaccccagttcaccctgcagcacgtgcccgactaccgccagaatgtctacatcccaggcagcaatgccacactgaccaacgcagctggcaagcgggatggcaaggccccagcaggtggcaatggcaacaagaagaagtcgggcaagaaggagaagaagtaacatggaggccaggccaagagccacagggcggcctctccccaaccagcccagcttctccttacctgcacccaggcctcagagtttcagggctaacccccagaatactggtaggggccaaggccatgctccccttgggaaacagaaacaagtgcccagtcagcacctaccccttcccccccagggggttgaatatgcaaaagcagttccgctgggaacccccatccaatcaactgctgtacccatgggggtagtggggttactgtagacaccaagaaccatttgccacaccccgtttagttacagctgaactcctccatcttccaaatcaatcaggcccatccatcccatgcctccctcctccccaccccactccaacagttcctctttcccgagtaaggtggttggggtgttgaagtaccaagtaacctacaagcctcctagttctgaaaagttggaagggcatcatgacctcttggcctctcctttgattctcaatcttcccccaaagcatggtttggtgccagccccttcacctccttccagagcccaagatcaatgctcaagttttggaggacatgatcaccatccccatggtactgatgcttgctggatttagggagggcattttgctaccaagcctcttcccaacgccctggggaccagtcttctgttttgtttttcattgtttgacgtttccactgcatgccttgacttcccccacctcctcctcaaacaagagactccactgcatgttccaagacagtatggggtggtaagataaggaagggaagtgtgtggatgtggatggtgggggcatggacaaagcttgacacatcaagttatcaaggccttggaggaggctctgtatgtcctcaggggactgacaacatcctccagattccagccataaaccaataactaggctggacccttcccactacataatagggctcagcccaggcagccagctttgggctgagctaacaggaccaatggattaaactggcatttcagtccaaggaagctcgaagcaggtttaggaccaggtccccttgagaggtcagaggggcctctgtgggtgctgggtactccagaggtgccactggtggaagggtcagcggagccccagcaggaagggtgggccagccaggccattcttagtccctgggttggggaggcagggagctagggcagggaccaaatgaacagaaagtctcagcccaggatggggcttcttcaacagggcccctgccctcctgaagcctcagtccttcaccttgccaggtgccgtttctcttccgtgaaggccactgcccaggtccccagtgcgccccctagtggccatagcctggttaaagttccccagtgcctccttgtgcatagaccttcttctcccacccccttctgcccctgggtccccggccatccagcggggctgccagagaaccccagacctgcccttacagtagtgtagcgccccctccctctttcggctggtgtagaatagccagtagtgtagtgcggtgtgcttttacgtgatggcgggtgggcagcgggcggcgggctccgcgcagccgtctgtccttgatctgcccgcggcggcccgtgttgtgttttgtgctgtgtccacgcgctaaggcgaccccctcccccgtactgacttctcctataagcgcttctcttcgcatagtcacgtagctcccaccccaccctcttcctgtgtctcacgcaagttttatactctaatatttatatggctttttttcttcgacaaaaaaataataaaacgtttcttctg

SEQ ID NO: 454948 - DNA, 4381 bp, Homo sapiens
tatgggggggagaataattgactaggtacgatggctcggttttaatcgtgcacggggtgtcggactcggcgcccagcgcccaagcgctaacccgctgaaagtttctcagcgaaatctcagggacgatctggaccccgctgagaggaactgcttttgagtgagatggtcccagaggcctggaggagcggactggaaatgaaattggagattagcgaggccgtggctccggggacgcgctttccgctcgagagcgcgcacgatcccgatgtgggaagcaactctttacaaacctatgagctgagccgaaatgaatactttgcgcttcgcgtgcagacgcgggaggacagcaccaagtacgcggagctggtgttggagcgcgccctggaccgagaacgggagcctagtctccagttagtgctgacggcgttggacggagggaccccagctctctccgccagcctgcctattcacatcaaggtgctggacgcgaatgacaatgcgcctgtcttcaaccagtccttgtaccgggcgcgcgtcctggaggatgcaccctccggcacgcgcgtggtacaagtccttgcaacggatctggatgaaggccccaacggtgaaattatttactccttcggcagccacaaccgcgccggcgtgcggcaactattcgccttagaccttgtaaccgggatgctgacaatcaagggtcggctggacttcgaggacaccaaactccatgagatttacatccaggccaaagacaagggcgccaatcccgaaggagcacattgcaaagtgttggtggaggttgtggatgtgaatgacaacgccccggagatcacagtcacctccgtgtacagcccagtacccgaggatgcccctctggggactgtcatcgctttgctcagtgtgactgacctggatgctggcgagaacgggctggtgacctgcgaagttccaccgggtctccctttcagccttacttcttccctcaagaattacttcactttgaaaaccagtgcagacctggatcgggagactgtgccagaatacaacctcagcatcaccgcccgagacgccggaaccccttccctctcagcccttacaatagtgcgtgttcaagtgtccgacatcaatgacaaccctccacaatcttctcaatcttcctacgacgtttacattgaagaaaacaacctccccggggctccaatactaaacctaagtgtctgggaccccgacgccccgcagaatgctcggctttctttctttctcttggagcaaggagctgaaaccgggctagtgggtcgctatttcacaataaatcgtgacaatggcatagtgtcatccttagtgcccctagactatgaggatcggcgggaatttgaattaacagctcatatcagcgatgggggcaccccggtcctagccaccaacatcagcgtgaacatatttgtcactgatcgcaatgacaatgccccccaggtcctatatcctcggccaggtgggagctcggtggagatgctgcctcgaggtacctcagctggccacctagtgtcacgggtggtaggctgggacgcggatgcagggcacaatgcctggctctcctacagtctcttgggatcccctaaccagagcctttttgccatagggctgcacactggtcaaatcagtactgcccgtccagtccaagacacagattcacccaggcagactctcacggtcttgatcaaagacaatggggagccttcgctctccaccactgctaccctcactgtgtcagtaaccgaggactctcctgaagcccgagccgagttcccctctggctctgccccccgggagcagaaaaaaaatctcaccttttatctacttctttctctaatcctggtttctgtggggtttgtggtcacagtgttcggagtaatcatattcaaagtttacaagtggaagcagtctagagacctataccgagccccggtgagctcactgtaccgaacaccagggccctccttgcacgcggacgccgtgcggggaggcctgatgtcgccgcacctttaccatcaggtgtatctcaccacggactcccgccgcagcgacccgctgctgaagaaacctggtgcagccagtccactggccagccgccagaacacgctgcggagctgtgatccggtgttctataggcaggtgttgggtgcagagagcgcccctcccggacagcaagccccgcccaacacggactggcgtttctctcaggcccagagacccggcaccagcggctcccaaaatggcgatgacaccggcacctggcccaacaaccagtttgacacagagatgctgcaagccatgatcttggcgtccgccagtgaagctgctgatgggagctccaccctgggagggggtgccggcaccatgggattgagcgcccgctacggaccccagttcaccctgcagcacgtgcccgactaccgccagaatgtctacatcccaggcagcaatgccacactgaccaacgcagctggcaagcgggatggcaaggccccagcaggtggcaatggcaacaagaagaagtcgggcaagaaggagaagaagtaacatggaggccaggccaagagccacagggcggcctctccccaaccagcccagcttctccttacctgcacccaggcctcagagtttcagggctaacccccagaatactggtaggggccaaggccatgctccccttgggaaacagaaacaagtgcccagtcagcacctaccccttcccccccagggggttgaatatgcaaaagcagttccgctgggaacccccatccaatcaactgctgtacccatgggggtagtggggttactgtagacaccaagaaccatttgccacaccccgtttagttacagctgaactcctccatcttccaaatcaatcaggcccatccatcccatgcctccctcctccccaccccactccaacagttcctctttcccgagtaaggtggttggggtgttgaagtaccaagtaacctacaagcctcctagttctgaaaagttggaagggcatcatgacctcttggcctctcctttgattctcaatcttcccccaaagcatggtttggtgccagccccttcacctccttccagagcccaagatcaatgctcaagttttggaggacatgatcaccatccccatggtactgatgcttgctggatttagggagggcattttgctaccaagcctcttcccaacgccctggggaccagtcttctgttttgtttttcattgtttgacgtttccactgcatgccttgacttcccccacctcctcctcaaacaagagactccactgcatgttccaagacagtatggggtggtaagataaggaagggaagtgtgtggatgtggatggtgggggcatggacaaagcttgacacatcaagttatcaaggccttggaggaggctctgtatgtcctcaggggactgacaacatcctccagattccagccataaaccaataactaggctggacccttcccactacataatagggctcagcccaggcagccagctttgggctgagctaacaggaccaatggattaaactggcatttcagtccaaggaagctcgaagcaggtttaggaccaggtccccttgagaggtcagaggggcctctgtgggtgctgggtactccagaggtgccactggtggaagggtcagcggagccccagcaggaagggtgggccagccaggccattcttagtccctgggttggggaggcagggagctagggcagggaccaaatgaacagaaagtctcagcccaggatggggcttcttcaacagggcccctgccctcctgaagcctcagtccttcaccttgccaggtgccgtttctcttccgtgaaggccactgcccaggtccccagtgcgccccctagtggccatagcctggttaaagttccccagtgcctccttgtgcatagaccttcttctcccacccccttctgcccctgggtccccggccatccagcggggctgccagagaaccccagacctgcccttacagtagtgtagcgccccctccctctttcggctggtgtagaatagccagtagtgtagtgcggtgtgcttttacgtgatggcgggtgggcagcgggcggcgggctccgcgcagccgtctgtccttgatctgcccgcggcggcccgtgttgtgttttgtgctgtgtccacgcgctaaggcgaccccctcccccgtactgacttctcctataagcgcttctcttcgcatagtcacgtagctcccaccccaccctcttcctgtgtctcacgcaagttttatactctaatatttatatggctttttttcttcgacaaaaaaataataaaacgtttcttctg

SEQ ID NO: 454949 - DNA, 2345 bp, Homo sapiens
gccacgcgtacgcccacgcgatctgccactgctgtcgtgtcggactcggcgcccagcgcccaagcgctaacccgctgaaagtttctcagcgaaatctcagggacgatctggaccccgctgagaggaactgcttttgagtgagatggtcccagaggcctggaggagcggactgcaagccccgcccaacacggactggcgtttctctcaggcccagagacccggcaccagcggctcccaaaatggcgatgacaccggcacctggcccaacaaccagtttgacacagagatgctgcaagccatgatcttggcgtccgccagtgaagctgctgatgggagctccaccctgggagggggtgccggcaccatgggattgagcgcccgctacggaccccagttcaccctgcagcacgtgcccgactaccgccagaatgtctacatcccaggcagcaatgccacactgaccaacgcagctggcaagcgggatggcaaggccccagcaggtggcaatggcaacaagaagaagtcgggcaagaaggagaagaagtaacatggaggccaggccaagagccacagggcggcctctccccaaccagcccagcttctccttacctgcacccaggcctcagagtttcagggctaacccccagaatactggtaggggccaaggccatgctccccttgggaaacagaaacaagtgcccagtcagcacctaccccttcccccccagggggttgaatatgcaaaagcagttccgctgggaacccccatccaatcaactgctgtacccatgggggtagtggggttactgtagacaccaagaaccatttgccacaccccgtttagttacagctgaactcctccatcttccaaatcaatcaggcccatccatcccatgcctccctcctccccaccccactccaacagttcctctttcccgagtaaggtggttggggtgttgaagtaccaagtaacctacaagcctcctagttctgaaaagttggaagggcatcatgacctcttggcctctcctttgattctcaatcttcccccaaagcatggtttggtgccagccccttcacctccttccagagcccaagatcaatgctcaagttttggaggacatgatcaccatccccatggtactgatgcttgctggatttagggagggcattttgctaccaagcctcttcccaacgccctggggaccagtcttctgttttgtttttcattgtttgacgtttccactgcatgccttgacttcccccacctcctcctcaaacaagagactccactgcatgttccaagacagtatggggtggtaagataaggaagggaagtgtgtggatgtggatggtgggggcatggacaaagcttgacacatcaagttatcaaggccttggaggaggctctgtatgtcctcaggggactgacaacatcctccagattccagccataaaccaataactaggctggacccttcccactacataatagggctcagcccaggcagccagctttgggctgagctaacaggaccaatggattaaactggcatttcagtccaaggaagctcgaagcaggtttaggaccaggtccccttgagaggtcagaggggcctctgtgggtgctgggtactccagaggtgccactggtggaagggtcagcggagccccagcaggaagggtgggccagccaggccattcttagtccctgggttggggaggcagggagctagggcagggaccaaatgaacagaaagtctcagcccaggatggggcttcttcaacagggcccctgccctcctgaagcctcagtccttcaccttgccaggtgccgtttctcttccgtgaaggccactgcccaggtccccagtgcgccccctagtggccatagcctggttaaagttccccagtgcctccttgtgcatagaccttcttctcccacccccttctgcccctgggtccccggccatccagcggggctgccagagaaccccagacctgcccttacagtagtgtagcgccccctccctctttcggctggtgtagaatagccagtagtgtagtgcggtgtgcttttacgtgatggcgggtgggcagcgggcggcgggctccgcgcagccgtctgtccttgatctgcccgcggcggcccgtgttgtgttttgtgctgtgtccacgcgctaaggcgaccccctcccccgtactgacttctcctataagcgcttctcttcgcatagtcacgtagctcccaccccaccctcttcctgtgtctcacgcaagttttatactctaatatttatatggctttttttcttcgacaaaaaaataataaaacgtttcttctg

SEQ ID NO: 454950 - DNA, 2498 bp, Homo sapiens
gccacgcgtacgcccacgcgatctgccactgctgtcgtgtcggactcggcgcccagcgcccaagcgctaacccgctgaaagtttctcagcgaaatctcagggacgatctggaccccgctgagaggaactgcttttgagtgagatggtcccagaggcctggaggagcggactggtgtatctcaccacggactcccgccgcagcgacccgctgctgaagaaacctggtgcagccagtccactggccagccgccagaacacgctgcggagctgtgatccggtgttctataggcaggtgttgggtgcagagagcgcccctcccggacagcaagccccgcccaacacggactggcgtttctctcaggcccagagacccggcaccagcggctcccaaaatggcgatgacaccggcacctggcccaacaaccagtttgacacagagatgctgcaagccatgatcttggcgtccgccagtgaagctgctgatgggagctccaccctgggagggggtgccggcaccatgggattgagcgcccgctacggaccccagttcaccctgcagcacgtgcccgactaccgccagaatgtctacatcccaggcagcaatgccacactgaccaacgcagctggcaagcgggatggcaaggccccagcaggtggcaatggcaacaagaagaagtcgggcaagaaggagaagaagtaacatggaggccaggccaagagccacagggcggcctctccccaaccagcccagcttctccttacctgcacccaggcctcagagtttcagggctaacccccagaatactggtaggggccaaggccatgctccccttgggaaacagaaacaagtgcccagtcagcacctaccccttcccccccagggggttgaatatgcaaaagcagttccgctgggaacccccatccaatcaactgctgtacccatgggggtagtggggttactgtagacaccaagaaccatttgccacaccccgtttagttacagctgaactcctccatcttccaaatcaatcaggcccatccatcccatgcctccctcctccccaccccactccaacagttcctctttcccgagtaaggtggttggggtgttgaagtaccaagtaacctacaagcctcctagttctgaaaagttggaagggcatcatgacctcttggcctctcctttgattctcaatcttcccccaaagcatggtttggtgccagccccttcacctccttccagagcccaagatcaatgctcaagttttggaggacatgatcaccatccccatggtactgatgcttgctggatttagggagggcattttgctaccaagcctcttcccaacgccctggggaccagtcttctgttttgtttttcattgtttgacgtttccactgcatgccttgacttcccccacctcctcctcaaacaagagactccactgcatgttccaagacagtatggggtggtaagataaggaagggaagtgtgtggatgtggatggtgggggcatggacaaagcttgacacatcaagttatcaaggccttggaggaggctctgtatgtcctcaggggactgacaacatcctccagattccagccataaaccaataactaggctggacccttcccactacataatagggctcagcccaggcagccagctttgggctgagctaacaggaccaatggattaaactggcatttcagtccaaggaagctcgaagcaggtttaggaccaggtccccttgagaggtcagaggggcctctgtgggtgctgggtactccagaggtgccactggtggaagggtcagcggagccccagcaggaagggtgggccagccaggccattcttagtccctgggttggggaggcagggagctagggcagggaccaaatgaacagaaagtctcagcccaggatggggcttcttcaacagggcccctgccctcctgaagcctcagtccttcaccttgccaggtgccgtttctcttccgtgaaggccactgcccaggtccccagtgcgccccctagtggccatagcctggttaaagttccccagtgcctccttgtgcatagaccttcttctcccacccccttctgcccctgggtccccggccatccagcggggctgccagagaaccccagacctgcccttacagtagtgtagcgccccctccctctttcggctggtgtagaatagccagtagtgtagtgcggtgtgcttttacgtgatggcgggtgggcagcgggcggcgggctccgcgcagccgtctgtccttgatctgcccgcggcggcccgtgttgtgttttgtgctgtgtccacgcgctaaggcgaccccctcccccgtactgacttctcctataagcgcttctcttcgcatagtcacgtagctcccaccccaccctcttcctgtgtctcacgcaagttttatactctaatatttatatggctttttttcttcgacaaaaaaataataaaacgtttcttctg

SEQ ID NO: 454951 - DNA, 9913 bp, Homo sapiens
  misc_feature (9723)..(9723): n is a, c, g, or t
  misc_feature (9734)..(9736): n is a, c, g, or t
  misc_feature (9745)..(9747): n is a, c, g, or t
cagggcagccccagctcagactccccagcgccagcctttacaccgcttcctcctcggaaaaagaagaattttttcttgaactggaactgcaactaaagtccgttcggagatccaaaaatctgcaatacagaggttatttgtaacccggcgtctccaggctggtgagcaagctgaggagagcaagagggatggggagcggcgccggggagctgggccgggctgagaggctgccagtgctctttctcttcctgctgtctttgttctgcccggcgctctgtgagcagatccgctacaggattcccgaggaaatgcccaagggctccgtagtggggaacctcgccacggacctggggttcagcgtccaggagttaccgactcgaaaactgcgcgtcagttcggagaagccttacttcaccgtgagcgcagagagcggggagttgcttgtgagcagcaggctagacagggaggagatatgcgggaagaagccagcttgtgctctggaatttgaggctgttgctgaaaatccactgaacttttatcacgtgaatgtggagatcgaggacattaatgaccacacgccaaaattcacgcaaaattcctttgagctgcaaataagtgagtctgcacagcctggcacacgatttatattaggatctgcccatgatgcggatattggtagcaacacactgcagaattaccaactcagtcccagtgatcatttctcactgataaataaagagaaatcagatggcagtaaataccctgagatggtattgaagacacctttggacagagaaaagcagaaatcctaccacttgactttgactgccttggactttggagctccacccctaagcagcactgcacagatacacgttctagtgactgatgccaatgataatgctccagtgttcagtcaagacgtatacagggtgagcctttcagaaaacgtgtacccggggaccacggtgctacaggtgactgccacggaccaggatgagggtgtcaatgccgagattactttctctttcagtgaagctagccagatcacccaatttgacctgaactctaacaccggggaaattactgttttaaatacattagattttgaagaagtcaaagaatattccatagttttggaagcaagggacggtggaggaatgattgcgcaatgcacagtggaggtagaagtcatagatgaaaatgacaacgccccagaagtgatattccagtctctacccaacctaattatggaggacgccgagctgggaacacatattgctttgctcaaagtccgtgacaaggattccagacacaatggagaagtgacttgtaaattggaaggtgatgttccatttaaaatattaacttcttcaagaaacacgtataaattagtgacagatgctgttctagaccgcgagcagaatccagagtacaatataaccgttacggcaacagatcggggcaagcctcccctctcctccagttccagcatcaccctgcacattggtgatgtaaatgacaacgctccggttttctcacagtcttcctatatagtccacgtggccgagaacaacccgcctggagcctctatttcacaagtcagggcttctgatccggacttggggcccaacggccaagtctcttactgcatcatggccagtgacctggagcagcgggagctgtcatcctacgtgtccataagcgcggagagcggggtggtgttcgcgcagcgcgccttcgaccacgagcagctgcgcgccttcgaactcacactgcaggcccgcgaccagggctcgccagcgctcagcgcgaacgtgagcctgcgcgtgttagtggacgaccgcaacgacaatgcgccacgggtgctgtaccccgcgctgggtcccgacggctctgcgctcttcgatatggtgccgcacgctgcagagcctggctacttggtgaccaaggtagtggcggtggacgcagactcaggacacaacgcctggctgtcctaccacgtgctgcaggctagcgagcccgggctcttcagcctggggctgcgcacgggcgaagtgcgcacagcgcgtgccttaggcgacagggacgccgtccgccagcgccttctggtcgccgtgcgtgacggtggacagccaccactctcggccactgccacgttgcacctggtcttcgccgacagcttgcaggaggtgctgccggatatcactgaccgccccgacccctctgacctccaggctgagctgcagttttacctagtggtggccttggccttgatctcagtgctcttcctcgtggccatgattctggccattgccttgcgcctgcgacgctcctccagccccgcctcctggagctgcttccagcctggtctctgtgttaaatccgaatccgtggttccccccaactacagcgaggggactttgccttattcctacaatctatgtgttgcacatacaggaaagacggagtttaatttcctaaaatgtagtgagcagttgagttcaggacaagacatactttgcggtgattcatctggggccttatttccactttgtaattccagtgaattgacttcccatcaggtgagtttcctttaagtataatttaatgctcattgcctacccatttctccatattcacaagaaaatatacatatttgcaggaaaatatataatttttagatgtcatggatcattttaggaaagttgtagtcagttaaaaagctgtcatatcattctacaaaggaggagtaaagtaggagcaattgtgtggcccaacatttgtttgttttttagccaagcttagatttataaagcaatgagggtgtggttttaaccacaaagtgaaagtgttagacagttgttggctctctcctaaaaagtgaatgagatttttcctatacattttccttcttgttgactaatatatgatgaatacttttttcagcttggatataccataaatataaaaataataaagccaaagaatttaagctaaaattcaacacttttcttaactaatttaactggtatggtctccatagtagtccactgttttgtttcctgtgttaacttcccttttgtttcaaaagctcttagaataaggagtcaactggatttttatgtccatggaccccttgtgattatatgcagtgtacgctgtgtgtgcgtgtgtgtgtgtgtgtgtgtgagagagatccttttacttagaaaaaggtctactatgctcattagaagatcaaaagcagattctccttacttgtaacataggagtttcaggattaatctgtattcaagctcattctatatccttcatcaaagaaaagacaatgttttgtgtctgttgtccctctcacacacagccctaatatataatgtgtaactgccttatctgcagccctaaactaatatagctagaggtcttctaatcattctcctacctctaggaaagaaatatagtcttgaaaactgccaatctggtgtgcatacaaaatatatacaaaataccaaggaacattatatgagccttttgctaggtatatctaagcaactgcttcagttaatggccactttacaaattgctgaaagaaggaaacgtctttcgattcttttttttttctttttttttttttgagacagagtctctgtctgttactcaggctgtagtgcagtggcacaatgatagctccctccagcctcaaactcctgggctcaagcattccttctgcatcagcctcctgactagctggaactcaggctcatgccaccagacctggctaatttttctgttttcagtagagaaaatattttctttcactaatttaactggtatggtttccattgtctacccagttttccatatgcataagaaaatatattcacaggaaaatataaagttttcagatttcatgagtggttttaagaaagttttagtcagtgaaaaaactatcataccagtcttcaaaggaagggtgaaataagttcatctgctacgttgcccaggctggtcttgaagggaaacagacttttttgtagtcatacttatcctttggcttcttagtaagtattatatagtcattactttttgcagttttttagatcaaagtgttaatgtaggtaaagttaattttagaatatatgtaaaagtcaagtctgctttaaatttaatcatctctttggtgaaagggatgggatggagctttgctttttatcatatattcatctgtacctttcaagtattcaaatagaaaaatataaacaatgtaaataaaatagcaaaacaatgtaatatctcataaaactgcaatggtaaaagcatttatcctattgaaattccacaatttttatttgaaaatattatcgacatgtaattcaagtggcatttagaagaataatttaaaagcaacaactctatagaaagcttgtaaaatgattaagtagtttaaaccaaataaaacaatttctgagtcagtcatctccagtaggtctattttagtctcaagataaattcatttctggtgacaactgaagttcttagttatttgttagtatatattggagacatttacaataaagcttagagcacaatgggaaatgaaagtatcatgttttttttaagaccaaatgtattgcagaaatgtgagtaatttaatccgatgctacaatctgatcattctgatctaatctgatcatttaataacactaaataaaaccttcatctcacattctttggctgtttcttttaaaatatgggtttacggataaatcaaataaattcaaaacaaagtaataagcaaatgatttttttttctcagtaatctagtagagtattacatttagaagtaatctgtatctcagtgcagtaactatttaggactgtaagcgccgctgttcacctactggaagacaaatgcaaccgaaaacactcagatctcacacctcacgaagacccgcagatgccacaaactaactgctggactgcagcgaaacccgacccctgtttggaggcactccaggtttccggaggattgtcatctccatagctgcggcaagaaactaaataagacccatttatgcacagtgaagattctgagaggattctgcagcaaaacaacaatggccgctccacagagtcgccccagacgcggcgagctgatcctgctgtgcgcgctgctgggaacgctgtgggaaatcgggaggggacagattcgctactctgtgccagaagagacggacaaaggctccttcgtgggtaatatctccaaggacctggggctggacccccggaagctggcgaagcacggagtccgtatcgtctccagaggtaggacgcagctctttgctctgaacccgcgcagcggcagcttgatcaccgcgggcaggatagatcgggaggagctctgcgctcagagcccgcggtgtctgataaatattaacaccctggttgaggataaaggaaaactctttggggtagaaatagaaataattgatattaacgataataacccaaaattccaggtcgaagatctagaagtaaaaattaacgaaatcgcggttcctggagcacgttatccactcccagaagctgttgacccggatgtgggcgtgaactccctccagagctaccagctcagccccaatcaccacttctccctggacgtgcagactggagacaatggagccataaacccagagctggtgctggagcgcgccctggacagggaggaagaggctgctcaccacctggtcctcacggcctcggatggcggcaagccgcctcgctctagcacagtgcgcatccacgtgacagtgttggatacaaatgacaatgccccggtttttcctcacccgatttaccgagtgaaagtccttgagaacatgcccccaggcacgcggctgcttactgtaacagccagcgacccggatgagggaatcaacggaaaagtggcatacaaattccggaaaattaatgaaaaacaaactccgttattccagcttaatgaaaatactggggaaatatcaatagcaaaaagtctagattatgaagaatgttcattttatgaaatggaaatacaagccgaagatgtgggggcacttctggggaggaccaaattgctcatttcggtggaagatgtaaatgacaatagaccagaagtgatcattacgtctttgtttagcccagtgttagaaaattctcttcccgggacagtaattgccttcttgagtgtgcatgaccaagactctggaaagaatggtcaagttgtctgttacacacgtgataatttaccttttaaattagaaaagtcaataggtaattattatagattagtgacaaggaaatatttggaccgagaaaatgtctctatctacaatatcacagtgatggcctcagatctaggaacaccacctctgtccactgaaactcaaatcgctctgcacgtggcagacattaacgacaaccctcctactttccctcatgcctcctactcagcgtatatcctagagaacaacctgagaggagcctccatcttttccttgactgcacacgaccccgacagccaggagaatgcccaggtcacttactctgtgaccgaggacacgctgcagggggcgcccctgtcctcgtatatctccatcaactctgacaccggtgtcctgtatgcgctgcaatctttcgactatgagcagatccgagacctgcagctactggtaacagccagcgacagcggggacccgcccctcagcagcaacatgtcactgagcctgttcgtgctggaccagaatgacaacgcgcccgagatcctgtaccccgccctccccacagacggttccactggcgtggagctggcgccccgctccgcagagcgtggctacctggtgaccaaggtggtggcggtggacagagactcgggccagaacgcctggctgtcctaccgcctgctcaaggccagcgagccgggactcttctcggtgggtctgcacacgggcgaggtgcgcacggcgcgagccctgctggacagagatgcgctcaagcagagcctcgtggtggccgtccaggaccatggccagccccctctctccgccactgtcacgctcaccgtagccgtggctgacagcatccccgaagtcctgaccgagttgggcagtctgaagccttcggtcgacccgaacgattcgagccttacactctatctcgtggtggcagtggctgccatctcctgtgtcttcctcgcctttgtcgctgtgcttctggggctcaggctgaggcgctggcacaagtcacgcctgctccaggattccggtggcagattggtaggcgtgcctgcctcacattttgtgggtgttgaggaggtacaggctttcctgcagacctattcccaggaagtctccctcaccgccgactcgcggaagagtcacctgatctttccccagcccaactacgcagacatgctcatcagtcaggagggctgtgagaaaaatgattctttgttaacatccgtagattttcatgaatataagaatgaagctgatcatggtcagcaagccccgcccaacacggactggcgtttctctcaggcccagagacccggcaccagcggctcccaaaatggcgatgacaccggcacctggcccaacaaccagtttgacacagagatgctgcaagccatgatcttggcgtccgccagtgaagctgctgatgggagctccaccctgggagggggtgccggcaccatgggattgagcgcccgctacggaccccagttcaccctgcagcacgtgcccgactaccgccagaatgtctacatcccaggcagcaatgccacactgaccaacgcagctggcaagcgggatggcaaggccccagcaggtggcaatggcaacaagaagaagtcgggcaagaaggagaagaagtaacatggaggccaggccaagagccacagggcggcctctccccaaccagcccagcttctccttacctgcacccaggcctcagagtttcagggctaacccccagaatactggtaggggccaaggccatgctccccttgggaaacagaaacaagtgcccagtcagcacctaccccttcccccccagggggttgaatatgcaaaagcagttccgctgggaacccccatccaatcaactgctgtacccatgggggtagtggggttactgtagacaccaagaaccatttgccacaccccgtttagttacagctgaactcctccatcttccaaatcaatcaggcccatccatcccatgcctccctcctccccaccccactccaacagttcctctttcccgagtaaggtggttggggtgttgaagtaccaagtaacctacaagcctcctagttctgaaaagttggaagggcatcatgacctcttggcctctcctttgattctcaatcttcccccaaagcatggtttggtgccagccccttcacctccttccagagcccaagatcaatgctcaagttttggaggacatgatcaccatccccatggtactgatgcttgctggatttagggagggcattttgctaccaagcctcttcccaacgccctggggaccagtcttctgttttgtttttcattgtttgacgtttccactgcatgccttgacttcccccacctcctcctcaaacaagagactccactgcatgttccaagacagtatggggtggtaagataaggaagggaagtgtgtggatgtggatggtgggggcatggacaaagcttgacacatcaagttatcaaggccttggaggaggctctgtatgtcctcaggggactgacaacatcctccagattccagccataaaccaataactaggctggacccttcccactacataatagggctcagcccaggcagccagctttgggctgagctaacaggaccaatggattaaactggcatttcagtccaaggaagctcgaagcaggtttaggaccaggtccccttgagaggtcagaggggcctctgtgggtgctgggtactccagaggtgccactggtggaagggtcagcggagccccagcaggaagggtgggccagccaggccattcttagtccctgggttggggaggcagggagctagggcagggaccaaatgaacagaaagtctcagcccaggatggggcttcttcaacagggcccctgccctcctgaagcctcagtccttcaccttgccaggtgccgtttctcttccgtgaaggccactgcccaggtccccagtgcgccccctagtggccatagcctggttaaagttccccagtgcctccttgtgcatagaccttcttctcccacccccttctgcccctgggtccccggccatccagcggggctgccagagaaccccagacctgcccttacagtagtgtagcgccccctccctctttcggctggtgtagaatagccagtagtgtagtgcggtgtgcttttacgtgatggcgggtgggcagcgggcggcgggctccgcgcagccgtctgtccttgatctgcccgcggcggcccgtgttgtgttttgtgctgtgtccacgcgctaaggcgaccccctcccccgtactgacttctcctataagcgcttctcttcgcatagtcacgtagctcccaccccaccctcttcctgtgtctcacgcaagttttatactctaatatttatatggctttttttcttcgacaaaaaaataataaaacgtttcttctgcaaaaaaanaaggggggcgnnnaaagttccnnngggccagttacgctaccgagttcgtgcaaggggccaatagggagcgattaaagcaggcggcggggttacacgtggcgggaaaaggccctgggctgggaggcccctcggggtgctatggacccccaagagttaccgggaaaaaggtagggacccttggggagtggaa

SEQ ID NO: 454952 - DNA, 10018 bp, Homo sapiens
  misc_feature (9723)..(9723): n is a, c, g, or t
cagggcagccccagctcagactccccagcgccagcctttacaccgcttcctcctcggaaaaagaagaattttttcttgaactggaactgcaactaaagtccgttcggagatccaaaaatctgcaatacagaggttatttgtaacccggcgtctccaggctggtgagcaagctgaggagagcaagagggatggggagcggcgccggggagctgggccgggctgagaggctgccagtgctctttctcttcctgctgtctttgttctgcccggcgctctgtgagcagatccgctacaggattcccgaggaaatgcccaagggctccgtagtggggaacctcgccacggacctggggttcagcgtccaggagttaccgactcgaaaactgcgcgtcagttcggagaagccttacttcaccgtgagcgcagagagcggggagttgcttgtgagcagcaggctagacagggaggagatatgcgggaagaagccagcttgtgctctggaatttgaggctgttgctgaaaatccactgaacttttatcacgtgaatgtggagatcgaggacattaatgaccacacgccaaaattcacgcaaaattcctttgagctgcaaataagtgagtctgcacagcctggcacacgatttatattaggatctgcccatgatgcggatattggtagcaacacactgcagaattaccaactcagtcccagtgatcatttctcactgataaataaagagaaatcagatggcagtaaataccctgagatggtattgaagacacctttggacagagaaaagcagaaatcctaccacttgactttgactgccttggactttggagctccacccctaagcagcactgcacagatacacgttctagtgactgatgccaatgataatgctccagtgttcagtcaagacgtatacagggtgagcctttcagaaaacgtgtacccggggaccacggtgctacaggtgactgccacggaccaggatgagggtgtcaatgccgagattactttctctttcagtgaagctagccagatcacccaatttgacctgaactctaacaccggggaaattactgttttaaatacattagattttgaagaagtcaaagaatattccatagttttggaagcaagggacggtggaggaatgattgcgcaatgcacagtggaggtagaagtcatagatgaaaatgacaacgccccagaagtgatattccagtctctacccaacctaattatggaggacgccgagctgggaacacatattgctttgctcaaagtccgtgacaaggattccagacacaatggagaagtgacttgtaaattggaaggtgatgttccatttaaaatattaacttcttcaagaaacacgtataaattagtgacagatgctgttctagaccgcgagcagaatccagagtacaatataaccgttacggcaacagatcggggcaagcctcccctctcctccagttccagcatcaccctgcacattggtgatgtaaatgacaacgctccggttttctcacagtcttcctatatagtccacgtggccgagaacaacccgcctggagcctctatttcacaagtcagggcttctgatccggacttggggcccaacggccaagtctcttactgcatcatggccagtgacctggagcagcgggagctgtcatcctacgtgtccataagcgcggagagcggggtggtgttcgcgcagcgcgccttcgaccacgagcagctgcgcgccttcgaactcacactgcaggcccgcgaccagggctcgccagcgctcagcgcgaacgtgagcctgcgcgtgttagtggacgaccgcaacgacaatgcgccacgggtgctgtaccccgcgctgggtcccgacggctctgcgctcttcgatatggtgccgcacgctgcagagcctggctacttggtgaccaaggtagtggcggtggacgcagactcaggacacaacgcctggctgtcctaccacgtgctgcaggctagcgagcccgggctcttcagcctggggctgcgcacgggcgaagtgcgcacagcgcgtgccttaggcgacagggacgccgtccgccagcgccttctggtcgccgtgcgtgacggtggacagccaccactctcggccactgccacgttgcacctggtcttcgccgacagcttgcaggaggtgctgccggatatcactgaccgccccgacccctctgacctccaggctgagctgcagttttacctagtggtggccttggccttgatctcagtgctcttcctcgtggccatgattctggccattgccttgcgcctgcgacgctcctccagccccgcctcctggagctgcttccagcctggtctctgtgttaaatccgaatccgtggttccccccaactacagcgaggggactttgccttattcctacaatctatgtgttgcacatacaggaaagacggagtttaatttcctaaaatgtagtgagcagttgagttcaggacaagacatactttgcggtgattcatctggggccttatttccactttgtaattccagtgaattgacttcccatcaggtgagtttcctttaagtataatttaatgctcattgcctacccatttctccatattcacaagaaaatatacatatttgcaggaaaatatataatttttagatgtcatggatcattttaggaaagttgtagtcagttaaaaagctgtcatatcattctacaaaggaggagtaaagtaggagcaattgtgtggcccaacatttgtttgttttttagccaagcttagatttataaagcaatgagggtgtggttttaaccacaaagtgaaagtgttagacagttgttggctctctcctaaaaagtgaatgagatttttcctatacattttccttcttgttgactaatatatgatgaatacttttttcagcttggatataccataaatataaaaataataaagccaaagaatttaagctaaaattcaacacttttcttaactaatttaactggtatggtctccatagtagtccactgttttgtttcctgtgttaacttcccttttgtttcaaaagctcttagaataaggagtcaactggatttttatgtccatggaccccttgtgattatatgcagtgtacgctgtgtgtgcgtgtgtgtgtgtgtgtgtgtgagagagatccttttacttagaaaaaggtctactatgctcattagaagatcaaaagcagattctccttacttgtaacataggagtttcaggattaatctgtattcaagctcattctatatccttcatcaaagaaaagacaatgttttgtgtctgttgtccctctcacacacagccctaatatataatgtgtaactgccttatctgcagccctaaactaatatagctagaggtcttctaatcattctcctacctctaggaaagaaatatagtcttgaaaactgccaatctggtgtgcatacaaaatatatacaaaataccaaggaacattatatgagccttttgctaggtatatctaagcaactgcttcagttaatggccactttacaaattgctgaaagaaggaaacgtctttcgattcttttttttttctttttttttttttgagacagagtctctgtctgttactcaggctgtagtgcagtggcacaatgatagctccctccagcctcaaactcctgggctcaagcattccttctgcatcagcctcctgactagctggaactcaggctcatgccaccagacctggctaatttttctgttttcagtagagaaaatattttctttcactaatttaactggtatggtttccattgtctacccagttttccatatgcataagaaaatatattcacaggaaaatataaagttttcagatttcatgagtggttttaagaaagttttagtcagtgaaaaaactatcataccagtcttcaaaggaagggtgaaataagttcatctgctacgttgcccaggctggtcttgaagggaaacagacttttttgtagtcatacttatcctttggcttcttagtaagtattatatagtcattactttttgcagttttttagatcaaagtgttaatgtaggtaaagttaattttagaatatatgtaaaagtcaagtctgctttaaatttaatcatctctttggtgaaagggatgggatggagctttgctttttatcatatattcatctgtacctttcaagtattcaaatagaaaaatataaacaatgtaaataaaatagcaaaacaatgtaatatctcataaaactgcaatggtaaaagcatttatcctattgaaattccacaatttttatttgaaaatattatcgacatgtaattcaagtggcatttagaagaataatttaaaagcaacaactctatagaaagcttgtaaaatgattaagtagtttaaaccaaataaaacaatttctgagtcagtcatctccagtaggtctattttagtctcaagataaattcatttctggtgacaactgaagttcttagttatttgttagtatatattggagacatttacaataaagcttagagcacaatgggaaatgaaagtatcatgttttttttaagaccaaatgtattgcagaaatgtgagtaatttaatccgatgctacaatctgatcattctgatctaatctgatcatttaataacactaaataaaaccttcatctcacattctttggctgtttcttttaaaatatgggtttacggataaatcaaataaattcaaaacaaagtaataagcaaatgatttttttttctcagtaatctagtagagtattacatttagaagtaatctgtatctcagtgcagtaactatttaggactgtaagcgccgctgttcacctactggaagacaaatgcaaccgaaaacactcagatctcacacctcacgaagacccgcagatgccacaaactaactgctggactgcagcgaaacccgacccctgtttggaggcactccaggtttccggaggattgtcatctccatagctgcggcaagaaactaaataagacccatttatgcacagtgaagattctgagaggattctgcagcaaaacaacaatggccgctccacagagtcgccccagacgcggcgagctgatcctgctgtgcgcgctgctgggaacgctgtgggaaatcgggaggggacagattcgctactctgtgccagaagagacggacaaaggctccttcgtgggtaatatctccaaggacctggggctggacccccggaagctggcgaagcacggagtccgtatcgtctccagaggtaggacgcagctctttgctctgaacccgcgcagcggcagcttgatcaccgcgggcaggatagatcgggaggagctctgcgctcagagcccgcggtgtctgataaatattaacaccctggttgaggataaaggaaaactctttggggtagaaatagaaataattgatattaacgataataacccaaaattccaggtcgaagatctagaagtaaaaattaacgaaatcgcggttcctggagcacgttatccactcccagaagctgttgacccggatgtgggcgtgaactccctccagagctaccagctcagccccaatcaccacttctccctggacgtgcagactggagacaatggagccataaacccagagctggtgctggagcgcgccctggacagggaggaagaggctgctcaccacctggtcctcacggcctcggatggcggcaagccgcctcgctctagcacagtgcgcatccacgtgacagtgttggatacaaatgacaatgccccggtttttcctcacccgatttaccgagtgaaagtccttgagaacatgcccccaggcacgcggctgcttactgtaacagccagcgacccggatgagggaatcaacggaaaagtggcatacaaattccggaaaattaatgaaaaacaaactccgttattccagcttaatgaaaatactggggaaatatcaatagcaaaaagtctagattatgaagaatgttcattttatgaaatggaaatacaagccgaagatgtgggggcacttctggggaggaccaaattgctcatttcggtggaagatgtaaatgacaatagaccagaagtgatcattacgtctttgtttagcccagtgttagaaaattctcttcccgggacagtaattgccttcttgagtgtgcatgaccaagactctggaaagaatggtcaagttgtctgttacacacgtgataatttaccttttaaattagaaaagtcaataggtaattattatagattagtgacaaggaaatatttggaccgagaaaatgtctctatctacaatatcacagtgatggcctcagatctaggaacaccacctctgtccactgaaactcaaatcgctctgcacgtggcagacattaacgacaaccctcctactttccctcatgcctcctactcagcgtatatcctagagaacaacctgagaggagcctccatcttttccttgactgcacacgaccccgacagccaggagaatgcccaggtcacttactctgtgaccgaggacacgctgcagggggcgcccctgtcctcgtatatctccatcaactctgacaccggtgtcctgtatgcgctgcaatctttcgactatgagcagatccgagacctgcagctactggtaacagccagcgacagcggggacccgcccctcagcagcaacatgtcactgagcctgttcgtgctggaccagaatgacaacgcgcccgagatcctgtaccccgccctccccacagacggttccactggcgtggagctggcgccccgctccgcagagcgtggctacctggtgaccaaggtggtggcggtggacagagactcgggccagaacgcctggctgtcctaccgcctgctcaaggccagcgagccgggactcttctcggtgggtctgcacacgggcgaggtgcgcacggcgcgagccctgctggacagagatgcgctcaagcagagcctcgtggtggccgtccaggaccatggccagccccctctctccgccactgtcacgctcaccgtagccgtggctgacagcatccccgaagtcctgaccgagttgggcagtctgaagccttcggtcgacccgaacgattcgagccttacactctatctcgtggtggcagtggctgccatctcctgtgtcttcctcgcctttgtcgctgtgcttctggggctcaggctgaggcgctggcacaagtcacgcctgctccaggattccggtggcagattggtaggcgtgcctgcctcacattttgtgggtgttgaggaggtacaggctttcctgcagacctattcccaggaagtctccctcaccgccgactcgcggaagagtcacctgatctttccccagcccaactacgcagacatgctcatcagtcaggagggctgtgagaaaaatgattctttgttaacatccgtagattttcatgaatataagaatgaagctgatcatggtcagcaagccccgcccaacacggactggcgtttctctcaggcccagagacccggcaccagcggctcccaaaatggcgatgacaccggcacctggcccaacaaccagtttgacacagagatgctgcaagccatgatcttggcgtccgccagtgaagctgctgatgggagctccaccctgggagggggtgccggcaccatgggattgagcgcccgctacggaccccagttcaccctgcagcacgtgcccgactaccgccagaatgtctacatcccaggcagcaatgccacactgaccaacgcagctggcaagcgggatggcaaggccccagcaggtggcaatggcaacaagaagaagtcgggcaagaaggagaagaagtaacatggaggccaggccaagagccacagggcggcctctccccaaccagcccagcttctccttacctgcacccaggcctcagagtttcagggctaacccccagaatactggtaggggccaaggccatgctccccttgggaaacagaaacaagtgcccagtcagcacctaccccttcccccccagggggttgaatatgcaaaagcagttccgctgggaacccccatccaatcaactgctgtacccatgggggtagtggggttactgtagacaccaagaaccatttgccacaccccgtttagttacagctgaactcctccatcttccaaatcaatcaggcccatccatcccatgcctccctcctccccaccccactccaacagttcctctttcccgagtaaggtggttggggtgttgaagtaccaagtaacctacaagcctcctagttctgaaaagttggaagggcatcatgacctcttggcctctcctttgattctcaatcttcccccaaagcatggtttggtgccagccccttcacctccttccagagcccaagatcaatgctcaagttttggaggacatgatcaccatccccatggtactgatgcttgctggatttagggagggcattttgctaccaagcctcttcccaacgccctggggaccagtcttctgttttgtttttcattgtttgacgtttccactgcatgccttgacttcccccacctcctcctcaaacaagagactccactgcatgttccaagacagtatggggtggtaagataaggaagggaagtgtgtggatgtggatggtgggggcatggacaaagcttgacacatcaagttatcaaggccttggaggaggctctgtatgtcctcaggggactgacaacatcctccagattccagccataaaccaataactaggctggacccttcccactacataatagggctcagcccaggcagccagctttgggctgagctaacaggaccaatggattaaactggcatttcagtccaaggaagctcgaagcaggtttaggaccaggtccccttgagaggtcagaggggcctctgtgggtgctgggtactccagaggtgccactggtggaagggtcagcggagccccagcaggaagggtgggccagccaggccattcttagtccctgggttggggaggcagggagctagggcagggaccaaatgaacagaaagtctcagcccaggatggggcttcttcaacagggcccctgccctcctgaagcctcagtccttcaccttgccaggtgccgtttctcttccgtgaaggccactgcccaggtccccagtgcgccccctagtggccatagcctggttaaagttccccagtgcctccttgtgcatagaccttcttctcccacccccttctgcccctgggtccccggccatccagcggggctgccagagaaccccagacctgcccttacagtagtgtagcgccccctccctctttcggctggtgtagaatagccagtagtgtagtgcggtgtgcttttacgtgatggcgggtgggcagcgggcggcgggctccgcgcagccgtctgtccttgatctgcccgcggcggcccgtgttgtgttttgtgctgtgtccacgcgctaaggcgaccccctcccccgtactgacttctcctataagcgcttctcttcgcatagtcacgtagctcccaccccaccctcttcctgtgtctcacgcaagttttatactctaatatttatatggctttttttcttcgacaaaaaaataataaaacgtttcttctgaaaaacaancaacagacaaaccacaacgaacagcaacaataaatacaccaaaaaaaaacagaacaagcacagacacacaccaccaacacacaaacagaggggaaccccacaaaaaaaacacacaaaaaagcacacacaataaaggaccccccaccaatgttcatcgaaaaagggacgcaccaagaaggaacctaataaaaacaggcacgactgcacagtcaaaaaaagacgaggcaggaaaaaagcaacagggccaccgctcgaagacaccacaagtgaggggcaacaaggaggccaacaacca

SEQ ID NO: 454953 - DNA, 10184 bp, Homo sapiens
cagggcagccccagctcagactccccagcgccagcctttacaccgcttcctcctcggaaaaagaagaattttttcttgaactggaactgcaactaaagtccgttcggagatccaaaaatctgcaatacagaggttatttgtaacccggcgtctccaggctggtgagcaagctgaggagagcaagagggatggggagcggcgccggggagctgggccgggctgagaggctgccagtgctctttctcttcctgctgtctttgttctgcccggcgctctgtgagcagatccgctacaggattcccgaggaaatgcccaagggctccgtagtggggaacctcgccacggacctggggttcagcgtccaggagttaccgactcgaaaactgcgcgtcagttcggagaagccttacttcaccgtgagcgcagagagcggggagttgcttgtgagcagcaggctagacagggaggagatatgcgggaagaagccagcttgtgctctggaatttgaggctgttgctgaaaatccactgaacttttatcacgtgaatgtggagatcgaggacattaatgaccacacgccaaaattcacgcaaaattcctttgagctgcaaataagtgagtctgcacagcctggcacacgatttatattaggatctgcccatgatgcggatattggtagcaacacactgcagaattaccaactcagtcccagtgatcatttctcactgataaataaagagaaatcagatggcagtaaataccctgagatggtattgaagacacctttggacagagaaaagcagaaatcctaccacttgactttgactgccttggactttggagctccacccctaagcagcactgcacagatacacgttctagtgactgatgccaatgataatgctccagtgttcagtcaagacgtatacagggtgagcctttcagaaaacgtgtacccggggaccacggtgctacaggtgactgccacggaccaggatgagggtgtcaatgccgagattactttctctttcagtgaagctagccagatcacccaatttgacctgaactctaacaccggggaaattactgttttaaatacattagattttgaagaagtcaaagaatattccatagttttggaagcaagggacggtggaggaatgattgcgcaatgcacagtggaggtagaagtcatagatgaaaatgacaacgccccagaagtgatattccagtctctacccaacctaattatggaggacgccgagctgggaacacatattgctttgctcaaagtccgtgacaaggattccagacacaatggagaagtgacttgtaaattggaaggtgatgttccatttaaaatattaacttcttcaagaaacacgtataaattagtgacagatgctgttctagaccgcgagcagaatccagagtacaatataaccgttacggcaacagatcggggcaagcctcccctctcctccagttccagcatcaccctgcacattggtgatgtaaatgacaacgctccggttttctcacagtcttcctatatagtccacgtggccgagaacaacccgcctggagcctctatttcacaagtcagggcttctgatccggacttggggcccaacggccaagtctcttactgcatcatggccagtgacctggagcagcgggagctgtcatcctacgtgtccataagcgcggagagcggggtggtgttcgcgcagcgcgccttcgaccacgagcagctgcgcgccttcgaactcacactgcaggcccgcgaccagggctcgccagcgctcagcgcgaacgtgagcctgcgcgtgttagtggacgaccgcaacgacaatgcgccacgggtgctgtaccccgcgctgggtcccgacggctctgcgctcttcgatatggtgccgcacgctgcagagcctggctacttggtgaccaaggtagtggcggtggacgcagactcaggacacaacgcctggctgtcctaccacgtgctgcaggctagcgagcccgggctcttcagcctggggctgcgcacgggcgaagtgcgcacagcgcgtgccttaggcgacagggacgccgtccgccagcgccttctggtcgccgtgcgtgacggtggacagccaccactctcggccactgccacgttgcacctggtcttcgccgacagcttgcaggaggtgctgccggatatcactgaccgccccgacccctctgacctccaggctgagctgcagttttacctagtggtggccttggccttgatctcagtgctcttcctcgtggccatgattctggccattgccttgcgcctgcgacgctcctccagccccgcctcctggagctgcttccagcctggtctctgtgttaaatccgaatccgtggttccccccaactacagcgaggggactttgccttattcctacaatctatgtgttgcacatacaggaaagacggagtttaatttcctaaaatgtagtgagcagttgagttcaggacaagacatactttgcggtgattcatctggggccttatttccactttgtaattccagtgaattgacttcccatcaggtgagtttcctttaagtataatttaatgctcattgcctacccatttctccatattcacaagaaaatatacatatttgcaggaaaatatataatttttagatgtcatggatcattttaggaaagttgtagtcagttaaaaagctgtcatatcattctacaaaggaggagtaaagtaggagcaattgtgtggcccaacatttgtttgttttttagccaagcttagatttataaagcaatgagggtgtggttttaaccacaaagtgaaagtgttagacagttgttggctctctcctaaaaagtgaatgagatttttcctatacattttccttcttgttgactaatatatgatgaatacttttttcagcttggatataccataaatataaaaataataaagccaaagaatttaagctaaaattcaacacttttcttaactaatttaactggtatggtctccatagtagtccactgttttgtttcctgtgttaacttcccttttgtttcaaaagctcttagaataaggagtcaactggatttttatgtccatggaccccttgtgattatatgcagtgtacgctgtgtgtgcgtgtgtgtgtgtgtgtgtgtgagagagatccttttacttagaaaaaggtctactatgctcattagaagatcaaaagcagattctccttacttgtaacataggagtttcaggattaatctgtattcaagctcattctatatccttcatcaaagaaaagacaatgttttgtgtctgttgtccctctcacacacagccctaatatataatgtgtaactgccttatctgcagccctaaactaatatagctagaggtcttctaatcattctcctacctctaggaaagaaatatagtcttgaaaactgccaatctggtgtgcatacaaaatatatacaaaataccaaggaacattatatgagccttttgctaggtatatctaagcaactgcttcagttaatggccactttacaaattgctgaaagaaggaaacgtctttcgattcttttttttttctttttttttttttgagacagagtctctgtctgttactcaggctgtagtgcagtggcacaatgatagctccctccagcctcaaactcctgggctcaagcattccttctgcatcagcctcctgactagctggaactcaggctcatgccaccagacctggctaatttttctgttttcagtagagaaaatattttctttcactaatttaactggtatggtttccattgtctacccagttttccatatgcataagaaaatatattcacaggaaaatataaagttttcagatttcatgagtggttttaagaaagttttagtcagtgaaaaaactatcataccagtcttcaaaggaagggtgaaataagttcatctgctacgttgcccaggctggtcttgaagggaaacagacttttttgtagtcatacttatcctttggcttcttagtaagtattatatagtcattactttttgcagttttttagatcaaagtgttaatgtaggtaaagttaattttagaatatatgtaaaagtcaagtctgctttaaatttaatcatctctttggtgaaagggatgggatggagctttgctttttatcatatattcatctgtacctttcaagtattcaaatagaaaaatataaacaatgtaaataaaatagcaaaacaatgtaatatctcataaaactgcaatggtaaaagcatttatcctattgaaattccacaatttttatttgaaaatattatcgacatgtaattcaagtggcatttagaagaataatttaaaagcaacaactctatagaaagcttgtaaaatgattaagtagtttaaaccaaataaaacaatttctgagtcagtcatctccagtaggtctattttagtctcaagataaattcatttctggtgacaactgaagttcttagttatttgttagtatatattggagacatttacaataaagcttagagcacaatgggaaatgaaagtatcatgttttttttaagaccaaatgtattgcagaaatgtgagtaatttaatccgatgctacaatctgatcattctgatctaatctgatcatttaataacactaaataaaaccttcatctcacattctttggctgtttcttttaaaatatgggtttacggataaatcaaataaattcaaaacaaagtaataagcaaatgatttttttttctcagtaatctagtagagtattacatttagaagtaatctgtatctcagtgcagtaactatttaggactgtaagcgccgctgttcacctactggaagacaaatgcaaccgaaaacactcagatctcacacctcacgaagacccgcagatgccacaaactaactgctggactgcagcgaaacccgacccctgtttggaggcactccaggtttccggaggattgtcatctccatagctgcggcaagaaactaaataagacccatttatgcacagtgaagattctgagaggattctgcagcaaaacaacaatggccgctccacagagtcgccccagacgcggcgagctgatcctgctgtgcgcgctgctgggaacgctgtgggaaatcgggaggggacagattcgctactctgtgccagaagagacggacaaaggctccttcgtgggtaatatctccaaggacctggggctggacccccggaagctggcgaagcacggagtccgtatcgtctccagaggtaggacgcagctctttgctctgaacccgcgcagcggcagcttgatcaccgcgggcaggatagatcgggaggagctctgcgctcagagcccgcggtgtctgataaatattaacaccctggttgaggataaaggaaaactctttggggtagaaatagaaataattgatattaacgataataacccaaaattccaggtcgaagatctagaagtaaaaattaacgaaatcgcggttcctggagcacgttatccactcccagaagctgttgacccggatgtgggcgtgaactccctccagagctaccagctcagccccaatcaccacttctccctggacgtgcagactggagacaatggagccataaacccagagctggtgctggagcgcgccctggacagggaggaagaggctgctcaccacctggtcctcacggcctcggatggcggcaagccgcctcgctctagcacagtgcgcatccacgtgacagtgttggatacaaatgacaatgccccggtttttcctcacccgatttaccgagtgaaagtccttgagaacatgcccccaggcacgcggctgcttactgtaacagccagcgacccggatgagggaatcaacggaaaagtggcatacaaattccggaaaattaatgaaaaacaaactccgttattccagcttaatgaaaatactggggaaatatcaatagcaaaaagtctagattatgaagaatgttcattttatgaaatggaaatacaagccgaagatgtgggggcacttctggggaggaccaaattgctcatttcggtggaagatgtaaatgacaatagaccagaagtgatcattacgtctttgtttagcccagtgttagaaaattctcttcccgggacagtaattgccttcttgagtgtgcatgaccaagactctggaaagaatggtcaagttgtctgttacacacgtgataatttaccttttaaattagaaaagtcaataggtaattattatagattagtgacaaggaaatatttggaccgagaaaatgtctctatctacaatatcacagtgatggcctcagatctaggaacaccacctctgtccactgaaactcaaatcgctctgcacgtggcagacattaacgacaaccctcctactttccctcatgcctcctactcagcgtatatcctagagaacaacctgagaggagcctccatcttttccttgactgcacacgaccccgacagccaggagaatgcccaggtcacttactctgtgaccgaggacacgctgcagggggcgcccctgtcctcgtatatctccatcaactctgacaccggtgtcctgtatgcgctgcaatctttcgactatgagcagatccgagacctgcagctactggtaacagccagcgacagcggggacccgcccctcagcagcaacatgtcactgagcctgttcgtgctggaccagaatgacaacgcgcccgagatcctgtaccccgccctccccacagacggttccactggcgtggagctggcgccccgctccgcagagcgtggctacctggtgaccaaggtggtggcggtggacagagactcgggccagaacgcctggctgtcctaccgcctgctcaaggccagcgagccgggactcttctcggtgggtctgcacacgggcgaggtgcgcacggcgcgagccctgctggacagagatgcgctcaagcagagcctcgtggtggccgtccaggaccatggccagccccctctctccgccactgtcacgctcaccgtagccgtggctgacagcatccccgaagtcctgaccgagttgggcagtctgaagccttcggtcgacccgaacgattcgagccttacactctatctcgtggtggcagtggctgccatctcctgtgtcttcctcgcctttgtcgctgtgcttctggggctcaggctgaggcgctggcacaagtcacgcctgctccaggattccggtggcagattggtaggcgtgcctgcctcacattttgtgggtgttgaggaggtacaggctttcctgcagacctattcccaggaagtctccctcaccgccgactcgcggaagagtcacctgatctttccccagcccaactacgcagacatgctcatcagtcaggagggctgtgagaaaaatgattctttgttaacatccgtagattttcatgaatataagaatgaagctgatcatggtcagcaagccccgcccaacacggactggcgtttctctcaggcccagagacccggcaccagcggctcccaaaatggcgatgacaccggcacctggcccaacaaccagtttgacacagagatgctgcaagccatgatcttggcgtccgccagtgaagctgctgatgggagctccaccctgggagggggtgccggcaccatgggattgagcgcccgctacggaccccagttcaccctgcagcacgtgcccgactaccgccagaatgtctacatcccaggcagcaatgccacactgaccaacgcagctggcaagcgggatggcaaggccccagcaggtggcaatggcaacaagaagaagtcgggcaagaaggagaagaagtaacatggaggccaggccaagagccacagggcggcctctccccaaccagcccagcttctccttacctgcacccaggcctcagagtttcagggctaacccccagaatactggtaggggccaaggccatgctccccttgggaaacagaaacaagtgcccagtcagcacctaccccttcccccccagggggttgaatatgcaaaagcagttccgctgggaacccccatccaatcaactgctgtacccatgggggtagtggggttactgtagacaccaagaaccatttgccacaccccgtttagttacagctgaactcctccatcttccaaatcaatcaggcccatccatcccatgcctccctcctccccaccccactccaacagttcctctttcccgagtaaggtggttggggtgttgaagtaccaagtaacctacaagcctcctagttctgaaaagttggaagggcatcatgacctcttggcctctcctttgattctcaatcttcccccaaagcatggtttggtgccagccccttcacctccttccagagcccaagatcaatgctcaagttttggaggacatgatcaccatccccatggtactgatgcttgctggatttagggagggcattttgctaccaagcctcttcccaacgccctggggaccagtcttctgttttgtttttcattgtttgacgtttccactgcatgccttgacttcccccacctcctcctcaaacaagagactccactgcatgttccaagacagtatggggtggtaagataaggaagggaagtgtgtggatgtggatggtgggggcatggacaaagcttgacacatcaagttatcaaggccttggaggaggctctgtatgtcctcaggggactgacaacatcctccagattccagccataaaccaataactaggctggacccttcccactacataatagggctcagcccaggcagccagctttgggctgagctaacaggaccaatggattaaactggcatttcagtccaaggaagctcgaagcaggtttaggaccaggtccccttgagaggtcagaggggcctctgtgggtgctgggtactccagaggtgccactggtggaagggtcagcggagccccagcaggaagggtgggccagccaggccattcttagtccctgggttggggaggcagggagctagggcagggaccaaatgaacagaaagtctcagcccaggatggggcttcttcaacagggcccctgccctcctgaagcctcagtccttcaccttgccaggtgccgtttctcttccgtgaaggccactgcccaggtccccagtgcgccccctagtggccatagcctggttaaagttccccagtgcctccttgtgcatagaccttcttctcccacccccttctgcccctgggtccccggccatccagcggggctgccagagaaccccagacctgcccttacagtagtgtagcgccccctccctctttcggctggtgtagaatagccagtagtgtagtgcggtgtgcttttacgtgatggcgggtgggcagcgggcggcgggctccgcgcagccgtctgtccttgatctgcccgcggcggcccgtgttgtgttttgtgctgtgtccacgcgctaaggcgaccccctcccccgtactgacttctcctataagcgcttctcttcgcatagtcacgtagctcccaccccaccctcttcctgtgtctcacgcaagttttatactctaatatttatatggctttttttcttcgacaaaaaaataataaaacgtttcttctgagggggggcggttgtaaagaagttctctcccgtgcggggggccacgatgttaacggagtaccccaggttctatcttcgtcactaacggtgggccctcatagtgatgagagatttcgatattaattagcgcaatgggcatcgtggcctcgcctgtttacaccaagcctgttctgcgtgctgggaaaacaactgcggctaacttgggggaatcctcttggtgaaaggagacccctatacttgtccgggtgggtgtggacagttattttgggcacaatgctacctttacagaagcattttaaagggttcatacgggatagagttaatagaagtttttgaacgcgtgcttctagggggtgttgaacagttatgacggcaatattgtttgggaaggcttgtgaaaaagtttaggcgaaaacgggagatactgatttcgtggagacttgtttatagcagcggtgtcttgtggaaaa

SEQ ID NO: 454954 - DNA, 8305 bp, Homo sapiens
cagggcagccccagctcagactccccagcgccagcctttacaccgcttcctcctcggaaaaagaagaattttttcttgaactggaactgcaactaaagtccgttcggagatccaaaaatctgcaatacagaggttatttgtaacccggcgtctccaggctggtgagcaagctgaggagagcaagagggatggggagcggcgccggggagctgggccgggctgagaggctgccagtgctctttctcttcctgctgtctttgttctgcccggcgctctgtgagcagatccgctacaggattcccgaggaaatgcccaagggctccgtagtggggaacctcgccacggacctggggttcagcgtccaggagttaccgactcgaaaactgcgcgtcagttcggagaagccttacttcaccgtgagcgcagagagcggggagttgcttgtgagcagcaggctagacagggaggagatatgcgggaagaagccagcttgtgctctggaatttgaggctgttgctgaaaatccactgaacttttatcacgtgaatgtggagatcgaggacattaatgaccacacgccaaaattcacgcaaaattcctttgagctgcaaataagtgagtctgcacagcctggcacacgatttatattaggatctgcccatgatgcggatattggtagcaacacactgcagaattaccaactcagtcccagtgatcatttctcactgataaataaagagaaatcagatggcagtaaataccctgagatggtattgaagacacctttggacagagaaaagcagaaatcctaccacttgactttgactgccttggactttggagctccacccctaagcagcactgcacagatacacgttctagtgactgatgccaatgataatgctccagtgttcagtcaagacgtatacagggtgagcctttcagaaaacgtgtacccggggaccacggtgctacaggtgactgccacggaccaggatgagggtgtcaatgccgagattactttctctttcagtgaagctagccagatcacccaatttgacctgaactctaacaccggggaaattactgttttaaatacattagattttgaagaagtcaaagaatattccatagttttggaagcaagggacggtggaggaatgattgcgcaatgcacagtggaggtagaagtcatagatgaaaatgacaacgccccagaagtgatattccagtctctacccaacctaattatggaggacgccgagctgggaacacatattgctttgctcaaagtccgtgacaaggattccagacacaatggagaagtgacttgtaaattggaaggtgatgttccatttaaaatattaacttcttcaagaaacacgtataaattagtgacagatgctgttctagaccgcgagcagaatccagagtacaatataaccgttacggcaacagatcggggcaagcctcccctctcctccagttccagcatcaccctgcacattggtgatgtaaatgacaacgctccggttttctcacagtcttcctatatagtccacgtggccgagaacaacccgcctggagcctctatttcacaagtcagggcttctgatccggacttggggcccaacggccaagtctcttactgcatcatggccagtgacctggagcagcgggagctgtcatcctacgtgtccataagcgcggagagcggggtggtgttcgcgcagcgcgccttcgaccacgagcagctgcgcgccttcgaactcacactgcaggcccgcgaccagggctcgccagcgctcagcgcgaacgtgagcctgcgcgtgttagtggacgaccgcaacgacaatgcgccacgggtgctgtaccccgcgctgggtcccgacggctctgcgctcttcgatatggtgccgcacgctgcagagcctggctacttggtgaccaaggtagtggcggtggacgcagactcaggacacaacgcctggctgtcctaccacgtgctgcaggctagcgagcccgggctcttcagcctggggctgcgcacgggcgaagtgcgcacagcgcgtgccttaggcgacagggacgccgtccgccagcgccttctggtcgccgtgcgtgacggtggacagccaccactctcggccactgccacgttgcacctggtcttcgccgacagcttgcaggaggtgctgccggatatcactgaccgccccgacccctctgacctccaggctgagctgcagttttacctagtggtggccttggccttgatctcagtgctcttcctcgtggccatgattctggccattgccttgcgcctgcgacgctcctccagccccgcctcctggagctgcttccagcctggtctctgtgttaaatccgaatccgtggttccccccaactacagcgaggggactttgccttattcctacaatctatgtgttgcacatacaggaaagacggagtttaatttcctaaaatgtagtgagcagttgagttcaggacaagacatactttgcggtgattcatctggggccttatttccactttgtaattccagtgaattgacttcccatcaggtgagtttcctttaagtataatttaatgctcattgcctacccatttctccatattcacaagaaaatatacatatttgcaggaaaatatataatttttagatgtcatggatcattttaggaaagttgtagtcagttaaaaagctgtcatatcattctacaaaggaggagtaaagtaggagcaattgtgtggcccaacatttgtttgttttttagccaagcttagatttataaagcaatgagggtgtggttttaaccacaaagtgaaagtgttagacagttgttggctctctcctaaaaagtgaatgagatttttcctatacattttccttcttgttgactaatatatgatgaatacttttttcagcttggatataccataaatataaaaataataaagccaaagaatttaagctaaaattcaacacttttcttaactaatttaactggtatggtctccatagtagtccactgttttgtttcctgtgttaacttcccttttgtttcaaaagctcttagaataaggagtcaactggatttttatgtccatggaccccttgtgattatatgcagtgtacgctgtgtgtgcgtgtgtgtgtgtgtgtgtgtgagagagatccttttacttagaaaaaggtctactatgctcattagaagatcaaaagcagattctccttacttgtaacataggagtttcaggattaatctgtattcaagctcattctatatccttcatcaaagaaaagacaatgttttgtgtctgttgtccctctcacacacagccctaatatataatgtgtaactgccttatctgcagccctaaactaatatagctagaggtcttctaatcattctcctacctctaggaaagaaatatagtcttgaaaactgccaatctggtgtgcatacaaaatatatacaaaataccaaggaacattatatgagccttttgctaggtatatctaagcaactgcttcagttaatggccactttacaaattgctgaaagaaggaaacgtctttcgattcttttttttttctttttttttttttgagacagagtctctgtctgttactcaggctgtagtgcagtggcacaatgatagctccctccagcctcaaactcctgggctcaagcattccttctgcatcagcctcctgactagctggaactcaggctcatgccaccagacctggctaatttttctgttttcagtagagaaaatattttctttcactaatttaactggtatggtttccattgtctacccagttttccatatgcataagaaaatatattcacaggaaaatataaagttttcagatttcatgagtggttttaagaaagttttagtcagtgaaaaaactatcataccagtcttcaaaggaagggtgaaataagttcatctgctacgttgcccaggctggtcttgaagggaaacagacttttttgtagtcatacttatcctttggcttcttagtaagtattatatagtcattactttttgcagttttttagatcaaagtgttaatgtaggtaaagttaattttagaatatatgtaaaagtcaagtctgctttaaatttaatcatctctttggtgaaagggatgggatggagctttgctttttatcatatattcatctgtacctttcaagtattcaaatagaaaaatataaacaatgtaaataaaatagcaaaacaatgtaatatctcataaaactgcaatggtaaaagcatttatcctattgaaattccacaatttttatttgaaaatattatcgacatgtaattcaagtggcatttagaagaataatttaaaagcaacaactctatagaaagcttgtaaaatgattaagtagtttaaaccaaataaaacaatttctgagtcagtcatctccagtaggtctattttagtctcaagataaattcatttctggtgacaactgaagttcttagttatttgttagtatatattggagacatttacaataaagcttagagcacaatgggaaatgaaagtatcatgttttttttaagaccaaatgtattgcagaaatgtgagtaatttaatccgatgctacaatctgatcattctgatctaatctgatcatttaataacactaaataaaaccttcatctcacattctttggctgtttcttttaaaatatgggtttacggataaatcaaataaattcaaaacaaagtaataagcaaatgatttttttttctcagtaatctagtagagtattacatttagaagtaatctgtatctcagtgcagtaactatttaggactgtaagcgccgctgttcacctactggaagacaaatgcaaccgaaaacactcagatctcacacctcacgaagacccgcagatgccacaaactaactgctggactgcagcgaaacccgacccctgtttggaggcactccaggtttccggaggattgtcatctccatagctgcggcaagaaactaaataagacccatttatgcacagtgaagattctgagaggattctgcagcaaaacaacaatggccgctccacagagtcgccccagacgcggcgagctgatcctgctgtgcgcgctgctgggaacgctgtgggaaatcgggaggggacagattcgctactctgtgccagaagagacggacaaaggctccttcgtgggtaatatctccaaggacctggggctggacccccggaagctggcgaagcacggagtccgtatcgtctccagaggtaggacgcagctctttgctctgaacccgcgcagcggcagcttgatcaccgcgggcaggatagatcgggaggagctctgcgctcagagcccgcggtgtctgataaatattaacaccctggttgaggataaaggaaaactctttggggtagaaatagaaataattgatattaacgataataacccaaaattccaggtcgaagatctagaagtaaaaattaacgaaatcgcggttcctggagcacgttatccactcccagaagctgttgacccggatgtgggcgtgaactccctccagagctaccagctcagccccaatcaccacttctccctggacgtgcagactggagacaatggagccataaacccagagctggtgctggagcgcgccctggacagggaggaagaggctgctcaccacctggtcctcacggcctcggatggcggcaagccgcctcgctctagcacagtgcgcatccacgtgacagtgttggatacaaatgacaatgccccggtttttcctcacccgatttaccgagtgaaagtccttgagaacatgcccccaggcacgcggctgcttactgtaacagccagcgacccggatgagggaatcaacggaaaagtggcatacaaattccggaaaattaatgaaaaacaaactccgttattccagcttaatgaaaatactggggaaatatcaatagcaaaaagtctagattatgaagaatgttcattttatgaaatggaaatacaagccgaagatgtgggggcacttctggggaggaccaaattgctcatttcggtggaagatgtaaatgacaatagaccagaagtgatcattacgtctttgtttagcccagtgttagaaaattctcttcccgggacagtaattgccttcttgagtgtgcatgaccaagactctggaaagaatggtcaagttgtctgttacacacgtgataatttaccttttaaattagaaaagtcaataggtaattattatagattagtgacaaggaaatatttggaccgagaaaatgtctctatctacaatatcacagtgatggcctcagatctaggaacaccacctctgtccactgaaactcaaatcgctctgcacgtggcagacattaacgacaaccctcctactttccctcatgcctcctactcagcgtatatcctagagaacaacctgagaggagcctccatcttttccttgactgcacacgaccccgacagccaggagaatgcccaggtcacttactctgtgaccgaggacacgctgcagggggcgcccctgtcctcgtatatctccatcaactctgacaccggtgtcctgtatgcgctgcaatctttcgactatgagcagatccgagacctgcagctactggtaacagccagcgacagcggggacccgcccctcagcagcaacatgtcactgagcctgttcgtgctggaccagaatgacaacgcgcccgagatcctgtaccccgccctccccacagacggttccactggcgtggagctggcgccccgctccgcagagcgtggctacctggtgaccaaggtggtggcggtggacagagactcgggccagaacgcctggctgtcctaccgcctgctcaaggccagcgagccgggactcttctcggtgggtctgcacacgggcgaggtgcgcacggcgcgagccctgctggacagagatgcgctcaagcagagcctcgtggtggccgtccaggaccatggccagccccctctctccgccactgtcacgctcaccgtagccgtggctgacagcatccccgaagtcctgaccgagttgggcagtctgaagccttcggtcgacccgaacgattcgagccttacactctatctcgtggtggcagtggctgccatctcctgtgtcttcctcgcctttgtcgctgtgcttctggggctcaggctgaggcgctggcacaagtcacgcctgctccaggattccggtggcagattggtaggcgtgcctgcctcacattttgtgggtgttgaggaggtacaggctttcctgcagacctattcccaggaagtctccctcaccgccgactcgcggaagagtcacctgatctttccccagcccaactacgcagacatgctcatcagtcaggagggctgtgagaaaaatgattctttgttaacatccgtagattttcatgaatataagaatgaagctgatcatggtcagcaagccccgcccaacacggactggcgtttctctcaggcccagagacccggcaccagcggctcccaaaatggcgatgacaccggcacctggcccaacaaccagtttgacacagagatgctgcaagccatgatcttggcgtccgccagtgaagctgctgatgggagctccaccctgggagggggtgccggcaccatgggattgagcgcccgctacggaccccagttcaccctgcagcacgtgcccgactaccgccagaatgtctacatcccaggcagcaatgccacactgaccaacgcagctggcaagcgggatggcaaggccccagcaggtggcaatggcaacaagaagaagtcgggcaagaaggagaagaagtaacatggaggccaggccaagagccacagggcggcctctccccaaccagcccagcttctccttacctgcacccaggcctcagagtttcagggctaacccccagaatactggtaggggccaaggccatgctccccttgggaaacagaaacaagtgcccagtcagcacctaccccttcccccccagggggttgaatatgcaaaagcagttccgctgggaacccccatccaatcaactgctgtacccatgggggtagtggggttactgtagacaccaagaaccatttgccacaccccgtttagttacagctgaactcctccatcttccaaatcaatcattccatcatacaagccccattaccgcggggattctttaaaatcggactgcaggcaat

SEQ ID NO: 454955 - DNA, 2755 bp, Homo sapiens
gcggggaaagggagataggtgtctccagctgctgtggctgtttggggcgggtcggcttcatccgcgtctcaggagcaagtagagaattagcgggcggcagcaatgctccgcaaggtgagaagctggacagaaatctggcggtgggctacccttttgttcctcttttaccacctgggttacgtttgtgggcagatccgctacccggtcccagaggagtcacaggaagggacttttgtagggaatgtcgctcaagatttcctgctggatacggacagtctgtcagctcgcaggctgcaggtcgctggagaggtgaaccaaagacacttccgtgtggatttggacagcggagccctgctcatcaagaacccaatcgaccgagaggcactgtgtgggctcagtgccagctgcatcgtgcccctggagtttgtcaccgaaggtcctttggaaatgtaccgagcagaggtagagatcgtagatgtgaatgatcacgccccccgttttccgcggcagcagctggacttggaaattggggaggcagctcctccaggacagcgtttcccgttggaaaaggctcaggatgcagatgtggggagcaattcgattagcagctataggctgagctccaatgaacactttgcactggatgtgaagaagcgcagcgacggcagcctggtcccagagctgctcctggagaagcctttggatcgagagaagcaatcggactaccgcctggtgctgactgctgtcgatggagggaacccgccgagatctggcaccgcagagctccgggtatccgtgctggacgtaaacgacaacgccccagccttccagcaatccagctacaggattagtgtgttggagagcgcaccagcgggcatggtgctcatccagctcaatgcctcagacccggacctgggtcccagtggtaacgtcaccttttatttcagtggtcatacccctgatcgtgtaagaaacctctttagcctgcaccccactactggaaagcttactcttttggggcccctagactttgagagtgagaattactatgaatttgatgtgcgggctcgcgatgggggttctccagccatggagcaacattgcagccttcgagtggatctgctggacgtaaatgacaatgccccttacatcacagtgacctcagagcttggaaccctccccgagagtgcagaacctggcactgtggtggcacttatcagtgtgcaggatccagactcagggtcaaacggagatgtgagcctccgcattcctgaccacttgccatttgccctcaagtctgccttcaggaaccagttctccctggtgactgctggacccttggatcgagaggccaaatctagctatgacatcatggtcactgcttctgatgctgggaaccctcctctcagtacccacagaactattttcctcaatatttcagatgtgaatgataatccaccctctttctttcagaggtcacatgaggtgtttgttcctgagaacaatcgcccaggggacctgctttgctcccttgcagcctctgacccagactctggcttgaatgcgcttatctcctactcactcctggagcccaggaatcgagatgtatcagcttcctctttcatctctctgaacccccagacaggagctgttcatgctactcgatcctttgactatgagcaaacccagacactgcagtttgaggtgcaggcccgggatcggggcaacccaccccttagcagcactgtaacagttcgtctatttgtgctggacctcaatgacaatgctccagctgtgctccgtcctcgggcccggcctggttccttatgtccccaagcactgcctccatcagttggtgctggccacctaatcacaaaggtgactgctgtggacttggattcaggttacaatgcttgggtttcctatcagctcctggaggccccagatcccagcctgtttgcagtctctcgatatgctggggaggtgcggacggctgttcctatcccagctgacctcccaccacagaagctggtcattgtggtaaaggatagtggtagtccaccactctctacctctgttactctcttagtgtccttagaggaagacactcatccagttgtcccagatcttcgagaatcttcagctccaagggaaggagaatctcgtctaaccctctacttggctgtgtccctagtggcaatttgctttgtctcctttggctcattcgtggcactactctctaagtgtcttcgtggggcagcctgtggagtcacatgctttcctgctggcacctgtgcctgtctcaccagatctcgaaggagggaggggcttcccccttccaatgggatcctccgaatccagctagggtcagatgaccctatcaagtttgttgatgtgggaggccactctcatggctgtacacccttggcttctgcacccactcggagtgatagcttcatgatggtgaagtcacccagtgcacctatggcaggggagcctgttcgcccaagctgcccaccctctgatcttctctatgggctagaggtgagacctttgcaggctcaacaaatgcttgagggttattctgatccaggcatatggctaggccatgtcctagagagtactggcctctcagtaagtgcccatagtgatgtcaccatttttgtaagaggtaactatgtggtagacgctgtgctttgtaactgtttcgtgaattaaccagagttgtcacagtttagcattgggggcgggtcat

SEQ ID NO: 454956 - DNA, 2888 bp, Homo sapiens
attggctgggactctgtgtgccgctgtcggccaatgaagacgctggagatcgggcccctgcccgtcccctttctgcgccccgggatgaggcagagactgaacagccggcgagcaaatcaacggcatccagaaagccatgtcggactcggcgcccagcgcccaagcgctaacccgctgaaagtttctcagcgaaatctcagggacgatctggaccccgctgagaggaactgcttttgagtgagatggtcccagaggcctggaggagcggactggtaagcaccgggagggtagtgggagttttgcttctgcttggtgccttgaacaaggcttccacggtcattcactatgagatcccggaggaaagagagaagggtttcgctgtgggcaacgtggtcgcgaaccttggtttggatctcggtagcctctcagcccgcaggttccgggtggtgtctggagctagccgaagattctttgaggtgaaccgggagaccggagagatgtttgtgaacgaccgtctggatcgagaggagctgtgtgggacactgccctcttgcactgtaactctggagttggtagtggagaacccgctggagctgttcagcgtggaagtggtgatccaggacatcaacgacaacaatcctgctttccctacccaggaaatgaaattggagattagcgaggccgtggctccggggacgcgctttccgctcgagagcgcgcacgatcccgatgtgggaagcaactctttacaaacctatgagctgagccgaaatgaatactttgcgcttcgcgtgcagacgcgggaggacagcaccaagtacgcggagctggtgttggagcgcgccctggaccgagaacgggagcctagtctccagttagtgctgacggcgttggacggagggaccccagctctctccgccagcctgcctattcacatcaaggtgctggacgcgaatgacaatgcgcctgtcttcaaccagtccttgtaccgggcgcgcgtcctggaggatgcaccctccggcacgcgcgtggtacaagtccttgcaacggatctggatgaaggccccaacggtgaaattatttactccttcggcagccacaaccgcgccggcgtgcggcaactattcgccttagaccttgtaaccgggatgctgacaatcaagggtcggctggacttcgaggacaccaaactccatgagatttacatccaggccaaagacaagggcgccaatcccgaaggagcacattgcaaagtgttggtggaggttgtggatgtgaatgacaacgccccggagatcacagtcacctccgtgtacagcccagtacccgaggatgcccctctggggactgtcatcgctttgctcagtgtgactgacctggatgctggcgagaacgggctggtgacctgcgaagttccaccgggtctccctttcagccttacttcttccctcaagaattacttcactttgaaaaccagtgcagacctggatcgggagactgtgccagaatacaacctcagcatcaccgcccgagacgccggaaccccttccctctcagcccttacaatagtgcgtgttcaagtgtccgacatcaatgacaaccctccacaatcttctcaatcttcctacgacgtttacattgaagaaaacaacctccccggggctccaatactaaacctaagtgtctgggaccccgacgccccgcagaatgctcggctttctttctttctcttggagcaaggagctgaaaccgggctagtgggtcgctatttcacaataaatcgtgacaatggcatagtgtcatccttagtgcccctagactatgaggatcggcgggaatttgaattaacagctcatatcagcgatgggggcaccccggtcctagccaccaacatcagcgtgaacatatttgtcactgatcgcaatgacaatgccccccaggtcctatatcctcggccaggtgggagctcggtggagatgctgcctcgaggtacctcagctggccacctagtgtcacgggtggtaggctgggacgcggatgcagggcacaatgcctggctctcctacagtctcttgggatcccctaaccagagcctttttgccatagggctgcacactggtcaaatcagtactgcccgtccagtccaagacacagattcacccaggcagactctcacggtcttgatcaaagacaatggggagccttcgctctccaccactgctaccctcactgtgtcagtaaccgaggactctcctgaagcccgagccgagttcccctctggctctgccccccggagttaaaccttctttaattatggattagccattaacatttttgaaacgtggaccatttaacctcggcctaccccctccaactgtcctggtgatgagttcattagctaagttaaattaattgaactttgatctaaaccaaaacaaatcaggaaaataaagctgtaaaggaacttatcaagcattccaaaaccaactagaaattacttgaagtttcgagtgagcattgcctgtgccagtattcttcattataggattataaactcgtttttttcccaaagcgcatgtctacgccaggcagaggagtaattattcagccaatttcatggatgtaacgatggatataaataattgatagcacctagaggcttccagtttgggtggaaggctaaaagtagaggggaactcactcacttgagaaatgatatttaagtgaataaatagttctcttctatgaaactattactatttagttctctggaaaacttaagtgtattaatgattagaacatcaaatcctaagtaaagaaatgacattttaaatataaaaagccaaactttaaataaatcatagagacctcagacataatataggaaa

SEQ ID NO: 454957 - DNA, 999 bp, Homo sapiens
catcttccaaatcaatcaggcccatccatcccatgcctccttcgctctccaccactgctaccctcactgtgtcagtaaccgaggactctcctgaagcccgagccgagttcccctctggctctgccccccgggagcagaaaaaaaatctcaccttttatctacttctttctctaatcctggtttctgtggggtttgtggtcacagtgttcggagtaatcatattcaaagtttacaagtggaagcagtctagagacctataccgagccccggtgagctcactgtaccgaacaccagggccctccttgcacgcggacgccgtgcggggaggcctgatgtcgccgcacctttaccatcaggtgtatctcaccacggactcccgccgcagcgacccgctgctgaagaaacctggtgcagccagtccactggccagccgccagaacacgctgcggagctgtgatccggtgttctataggcaggtgttgggtgcagagagcgcccctcccggacagcaagccccgcccaacacggactggcgtttctctcaggcccagagacccggcaccagcggctcccaaaatggcgatgacaccggcacctggcccaacaaccagtttgacacagagatgctgcaagccatgatcttggcgtccgccagtgctccctctttcggctggtgtagaatagccagtagtgtagtgcggtgtgcttttacgtgatggcgggtgggcagcgggcggcgggctccgcgcagccgtctgtccttgatctgcccgcggcggcccgtgttgtgttttgtgctgtgtccacgcgctaaggcgaccccctcccccgtactgacttctcctataagcgcttctcttcgcatagtcacgtagctcccaccccaccctcttcctgtgtctcacgcaagttttatactctaatatttatatggctttttttcttcgacaaaaaaataataaaacgtttcttctgaaaagctaaacgtttctgtataag

SEQ ID NO: 454958 - DNA, 319 bp, Homo sapiens
ctctctctctctctctctctctctgcttttacgtgatggcgggtgggcagcgggcggcgggctccgcgcagccgtctgtccttgatctgcccgcggcggcccgtgttgtgttttgtgctgtgtccacgcgctaaggcgaccccctcccccgtactgacttctcctataagcgcttctcttcgcatagtcacgtagctcccaccccaccctcttcctgtgtctcacgcaagttttatactctaatatttatatggctttttttcttcgacaaaaaaataataaaacgtttcttctgaaaagctaaacgtttctgtataag

SEQ ID NO: 454959 - DNA, 4845 bp, Homo sapiens
attggctgggactctgtgtgccgctgtcggccaatgaagacgctggagatcgggcccctgcccgtcccctttctgcgccccgggatgaggcagagactgaacagccggcgagcaaatcaacggcatccagaaagccatgtcggactcggcgcccagcgcccaagcgctaacccgctgaaagtttctcagcgaaatctcagggacgatctggaccccgctgagaggaactgcttttgagtgagatggtcccagaggcctggaggagcggactggtaagcaccgggagggtagtgggagttttgcttctgcttggtgccttgaacaaggcttccacggtcattcactatgagatcccggaggaaagagagaagggtttcgctgtgggcaacgtggtcgcgaaccttggtttggatctcggtagcctctcagcccgcaggttccgggtggtgtctggagctagccgaagattctttgaggtgaaccgggagaccggagagatgtttgtgaacgaccgtctggatcgagaggagctgtgtgggacactgccctcttgcactgtaactctggagttggtagtggagaacccgctggagctgttcagcgtggaagtggtgatccaggacatcaacgacaacaatcctgctttccctacccaggaaatgaaattggagattagcgaggccgtggctccggggacgcgctttccgctcgagagcgcgcacgatcccgatgtgggaagcaactctttacaaacctatgagctgagccgaaatgaatactttgcgcttcgcgtgcagacgcgggaggacagcaccaagtacgcggagctggtgttggagcgcgccctggaccgagaacgggagcctagtctccagttagtgctgacggcgttggacggagggaccccagctctctccgccagcctgcctattcacatcaaggtgctggacgcgaatgacaatgcgcctgtcttcaaccagtccttgtaccgggcgcgcgtcctggaggatgcaccctccggcacgcgcgtggtacaagtccttgcaacggatctggatgaaggccccaacggtgaaattatttactccttcggcagccacaaccgcgccggcgtgcggcaactattcgccttagaccttgtaaccgggatgctgacaatcaagggtcggctggacttcgaggacaccaaactccatgagatttacatccaggccaaagacaagggcgccaatcccgaaggagcacattgcaaagtgttggtggaggttgtggatgtgaatgacaacgccccggagatcacagtcacctccgtgtacagcccagtacccgaggatgcccctctggggactgtcatcgctttgctcagtgtgactgacctggatgctggcgagaacgggctggtgacctgcgaagttccaccgggtctccctttcagccttacttcttccctcaagaattacttcactttgaaaaccagtgcagacctggatcgggagactgtgccagaatacaacctcagcatcaccgcccgagacgccggaaccccttccctctcagcccttacaatagtgcgtgttcaagtgtccgacatcaatgacaaccctccacaatcttctcaatcttcctacgacgtttacattgaagaaaacaacctccccggggctccaatactaaacctaagtgtctgggaccccgacgccccgcagaatgctcggctttctttctttctcttggagcaaggagctgaaaccgggctagtgggtcgctatttcacaataaatcgtgacaatggcatagtgtcatccttagtgcccctagactatgaggatcggcgggaatttgaattaacagctcatatcagcgatgggggcaccccggtcctagccaccaacatcagcgtgaacatatttgtcactgatcgcaatgacaatgccccccaggtcctatatcctcggccaggtgggagctcggtggagatgctgcctcgaggtacctcagctggccacctagtgtcacgggtggtaggctgggacgcggatgcagggcacaatgcctggctctcctacagtctcttgggatcccctaaccagagcctttttgccatagggctgcacactggtcaaatcagtactgcccgtccagtccaagacacagattcacccaggcagactctcacggtcttgatcaaagacaatggggagccttcgctctccaccactgctaccctcactgtgtcagtaaccgaggactctcctgaagcccgagccgagttcccctctggctctgccccccgggagcagaaaaaaaatctcaccttttatctacttctttctctaatcctggtttctgtggggtttgtggtcacagtgttcggagtaatcatattcaaagtttacaagtggaagcagtctagagacctataccgagccccggtgagctcactgtaccgaacaccagggccctccttgcacgcggacgccgtgcggggaggcctgatgtcgccgcacctttaccatcaggtgtatctcaccacggactcccgccgcagcgacccgctgctgaagaaacctggtgcagccagtccactggccagccgccagaacacgctgcggagctgtgatccggtgttctataggcaggtgttgggtgcagagagcgcccctcccggacagcaagccccgcccaacacggactggcgtttctctcaggcccagagacccggcaccagcggctcccaaaatggcgatgacaccggcacctggcccaacaaccagtttgacacagagatgctgcaagccatgatcttggcgtccgccagtgaagctgctgatgggagctccaccctgggagggggtgccggcaccatgggattgagcgcccgctacggaccccagttcaccctgcagcacgtgcccgactaccgccagaatgtctacatcccaggcagcaatgccacactgaccaacgcagctggcaagcgggatggcaaggccccagcaggtggcaatggcaacaagaagaagtcgggcaagaaggagaagaagtaacatggaggccaggccaagagccacagggcggcctctccccaaccagcccagcttctccttacctgcacccaggcctcagagtttcagggctaacccccagaatactggtaggggccaaggccatgctccccttgggaaacagaaacaagtgcccagtcagcacctaccccttcccccccagggggttgaatatgcaaaagcagttccgctgggaacccccatccaatcaactgctgtacccatgggggtagtggggttactgtagacaccaagaaccatttgccacaccccgtttagttacagctgaactcctccatcttccaaatcaatcaggcccatccatcccatgcctccctcctccccaccccactccaacagttcctctttcccgagtaaggtggttggggtgttgaagtaccaagtaacctacaagcctcctagttctgaaaagttggaagggcatcatgacctcttggcctctcctttgattctcaatcttcccccaaagcatggtttggtgccagccccttcacctccttccagagcccaagatcaatgctcaagttttggaggacatgatcaccatccccatggtactgatgcttgctggatttagggagggcattttgctaccaagcctcttcccaacgccctggggaccagtcttctgttttgtttttcattgtttgacgtttccactgcatgccttgacttcccccacctcctcctcaaacaagagactccactgcatgttccaagacagtatggggtggtaagataaggaagggaagtgtgtggatgtggatggtgggggcatggacaaagcttgacacatcaagttatcaaggccttggaggaggctctgtatgtcctcaggggactgacaacatcctccagattccagccataaaccaataactaggctggacccttcccactacataatagggctcagcccaggcagccagctttgggctgagctaacaggaccaatggattaaactggcatttcagtccaaggaagctcgaagcaggtttaggaccaggtccccttgagaggtcagaggggcctctgtgggtgctgggtactccagaggtgccactggtggaagggtcagcggagccccagcaggaagggtgggccagccaggccattcttagtccctgggttggggaggcagggagctagggcagggaccaaatgaacagaaagtctcagcccaggatggggcttcttcaacagggcccctgccctcctgaagcctcagtccttcaccttgccaggtgccgtttctcttccgtgaaggccactgcccaggtccccagtgcgccccctagtggccatagcctggttaaagttccccagtgcctccttgtgcatagaccttcttctcccacccccttctgcccctgggtccccggccatccagcggggctgccagagaaccccagacctgcccttacagtagtgtagcgccccctccctctttcggctggtgtagaatagccagtagtgtagtgcggtgtgcttttacgtgatggcgggtgggcagcgggcggcgggctccgcgcagccgtctgtccttgatctgcccgcggcggcccgtgttgtgttttgtgctgtgtccacgcgctaaggcgaccccctcccccgtactgacttctcctataagcgcttctcttcgcatagtcacgtagctcccaccccaccctcttcctgtgtctcacgcaagttttatactctaatatttatatggctttttttcttcgacaaaaaaataataaaacgtttcttctg

SEQ ID NO: 454960 - DNA, 4594 bp, Homo sapiens
atgaaagcgagctcagggaggtgcgggctggtgcggtggctgcaggtactgttgcccttcctgttgtctttgttccccggggctctcccagtccagatccgctattcaattccagaggagctggccaaaaactcggtcgtaggaaacctcgccaaggatctggggctcagcgtccgggacttgccagcccggaagctgcgggttagcgcggagaaggaatatttcacagtaaacccagaaagcggagacttacttgtgagtgacagaatagaccgagaacagatatgcgggaagcagcctctgtgtgttctggatttcgatactgtcgctgaaaatccactaaatattttctacatagcagtaattgtgcaggatataaatgataataccccgctattcaaacagactaagattaatttaaaaattggcgaatccactaagccaggtacaacatttccacttgacccagccctggattcagatgttggtcctaactcactacaaagataccaccttaatgacaacgagtactttgatctcgctgagaaacagactccagatggtcgtaaatatcctgagttgattctaaaacactctctggacagagaagagcacagtttacatcaattggtcctcacagctgtggatggcggagacccacctcaaagtggcacgacccaaatccgaatcaaagtcacggatgccaacgataaccctccagtgttcagccaggacgtgtacagggtcaccctgagggaggacgtgccgccgggcttctttgtgcttcaagtgacagccaccgaccgggatgaaggcataaacgcagagatcacctactcctttcataatgtggacgaacaagtgaaacactttttcaacttaaatgaaaaaacaggagaaatcacgacaaaggatgatttggattttgagattgcaagtagttacactctgagtatcgaagcaaaagatcctggagatctagcagcccactgcagtatccaagttgaaattcttgatgacaacgattgtgcacctgaagttattgtgacttcagtatctactcccctaccggaggattcgccaccaggaacagtgatcgccttgataaaaacgagagacagagactctggagaaaatggagaagtttactgccaagtgttgggaaatgccaagtttattttgaaatcttcctcaaagaactattacaaactagtgacagacggcgctctggaccgggaggagatcccagaatacaatctcaccatcacagccaccgacgggggcaagccgcccctctcctccagcataattgtcaccctgcacatctccgacgtcaacgataatgccccagttttccaacagacttcctacatggttcacgtggcagagaacaatcctcctggcgcctctatcgctcaaatcagtgcctctgaccctgacttgggccccagtggccaagtttcctactccatcgtagcgagcgacctgaagccgcgggagattttatcctacgtgtccgtgagcgcgcagagcggggtggtgttcgcgcagcgcgccttcgatcatgagcagctgcgcgccttcgagctcacactgcaggcccgcgaccagggctcgcccgcgctcagcgccaacgtgagcctgcgcgtgttagtgggcgacctcaatgacaatgcgccacgggtgctgtaccccgcgctggggcctgatggctccgccctcttcgatatggtgccacgcgccgcagagcccggctacctggtgaccaaggtggtggcggtggacgcagactcaggacacaacgcttggctgtcctaccacgtgctgcaggccagcgagcccgggctcttcagcctggggttgcgcacgggtgaggtgcgcacagcgcgtgccttgggcgacagggacgcggcccgccagcgcctgctggtcgctgtgcgtgatggaggacagccgccactctccgctacggccacgctgcacctaatcttcgcggatagcctgcaagaggtattgccagacctcagcgaccgccgggagccctctgacccccaggcaaaactgcagttttacctggttgtggccttggccttgatctcagtgctcttcttcctcgcggtgattctggcaatctccctgcgcctgcgactctcttccaggtcagatgcttgggactgttttcagcctggtctcagctccaagcctggacctggggttctccccaattacagtgagggtacattgccctattcctacaacctgtgtgttgcctcacaatcagccaagacagagttcaattttctgaacataaccccggaattggttcccgcgcaagatctcgtctgtgacaatgcctcttgggaacaaaatacaaatcatggagccgctggggtcccttttgcctcagatactattttgaagcaagccccgcccaacacggactggcgtttctctcaggcccagagacccggcaccagcggctcccaaaatggcgatgacaccggcacctggcccaacaaccagtttgacacagagatgctgcaagccatgatcttggcgtccgccagtgaagctgctgatgggagctccaccctgggagggggtgccggcaccatgggattgagcgcccgctacggaccccagttcaccctgcagcacgtgcccgactaccgccagaatgtctacatcccaggcagcaatgccacactgaccaacgcagctggcaagcgggatggcaaggccccagcaggtggcaatggcaacaagaagaagtcgggcaagaaggagaagaagtaacatggaggccaggccaagagccacagggcggcctctccccaaccagcccagcttctccttacctgcacccaggcctcagagtttcagggctaacccccagaatactggtaggggccaaggccatgctccccttgggaaacagaaacaagtgcccagtcagcacctaccccttcccccccagggggttgaatatgcaaaagcagttccgctgggaacccccatccaatcaactgctgtacccatgggggtagtggggttactgtagacaccaagaaccatttgccacaccccgtttagttacagctgaactcctccatcttccaaatcaatcaggcccatccatcccatgcctccctcctccccaccccactccaacagttcctctttcccgagtaaggtggttggggtgttgaagtaccaagtaacctacaagcctcctagttctgaaaagttggaagggcatcatgacctcttggcctctcctttgattctcaatcttcccccaaagcatggtttggtgccagccccttcacctccttccagagcccaagatcaatgctcaagttttggaggacatgatcaccatccccatggtactgatgcttgctggatttagggagggcattttgctaccaagcctcttcccaacgccctggggaccagtcttctgttttgtttttcattgtttgacgtttccactgcatgccttgacttcccccacctcctcctcaaacaagagactccactgcatgttccaagacagtatggggtggtaagataaggaagggaagtgtgtggatgtggatggtgggggcatggacaaagcttgacacatcaagttatcaaggccttggaggaggctctgtatgtcctcaggggactgacaacatcctccagattccagccataaaccaataactaggctggacccttcccactacataatagggctcagcccaggcagccagctttgggctgagctaacaggaccaatggattaaactggcatttcagtccaaggaagctcgaagcaggtttaggaccaggtccccttgagaggtcagaggggcctctgtgggtgctgggtactccagaggtgccactggtggaagggtcagcggagccccagcaggaagggtgggccagccaggccattcttagtccctgggttggggaggcagggagctagggcagggaccaaatgaacagaaagtctcagcccaggatggggcttcttcaacagggcccctgccctcctgaagcctcagtccttcaccttgccaggtgccgtttctcttccgtgaaggccactgcccaggtccccagtgcgccccctagtggccatagcctggttaaagttccccagtgcctccttgtgcatagaccttcttctcccacccccttctgcccctgggtccccggccatccagcggggctgccagagaaccccagacctgcccttacagtagtgtagcgccccctccctctttcggctggtgtagaatagccagtagtgtagtgcggtgtgcttttacgtgatggcgggtgggcagcgggcggcgggctccgcgcagccgtctgtccttgatctgcccgcggcggcccgtgttgtgttttgtgctgtgtccacgcgctaaggcgaccccctcccccgtactgacttctcctataagcgcttctcttcgcatagtcacgtagctcccaccccaccctcttcctgtgtctcacgcaagttttatactctaatatttatatggctttttttcttcgacaaaaaaataataaaacgtttcttctg

SEQ ID NO: 454961 - DNA, 4719 bp, Homo sapiens
aaagtgcccaggctacagagacaccctgaagccacagaaagacaaaggaaccggttgaaacacacaacgtgtccagtgaggactttgcagaattctgtaaccagactacaatggccgctcaaaggaatcgctcaaaggaatcaaaggattgcagcgggctggtcctgctctgccttttcttcgggattccatgggaggctggagcccggcagatctcctactcaattcctgaggaattagagaaaggctctttcgtgggcaacatctccaaggacttgggtctggcgccccgggagctggcggagcgcggagtccgcatagtctccagaggtaggacgcagcttttctctctgaacccgcgcagcggcagcttgatcaccgcgggcaggatagaccgggaggagctctgcgctcagagcgcgcggtgcgtggtgagttttaatatccttgtggaagacagggtgaaactttttgggatagaaatagaagtaactgatatcaatgacaatgctccaaaattccaagcagaaaatctagacgtaaaaattaatgaaaatgtcgctgcgggaatgcgttttcctctcccggaagctattgatccggatgtgggcgtgaactccctgcagagctatcagctcagccccaataagcacttctccctaagagttcagagccgtgccaatggcgtcaagtacccggagctggtactggagcactccctagatcgcgaggaagaggccattcaccacctggtcctcaccgcctccgacgggggtgaccctctccgatctggcactgtccttgtcagtgtgactgtcttcgatgcaaatgacaacgcgccggtcttcaccttgccagaataccgagtgagtgttcctgagaatttgcctgtgggcactcagctgctgacagtcacagccaccgacagggacgaaggtgccaatggagaagtgacatattcattccgaaaattacctgacacgcaattgttgaagttccaactaaacaaatatactggagaaataaaaatatcagaaaatctagattatgaagaaaccggtttctatgaaatagaaatacaagcagaagatggaggagcatatcttgcaactgcaaaagtgttgattacagtagaagatgtaaatgacaacagtccagagctgaccatcacgtctctatttagtccagtgactgaagattcacctctgggaacagtcgtagcccttttaaatgtgcatgatttagactctgagcagaatggacaggtaacctgttccattttggcgtatctaccatttaaattagaaaagtccattgacagttattacagattggtgatacacagagcccttgacagggaacaggtatcctcttacaatatcacagtgacagccacagatgggggaagtcctcctctatcaacggaagctcactttatgctacaagtggcagatatcaatgacaacccacctaccttctctcaagtctcctactttacctatatcccagagaacaacgccaggggtgcctccatcttctcagtgacagcgctggacccggacagcaaagagaatgcccagattatttactccctggctgaagacaccatccagggggtacctctgtcctcatacatatccatcaactcagacactggcgtcctgtatgcactcagatccttcgactatgagcagtttcatgagctacagatgcaggtgacagccagcgacagcggggatcctccactcagcagcaacgtgtcgttgagcctgtttgtgctggaccagaacgacaatgcgcccgagatcctgtaccccgccctccccacagacggttccacaggcgtggagctggcgccccgctccgcagagcccggctacctggtgaccaaggtggtggcggtggacagagactccggccagaacgcctggctgtcctaccgtctgctcaaggccagcgagccgggactcttcgcggtgggggagcacacgggcgaggtgcgcacggcgcgagccctgctggacagagacgcgctcaagcaaagcctcgtagtggccgtccaggaccacggccagccccctctctccgccactgtcacgctcaccgtggccgtggccgacagcatcccccaagtcctggcggacctcggcagcttcgagtctccagctaactctgaaacctcagacctcactctgtacctggtggtagcggtggccgcggtctcctgcgtcttcctggccttcgtcatcgtgctgctggcgcacaggctgcggcgctggcacaagtcacgcctgctgcaggcttcaggaggcggcttgacaggtgtgtccggctcgcactttgtgggcgtggacggggttcgggctttcctgcagacctattcccacgaggtctctctcaccgcggactcgcgaaagagtcacctgatcttcccccagcccaattatgcggacacgctcatcagccaggagagctgtgagaaaaacgatcctttgtctttgttagatgattcgaagtttcctatagaggataccccattggttccacaagccccgcccaacacggactggcgtttctctcaggcccagagacccggcaccagcggctcccaaaatggcgatgacaccggcacctggcccaacaaccagtttgacacagagatgctgcaagccatgatcttggcgtccgccagtgaagctgctgatgggagctccaccctgggagggggtgccggcaccatgggattgagcgcccgctacggaccccagttcaccctgcagcacgtgcccgactaccgccagaatgtctacatcccaggcagcaatgccacactgaccaacgcagctggcaagcgggatggcaaggccccagcaggtggcaatggcaacaagaagaagtcgggcaagaaggagaagaagtaacatggaggccaggccaagagccacagggcggcctctccccaaccagcccagcttctccttacctgcacccaggcctcagagtttcagggctaacccccagaatactggtaggggccaaggccatgctccccttgggaaacagaaacaagtgcccagtcagcacctaccccttcccccccagggggttgaatatgcaaaagcagttccgctgggaacccccatccaatcaactgctgtacccatgggggtagtggggttactgtagacaccaagaaccatttgccacaccccgtttagttacagctgaactcctccatcttccaaatcaatcaggcccatccatcccatgcctccctcctccccaccccactccaacagttcctctttcccgagtaaggtggttggggtgttgaagtaccaagtaacctacaagcctcctagttctgaaaagttggaagggcatcatgacctcttggcctctcctttgattctcaatcttcccccaaagcatggtttggtgccagccccttcacctccttccagagcccaagatcaatgctcaagttttggaggacatgatcaccatccccatggtactgatgcttgctggatttagggagggcattttgctaccaagcctcttcccaacgccctggggaccagtcttctgttttgtttttcattgtttgacgtttccactgcatgccttgacttcccccacctcctcctcaaacaagagactccactgcatgttccaagacagtatggggtggtaagataaggaagggaagtgtgtggatgtggatggtgggggcatggacaaagcttgacacatcaagttatcaaggccttggaggaggctctgtatgtcctcaggggactgacaacatcctccagattccagccataaaccaataactaggctggacccttcccactacataatagggctcagcccaggcagccagctttgggctgagctaacaggaccaatggattaaactggcatttcagtccaaggaagctcgaagcaggtttaggaccaggtccccttgagaggtcagaggggcctctgtgggtgctgggtactccagaggtgccactggtggaagggtcagcggagccccagcaggaagggtgggccagccaggccattcttagtccctgggttggggaggcagggagctagggcagggaccaaatgaacagaaagtctcagcccaggatggggcttcttcaacagggcccctgccctcctgaagcctcagtccttcaccttgccaggtgccgtttctcttccgtgaaggccactgcccaggtccccagtgcgccccctagtggccatagcctggttaaagttccccagtgcctccttgtgcatagaccttcttctcccacccccttctgcccctgggtccccggccatccagcggggctgccagagaaccccagacctgcccttacagtagtgtagcgccccctccctctttcggctggtgtagaatagccagtagtgtagtgcggtgtgcttttacgtgatggcgggtgggcagcgggcggcgggctccgcgcagccgtctgtccttgatctgcccgcggcggcccgtgttgtgttttgtgctgtgtccacgcgctaaggcgaccccctcccccgtactgacttctcctataagcgcttctcttcgcatagtcacgtagctcccaccccaccctcttcctgtgtctcacgcaagttttatactctaatatttatatggctttttttcttcgacaaaaaaataataaaacgtttcttctg

SEQ ID NO: 454962 - DNA, 4717 bp, Homo sapiens
gcggggaaagggagataggtgtctccagctgctgtggctgtttggggcgggtcggcttcatccgcgtctcaggagcaagtagagaattagcgggcggcagcaatgctccgcaaggtgagaagctggacagaaatctggcggtgggctacccttttgttcctcttttaccacctgggttacgtttgtgggcagatccgctacccggtcccagaggagtcacaggaagggacttttgtagggaatgtcgctcaagatttcctgctggatacggacagtctgtcagctcgcaggctgcaggtcgctggagaggtgaaccaaagacacttccgtgtggatttggacagcggagccctgctcatcaagaacccaatcgaccgagaggcactgtgtgggctcagtgccagctgcatcgtgcccctggagtttgtcaccgaaggtcctttggaaatgtaccgagcagaggtagagatcgtagatgtgaatgatcacgccccccgttttccgcggcagcagctggacttggaaattggggaggcagctcctccaggacagcgtttcccgttggaaaaggctcaggatgcagatgtggggagcaattcgattagcagctataggctgagctccaatgaacactttgcactggatgtgaagaagcgcagcgacggcagcctggtcccagagctgctcctggagaagcctttggatcgagagaagcaatcggactaccgcctggtgctgactgctgtcgatggagggaacccgccgagatctggcaccgcagagctccgggtatccgtgctggacgtaaacgacaacgccccagccttccagcaatccagctacaggattagtgtgttggagagcgcaccagcgggcatggtgctcatccagctcaatgcctcagacccggacctgggtcccagtggtaacgtcaccttttatttcagtggtcatacccctgatcgtgtaagaaacctctttagcctgcaccccactactggaaagcttactcttttggggcccctagactttgagagtgagaattactatgaatttgatgtgcgggctcgcgatgggggttctccagccatggagcaacattgcagccttcgagtggatctgctggacgtaaatgacaatgccccttacatcacagtgacctcagagcttggaaccctccccgagagtgcagaacctggcactgtggtggcacttatcagtgtgcaggatccagactcagggtcaaacggagatgtgagcctccgcattcctgaccacttgccatttgccctcaagtctgccttcaggaaccagttctccctggtgactgctggacccttggatcgagaggccaaatctagctatgacatcatggtcactgcttctgatgctgggaaccctcctctcagtacccacagaactattttcctcaatatttcagatgtgaatgataatccaccctctttctttcagaggtcacatgaggtgtttgttcctgagaacaatcgcccaggggacctgctttgctcccttgcagcctctgacccagactctggcttgaatgcgcttatctcctactcactcctggagcccaggaatcgagatgtatcagcttcctctttcatctctctgaacccccagacaggagctgttcatgctactcgatcctttgactatgagcaaacccagacactgcagtttgaggtgcaggcccgggatcggggcaacccaccccttagcagcactgtaacagttcgtctatttgtgctggacctcaatgacaatgctccagctgtgctccgtcctcgggcccggcctggttccttatgtccccaagcactgcctccatcagttggtgctggccacctaatcacaaaggtgactgctgtggacttggattcaggttacaatgcttgggtttcctatcagctcctggaggccccagatcccagcctgtttgcagtctctcgatatgctggggaggtgcggacggctgttcctatcccagctgacctcccaccacagaagctggtcattgtggtaaaggatagtggtagtccaccactctctacctctgttactctcttagtgtccttagaggaagacactcatccagttgtcccagatcttcgagaatcttcagctccaagggaaggagaatctcgtctaaccctctacttggctgtgtccctagtggcaatttgctttgtctcctttggctcattcgtggcactactctctaagtgtcttcgtggggcagcctgtggagtcacatgctttcctgctggcacctgtgcctgtctcaccagatctcgaaggagggaggggcttcccccttccaatgggatcctccgaatccagctagggtcagatgaccctatcaagtttgttgatgtgggaggccactctcatggctgtacacccttggcttctgcacccactcggagtgatagcttcatgatggtgaagtcacccagtgcacctatggcaggggagcctgttcgcccaagctgcccaccctctgatcttctctatgggctagagcaagccccgcccaacacggactggcgtttctctcaggcccagagacccggcaccagcggctcccaaaatggcgatgacaccggcacctggcccaacaaccagtttgacacagagatgctgcaagccatgatcttggcgtccgccagtgaagctgctgatgggagctccaccctgggagggggtgccggcaccatgggattgagcgcccgctacggaccccagttcaccctgcagcacgtgcccgactaccgccagaatgtctacatcccaggcagcaatgccacactgaccaacgcagctggcaagcgggatggcaaggccccagcaggtggcaatggcaacaagaagaagtcgggcaagaaggagaagaagtaacatggaggccaggccaagagccacagggcggcctctccccaaccagcccagcttctccttacctgcacccaggcctcagagtttcagggctaacccccagaatactggtaggggccaaggccatgctccccttgggaaacagaaacaagtgcccagtcagcacctaccccttcccccccagggggttgaatatgcaaaagcagttccgctgggaacccccatccaatcaactgctgtacccatgggggtagtggggttactgtagacaccaagaaccatttgccacaccccgtttagttacagctgaactcctccatcttccaaatcaatcaggcccatccatcccatgcctccctcctccccaccccactccaacagttcctctttcccgagtaaggtggttggggtgttgaagtaccaagtaacctacaagcctcctagttctgaaaagttggaagggcatcatgacctcttggcctctcctttgattctcaatcttcccccaaagcatggtttggtgccagccccttcacctccttccagagcccaagatcaatgctcaagttttggaggacatgatcaccatccccatggtactgatgcttgctggatttagggagggcattttgctaccaagcctcttcccaacgccctggggaccagtcttctgttttgtttttcattgtttgacgtttccactgcatgccttgacttcccccacctcctcctcaaacaagagactccactgcatgttccaagacagtatggggtggtaagataaggaagggaagtgtgtggatgtggatggtgggggcatggacaaagcttgacacatcaagttatcaaggccttggaggaggctctgtatgtcctcaggggactgacaacatcctccagattccagccataaaccaataactaggctggacccttcccactacataatagggctcagcccaggcagccagctttgggctgagctaacaggaccaatggattaaactggcatttcagtccaaggaagctcgaagcaggtttaggaccaggtccccttgagaggtcagaggggcctctgtgggtgctgggtactccagaggtgccactggtggaagggtcagcggagccccagcaggaagggtgggccagccaggccattcttagtccctgggttggggaggcagggagctagggcagggaccaaatgaacagaaagtctcagcccaggatggggcttcttcaacagggcccctgccctcctgaagcctcagtccttcaccttgccaggtgccgtttctcttccgtgaaggccactgcccaggtccccagtgcgccccctagtggccatagcctggttaaagttccccagtgcctccttgtgcatagaccttcttctcccacccccttctgcccctgggtccccggccatccagcggggctgccagagaaccccagacctgcccttacagtagtgtagcgccccctccctctttcggctggtgtagaatagccagtagtgtagtgcggtgtgcttttacgtgatggcgggtgggcagcgggcggcgggctccgcgcagccgtctgtccttgatctgcccgcggcggcccgtgttgtgttttgtgctgtgtccacgcgctaaggcgaccccctcccccgtactgacttctcctataagcgcttctcttcgcatagtcacgtagctcccaccccaccctcttcctgtgtctcacgcaagttttatactctaatatttatatggctttttttcttcgacaaaaaaataataaaacgtttcttctg

SEQ ID NO: 454963 - DNA, 4864 bp, Homo sapiens
agaatgggctctaggcgccgctgctcaccaatcagggaatgggaagctgcgcgccattgagtccctccctcccccgcctctaccacacaaagcggaatgagatggatactcacagatcctgacactggagacttagaagtattttccttcgctttctgatatattttggatgtagtcggcctaggacttcatagatacataagccgattcacaaccaaccagctcgagaaaccgcggaatatcggcttagagcctgccatggcgaatcggctacagcgcggggaccgcagtcggctgctgctgctgctgtgcattttcctggggacgctgcgggggttccgggccaggcagatccgatattcggtgccagaagagaccgaaaagggctccttcgtgggcaatatctccaaggacctggggctggagccccgggagctggcgaagcgcggagtccgcatcgtctccagagggaagacacagcttttcgctgtgaatccgcgaagcggcagcttgatcacggcaggcaggatagaccgggaggagctctgtgagacggtgtcctcctgttttttaaatatggaacttctcgtggaagacaccttgaagatttacggagtggaggtggaaataatagatattaatgataacgcccccagcttccaggaggacgaagtggagataaaagtcagtgagcacgcaattcctggggcgcgatttgctcttcctaatgctagggatccagatgtgggcgtgaactccctccagagctaccagctcagccctaataattacttttccttgcaactgcggggcagaacggatggggccaagaatccagagctagtactggagggaagcctggaccgagagaaagaggctgctcacctgctcctcctcacagctttagatggaggcgatcccatccgaaagggcgcagttcccattcgtgtggtggtcctcgatgtaaatgatcacatcccaatgtttacacagtccgtatatcgcgtgagtgttccagaaaacatcagctccggaactcgggtgctgatggttaatgcaacggatccagacgagggaatcaacggggaagtaatgtattcatttcggaacatggaaagcaaggcttctgaaatattccaattggattcacaaactggagaagttcaagtacgggggtctctggattttgaaaaatatagattctatgagatggaaattcaaggccaagatggtggaggtctctttaccaccacgacgatgttgatcactgttgtggatgtgaatgataacgctccagaaataactatcacctcttctattaattcaattctggaaaactctcctccaggtacagtgattgctcttctaaatgtgcaagatcaagattctggagaaaatggtcaagtctcctgttttattcctaaccacctgccttttaaattagaaaagacttatggaaattattacaaattgataacaagcagagtgctggacagggagttggtccagagctacaatataacgttgacagccacagaccagggaagcccgcctttgtctgcagaaactcatgtctggctgaatgtggcagatgacaacgataaccctcccgtttttcctcactcctcttactctgcctacattcccgaaaacaaccccaggggtgcctccatcttctcagtgaccgccctcgacccggacagcaaacagaatgccctggtcacttactctctgacggatgacactgtccagggggtgcctctgtcctcctatgtctctattaactccaacactggtgttctctatgccctacaatccttcgactatgagcagtttcgagacttagaactgagagtgatagcacgtgacagcggggacccgcccctcagcagcaacgtgtcgctgagcctgttcgtgctggaccagaacgacaatgcgcccgagatcctgtaccctgccctccccacagacggctccactggcgtggagctggcgccccgctctgcggaacctggctacctggtgaccaaggtggttgcggtggacaaagattcaggccagaacgcctggctgtcctatcgcctgcttaaggccagcgagccgggactcttcgcggtgggggagcacacgggcgaggtgcgtacagcgcgggcactgctggacagagacgcgctcaagcagagcctcgtggtggccgtccaggaccacggccagccccctctctcggccaccgtcacgctcaccgtggctgtggccgacagcatccccgaagtcctggcggacctcggcagcctcgagtctctggctaactctgaaacctcagacctctcgctgtacttggtggtggcggtggccgcagtctcctgcatcttcctggtctttgtcatcgtgctgctggcactcaggctgtggcgctggcataagtcacgcctgctgcaggcttctgaaggcgggttggcaggtatgcccacgtcacattttgtaggcgtggacggggtacaggctttcctgcaaacctattcccacgaggtctctctcattgcggactcgcagaagagtcacctgattttcccccagcccaactatggggacacgctcatcagccaggagagctgtgagaaaagcgagccactcttgatagctgaagactcagctatcattttaggcaaatgtgacccgacaagtaatcagcaagccccgcccaacacggactggcgtttctctcaggcccagagacccggcaccagcggctcccaaaatggcgatgacaccggcacctggcccaacaaccagtttgacacagagatgctgcaagccatgatcttggcgtccgccagtgaagctgctgatgggagctccaccctgggagggggtgccggcaccatgggattgagcgcccgctacggaccccagttcaccctgcagcacgtgcccgactaccgccagaatgtctacatcccaggcagcaatgccacactgaccaacgcagctggcaagcgggatggcaaggccccagcaggtggcaatggcaacaagaagaagtcgggcaagaaggagaagaagtaacatggaggccaggccaagagccacagggcggcctctccccaaccagcccagcttctccttacctgcacccaggcctcagagtttcagggctaacccccagaatactggtaggggccaaggccatgctccccttgggaaacagaaacaagtgcccagtcagcacctaccccttcccccccagggggttgaatatgcaaaagcagttccgctgggaacccccatccaatcaactgctgtacccatgggggtagtggggttactgtagacaccaagaaccatttgccacaccccgtttagttacagctgaactcctccatcttccaaatcaatcaggcccatccatcccatgcctccctcctccccaccccactccaacagttcctctttcccgagtaaggtggttggggtgttgaagtaccaagtaacctacaagcctcctagttctgaaaagttggaagggcatcatgacctcttggcctctcctttgattctcaatcttcccccaaagcatggtttggtgccagccccttcacctccttccagagcccaagatcaatgctcaagttttggaggacatgatcaccatccccatggtactgatgcttgctggatttagggagggcattttgctaccaagcctcttcccaacgccctggggaccagtcttctgttttgtttttcattgtttgacgtttccactgcatgccttgacttcccccacctcctcctcaaacaagagactccactgcatgttccaagacagtatggggtggtaagataaggaagggaagtgtgtggatgtggatggtgggggcatggacaaagcttgacacatcaagttatcaaggccttggaggaggctctgtatgtcctcaggggactgacaacatcctccagattccagccataaaccaataactaggctggacccttcccactacataatagggctcagcccaggcagccagctttgggctgagctaacaggaccaatggattaaactggcatttcagtccaaggaagctcgaagcaggtttaggaccaggtccccttgagaggtcagaggggcctctgtgggtgctgggtactccagaggtgccactggtggaagggtcagcggagccccagcaggaagggtgggccagccaggccattcttagtccctgggttggggaggcagggagctagggcagggaccaaatgaacagaaagtctcagcccaggatggggcttcttcaacagggcccctgccctcctgaagcctcagtccttcaccttgccaggtgccgtttctcttccgtgaaggccactgcccaggtccccagtgcgccccctagtggccatagcctggttaaagttccccagtgcctccttgtgcatagaccttcttctcccacccccttctgcccctgggtccccggccatccagcggggctgccagagaaccccagacctgcccttacagtagtgtagcgccccctccctctttcggctggtgtagaatagccagtagtgtagtgcggtgtgcttttacgtgatggcgggtgggcagcgggcggcgggctccgcgcagccgtctgtccttgatctgcccgcggcggcccgtgttgtgttttgtgctgtgtccacgcgctaaggcgaccccctcccccgtactgacttctcctataagcgcttctcttcgcatagtcacgtagctcccaccccaccctcttcctgtgtctcacgcaagttttatactctaatatttatatggctttttttcttcgacaaaaaaataataaaacgtttcttctg

SEQ ID NO: 454964 - DNA, 4597 bp, Homo sapiens
atggcagctccaaccaaatgccagctccgcggaagattagtcctgctatgctcgctcctggggatgctatgggaggccagggccagtcagattcgctactcagtgcctgaagagacagaaaagggctatattgtgggcaacatctccaaggacctggctctggagccccgggagctggcggagcgccgagtccgcatcgtctctagaggtaggacgcagcttttctctctgaacccgcgcagcggcaccttggtcaccgcgggtaggatagaccgggaggagctctgtgctcagagcccgcggtgtctggtgaactttaaagtcctggttgaagacagagtgaaactgtacggaatagaaatagaagtaactgatattaacgacagcgccccaaagttccaggccgaaagtctggaagtaaaaattaacgaaatcgcggttcctggagcacgttatccacttccagaagctattgatccggatgttggcgtgaactccctccagagctaccagctcagccccaatcaccacttctccctgaacgtgcagactggagacaatggagccataaacccagagctggtgctggagcgcgccctggacagggaggaggcaactgcccaccacctggtcctcacggcctcggatggcggcgagccgcgtcgctccagcacagtgcgcatccatgtgacagtgttggatacaaatgataatgccccggtttttgctcaacggatttaccgagttaaagtccttgagaacgtgcccccaggcacctggctgcttactgcaacagccagcgacctggatgagggaatcaacggaaaagtggcatacaaattctggaaaattaatgaaaaacaatctctgctattccagcttaatgaaaatactggggaaatatcaacagcaaaaagtctagattatgaagaatgttcattttatgaaatggaaatacaagctgaagatggtgggggattgaaagggtggacaaaagtgctcatttcggtggaagatgtaaatgacaatagacctgaagtgaccattacatctctgtttagcccagtgagagaagacgcacctcagggaacagtaattcttcttttcaatgctcatgaccgagactccgggaagaatggtcaagttgtctgttctatccaggagaatctatcttttacattagaaaattcagaagaagattattacagattgttgacggcccaaattcttgaccgagaaaaagcctcagaatataatatcacggtgactgcaacagacagaggaactccgcccctgtccacagaaattcacatcaccctgcaagtgactgacatcaatgataatccacctgctttctctcaagcctcctactcagtctacctcccggaaaacaacgccagaggtacttccatcttctccgtgattgcctatgaccctgatagcaatgagaattctagagttatttactccttggcagaggataccatccaagggtctcctctctccacctatgtctctattaactcagacactggtgtgctgtatgctctgtgctcctttgactatgagcagtttagagatttgcaaatgcaggtgacggcaagtgacagtggaagcccaccacttagcagcaatgtgtcattgagactgtttgttttggaccagaatgacaatgccccagaaatcctgtaccctgccctccccactgatggttctactggtgtggagctggcaccccgctctgcagagcctggctacctggtgaccaaggtggtggcagtggacagagactcaggccagaatgcttggctctcctaccgcctattcaaggccagtgagccagggctcttctcggtggggctgcacacaggtgaagtgcgcacagctcgggccctgctagatagagatgcgctcaaacagagccttgtggtggctgtacaggaccatggccagccccctctctcggccactgtcacgctcacagtagccatagctgacagcatcccagacatcctggctgacctgggcagtcttcagatccctgcagacctggaggcctcagaccttaccctctacctcgttgtggctgtggcagtcgtctcctgtgtcttcctcaccttcgttatcacgctgctggccctcaggctgaggcactggcactcctcgcatctgctgcgggctaccagtgatgggttggctggtgtgcccacctcacactttgtgggtgtagatggggttcgagctttcctacagacctattctcaggagttctccctcaccgctgactcaaggaagagtcacctgatcttcccccagcccaactatgcagacacactcatcagccagcagagctgtgagaaaaatgagcctttgtgcgtctctgttgattccaagtttcctatagaagacacccctttggttccgcaagccccgcccaacacggactggcgtttctctcaggcccagagacccggcaccagcggctcccaaaatggcgatgacaccggcacctggcccaacaaccagtttgacacagagatgctgcaagccatgatcttggcgtccgccagtgaagctgctgatgggagctccaccctgggagggggtgccggcaccatgggattgagcgcccgctacggaccccagttcaccctgcagcacgtgcccgactaccgccagaatgtctacatcccaggcagcaatgccacactgaccaacgcagctggcaagcgggatggcaaggccccagcaggtggcaatggcaacaagaagaagtcgggcaagaaggagaagaagtaacatggaggccaggccaagagccacagggcggcctctccccaaccagcccagcttctccttacctgcacccaggcctcagagtttcagggctaacccccagaatactggtaggggccaaggccatgctccccttgggaaacagaaacaagtgcccagtcagcacctaccccttcccccccagggggttgaatatgcaaaagcagttccgctgggaacccccatccaatcaactgctgtacccatgggggtagtggggttactgtagacaccaagaaccatttgccacaccccgtttagttacagctgaactcctccatcttccaaatcaatcaggcccatccatcccatgcctccctcctccccaccccactccaacagttcctctttcccgagtaaggtggttggggtgttgaagtaccaagtaacctacaagcctcctagttctgaaaagttggaagggcatcatgacctcttggcctctcctttgattctcaatcttcccccaaagcatggtttggtgccagccccttcacctccttccagagcccaagatcaatgctcaagttttggaggacatgatcaccatccccatggtactgatgcttgctggatttagggagggcattttgctaccaagcctcttcccaacgccctggggaccagtcttctgttttgtttttcattgtttgacgtttccactgcatgccttgacttcccccacctcctcctcaaacaagagactccactgcatgttccaagacagtatggggtggtaagataaggaagggaagtgtgtggatgtggatggtgggggcatggacaaagcttgacacatcaagttatcaaggccttggaggaggctctgtatgtcctcaggggactgacaacatcctccagattccagccataaaccaataactaggctggacccttcccactacataatagggctcagcccaggcagccagctttgggctgagctaacaggaccaatggattaaactggcatttcagtccaaggaagctcgaagcaggtttaggaccaggtccccttgagaggtcagaggggcctctgtgggtgctgggtactccagaggtgccactggtggaagggtcagcggagccccagcaggaagggtgggccagccaggccattcttagtccctgggttggggaggcagggagctagggcagggaccaaatgaacagaaagtctcagcccaggatggggcttcttcaacagggcccctgccctcctgaagcctcagtccttcaccttgccaggtgccgtttctcttccgtgaaggccactgcccaggtccccagtgcgccccctagtggccatagcctggttaaagttccccagtgcctccttgtgcatagaccttcttctcccacccccttctgcccctgggtccccggccatccagcggggctgccagagaaccccagacctgcccttacagtagtgtagcgccccctccctctttcggctggtgtagaatagccagtagtgtagtgcggtgtgcttttacgtgatggcgggtgggcagcgggcggcgggctccgcgcagccgtctgtccttgatctgcccgcggcggcccgtgttgtgttttgtgctgtgtccacgcgctaaggcgaccccctcccccgtactgacttctcctataagcgcttctcttcgcatagtcacgtagctcccaccccaccctcttcctgtgtctcacgcaagttttatactctaatatttatatggctttttttcttcgacaaaaaaataataaaacgtttcttctg

SEQ ID NO: 454965 - DNA, 4582 bp, Homo sapiens
atgcagagagccagagaagccgaaatgatgaaaagtcaggtactgtttcccttcctgctgtctttgttctgcggggccatctcccagcagatccgatacacgattccagaggagctagccaacggctcacgggtggggaaacttgccaaggatctggggctcagtgtccgggagttgccaactcgaaaactgcgggttagtgcagaggattatttcaacgttagtttggagagcggggatttgttagtgaacggtaggatagatcgagagaagatttgcggaaggaaacttgagtgtgcactagaattcgaaacggtcgctgaaaacccaatgaatgttttccacgtggttgttgtaatccaagatattaatgacaatgcaccacgtttcgttgcaaaaggcattgacttagaaatttgtgagtcagccttacccggggtaaaattctctctggattctgctcaagatgcagatgtggaaggcaattcactgaagttatacaccatcaaccccaatcaatacttctctctgtcaacgaaggaaagtcctgatggaagtaaatatccggtattactgctggaaaaacctctagacagggaacatcagagctctcatcgcttaatcctgactgccatggatggcggggacccgcctctaagcggcaccacccatatctggatccgagttacggatgccaatgataatgctcccgtgtttagccaggaggtatacagggttagcctccaagaaaacgtaccgtggggaacctccgtgctgcgggtgatggccacagaccaggatgagggcattaatgcagagatcacctatgccttcctcaattccccaataagtaccagcctcttcaatctcaatccaaatactggcgacatcacaaccaatggcacattggattttgaagagacaagtagatatgtgttgagtgtggaagctaaggatggaggagtacacacagctcactgtaatgttcaaatagaaattgttgacgagaatgacaatgccccagaggtgacattcatgtccttctctaaccagattccagaggattcagaccttggaactgtaatagccctcataaaagtgcgagacaaggattctgggcaaaatggcatggtgacatgctatactcaggaagaagttcctttcaaattagaatccacctcgaagaattattacaagctggtgattgctggagccctaaaccgggagcagacagcagactacaacgtcacaatcatagccaccgacaagggcaaaccagccctttcctccaggacaagcatcaccctgcacatctccgacatcaacgacaatgcacctgttttccatcaggcctcctatgtggtccacgtgtctgagaacaacccacctggcgcctccattgcacaagtaagcgcctccgacccggatttgggacccaacggcagagtctcctactctattctggccagtgacctggagccgcgggagctgttgtcctacgtgtccgtgagcccgcagagcggggtggtgttcgcgcagcgcgccttcgaccacgagcagctgcgcgccttcgagctcacactgcaggccagggaccagggctcccccgcgctcagcgccaacgtgagcctgcgcgtgttggtgggcgacctcaatgacaatgcgccacgggtgctgtaccccgcgctggggcctgatggctccgccctcttcgatatggtgccacgcgccgcagagcccggctacctggtgaccaaggtggtggcggtggacgcagactcaggacacaacgcttggctgtcctaccacgtgctgcaggccagcgagcccgggctcttcagcctggggttgcgcacgggtgaggtgcgcacagcgcgtgccttgggcgacagggacgcggcccgccagcgcctgctggtcgctgtgcgtgatggaggacagccgccactctccgccaccgccacgctgcacctaatcttcgcggatagcctgcaagaggtattgccagacctcagcgaccgccctgagccctctgacccccagacggaactgcagttttacctggttgtggccttggccttgatctcagtgctctttctcctcgcggtgattctagcgatcgccctgcgcctgcgacgttcctccagcctcgacactgagggctgctttcaaaccggtctctgctccaagtctgggcccggggttcctcccaaccacagcgaggggactttgccctattcctacaatctatgtattgcctctcattctgcaaagacagagtttaattctctcaacctgacaccggaaatggctccccctcaggatctgctgtgtgatgatccttctatggttgtatgtgccagtaatgaagatcacaaaatcgcttatgacccttctttgtcttcgcaccaagccccgcccaacacggactggcgtttctctcaggcccagagacccggcaccagcggctcccaaaatggcgatgacaccggcacctggcccaacaaccagtttgacacagagatgctgcaagccatgatcttggcgtccgccagtgaagctgctgatgggagctccaccctgggagggggtgccggcaccatgggattgagcgcccgctacggaccccagttcaccctgcagcacgtgcccgactaccgccagaatgtctacatcccaggcagcaatgccacactgaccaacgcagctggcaagcgggatggcaaggccccagcaggtggcaatggcaacaagaagaagtcgggcaagaaggagaagaagtaacatggaggccaggccaagagccacagggcggcctctccccaaccagcccagcttctccttacctgcacccaggcctcagagtttcagggctaacccccagaatactggtaggggccaaggccatgctccccttgggaaacagaaacaagtgcccagtcagcacctaccccttcccccccagggggttgaatatgcaaaagcagttccgctgggaacccccatccaatcaactgctgtacccatgggggtagtggggttactgtagacaccaagaaccatttgccacaccccgtttagttacagctgaactcctccatcttccaaatcaatcaggcccatccatcccatgcctccctcctccccaccccactccaacagttcctctttcccgagtaaggtggttggggtgttgaagtaccaagtaacctacaagcctcctagttctgaaaagttggaagggcatcatgacctcttggcctctcctttgattctcaatcttcccccaaagcatggtttggtgccagccccttcacctccttccagagcccaagatcaatgctcaagttttggaggacatgatcaccatccccatggtactgatgcttgctggatttagggagggcattttgctaccaagcctcttcccaacgccctggggaccagtcttctgttttgtttttcattgtttgacgtttccactgcatgccttgacttcccccacctcctcctcaaacaagagactccactgcatgttccaagacagtatggggtggtaagataaggaagggaagtgtgtggatgtggatggtgggggcatggacaaagcttgacacatcaagttatcaaggccttggaggaggctctgtatgtcctcaggggactgacaacatcctccagattccagccataaaccaataactaggctggacccttcccactacataatagggctcagcccaggcagccagctttgggctgagctaacaggaccaatggattaaactggcatttcagtccaaggaagctcgaagcaggtttaggaccaggtccccttgagaggtcagaggggcctctgtgggtgctgggtactccagaggtgccactggtggaagggtcagcggagccccagcaggaagggtgggccagccaggccattcttagtccctgggttggggaggcagggagctagggcagggaccaaatgaacagaaagtctcagcccaggatggggcttcttcaacagggcccctgccctcctgaagcctcagtccttcaccttgccaggtgccgtttctcttccgtgaaggccactgcccaggtccccagtgcgccccctagtggccatagcctggttaaagttccccagtgcctccttgtgcatagaccttcttctcccacccccttctgcccctgggtccccggccatccagcggggctgccagagaaccccagacctgcccttacagtagtgtagcgccccctccctctttcggctggtgtagaatagccagtagtgtagtgcggtgtgcttttacgtgatggcgggtgggcagcgggcggcgggctccgcgcagccgtctgtccttgatctgcccgcggcggcccgtgttgtgttttgtgctgtgtccacgcgctaaggcgaccccctcccccgtactgacttctcctataagcgcttctcttcgcatagtcacgtagctcccaccccaccctcttcctgtgtctcacgcaagttttatactctaatatttatatggctttttttcttcgacaaaaaaataataaaacgtttcttctg

SEQ ID NO: 454966 - DNA, 4633 bp, Homo sapiens
atggggcccaagacactcccacagctcgctgggaaatggcaagtgctgtgcatgttgtccttgtgctgctggggctgggtgtctgggcagcttcgttactcagtggtggaggagtctgagccggggacgctggtggggaatgttgctcaggatctgggcttaaagatgacagatctgttgagccggcggctgcaattgggctctgaggagaatgggcgctatttttccctgagcttgatgagtggtgccctggcagtgaatcaaaagattgaccgagaaagcctatgtggagccagcaccagctgcctgctgccagtgcaggtggtgactgaacaccccctggagctaatccgtgtagaggtagagatcctggatctcaatgacaactctcctagctttgccacccctgagcgagagatgcgcatctcagaatcagcagcatctggggcacgattcccactggacagtgcccaggatccggatgtgggcaccaatactgtgagcttttacactctaagccccaacagccacttctctctgaatgtgaagaccctaaaagatgggaagccattcccagagctggtgctagagcagcagctggatcgtgaagcccaggcaagacatcagctggtgcttactgctgtggatggggggaccccagcccgctcagggaccacccttatctctgtcatcgtgctggacatcaatgataatgctccaaccttccaatcctcagttctacgtgtgggaatcccagagaatgcacccattggtactctgctgctccgcctcaatgccactgatccagacgagggcaccaacggccaactagactattcttttggagaccacacatctgaggcagtgcggaacctctttggcctagaccctagcagtggggcaatccatgtgttgggtcccatagactttgaggagtcacgtttctatgaaattcatgcaagagcccgtgaccagggacagcctgccatggagggccactgtgtgattcaagtggatgtgggggatgtcaatgacaatgccccagaggtgctattggcctctttggccaaccctgtcctagagagcacaccagtgggcacagtagtggggttgtttaatgtgcgagaccgggactcaggtagaaatggtgaagtgagccttgatatctctccggacctgccatttcagattaagccttctgagaaccactactcgctgctaaccagccagcctttggaccgggaggccacatcccactatatcatcgagctgctggccagcgatgctggttcaccttccctacacaaacatctcaccatcaggctcaacatttcagatgtcaatgacaatgcaccccgcttcaaccagcagctttacactgcttacatcctagaaaaccggcctccgggctcccttctttgcactgtggctgcctcagatccagacactggggataatgcccgcctcacctactccattgtaggaaatcaggttcagggagccccagcctcctcctttgtgtatgtcaacccagaggatggacggatctttgcccagcgtacctttgactatgaattgctgcagatgctgcagattgtggtgggggttcgagactccggctctcccccattgcatgccaacacatctctgcatgtgtttgtcctagacgagaatgataatgccccagctgtgctgcacccacggccagactgggaacactcagccccccagcgtctccctcgctctgctcctcctggctccttggtcaccaaggtgacagccgtggatgctgatgcaggccacaatgcgtggctctcctactcactgttgccacagtccacagccccaggactgttcctcgtgtctacacacactggtgaggtgcgcacagcccgggccttactggaggatgactctgacacccagcaggtggtggtcctggtgagggacaatggtgacccttcactctcctccacagccacagtgctgctggttctggaggatgaggaccctgaggaaatgcccaaatccagtgacttcctcatacaccctcctgagcgttcagaccttaccctttacctcattgtggctctagcgaccgtcagtctcttatccctagtcaccttcacctttctgtcagcgaagtgccttcagggaaacgcagacggggacgggggtggagggcagtgctgcaggcgccaggactcaccctccccggacttctataagcagtccagccccaacctgcaggtgagctcggacggcacgctcaagtacatggaggtgacgctgcggcccacagactcgcagagccactgctacaggacgtgcttttcaccggcctcggacggcagtgacttcacttttctaagacccctcagcgttcagcagcccacagctctggcgctggagcctgacgccatccggtcccgctctaatacgctgcgggagcggagccagcaagccccgcccaacacggactggcgtttctctcaggcccagagacccggcaccagcggctcccaaaatggcgatgacaccggcacctggcccaacaaccagtttgacacagagatgctgcaagccatgatcttggcgtccgccagtgaagctgctgatgggagctccaccctgggagggggtgccggcaccatgggattgagcgcccgctacggaccccagttcaccctgcagcacgtgcccgactaccgccagaatgtctacatcccaggcagcaatgccacactgaccaacgcagctggcaagcgggatggcaaggccccagcaggtggcaatggcaacaagaagaagtcgggcaagaaggagaagaagtaacatggaggccaggccaagagccacagggcggcctctccccaaccagcccagcttctccttacctgcacccaggcctcagagtttcagggctaacccccagaatactggtaggggccaaggccatgctccccttgggaaacagaaacaagtgcccagtcagcacctaccccttcccccccagggggttgaatatgcaaaagcagttccgctgggaacccccatccaatcaactgctgtacccatgggggtagtggggttactgtagacaccaagaaccatttgccacaccccgtttagttacagctgaactcctccatcttccaaatcaatcaggcccatccatcccatgcctccctcctccccaccccactccaacagttcctctttcccgagtaaggtggttggggtgttgaagtaccaagtaacctacaagcctcctagttctgaaaagttggaagggcatcatgacctcttggcctctcctttgattctcaatcttcccccaaagcatggtttggtgccagccccttcacctccttccagagcccaagatcaatgctcaagttttggaggacatgatcaccatccccatggtactgatgcttgctggatttagggagggcattttgctaccaagcctcttcccaacgccctggggaccagtcttctgttttgtttttcattgtttgacgtttccactgcatgccttgacttcccccacctcctcctcaaacaagagactccactgcatgttccaagacagtatggggtggtaagataaggaagggaagtgtgtggatgtggatggtgggggcatggacaaagcttgacacatcaagttatcaaggccttggaggaggctctgtatgtcctcaggggactgacaacatcctccagattccagccataaaccaataactaggctggacccttcccactacataatagggctcagcccaggcagccagctttgggctgagctaacaggaccaatggattaaactggcatttcagtccaaggaagctcgaagcaggtttaggaccaggtccccttgagaggtcagaggggcctctgtgggtgctgggtactccagaggtgccactggtggaagggtcagcggagccccagcaggaagggtgggccagccaggccattcttagtccctgggttggggaggcagggagctagggcagggaccaaatgaacagaaagtctcagcccaggatggggcttcttcaacagggcccctgccctcctgaagcctcagtccttcaccttgccaggtgccgtttctcttccgtgaaggccactgcccaggtccccagtgcgccccctagtggccatagcctggttaaagttccccagtgcctccttgtgcatagaccttcttctcccacccccttctgcccctgggtccccggccatccagcggggctgccagagaaccccagacctgcccttacagtagtgtagcgccccctccctctttcggctggtgtagaatagccagtagtgtagtgcggtgtgcttttacgtgatggcgggtgggcagcgggcggcgggctccgcgcagccgtctgtccttgatctgcccgcggcggcccgtgttgtgttttgtgctgtgtccacgcgctaaggcgaccccctcccccgtactgacttctcctataagcgcttctcttcgcatagtcacgtagctcccaccccaccctcttcctgtgtctcacgcaagttttatactctaatatttatatggctttttttcttcgacaaaaaaataataaaacgtttcttctg

SEQ ID NO: 454967 - DNA, 4597 bp, Homo sapiens
atggcgcctccgcagaggcatccgcagcgcagcgagcaggtcctgctcctcacgctcctggggacgctgtggggggccgcggcagcgcagatccgctactctattcccgaggagctggagaaaggctccttcgtaggcaacatcgtcaaggatctgggactggagccccaggagttggcggagcacggagtccgcatcgtctccagaggtaggatgcagcttttctctctgaatccgcgaaacggcagcttggtcaccgcgggtaggatagaccgcgaggagctctgtgctcagagcccgcggtgtctggtgagttttaacatccttgtcgaggataaactgaatctttatcccgtggaagtggaaatagtggacattaatgacaatacaccccgattcttaaaggaagaattggaagtgaaaattctcgaaaacgcagctccatcctctcgttttccactaatggaggtctatgaccctgatgtgggaatgaactcccttcagggatttaagctcagtggtaatagtcacttctcagtggacgtgcaaagcgaagcccatgggcccaagtacccggagctggtgctggagggcacactggaccgggaaggagaagccgtttaccgcctggtccttactgccatggatggcggcgaccctgtccgctcaagcgtcgcccaaattctggtaacagttctagatgtgaatgacaacactccaatgtttactcagcctgtctaccgtgtaagtgttcctgaaaacctgccagtaggcacaccagtgttggcagtgactgccaccgaccaggatgaaggagtccacggggaagtaacttattcctttgtgaagattacagaaaagatctcacaaattttctgtttgaatgttttgactggagaaatttcaacttctgcaaatctagactatgaggactcgagtttttatgagctgggtgttgaagcccgggatgggccaggtcttcgagacagagcgaaagtcttaataactatcttggatgtcaatgataatgtaccagaagtggttgttacatctggaagcagaacaattgctgaaagtgcacctccaggaacagtaatcgccctttttcaagtgttcgatcgagactctggcctgaatggcctggtaacctgttccatcccgagaagtctcccatttgaattggaaaaatcagttggcaattattatcgattagtgacaaatgcagctctagaccgggaagaggtattcttgtacaacatcactgtgacagccacggacaaaggaacaccacctctgtctacagaaacaatcatctctctaaatgtggcagacaccaacgacaacccgcccaccttcccccattcatcctactcagtctatgtccttgaaaacaaccccaggggtgcctccatcttctctgtgaatgcactggaccctgacgtggaccagaacgcccaagtctcctactcactggcagaagacaccctccagggggcgcccctgtcctcctacgtgtccatcaactccgacactgggattctgtacgccctgcgctccttcgactatgagcagttgagagacctacagctgtgggtgacagccagcgacagcggggacccgcctcttagcagcaacgtgtcactgagcctgtttgtgctggaccagaatgacaatgcgcccgagatcctgtaccccgccctccccacagacggttccactggcgtggagctggcgccccgctccgcagagcccggctacctggtgaccaaggtggtggcggtggacagagactcgggccagaacgcctggctgtcctaccgcctgctcaaggccagcgagccaggacttttctcagtgggcctgcacacgggcgaggtgcgcacggcgcgcgccctgctggacagagacgcgctcaagcagagcctagtggtggccgtccaggaccacggccagccccctctctccgccactgtcacgctcaccgtggccgtggccgacaggatccccgacatcctggccgacctgggcagcctcgagccctccgccaaacccaacgattcggacctcactctgtacctggtggtggcggtggccgcggtctcctgcgtcttcctggccttcgtcatcgtgctgctggcgctcagactgcagcgctggcacaagtcacgcctgctgcaggcttcgggaggtggcttagcgagcatgcccggctcgcactttgtgggcgtggaaggggttcgggctttcctgcagacctattcccacgaggtctcactcactgcagactcgcgtaagagtcatctgattttcccccagcccaactatgccgacacgcttatcaaccaggagagctatgagaaaagcgagcctcttctgataactcaggatttacttgaaacgaaaggagaacccaggcaacttcagcaagccccgcccaacacggactggcgtttctctcaggcccagagacccggcaccagcggctcccaaaatggcgatgacaccggcacctggcccaacaaccagtttgacacagagatgctgcaagccatgatcttggcgtccgccagtgaagctgctgatgggagctccaccctgggagggggtgccggcaccatgggattgagcgcccgctacggaccccagttcaccctgcagcacgtgcccgactaccgccagaatgtctacatcccaggcagcaatgccacactgaccaacgcagctggcaagcgggatggcaaggccccagcaggtggcaatggcaacaagaagaagtcgggcaagaaggagaagaagtaacatggaggccaggccaagagccacagggcggcctctccccaaccagcccagcttctccttacctgcacccaggcctcagagtttcagggctaacccccagaatactggtaggggccaaggccatgctccccttgggaaacagaaacaagtgcccagtcagcacctaccccttcccccccagggggttgaatatgcaaaagcagttccgctgggaacccccatccaatcaactgctgtacccatgggggtagtggggttactgtagacaccaagaaccatttgccacaccccgtttagttacagctgaactcctccatcttccaaatcaatcaggcccatccatcccatgcctccctcctccccaccccactccaacagttcctctttcccgagtaaggtggttggggtgttgaagtaccaagtaacctacaagcctcctagttctgaaaagttggaagggcatcatgacctcttggcctctcctttgattctcaatcttcccccaaagcatggtttggtgccagccccttcacctccttccagagcccaagatcaatgctcaagttttggaggacatgatcaccatccccatggtactgatgcttgctggatttagggagggcattttgctaccaagcctcttcccaacgccctggggaccagtcttctgttttgtttttcattgtttgacgtttccactgcatgccttgacttcccccacctcctcctcaaacaagagactccactgcatgttccaagacagtatggggtggtaagataaggaagggaagtgtgtggatgtggatggtgggggcatggacaaagcttgacacatcaagttatcaaggccttggaggaggctctgtatgtcctcaggggactgacaacatcctccagattccagccataaaccaataactaggctggacccttcccactacataatagggctcagcccaggcagccagctttgggctgagctaacaggaccaatggattaaactggcatttcagtccaaggaagctcgaagcaggtttaggaccaggtccccttgagaggtcagaggggcctctgtgggtgctgggtactccagaggtgccactggtggaagggtcagcggagccccagcaggaagggtgggccagccaggccattcttagtccctgggttggggaggcagggagctagggcagggaccaaatgaacagaaagtctcagcccaggatggggcttcttcaacagggcccctgccctcctgaagcctcagtccttcaccttgccaggtgccgtttctcttccgtgaaggccactgcccaggtccccagtgcgccccctagtggccatagcctggttaaagttccccagtgcctccttgtgcatagaccttcttctcccacccccttctgcccctgggtccccggccatccagcggggctgccagagaaccccagacctgcccttacagtagtgtagcgccccctccctctttcggctggtgtagaatagccagtagtgtagtgcggtgtgcttttacgtgatggcgggtgggcagcgggcggcgggctccgcgcagccgtctgtccttgatctgcccgcggcggcccgtgttgtgttttgtgctgtgtccacgcgctaaggcgaccccctcccccgtactgacttctcctataagcgcttctcttcgcatagtcacgtagctcccaccccaccctcttcctgtgtctcacgcaagttttatactctaatatttatatggctttttttcttcgacaaaaaaataataaaacgtttcttctg

SEQ ID NO: 454968 - DNA, 2445 bp, Homo sapiens
attggctgggactctgtgtgccgctgtcggccaatgaagacgctggagatcgggcccctgcccgtcccctttctgcgccccgggatgaggcagagactgaacagccggcgagcaaatcaacggcatccagaaagccatgtcggactcggcgcccagcgcccaagcgctaacccgctgaaagtttctcagcgaaatctcagggacgatctggaccccgctgagaggaactgcttttgagtgagatggtcccagaggcctggaggagcggactgcaagccccgcccaacacggactggcgtttctctcaggcccagagacccggcaccagcggctcccaaaatggcgatgacaccggcacctggcccaacaaccagtttgacacagagatgctgcaagccatgatcttggcgtccgccagtgaagctgctgatgggagctccaccctgggagggggtgccggcaccatgggattgagcgcccgctacggaccccagttcaccctgcagcacgtgcccgactaccgccagaatgtctacatcccaggcagcaatgccacactgaccaacgcagctggcaagcgggatggcaaggccccagcaggtggcaatggcaacaagaagaagtcgggcaagaaggagaagaagtaacatggaggccaggccaagagccacagggcggcctctccccaaccagcccagcttctccttacctgcacccaggcctcagagtttcagggctaacccccagaatactggtaggggccaaggccatgctccccttgggaaacagaaacaagtgcccagtcagcacctaccccttcccccccagggggttgaatatgcaaaagcagttccgctgggaacccccatccaatcaactgctgtacccatgggggtagtggggttactgtagacaccaagaaccatttgccacaccccgtttagttacagctgaactcctccatcttccaaatcaatcaggcccatccatcccatgcctccctcctccccaccccactccaacagttcctctttcccgagtaaggtggttggggtgttgaagtaccaagtaacctacaagcctcctagttctgaaaagttggaagggcatcatgacctcttggcctctcctttgattctcaatcttcccccaaagcatggtttggtgccagccccttcacctccttccagagcccaagatcaatgctcaagttttggaggacatgatcaccatccccatggtactgatgcttgctggatttagggagggcattttgctaccaagcctcttcccaacgccctggggaccagtcttctgttttgtttttcattgtttgacgtttccactgcatgccttgacttcccccacctcctcctcaaacaagagactccactgcatgttccaagacagtatggggtggtaagataaggaagggaagtgtgtggatgtggatggtgggggcatggacaaagcttgacacatcaagttatcaaggccttggaggaggctctgtatgtcctcaggggactgacaacatcctccagattccagccataaaccaataactaggctggacccttcccactacataatagggctcagcccaggcagccagctttgggctgagctaacaggaccaatggattaaactggcatttcagtccaaggaagctcgaagcaggtttaggaccaggtccccttgagaggtcagaggggcctctgtgggtgctgggtactccagaggtgccactggtggaagggtcagcggagccccagcaggaagggtgggccagccaggccattcttagtccctgggttggggaggcagggagctagggcagggaccaaatgaacagaaagtctcagcccaggatggggcttcttcaacagggcccctgccctcctgaagcctcagtccttcaccttgccaggtgccgtttctcttccgtgaaggccactgcccaggtccccagtgcgccccctagtggccatagcctggttaaagttccccagtgcctccttgtgcatagaccttcttctcccacccccttctgcccctgggtccccggccatccagcggggctgccagagaaccccagacctgcccttacagtagtgtagcgccccctccctctttcggctggtgtagaatagccagtagtgtagtgcggtgtgcttttacgtgatggcgggtgggcagcgggcggcgggctccgcgcagccgtctgtccttgatctgcccgcggcggcccgtgttgtgttttgtgctgtgtccacgcgctaaggcgaccccctcccccgtactgacttctcctataagcgcttctcttcgcatagtcacgtagctcccaccccaccctcttcctgtgtctcacgcaagttttatactctaatatttatatggctttttttcttcgacaaaaaaataataaaacgtttcttctg

SEQ ID NO: 454969 - DNA, 8943 bp, Homo sapiens
  misc_feature (8931)..(8931): n is a, c, g, or t
  misc_feature (8933)..(8934): n is a, c, g, or t
  misc_feature (8939)..(8939): n is a, c, g, or t
  misc_feature (8941)..(8942): n is a, c, g, or t
cagggcagccccagctcagactccccagcgccagcctttacaccgcttcctcctcggaaaaagaagaattttttcttgaactggaactgcaactaaagtccgttcggagatccaaaaatctgcaatacagaggttatttgtaacccggcgtctccaggctggtgagcaagctgaggagagcaagagggatggggagcggcgccggggagctgggccgggctgagaggctgccagtgctctttctcttcctgctgtctttgttctgcccggcgctctgtgagcagatccgctacaggattcccgaggaaatgcccaagggctccgtagtggggaacctcgccacggacctggggttcagcgtccaggagttaccgactcgaaaactgcgcgtcagttcggagaagccttacttcaccgtgagcgcagagagcggggagttgcttgtgagcagcaggctagacagggaggagatatgcgggaagaagccagcttgtgctctggaatttgaggctgttgctgaaaatccactgaacttttatcacgtgaatgtggagatcgaggacattaatgaccacacgccaaaattcacgcaaaattcctttgagctgcaaataagtgagtctgcacagcctggcacacgatttatattaggatctgcccatgatgcggatattggtagcaacacactgcagaattaccaactcagtcccagtgatcatttctcactgataaataaagagaaatcagatggcagtaaataccctgagatggtattgaagacacctttggacagagaaaagcagaaatcctaccacttgactttgactgccttggactttggagctccacccctaagcagcactgcacagatacacgttctagtgactgatgccaatgataatgctccagtgttcagtcaagacgtatacagggtgagcctttcagaaaacgtgtacccggggaccacggtgctacaggtgactgccacggaccaggatgagggtgtcaatgccgagattactttctctttcagtgaagctagccagatcacccaatttgacctgaactctaacaccggggaaattactgttttaaatacattagattttgaagaagtcaaagaatattccatagttttggaagcaagggacggtggaggaatgattgcgcaatgcacagtggaggtagaagtcatagatgaaaatgacaacgccccagaagtgatattccagtctctacccaacctaattatggaggacgccgagctgggaacacatattgctttgctcaaagtccgtgacaaggattccagacacaatggagaagtgacttgtaaattggaaggtgatgttccatttaaaatattaacttcttcaagaaacacgtataaattagtgacagatgctgttctagaccgcgagcagaatccagagtacaatataaccgttacggcaacagatcggggcaagcctcccctctcctccagttccagcatcaccctgcacattggtgatgtaaatgacaacgctccggttttctcacagtcttcctatatagtccacgtggccgagaacaacccgcctggagcctctatttcacaagtcagggcttctgatccggacttggggcccaacggccaagtctcttactgcatcatggccagtgacctggagcagcgggagctgtcatcctacgtgtccataagcgcggagagcggggtggtgttcgcgcagcgcgccttcgaccacgagcagctgcgcgccttcgaactcacactgcaggcccgcgaccagggctcgccagcgctcagcgcgaacgtgagcctgcgcgtgttagtggacgaccgcaacgacaatgcgccacgggtgctgtaccccgcgctgggtcccgacggctctgcgctcttcgatatggtgccgcacgctgcagagcctggctacttggtgaccaaggtagtggcggtggacgcagactcaggacacaacgcctggctgtcctaccacgtgctgcaggctagcgagcccgggctcttcagcctggggctgcgcacgggcgaagtgcgcacagcgcgtgccttaggcgacagggacgccgtccgccagcgccttctggtcgccgtgcgtgacggtggacagccaccactctcggccactgccacgttgcacctggtcttcgccgacagcttgcaggaggtgctgccggatatcactgaccgccccgacccctctgacctccaggctgagctgcagttttacctagtggtggccttggccttgatctcagtgctcttcctcgtggccatgattctggccattgccttgcgcctgcgacgctcctccagccccgcctcctggagctgcttccagcctggtctctgtgttaaatccgaatccgtggttccccccaactacagcgaggggactttgccttattcctacaatctatgtgttgcacatacaggaaagacggagtttaatttcctaaaatgtagtgagcagttgagttcaggacaagacatactttgcggtgattcatctggggccttatttccactttgtaattccagtgaattgacttcccatcaggtgagtttcctttaagtataatttaatgctcattgcctacccatttctccatattcacaagaaaatatacatatttgcaggaaaatatataatttttagatgtcatggatcattttaggaaagttgtagtcagttaaaaagctgtcatatcattctacaaaggaggagtaaagtaggagcaattgtgtggcccaacatttgtttgttttttagccaagcttagatttataaagcaatgagggtgtggttttaaccacaaagtgaaagtgttagacagttgttggctctctcctaaaaagtgaatgagatttttcctatacattttccttcttgttgactaatatatgatgaatacttttttcagcttggatataccataaatataaaaataataaagccaaagaatttaagctaaaattcaacacttttcttaactaatttaactggtatggtctccatagtagtccactgttttgtttcctgtgttaacttcccttttgtttcaaaagctcttagaataaggagtcaactggatttttatgtccatggaccccttgtgattatatgcagtgtacgctgtgtgtgcgtgtgtgtgtgtgtgtgtgtgagagagatccttttacttagaaaaaggtctactatgctcattagaagatcaaaagcagattctccttacttgtaacataggagtttcaggattaatctgtattcaagctcattctatatccttcatcaaagaaaagacaatgttttgtgtctgttgtccctctcacacacagccctaatatataatgtgtaactgccttatctgcagccctaaactaatatagctagaggtcttctaatcattctcctacctctaggaaagaaatatagtcttgaaaactgccaatctggtgtgcatacaaaatatatacaaaataccaaggaacattatatgagccttttgctaggtatatctaagcaactgcttcagttaatggccactttacaaattgctgaaagaaggaaacgtctttcgattcttttttttttctttttttttttttgagacagagtctctgtctgttactcaggctgtagtgcagtggcacaatgatagctccctccagcctcaaactcctgggctcaagcattccttctgcatcagcctcctgactagctggaactcaggctcatgccaccagacctggctaatttttctgttttcagtagagaaaatattttctttcactaatttaactggtatggtttccattgtctacccagttttccatatgcataagaaaatatattcacaggaaaatataaagttttcagatttcatgagtggttttaagaaagttttagtcagtgaaaaaactatcataccagtcttcaaaggaagggtgaaataagttcatctgctacgttgcccaggctggtcttgaagggaaacagacttttttgtagtcatacttatcctttggcttcttagtaagtattatatagtcattactttttgcagttttttagatcaaagtgttaatgtaggtaaagttaattttagaatatatgtaaaagtcaagtctgctttaaatttaatcatctctttggtgaaagggatgggatggagctttgctttttatcatatattcatctgtacctttcaagtattcaaatagaaaaatataaacaatgtaaataaaatagcaaaacaatgtaatatctcataaaactgcaatggtaaaagcatttatcctattgaaattccacaatttttatttgaaaatattatcgacatgtaattcaagtggcatttagaagaataatttaaaagcaacaactctatagaaagcttgtaaaatgattaagtagtttaaaccaaataaaacaatttctgagtcagtcatctccagtaggtctattttagtctcaagataaattcatttctggtgacaactgaagttcttagttatttgttagtatatattggagacatttacaataaagcttagagcacaatgggaaatgaaagtatcatgttttttttaagaccaaatgtattgcagaaatgtgagtaatttaatccgatgctacaatctgatcattctgatctaatctgatcatttaataacactaaataaaaccttcatctcacattctttggctgtttcttttaaaatatgggtttacggataaatcaaataaattcaaaacaaagtaataagcaaatgatttttttttctcagtaatctagtagagtattacatttagaagtaatctgtatctcagtgcagtaactatttaggactgtaagcgccgctgttcacctactggaagacaaatgcaaccgaaaacactcagatctcacacctcacgaagacccgcagatgccacaaactaactgctggactgcagcgaaacccgacccctgtttggaggcactccaggtttccggaggattgtcatctccatagctgcggcaagaaactaaataagacccatttatgcacagtgaagattctgagaggattctgcagcaaaacaacaatggccgctccacagagtcgccccagacgcggcgagctgatcctgctgtgcgcgctgctgggaacgctgtgggaaatcgggaggggacagattcgctactctgtgccagaagagacggacaaaggctccttcgtgggtaatatctccaaggacctggggctggacccccggaagctggcgaagcacggagtccgtatcgtctccagaggtaggacgcagctctttgctctgaacccgcgcagcggcagcttgatcaccgcgggcaggatagatcgggaggagctctgcgctcagagcccgcggtgtctgataaatattaacaccctggttgaggataaaggaaaactctttggggtagaaatagaaataattgatattaacgataataacccaaaattccaggtcgaagatctagaagtaaaaattaacgaaatcgcggttcctggagcacgttatccactcccagaagctgttgacccggatgtgggcgtgaactccctccagagctaccagctcagccccaatcaccacttctccctggacgtgcagactggagacaatggagccataaacccagagctggtgctggagcgcgccctggacagggaggaagaggctgctcaccacctggtcctcacggcctcggatggcggcaagccgcctcgctctagcacagtgcgcatccacgtgacagtgttggatacaaatgacaatgccccggtttttcctcacccgatttaccgagtgaaagtccttgagaacatgcccccaggcacgcggctgcttactgtaacagccagcgacccggatgagggaatcaacggaaaagtggcatacaaattccggaaaattaatgaaaaacaaactccgttattccagcttaatgaaaatactggggaaatatcaatagcaaaaagtctagattatgaagaatgttcattttatgaaatggaaatacaagccgaagatgtgggggcacttctggggaggaccaaattgctcatttcggtggaagatgtaaatgacaatagaccagaagtgatcattacgtctttgtttagcccagtgttagaaaattctcttcccgggacagtaattgccttcttgagtgtgcatgaccaagactctggaaagaatggtcaagttgtctgttacacacgtgataatttaccttttaaattagaaaagtcaataggtaattattatagattagtgacaaggaaatatttggaccgagaaaatgtctctatctacaatatcacagtgatggcctcagatctaggaacaccacctctgtccactgaaactcaaatcgctctgcacgtggcagacattaacgacaaccctcctactttccctcatgcctcctactcagcgtatatcctagagaacaacctgagaggagcctccatcttttccttgactgcacacgaccccgacagccaggagaatgcccaggtcacttactctgtgaccgaggacacgctgcagggggcgcccctgtcctcgtatatctccatcaactctgacaccggtgtcctgtatgcgctgcaatctttcgactatgagcagatccgagacctgcagctactggtaacagccagcgacagcggggacccgcccctcagcagcaacatgtcactgagcctgttcgtgctggaccagaatgacaacgcgcccgagatcctgtaccccgccctccccacagacggttccactggcgtggagctggcgccccgctccgcagagcgtggctacctggtgaccaaggtggtggcggtggacagagactcgggccagaacgcctggctgtcctaccgcctgctcaaggccagcgagccgggactcttctcggtgggtctgcacacgggcgaggtgcgcacggcgcgagccctgctggacagagatgcgctcaagcagagcctcgtggtggccgtccaggaccatggccagccccctctctccgccactgtcacgctcaccgtagccgtggctgacagcatccccgaagtcctgaccgagttgggcagtctgaagccttcggtcgacccgaacgattcgagccttacactctatctcgtggtggcagtggctgccatctcctgtgtcttcctcgcctttgtcgctgtgcttctggggctcaggctgaggcgctggcacaagtcacgcctgctccaggattccggtggcagattggtaggcgtgcctgcctcacattttgtgggtgttgaggaggtacaggctttcctgcagacctattcccaggaagtctccctcaccgccgactcgcggaagagtcacctgatctttccccagcccaactacgcagacatgctcatcagtcaggagggctgtgagaaaaatgattctttgttaacatccgtagattttcatgaatataagaatgaagctgatcatggtcaggtgagtttagttctttgcttgcttttaatttccagatgaattttatttggcataaattatgttttgaaaaacattgtgaagatagttgaaaataatttttaaggtgtatcacagagttttgggtttattttggtggtgttactataaaattgaactctaatagtcataggttattgtttcatttgcttttaaacgacttggaaaagattgttcaaccattttaagccttccagtattttattcctattatcactcattcacttaagaagtagctacccgtccatactggtaattttgctattgtttgtgtgtgtgtgtgtgtgtgtgtgtgtgtgtgtgtgtgtgtatcccaaactagaacttcagaaaattatcaagaagtctaaagccttgttattagcttagcaaaagtaaaatatatctcagaatttttagggttatgtttagcatttgaacctgtaactaggctcttgtagatttcttcactttaaacctcttttctgagccctgtttctgtaccagtgcccttcaaaactttaatacttcttaccatccttcaaaacatgaacaaactttaaagatggatcttggtgggagatgagactggttactaaatattaagtatgtgagtcagtggtcacctgggctccatgcccatggagacatgaaatctaaagcctagaatgtccattgctcccccaaacaaaaaacaaaagcaaaaacattagatctgaattaaaatgtaattttaaactgttgaaagtgacttttgtaaaatatgtaagaacatatttcaatacaattccaattagctgtttcggttgtgcattgatgtgaagtggtgagaatgttgatattaagaaccaatgtttcaggtacacaagttctaaataagctgatcaattcaattaaagttattcagtcttggctggacacagtgcctcatgtctgaaatcccagcactttgggaggctggggcaggaggaccgcttgagccccgggggtttgaaactgcagtgagctatgatcatgccactgcactccagcctaggtggcagaactagaccctgtctctaaaaaaactattattaggccgggtgcggtggctcacgcctgtaatcccagcactttgggagactgaggtgggtggatcacctgaggtcaggagttcaagatcagcctggcaaacatggtgaaaccccgtctctactaaaaactacaaaaattagccaggcatggtggcatgcgcctgtggtcccagctactcgggaggctgaggcagaagaatcacttgaacccgggaggtggaggttgcagtgagcctcgatcctgtcactgcactccagcctgggcaacagggtgagactccgtctcaaaaaaaaaaaactantnntaatngnna

SEQ ID NO: 454970 - DNA, 3305 bp, Homo sapiens
gcacgcgcctgaagcacaaagcagatagctaggaatgaaccatccctgggagtatgtggaaacaacggaggagctctgacttcccaactgtcccattctatgggcgaaggaactgctcctgacttcagtggttaagggcagaattgaaaataattctggaggaagataagaatgattcctgcgcgactgcaccgggactacaaagggcttgtcctgctgggaatcctcctggggactctgtgggagaccggatgcacccagatacgctattcagttccggaagagctggagaaaggctctagggtgggcgacatctccagggacctggggctggagccccgggagctcgcggagcgcggagtccgcatcatccccagaggtaggacgcagcttttcgccctgaatccgcgcagcggcagcttggtcacggcgggcaggatagaccgggaggagctctgtatgggggccatcaagtgtcaattaaatctagacattctgatggaggataaagtgaaaatatatggagtagaagtagaagtaagggacattaacgacaatgcgccttactttcgtgaaagtgaattagaaataaaaattagtgaaaatgcagccactgagatgcggttccctctaccccacgcctgggatccggatatcgggaagaactctctgcagagctacgagctcagcccgaacactcacttctccctcatcgtgcaaaatggagccgacggtagtaagtaccccgaattggtgctgaaacgcgccctggaccgcgaagaaaaggctgctcaccacctggtccttacggcctccgacgggggcgacccggtgcgcacaggcaccgcgcgcatccgcgtgatggttctggatgcgaacgacaacgcaccagcgtttgctcagcccgagtaccgcgcgagcgttccggagaatctggccttgggcacgcagctgcttgtagtcaacgctaccgaccctgacgaaggagtcaatgcggaagtgaggtattccttccggtatgtggacgacaaggcggcccaagttttcaaactagattgtaattcagggacaatatcaacaataggggagttggaccacgaggagtcaggattctaccagatggaagtgcaagcaatggataatgcaggatattctgcgcgagccaaagtcctgatcactgttctggacgtgaacgacaatgccccagaagtggtcctcacctctctcgccagctcggttcccgaaaactctcccagagggacattaattgcccttttaaatgtaaatgaccaagattctgaggaaaacggacaggtgatctgtttcatccaaggaaatctgccctttaaattagaaaaatcttacggaaattactatagtttagtcacagacatagtcttggatagggaacaggttcctagctacaacatcacagtgaccgccactgaccggggaaccccgcccctatccacggaaactcatatctcgctgaacgtggcagacaccaacgacaacccgccggtcttccctcaggcctcctattccgcttatatcccagagaacaatcccagaggagtttccctcgtctctgtgaccgcccacgaccccgactgtgaagagaacgcccagatcacttattccctggctgagaacaccatccaaggggcaagcctatcgtcctacgtgtccatcaactccgacactggggtactgtatgcgctgagctccttcgactacgagcagttccgagacttgcaagtgaaagtgatggcgcgggacaacgggcacccgcccctcagcagcaacgtgtcgttgagcctgttcgtgctggaccagaacgacaatgcgcccgagatcctgtaccccgccctccccacggacggttccactggcgtggagctggctccccgctccgcagagcccggctacctggtgaccaaggtggtggcggtggacagagactccggccagaacgcctggctgtcctaccgtctgctcaaggccagcgagccgggactcttctcggtgggtctgcacacgggcgaggtgcgcacggcgcgagccctgctggacagagacgcgctcaagcagagcctcgtagtggccgtccaggaccacggccagccccctctctccgccactgtcacgctcaccgtggccgtggccgacagcatcccccaagtcctggcggacctcggcagcctcgagtctccagctaactctgaaacctcagacctcactctgtacctggtggtagcggtggccgcggtctcctgcgtcttcctggccttcgtcatcttgctgctggcgctcaggctgcggcgctggcacaagtcacgcctgctgcaggcttcaggaggcggcttgacaggagcgccggcgtcgcactttgtgggcgtggacggggtgcaggctttcctgcagacctattcccacgaggtttccctcaccacggactcgcggaagagtcacctgatcttcccccagcccaactatgcagacatgctcgtcagccaggagagctttgaaaaaagcgagccccttttgctgtcaggtgattcggtattttctaaagacagtcatgggttaattgaggtgagtttatatcaaatcttctttctttttttttttaattgctctgtctcccaagctggaatgcagcggtacgatcatagctcactgcagcctcaaactcctaggctcaagcaattatcccacctttgcctccggtgtaacagggactacaggtgcaagccacctactgtctgcctatctatctatctatctatctatctatctatctatctatctatctattactttcttgcctgtaatcccagtactttgggaggccgaggcgggtggatcacctgaggttgggagtttgagaccagcctgaccaacatggagaaaccccgtctatactaaaaaaatacaaaattagccgggcgtggtggtgcatgtctgtaatcccagctacttgggaggctgagtcaggagaattgctttaacctgggaggtggaggttgcaatgagctgagattgtgccattgcactccagcctgggcaacaagagtgaaactctatctcaaaaaaaaaaaaaaaaaactttatcctctagtttcatccattgatgacacttgctttaatcacttattacaatcacctccaaatgaagattttataattccattgtttcttctacagttgttaattggctttctaccttgaagaagagttttatattctctatatatgtttgtttctatgattctggaagcatggttttctattttattcaatgg

SEQ ID NO: 454971 - DNA, 2664 bp, Homo sapiens
acagcacaagggggtggaggtttggccctaaagcttcaggacaccaaagaaattcagtcgaacagcccaccagttctctccatagggacctgggtcccgtgaatgctggttatctcacaccctgaggaataaagattggaatccgcactggatgctggaagttgactcggagaaaattgcgacaggagggaaatggcggctctgcaaaagttgccacactgcagaaagctggtcctgctgtgcttccttttggcgaccctgtgggaggccagggccgggcagattcgctattctgtgcgggaagagatcgacagaggctccttcgtaggcaacatcgccaaggacttgggtttggagcccctggcactggcagagcagggagtccgcatcgtctccagaggtaggtcccagctctttgctctgaacccgcgaagcggcagcttggtcactgcgaacaggatagaccgggaggagctctgcgctcagagcgcaccctgtctgttgaattttaacattctgctggaggataaattgactatttattcagtagaggtggaaataacagatattaacgataatgcccctcgctttggagtagaggaactggagctaaaaatcagtgaaaccactacgccaggattccggattcctcttaagaatgcgcatgatgcagacgtaggtgagaacgcccttcagaagtacgcactcaacccaaatgaccacttctccctggacgtgcgaaggggagctgatgggaacaagtacccagaactggtgctggagcgctctctggaccgcgaggaagaggctgttcaccacctcgttctcgtggcttctgatgggggtgacccagtgctatctggcacctcccgcatctgcgtgaaggtcctggatgcgaacgacaatgcgcctgtttttacacagcccgagtaccgcataagcattccggagaatacgctcgtgggcacccggatactcacggtgaccgccactgacgcagatgagggctactacgctcaagtggtatattttctagagaaaagccctggagaaacctcagaggtatttgagcttaagtcaacatctggagaactgacaatcataaaagatctagattatgaggatgctacattccatgaaattgatattgaagctcaggatggtccgggccttctaaccagagcgaaggttatcgtcacggttctggatgtgaatgacaatgccccagaattttacatgacatctgctactagctcagtttctgaagactctcttccaggaaccataattgggctttttaatgtacatgatagagactctgggcagaacgcattcaccacctgttcactccccgaggatcttccttttaagttagaaaagtcagtagacaattactaccgactggttacaaccagagcccttgacagggaacagttttccttttacaacatcactctaaccgctaaagatggagggaacccctccctgtccacggatgctcacattttgctccaggtggcagacatcaacgacaacgcacccgccttctcccgcacatcctactccacctacattcccgaaaacaaccccagaggagcctctgtcttctcagtgacggcccatgaccccgacagcaacgacaatgctcatgtaacttactctttcgcggaggacactgttcagggggcacccttatcctcttacatctctatcaactccgacactggagtactctatgcactgcgctcctttgattatgagcagttgcgagacttgcaagtgtgggtgatagcgcgggacagcgggaaccctccactcagtagcaatgtatcattaagcctgttcgtgctggaccagaacgacaacgcgcccgagatcctgtaccctgccttccccacagacggttccactggcgtggagctggcgccccgctccgcagagcccggctacctggtgaccaaggtggtggcggtggacagagactcgggccagaacgcctggctgtcttaccacctgctcaaggccagcgagccgggactcttctcggtgggtctgcacacgggcgaggtgcgcacggcgcgagccctgctggacagagacgcgctcaagcagagcctcgtggtggccatccaggaccacggccagccccctctctccgccactgtcacgctcaccgtggccgtggccgacaggatccccgacatcctggccgacctgggcagcctcgagccctccgccatacccaacgattcggacctcactctgtacctggtggtggcggtggccgcggtctcctgcgtcttcctggccttcgtcatcgtgttgctggcgcacaggctgcggcgctggcacaagtcacgcctgctgcaggcttcaggaggcagcttgacaggcatgcagagctcgcactttgtgggcgtggacggggttcgggctttcctgcagacctattcccacgaggtctccctcactgcggactcgcggaagagccacctgattttcccccagcccaactatgcggacacgctcatcagccaggagagctgtgagaaaaaggattttttatcagcgcctcaatctctactcgaagaagaaagagaagaaacgttttctcaggtaatctatcttttcacaacatacgtactagctagtttgctgaagtaa

SEQ ID NO: 454972 - DNA, 2721 bp, Homo sapiens
atggcggctcagccgaggggcggggactacagaggattcttcctgctctccatcctcctggggaccccctgggaagcctgggcaggacgtattctctactccgtgtcggaggagacggacaaagggtcctttgtgggagacatcgccaaggacctggggctggagccccgggagctggcggagcgcggagtccgcatcatctccagaggtaggacgcagcttttcgccctgaaccagcgcagcggcagcttggtcactgcgggcaggatagaccgggaagagatctgcgctcagagtgcgcggtgtctggtaaactttaacatcctgatggaagataaaatgaatctttaccctatagacgtggaaataatagatattaatgacaacgttccaagattcttgacggaagaaataaatgtaaaaataatggagaatacagctcctggggttcggtttccgttaagcgaggctggggatccagatgtgggcacgaactccctccagagttaccagctcagccccaatcgccacttctccctggctgtgcaaagtggagacgatgaaactaagtacccggaactggtgctggagcgggtgctggaccgggaggaagagcgggttcaccacctggtcctcacagcctctgatggcggcgacccgccccgatccagcaccgcccacatccaggtgacagtggtggatgtgaatgaccacacgcctgtcttctctctgcctcagtaccaagtaactgtccccgagaatgtgccagtgggtacaagactgctcacggtacatgctatcgacctggacgagggagtcaatggggaagtgacatattcttttcggaaaataactcctaaacttccaaagatgtttcatctgaactcgcttacaggagaaatatcaactttagaaggattagattatgaagaaactgccttctatgaaatggaggttcaggctcaagatggtcctggtagtctgacaaaggcaaaagtactgatcacagttttagatgtaaatgataatgctccagaagtgactatgacgtctttaagtagctcaatccctgaagacacacctcttgggacagtcattgctcttttctacctacaagacagagattctggaaagaatggtgaggtgacctgcaccattccagaaaacctaccttttaaattagaaaaatcaatagataattattatagattggtcacaaccaaaaacttggaccgggaaacactctctttgtataacatcacactgaaagccacagatggtggaactcctcccttgtccagggaaactcacatattcatgcaggtggcagacaccaacgataacccacccaccttcccccactcatcctactcagtctacatcgctgagaacaaccccagaggggcctccattttcttagtgactgcacaggaccacgacagtgaggataatgcccagatcacttattccttggccgaagacaccatccagggggctccagtgtcctcctatgtctccataaactctgacactggagtcctgtacgcgctgcaatcctttgattatgagcagttgagagaactacaactaagagtgactgcacatgacagcggggacccgcctctcagcagcaacatgtcactgagcctgttcgtgctggaccagaatgacaacccgcccgagatcctgtacccggccctccccacagatggttctactggcatggagctggcaccccgctccgcagagcccggctacctggtgaccaaggtggtggcggtggacaaagattcaggccagaacgcctggctgtcatacctcctgcttaaggccagcgagccaggactctttgcggttgggctgtacacgggcgaggtgcgcacggctcgggccctgctggacagagatgccctcaagcagagcctcgtggtggccgtccaggaccacggtcagcctcctctgtcagccaccgtcacactcaccgtggctgtggctgacagcatccccgaagtcttggccgacctgggcagccttgagccctccgacggtccttacaactatgacctcacgttgtacctggtggtggcggtggccacagtctcctgcgtcttcctagccttcgtcctcgtactgctggcgctcaggctgcggcgctggcacaagtcacgcctgctgcaggcttcagaaggtggcttggcgaacgtgcccacctcgcactttgtgggcatggacggggtgcaggctttcctgcagacctattcccatgaggtctccctcaccgcggactctcggaagagtcacctgatcttcccccagcccaactatgtagacatgctcatcagccaggagagctgtgagaaaaatgattctttgctaacatccgtagattttcaggaatgtaaagaaaacctgccaagtattcaggtgagcccagcccttcctttatttccatgaggaatttatttgcatgatatttctctattattttgcaaaacaaatgttttgaaaatagggatttaaaaaactttatagaggtaaaaatgagtttaccagtttccttcagtggtgacactttaatatagaacacataggatatagtatttctttagtgaaagcctatggacaagattatgaatatgtggactatcacattttataatttccacctactttccaatctatgttccaacctactttcttaactcatatattttatacatt

SEQ ID NO: 454973 - DNA, 2608 bp, Homo sapiens
gctgcgcagacctttcccagcacagcggattgccagctccgagacccgggactcctcctgtcctgggccgaatgctcttttagcgcggtagagtgcactttctccaactggaaaagcggggacccagcgagaacccgagcgaacgatgggagggagctgcgcgcagaggcgccgggccggcccgcggcaggtgctatttcctttgctgctgcctttgttctaccccaccctgagtgagccgatccgctactcgattccggaggagctggccaagggctcggtggtggggaacctcgctaaggatctagggctcagtgtcctggatgtgtcggctcgcaagctgcgagtgagcgcggagaagctgcacttcagcgtagacgcggagagcggggacttacttgtgaagaaccgaatagaccgtgagcaaatatgcaaagagagaagaagatgtgagttgcaattggaagctgtggtggaaaatcctttaaatatttttcatgtcattgtggtgattgaggatgttaatgaccacgcccctcaatttgataaaaaggaaatacatttagaaattttcgaatctgcatccgctggtacacgactatcgcttgaccctgccacggatcctgatataaacataaactcaattaaagattataagataaactctaatccttatttttcattaatggttagagttaattccgatggtggcaaatacccagagttatctctggagaaactcctagaccgggaagaacagagatctcatagcttgatattgactgccttggacggaggggacccaccaagaagtgccaccgctcacatagaaatttctgtcaaggataccaatgataaccccccggttttcagcagagacgaatatagaattagtcttagtgaaaatctgccccctgggtcccctgtgttgcaagtgacagccactgaccaggatgagggggtcaatgctgagataaactactacttccgaagcactgcccagagcacaaaacatatgttctcattggatgagaaaacaggtatgattaagaataaccagtcatttgattttgaagatgtagaaaggtacaccatggaagtggaagcgaaggacggaggtggtctctctacccagtgtaaagtaatcatagaaatccttgatgaaaacgacaacagcccagaaataatcatcacttctctctctgatcagattttggagaattcacctccaggaatggttgttgccctcttcaaaacacgggatctggatttcggaggaaatggagaagtcaggtgtaatatagaaacagacattccattcaagatttattcttcttccaataactactacaaactggtgacagatggagccctggaccgagagcagacaccagaatacaatgtcaccatcgtagccactgacaggggcaagccgcctctttcttccagtagaagcatcaccttgtatgtcgctgacatcaacgacaacgccccagttttcgaccagacgtcctacgtggtccacgtggccgagaacaacccgccaggagcctccattgcgcaagtgagcgcctctgacccggatttggggctcaatggccacatctcctactctatagtggcgagtgacctagagcccctggcggtgtcgtcatacgtgtcagtgagcgcgcagagcggggtggtgttcgcgcagcgcgcctttgatcacgagcagctgcgcgccttcgcgctcacgctgcaggcccgcgaccacggctcgcccacgctcagcgccaacgtgagcctgcgcgtgttggtgggagaccgcaatgacaacgcaccgcgggtgctgtacccagctctgggtcctgacggctccgcgttcttcgatatggtacctcgctctgcagagcccggctacctagtgactaaggtggtagcggtggacgccgactcgggacacaacgcctggctgtcctaccacgtgctgcaggccagtgagcccggactcttcagcctggggctgcgcactggggaggtgcgcacggctcgagccttaggcgacagggacgcagcccgccagcgcctgctggtcgctgtgcgtgacggtggacagccgccactctctgccaccgccacgcttcatctggtcttcgcagacaacttgcaagagatactgccagacctcagcgaccgccctgtactctctgacccccaggctgaactgcagttttacctggtggtggccttggccttaatctcagtgctcttcctcctcgccgtgattctggccattgccttgcgcctgcgacgctctctcagccctgctacttgggactgcttccatcctggtctctgtgtcaagtctggacctgtagttccccccaactacagtgaggggactttgccttattcttataatctgtgcattgcacatacgggtacaaaagagtttaatttcctaaaatgcagtgtgcccctacattccaatgaagacatggtttgcagtgtttctcctggagccttaattccacctcatggtggggaggatttgacttcacatcctgagactctgacttcggtgagtttctcttttttgtgtgtgatttatctaatagtctactag

SEQ ID NO: 454974 - DNA, 2490 bp, Homo sapiens
atgaccaattgcctgagtttccgaaatggcagaggactggccctgctgtgcgcgctcctggggacgctgtgcgaaacaggatccggtcagatccgctactcggtgtctgaggagctagataaaggttccttcgtgggcaacatcgctaacgacctggggctagagccccgggagctggcggagcgcggagtccgcatcgtctccagaggtaggacgcagcttttctctctgaatccgcaaagcggcagcttggtcaccgcggagaggatagaccgggaggagctctgcgctcagatcccgctgtgtctggtaaaaattaacattctggttgaggataaattgaaaatttttgaagtagaaatagaaattaaagatattaatgataatgctcctaatttcccaacagaggaattggaaataaaaattggtgaactaacggttcctggaacccgatttccaattaaaactgcttttgacccagatgtaggcattaactccctgcagaactacaagcttagccccaatgactacttctctctggctgtgaatagcgtctctgagggggccaagtatccagagctggtgctggagcgggccctggaccgtgagaaaaaagaaattcaccagcttgtcctggttgcctctgatggtggcgaccctgtccactctggcaacttgcacatccaagtgatagtcctggatgcaaatgacaacccaccaatgtttactcagcctgagtaccgtgtgagtgtttgggagaacgtgcctgtgggtacccggctgctcacggtgaatgccactgaccctgacgagggattcaatgctcaagtgtcttatattctagataaaatgcctgggaaaatcgctgagattttccatcttaactcagtgagtggagaagtatcaatattaaaaagtctagattatgaggatgccatgttctatgaaattaaaattgaagcacaggatggaccaggtcttctttcaagagccaagattctagtcacggttctggatgtgaatgacaatgctccagaaattacaatcacgtctctcacaagctcagtcccagaagagggcaccgttggaagagaaattgctcttatcgacgtgcatgaccgagattctgggcagaatgggcaggttgaagtttttgtcctgggaaatctgccatttaagttagaaaaatcaatagatcaatattaccgcttagtgacggccacatccctggaccgcgaacaaatatcagaatataacattagtctgagagcctcagatgggggaagcccgccactgtccacagaaactcacatcaccctgcatgtgattgacatcaatgacaacccacccaccttccctcatttatcctactccgcctacattccagaaaacaaccccagaggagcctccatcttctcagtgacagcccaggacccagatagcaacaacaacgcccgcatcacttatgcattgaccgaggacactctccagggggcgcccctgtcctccttcgtctctatcaactccaacactggcgtcctatacgcgctgagatccttcgactacgagcaatttagagacttaaagctactggtgacagccagcgacagcgggaaccctccactcagcagcaacgtgtcgctgaacctgttcgtgctggaccagaacgacaacgcgcccgagatcctgtaccccgccctccccacagacggttccactggcgtggagctggcgcctcgctccgcagagcccggctacctggtgaccaaggtggtggcggtggacagagactcgggccagaacgcctggctgtcctaccgcctgctcaaggccagcgagccgggactcttctcggtgggtctgcacacgggcgaggtgcgcacggcgcgagccctgctggacagagacgcgctcaagcagagcctcgtggtggccgtccaggaccacggccagccccctctctccgccactgtcacgctcaccgtggccgtggccgacaggatccccgacatcctggccgacctgggcagcctcgagccctccgccaaacccaacgattcggacctcactctgtacctggtggtggcggtggccgcggtctcctgcgtcttcctggccttcgtcatcgtgctgctggcgctcaggctgcggcgctggcacaagtcacgcctgctgcaggcttcgggaggcggcttggcgagtacgcccggctcgcactttgtgggcgcggacggggttcgggctttcctgcagacctattcccacgaggtctccctcactgcggactcgcggaagagccacctgattttcccccagcccaactatgcggacacgctcatcagccaggagagctgtgagaaaagcgagcctcttctgataactcaggatttacttgaaatgaaaggagattccaacctacttcaggtgagtttatttatttctttgattattaagaacaaatatgagaatgtggttattataaagctttaa

SEQ ID NO: 454975 - DNA, 2457 bp, Homo sapiens
atggggagcggcgccggggagctgggccgggctgagaggctgccagtgctctttctcttcctgctgtctttgttctgcccggcgctctgtgagcagatccgctacaggattcccgaggaaatgcccaagggctccgtagtggggaacctcgccacggacctggggttcagcgtccaggagttaccgactcgaaaactgcgcgtcagttcggagaagccttacttcaccgtgagcgcagagagcggggagttgcttgtgagcagcaggctagacagggaggagatatgcgggaagaagccagcttgtgctctggaatttgaggctgttgctgaaaatccactgaacttttatcacgtgaatgtggagatcgaggacattaatgaccacacgccaaaattcacgcaaaattcctttgagctgcaaataagtgagtctgcacagcctggcacaagatttatactagaagtagcagaagatgcagatattggcttaaactctctgcagaagtataaactctctcttaacccaagtttctcattaataattaaggagaaacaggatggtagtaaatacccggaactggcactggagaaaaccttagaccgggaacaacagagttaccatcgtttagtcctgactgccttggacggtggacatccacccctaagcggcaccactgagctccggatccaggtaaccgacgccaatgataatcccccggtattcaaccgagacgtgtacagagtcagccttcgggaaaacgtgccaccaggcaccactgtgttgcaagtgtcagccactgaccaagacgagggcatcaactcagaaattacttattccttctacagaaccgggcaaatctttagtctgaattcaaagagcggagaaattaccactcaaaagaaactggattttgaagagaccaaggaatattcaatggttgtagaagggagggatggtggtggactggttgcacaatgtacagttgaaattaatattcaagatgaaaatgacaatagcccagaagttacattccattctctacttgaaatgattctggaaaacgcggtgcctggaacactaattgctttgatcaaaatacatgaccaagattctggggaaaatggggaggttaattgtcaattacaaggcgaagtcccttttaagattatctcttcatccaaaaattcgtataagttggtaacagatggaaccctagaccgagagcaaaccccggagtacaatgtcaccatcacagccacagacaggggcaagccgcccctctcctccagcataagcgtcatcctacatatcagagacgtcaacgataacgctccggttttccaccaggcgtcctacttagtcagtgtacccgaaaacaaccctcctggggcctccatcgcgcaagtctgcgcctcggacctggacttggggttgaacggccaagtctcctactctatcatggccagcgacctagagcctctggcactggcctcttacgtgtccatgagcgcgcaaagtggggtggtgttcgcgcagcgcgcctttgactacgagcagctgcgcaccttcgaactcacactacaggcccgcgaccagggctcgcctgcgctcagcgcaaacgtgagcctgcgcgtgttggtgggcgaccgaaacgacaacgcaccgcgggtgctgtaccccgcgctgggtcccgacggctctgcgctcttcgatatggtgccgcgcgctgcagagcccggctacctggtgaccaaggtagtggccgtggacgcagactcaggacacaacgcctggctgtcctaccacgtgctgcaggctagcgagcccgggctcttcagcctggggctgcgcacaggagaggtgcgcacagcgcgtgccttgggcgacagggacgcggcccgccagcgcctgctggttgctgtgcgtgatggtggacagccgccactctccgccaccgccacgctgcacttggtctttgctgacagcttgcaggaggtgctgccggatatcactgaccgccctgtaccctctgacccccaggctgagctgcagttttacctagtggtggccttggccttgatctcagtgctcttcctcctggccgtgattctggccgttgccttgcgcctgcgacgctcctccagccctgccgcctggagctgcttccaacctggtctctgtgtcaagtctggacctgtggttccccccaactacagtcaggggactttgccttattcctacaacctatgtgttgcacatacaggaaagacggagtttaatttcctaaaatgtagtgagcaattgagttcaggacaagacatactttgtggtgattcatctggggccttatttccactttgtaattccagcgagtcgacttcccatcctgagttggtgagtttcatttatgtctattctttttcattacccacccaattttctgtatttacatga

SEQ ID NO: 454976 - DNA, 2445 bp, Homo sapiens
atgggaaatagctccggatggaggggcccagcagggcagaggcgaatgctatttctcttcctgctctctttgttagaccaggttctctccgaaccgatccgctacgctattcccgaggagctggacaggggctcgctggtagggaacctcgccaaggacctggggtttggcgtgggggatttacctactaggaacctgcgggttattgcagagaagaaattctttaccgtgagccccgaaaatgggaacttacttgtgagcgaccgtatagaccgagaggagatttgtggcaagaagtcgacgtgtgttctggaatttgaaatggttgctgaaaagcctttaaacttttttcatgtaactgtgctgatccaggatattaacgacaacccaccgacctttagccaaaatatcactgagctggaaatcagcgaactggctctcactggagccacatttgccctggaatctgcgcaagatcctgatgtaggtgtcaattcgctgcagcagtactacctcagccctgatccgcacttctctttgattcagaaggagaacctggatggcagtaggtacccagagctagtactgaaagcacccctggacagggaagagcagccacatcaccacctggtcctcacagctgtggatgggggcgagccctccagaagctgtaccacccagatcagggtaattgtcgcagatgcaaatgataaccccccagtatttactcaggacatgtacagggtcaatgttgcagagaacctgcccgctggctcctccgtattaaaagtgatggccattgacatggatgagggcatcaatgccgaaatcatctatgccttcatcaatattggcaaggaagtgagacaactgttcaagctggacagtaaaacgggggaactcaccactattggagaactggactttgaagagagagatagctacacaattggggtggaagcaaaggatggtggacatcacactgcatattgtaaagtacagatagatatttcagatgaaaatgacaatgccccggagataaccctggcttctgaatcccaacatatacaagaagatgctgagctggggactgccgttgccctgatcaaaacacatgatctagattctggatttaatggagaaatcctatgccaactaaaaggaaacttcccctttaaaatcgttcaagataccaaaaacacatacaggttggtgacagatggagccctggaccgggagcagatcccagaatacaatgtgacgatcacagctaccgacaaaggcaatccaccgctctcctccagcaagaccatcactctgcacatccttgatgtcaacgacaacgttcccgttttccaccaggcctcctacaccgtgcatgtagctgagaacaatccgcctggagcctccattgcgcatgtcagagcctcggatcccgacttgggacctaatggccttgtctcctactacatcgtggccagtgacctggagccgcgggagctgtcgtcctacgtgtccgtgagcgcgcggagcggggtggtgttcgcgcagcgagccttcgaccacgagcagctgcgtgccttcgagctcactctgcaggcccgcgaccagggctcgcctacgctcagcgccaacgtgagcctgcgcgtgttggtggacgaccgcaacgacaatgcaccgctggtgctgtacccagctctggggcccgaaggctctgcgctcttcgatatggtgccgcgctctgcagagcctggctacctggtgaccaaggtggtggcggtggacgcagactcgggatacaacgcctggctgtcctaccacattgtgcaggccagcgagcccgggctgttcagcctgggcctgcgcacgggtgaggtgcgcacggcgcgtaccttgggcgacagggaggccgcccgccagcgcctgctggtcactgtgcgtgatggaggacagcagcctctttcagccaccgtcatgctgcacctaatcttcgcagatagcttgcaagagatacaacctgaccttagcgaccgccccactccctctgaccctcaggcggagctacagtttcacctagtagtggcgttggccttgatctcagtgctcttcctcctcgcggtgattctggcaatctccctgcgcctgcgatgctcctccagacccgccactgagggctactttcagcctggtgtctgcttcaagactgtacctggagttctccccacctacagcgaaaggactttgccttattcctacaatccgtgtgctgcctcacattcctcaaacaccgagtttaaatttctcaatataaaggctgaaaatgctgcaccacaagatcttctatgtgatgaagcctcttggtttgaaagtaatgacaatccagaaatgccttctaattcaggcaatttgcaaaaggtgagtttcttcaaacctttccttccataa

SEQ ID NO: 454977 - DNA, 9738 bp, Homo sapiens
cagggcagccccagctcagactccccagcgccagcctttacaccgcttcctcctcggaaaaagaagaattttttcttgaactggaactgcaactaaagtccgttcggagatccaaaaatctgcaatacagaggttatttgtaacccggcgtctccaggctggtgagcaagctgaggagagcaagagggatggggagcggcgccggggagctgggccgggctgagaggctgccagtgctctttctcttcctgctgtctttgttctgcccggcgctctgtgagcagatccgctacaggattcccgaggaaatgcccaagggctccgtagtggggaacctcgccacggacctggggttcagcgtccaggagttaccgactcgaaaactgcgcgtcagttcggagaagccttacttcaccgtgagcgcagagagcggggagttgcttgtgagcagcaggctagacagggaggagatatgcgggaagaagccagcttgtgctctggaatttgaggctgttgctgaaaatccactgaacttttatcacgtgaatgtggagatcgaggacattaatgaccacacgccaaaattcacgcaaaattcctttgagctgcaaataagtgagtctgcacagcctggcacacgatttatattaggatctgcccatgatgcggatattggtagcaacacactgcagaattaccaactcagtcccagtgatcatttctcactgataaataaagagaaatcagatggcagtaaataccctgagatggtattgaagacacctttggacagagaaaagcagaaatcctaccacttgactttgactgccttggactttggagctccacccctaagcagcactgcacagatacacgttctagtgactgatgccaatgataatgctccagtgttcagtcaagacgtatacagggtgagcctttcagaaaacgtgtacccggggaccacggtgctacaggtgactgccacggaccaggatgagggtgtcaatgccgagattactttctctttcagtgaagctagccagatcacccaatttgacctgaactctaacaccggggaaattactgttttaaatacattagattttgaagaagtcaaagaatattccatagttttggaagcaagggacggtggaggaatgattgcgcaatgcacagtggaggtagaagtcatagatgaaaatgacaacgccccagaagtgatattccagtctctacccaacctaattatggaggacgccgagctgggaacacatattgctttgctcaaagtccgtgacaaggattccagacacaatggagaagtgacttgtaaattggaaggtgatgttccatttaaaatattaacttcttcaagaaacacgtataaattagtgacagatgctgttctagaccgcgagcagaatccagagtacaatataaccgttacggcaacagatcggggcaagcctcccctctcctccagttccagcatcaccctgcacattggtgatgtaaatgacaacgctccggttttctcacagtcttcctatatagtccacgtggccgagaacaacccgcctggagcctctatttcacaagtcagggcttctgatccggacttggggcccaacggccaagtctcttactgcatcatggccagtgacctggagcagcgggagctgtcatcctacgtgtccataagcgcggagagcggggtggtgttcgcgcagcgcgccttcgaccacgagcagctgcgcgccttcgaactcacactgcaggcccgcgaccagggctcgccagcgctcagcgcgaacgtgagcctgcgcgtgttagtggacgaccgcaacgacaatgcgccacgggtgctgtaccccgcgctgggtcccgacggctctgcgctcttcgatatggtgccgcacgctgcagagcctggctacttggtgaccaaggtagtggcggtggacgcagactcaggacacaacgcctggctgtcctaccacgtgctgcaggctagcgagcccgggctcttcagcctggggctgcgcacgggcgaagtgcgcacagcgcgtgccttaggcgacagggacgccgtccgccagcgccttctggtcgccgtgcgtgacggtggacagccaccactctcggccactgccacgttgcacctggtcttcgccgacagcttgcaggaggtgctgccggatatcactgaccgccccgacccctctgacctccaggctgagctgcagttttacctagtggtggccttggccttgatctcagtgctcttcctcgtggccatgattctggccattgccttgcgcctgcgacgctcctccagccccgcctcctggagctgcttccagcctggtctctgtgttaaatccgaatccgtggttccccccaactacagcgaggggactttgccttattcctacaatctatgtgttgcacatacaggaaagacggagtttaatttcctaaaatgtagtgagcagttgagttcaggacaagacatactttgcggtgattcatctggggccttatttccactttgtaattccagtgaattgacttcccatcaggtgagtttcctttaagtataatttaatgctcattgcctacccatttctccatattcacaagaaaatatacatatttgcaggaaaatatataatttttagatgtcatggatcattttaggaaagttgtagtcagttaaaaagctgtcatatcattctacaaaggaggagtaaagtaggagcaattgtgtggcccaacatttgtttgttttttagccaagcttagatttataaagcaatgagggtgtggttttaaccacaaagtgaaagtgttagacagttgttggctctctcctaaaaagtgaatgagatttttcctatacattttccttcttgttgactaatatatgatgaatacttttttcagcttggatataccataaatataaaaataataaagccaaagaatttaagctaaaattcaacacttttcttaactaatttaactggtatggtctccatagtagtccactgttttgtttcctgtgttaacttcccttttgtttcaaaagctcttagaataaggagtcaactggatttttatgtccatggaccccttgtgattatatgcagtgtacgctgtgtgtgcgtgtgtgtgtgtgtgtgtgtgagagagatccttttacttagaaaaaggtctactatgctcattagaagatcaaaagcagattctccttacttgtaacataggagtttcaggattaatctgtattcaagctcattctatatccttcatcaaagaaaagacaatgttttgtgtctgttgtccctctcacacacagccctaatatataatgtgtaactgccttatctgcagccctaaactaatatagctagaggtcttctaatcattctcctacctctaggaaagaaatatagtcttgaaaactgccaatctggtgtgcatacaaaatatatacaaaataccaaggaacattatatgagccttttgctaggtatatctaagcaactgcttcagttaatggccactttacaaattgctgaaagaaggaaacgtctttcgattcttttttttttctttttttttttttgagacagagtctctgtctgttactcaggctgtagtgcagtggcacaatgatagctccctccagcctcaaactcctgggctcaagcattccttctgcatcagcctcctgactagctggaactcaggctcatgccaccagacctggctaatttttctgttttcagtagagaaaatattttctttcactaatttaactggtatggtttccattgtctacccagttttccatatgcataagaaaatatattcacaggaaaatataaagttttcagatttcatgagtggttttaagaaagttttagtcagtgaaaaaactatcataccagtcttcaaaggaagggtgaaataagttcatctgctacgttgcccaggctggtcttgaagggaaacagacttttttgtagtcatacttatcctttggcttcttagtaagtattatatagtcattactttttgcagttttttagatcaaagtgttaatgtaggtaaagttaattttagaatatatgtaaaagtcaagtctgctttaaatttaatcatctctttggtgaaagggatgggatggagctttgctttttatcatatattcatctgtacctttcaagtattcaaatagaaaaatataaacaatgtaaataaaatagcaaaacaatgtaatatctcataaaactgcaatggtaaaagcatttatcctattgaaattccacaatttttatttgaaaatattatcgacatgtaattcaagtggcatttagaagaataatttaaaagcaacaactctatagaaagcttgtaaaatgattaagtagtttaaaccaaataaaacaatttctgagtcagtcatctccagtaggtctattttagtctcaagataaattcatttctggtgacaactgaagttcttagttatttgttagtatatattggagacatttacaataaagcttagagcacaatgggaaatgaaagtatcatgttttttttaagaccaaatgtattgcagaaatgtgagtaatttaatccgatgctacaatctgatcattctgatctaatctgatcatttaataacactaaataaaaccttcatctcacattctttggctgtttcttttaaaatatgggtttacggataaatcaaataaattcaaaacaaagtaataagcaaatgatttttttttctcagtaatctagtagagtattacatttagaagtaatctgtatctcagtgcagtaactatttaggactgtaagcgccgctgttcacctactggaagacaaatgcaaccgaaaacactcagatctcacacctcacgaagacccgcagatgccacaaactaactgctggactgcagcgaaacccgacccctgtttggaggcactccaggtttccggaggattgtcatctccatagctgcggcaagaaactaaataagacccatttatgcacagtgaagattctgagaggattctgcagcaaaacaacaatggccgctccacagagtcgccccagacgcggcgagctgatcctgctgtgcgcgctgctgggaacgctgtgggaaatcgggaggggacagattcgctactctgtgccagaagagacggacaaaggctccttcgtgggtaatatctccaaggacctggggctggacccccggaagctggcgaagcacggagtccgtatcgtctccagaggtaggacgcagctctttgctctgaacccgcgcagcggcagcttgatcaccgcgggcaggatagatcgggaggagctctgcgctcagagcccgcggtgtctgataaatattaacaccctggttgaggataaaggaaaactctttggggtagaaatagaaataattgatattaacgataataacccaaaattccaggtcgaagatctagaagtaaaaattaacgaaatcgcggttcctggagcacgttatccactcccagaagctgttgacccggatgtgggcgtgaactccctccagagctaccagctcagccccaatcaccacttctccctggacgtgcagactggagacaatggagccataaacccagagctggtgctggagcgcgccctggacagggaggaagaggctgctcaccacctggtcctcacggcctcggatggcggcaagccgcctcgctctagcacagtgcgcatccacgtgacagtgttggatacaaatgacaatgccccggtttttcctcacccgatttaccgagtgaaagtccttgagaacatgcccccaggcacgcggctgcttactgtaacagccagcgacccggatgagggaatcaacggaaaagtggcatacaaattccggaaaattaatgaaaaacaaactccgttattccagcttaatgaaaatactggggaaatatcaatagcaaaaagtctagattatgaagaatgttcattttatgaaatggaaatacaagccgaagatgtgggggcacttctggggaggaccaaattgctcatttcggtggaagatgtaaatgacaatagaccagaagtgatcattacgtctttgtttagcccagtgttagaaaattctcttcccgggacagtaattgccttcttgagtgtgcatgaccaagactctggaaagaatggtcaagttgtctgttacacacgtgataatttaccttttaaattagaaaagtcaataggtaattattatagattagtgacaaggaaatatttggaccgagaaaatgtctctatctacaatatcacagtgatggcctcagatctaggaacaccacctctgtccactgaaactcaaatcgctctgcacgtggcagacattaacgacaaccctcctactttccctcatgcctcctactcagcgtatatcctagagaacaacctgagaggagcctccatcttttccttgactgcacacgaccccgacagccaggagaatgcccaggtcacttactctgtgaccgaggacacgctgcagggggcgcccctgtcctcgtatatctccatcaactctgacaccggtgtcctgtatgcgctgcaatctttcgactatgagcagatccgagacctgcagctactggtaacagccagcgacagcggggacccgcccctcagcagcaacatgtcactgagcctgttcgtgctggaccagaatgacaacgcgcccgagatcctgtaccccgccctccccacagacggttccactggcgtggagctggcgccccgctccgcagagcgtggctacctggtgaccaaggtggtggcggtggacagagactcgggccagaacgcctggctgtcctaccgcctgctcaaggccagcgagccgggactcttctcggtgggtctgcacacgggcgaggtgcgcacggcgcgagccctgctggacagagatgcgctcaagcagagcctcgtggtggccgtccaggaccatggccagccccctctctccgccactgtcacgctcaccgtagccgtggctgacagcatccccgaagtcctgaccgagttgggcagtctgaagccttcggtcgacccgaacgattcgagccttacactctatctcgtggtggcagtggctgccatctcctgtgtcttcctcgcctttgtcgctgtgcttctggggctcaggctgaggcgctggcacaagtcacgcctgctccaggattccggtggcagattggtaggcgtgcctgcctcacattttgtgggtgttgaggaggtacaggctttcctgcagacctattcccaggaagtctccctcaccgccgactcgcggaagagtcacctgatctttccccagcccaactacgcagacatgctcatcagtcaggagggctgtgagaaaaatgattctttgttaacatccgtagattttcatgaatataagaatgaagctgatcatggtcagcaagccccgcccaacacggactggcgtttctctcaggcccagagacccggcaccagcggctcccaaaatggcgatgacaccggcacctggcccaacaaccagtttgacacagagatgctgcaagccatgatcttggcgtccgccagtgaagctgctgatgggagctccaccctgggagggggtgccggcaccatgggattgagcgcccgctacggaccccagttcaccctgcagcacgtgcccgactaccgccagaatgtctacatcccaggcagcaatgccacactgaccaacgcagctggcaagcgggatggcaaggccccagcaggtggcaatggcaacaagaagaagtcgggcaagaaggagaagaagtaacatggaggccaggccaagagccacagggcggcctctccccaaccagcccagcttctccttacctgcacccaggcctcagagtttcagggctaacccccagaatactggtaggggccaaggccatgctccccttgggaaacagaaacaagtgcccagtcagcacctaccccttcccccccagggggttgaatatgcaaaagcagttccgctgggaacccccatccaatcaactgctgtacccatgggggtagtggggttactgtagacaccaagaaccatttgccacaccccgtttagttacagctgaactcctccatcttccaaatcaatcaggcccatccatcccatgcctccctcctccccaccccactccaacagttcctctttcccgagtaaggtggttggggtgttgaagtaccaagtaacctacaagcctcctagttctgaaaagttggaagggcatcatgacctcttggcctctcctttgattctcaatcttcccccaaagcatggtttggtgccagccccttcacctccttccagagcccaagatcaatgctcaagttttggaggacatgatcaccatccccatggtactgatgcttgctggatttagggagggcattttgctaccaagcctcttcccaacgccctggggaccagtcttctgttttgtttttcattgtttgacgtttccactgcatgccttgacttcccccacctcctcctcaaacaagagactccactgcatgttccaagacagtatggggtggtaagataaggaagggaagtgtgtggatgtggatggtgggggcatggacaaagcttgacacatcaagttatcaaggccttggaggaggctctgtatgtcctcaggggactgacaacatcctccagattccagccataaaccaataactaggctggacccttcccactacataatagggctcagcccaggcagccagctttgggctgagctaacaggaccaatggattaaactggcatttcagtccaaggaagctcgaagcaggtttaggaccaggtccccttgagaggtcagaggggcctctgtgggtgctgggtactccagaggtgccactggtggaagggtcagcggagccccagcaggaagggtgggccagccaggccattcttagtccctgggttggggaggcagggagctagggcagggaccaaatgaacagaaagtctcagcccaggatggggcttcttcaacagggcccctgccctcctgaagcctcagtccttcaccttgccaggtgccgtttctcttccgtgaaggccactgcccaggtccccagtgcgccccctagtggccatagcctggttaaagttccccagtgcctccttgtgcatagaccttcttctcccacccccttctgcccctgggtccccggccatccagcggggctgccagagaaccccagacctgcccttacagtagtgtagcgccccctccctctttcggctggtgtagaatagccagtagtgtagtgcggtgtgcttttacgtgatggcgggtgggcagcgggcggcgggctccgcgcagccgtctgtccttgatctgcccgcggcggcccgtgttgtgttttgtgctgtgtccacgcgctaaggcgaccccctcccccgtactgacttctcctataagcgcttctcttcgcatagtcacgtagctcccaccccaccctcttcctgtgtctcacgcaagttttatactctaatatttatatggctttttttcttcgacaaaaaaataataaaacgtttcttctgaaaagctaaacgtttctgtataag

SEQ ID NO: 454978 - DNA, 4496 bp, Homo sapiens
atgaccaattgcctgagtttccgaaatggcagaggactggccctgctgtgcgcgctcctggggacgctgtgcgaaacaggatccggtcagatccgctactcggtgtctgaggagctagataaaggttccttcgtgggcaacatcgctaacgacctggggctagagccccgggagctggcggagcgcggagtccgcatcgtctccagaggtaggacgcagcttttctctctgaatccgcaaagcggcagcttggtcaccgcggagaggatagaccgggaggagctctgcgctcagatcccgctgtgtctgaggaattggaaataaaaattggtgaactaacggttcctggaacccgatttccaattaaaactgcttttgacccagatgtaggcattaactccctgcagaactacaagcttagccccaatgactacttctctctggctgtgaatagcgtctctgagggggccaagtatccagagctggtgctggagcgggccctggaccgtgagaaaaaagaaattcaccagcttgtcctggttgcctctgatggtggcgaccctgtccactctggcaacttgcacatccaagtgatagtcctggatgcaaatgacaacccaccaatgtttactcagcctgagtaccgtgtgagtgtttgggagaacgtgcctgtgggtacccggctgctcacggtgaatgccactgaccctgacgagggattcaatgctcaagtgtcttatattctagataaaatgcctgggaaaatcgctgagattttccatcttaactcagtgagtggagaagtatcaatattaaaaagtctagattatgaggatgccatgttctatgaaattaaaattgaagcacaggatggaccaggtcttctttcaagagccaagattctagtcacggttctggatgtgaatgacaatgctccagaaattacaatcacgtctctcacaagctcagtcccagaagagggcaccgttggaagagaaattgctcttatcgacgtgcatgaccgagattctgggcagaatgggcaggttgaagtttttgtcctgggaaatctgccatttaagttagaaaaatcaatagatcaatattaccgcttagtgacggccacatccctggaccgcgaacaaatatcagaatataacattagtctgagagcctcagatgggggaagcccgccactgtccacagaaactcacatcaccctgcatgtgattgacatcaatgacaacccacccaccttccctcatttatcctactccgcctacattccagaaaacaaccccagaggagcctccatcttctcagtgacagcccaggacccagatagcaacaacaacgcccgcatcacttatgcattgaccgaggacactctccagggggcgcccctgtcctccttcgtctctatcaactccaacactggcgtcctatacgcgctgagatccttcgactacgagcaatttagagacttaaagctactggtgacagccagcgacagcgggaaccctccactcagcagcaacgtgtcgctgaacctgttcgtgctggaccagaacgacaacgcgcccgagatcctgtaccccgccctccccacagacggttccactggcgtggagctggcgcctcgctccgcagagcccggctacctggtgaccaaggtggtggcggtggacagagactcgggccagaacgcctggctgtcctaccgcctgctcaaggccagcgagccgggactcttctcggtgggtctgcacacgggcgaggtgcgcacggcgcgagccctgctggacagagacgcgctcaagcagagcctcgtggtggccgtccaggaccacggccagccccctctctccgccactgtcacgctcaccgtggccgtggccgacaggatccccgacatcctggccgacctgggcagcctcgagccctccgccaaacccaacgattcggacctcactctgtacctggtggtggcggtggccgcggtctcctgcgtcttcctggccttcgtcatcgtgctgctggcgctcaggctgcggcgctggcacaagtcacgcctgctgcaggcttcgggaggcggcttggcgagtacgcccggctcgcactttgtgggcgcggacggggttcgggctttcctgcagacctattcccacgaggtctccctcactgcggactcgcggaagagccacctgattttcccccagcccaactatgcggacacgctcatcagccaggagagctgtgagaaaagcgagcctcttctgataactcaggatttacttgaaatgaaaggagattccaacctactcaagccccgcccaacacggactggcgtttctctcaggcccagagacccggcaccagcggctcccaaaatggcgatgacaccggcacctggcccaacaaccagtttgacacagagatgctgcaagccatgatcttggcgtccgccagtgaagctgctgatgggagctccaccctgggagggggtgccggcaccatgggattgagcgcccgctacggaccccagttcaccctgcagcacgtgcccgactaccgccagaatgtctacatcccaggcagcaatgccacactgaccaacgcagctggcaagcgggatggcaaggccccagcaggtggcaatggcaacaagaagaagtcgggcaagaaggagaagaagtaacatggaggccaggccaagagccacagggcggcctctccccaaccagcccagcttctccttacctgcacccaggcctcagagtttcagggctaacccccagaatactggtaggggccaaggccatgctccccttgggaaacagaaacaagtgcccagtcagcacctaccccttcccccccagggggttgaatatgcaaaagcagttccgctgggaacccccatccaatcaactgctgtacccatgggggtagtggggttactgtagacaccaagaaccatttgccacaccccgtttagttacagctgaactcctccatcttccaaatcaatcaggcccatccatcccatgcctccctcctccccaccccactccaacagttcctctttcccgagtaaggtggttggggtgttgaagtaccaagtaacctacaagcctcctagttctgaaaagttggaagggcatcatgacctcttggcctctcctttgattctcaatcttcccccaaagcatggtttggtgccagccccttcacctccttccagagcccaagatcaatgctcaagttttggaggacatgatcaccatccccatggtactgatgcttgctggatttagggagggcattttgctaccaagcctcttcccaacgccctggggaccagtcttctgttttgtttttcattgtttgacgtttccactgcatgccttgacttcccccacctcctcctcaaacaagagactccactgcatgttccaagacagtatggggtggtaagataaggaagggaagtgtgtggatgtggatggtgggggcatggacaaagcttgacacatcaagttatcaaggccttggaggaggctctgtatgtcctcaggggactgacaacatcctccagattccagccataaaccaataactaggctggacccttcccactacataatagggctcagcccaggcagccagctttgggctgagctaacaggaccaatggattaaactggcatttcagtccaaggaagctcgaagcaggtttaggaccaggtccccttgagaggtcagaggggcctctgtgggtgctgggtactccagaggtgccactggtggaagggtcagcggagccccagcaggaagggtgggccagccaggccattcttagtccctgggttggggaggcagggagctagggcagggaccaaatgaacagaaagtctcagcccaggatggggcttcttcaacagggcccctgccctcctgaagcctcagtccttcaccttgccaggtgccgtttctcttccgtgaaggccactgcccaggtccccagtgcgccccctagtggccatagcctggttaaagttccccagtgcctccttgtgcatagaccttcttctcccacccccttctgcccctgggtccccggccatccagcggggctgccagagaaccccagacctgcccttacagtagtgtagcgccccctccctctttcggctggtgtagaatagccagtagtgtagtgcggtgtgcttttacgtgatggcgggtgggcagcgggcggcgggctccgcgcagccgtctgtccttgatctgcccgcggcggcccgtgttgtgttttgtgctgtgtccacgcgctaaggcgaccccctcccccgtactgacttctcctataagcgcttctcttcgcatagtcacgtagctcccaccccaccctcttcctgtgtctcacgcaagttttatactctaatatttatatggctttttttcttcgacaaaaaaataataaaacgtttcttctg

SEQ ID NO: 454979 - DNA, 2925 bp, Homo sapiens
attggctgggactctgtgtgccgctgtcggccaatgaagacgctggagatcgggcccctgcccgtcccctttctgcgccccgggatgaggcagagactgaacagccggcgagcaaatcaacggcatccagaaagccatgtcggactcggcgcccagcgcccaagcgctaacccgctgaaagtttctcagcgaaatctcagggacgatctggaccccgctgagaggaactgcttttgagtgagatggtcccagaggcctggaggagcggactggtaagcaccgggagggtagtgggagttttgcttctgcttggtgccttgaacaaggcttccacggtcattcactatgagttcccctctggctctgccccccgggagcagaaaaaaaatctcaccttttatctacttctttctctaatcctggtttctgtggggtttgtggtcacagtgttcggagtaatcatattcaaagtttacaagtggaagcagtctagagacctataccgagccccggtgagctcactgtaccgaacaccagggccctccttgcacgcggacgccgtgcggggaggcctgatgtcgccgcacctttaccatcaggtgtatctcaccacggactcccgccgcagcgacccgctgctgaagaaacctggtgcagccagtccactggccagccgccagaacacgctgcggagctgtgatccggtgttctataggcaggtgttgggtgcagagagcgcccctcccggacagcaagccccgcccaacacggactggcgtttctctcaggcccagagacccggcaccagcggctcccaaaatggcgatgacaccggcacctggcccaacaaccagtttgacacagagatgctgcaagccatgatcttggcgtccgccagtgaagctgctgatgggagctccaccctgggagggggtgccggcaccatgggattgagcgcccgctacggaccccagttcaccctgcagcacgtgcccgactaccgccagaatgtctacatcccaggcagcaatgccacactgaccaacgcagctggcaagcgggatggcaaggccccagcaggtggcaatggcaacaagaagaagtcgggcaagaaggagaagaagtaacatggaggccaggccaagagccacagggcggcctctccccaaccagcccagcttctccttacctgcacccaggcctcagagtttcagggctaacccccagaatactggtaggggccaaggccatgctccccttgggaaacagaaacaagtgcccagtcagcacctaccccttcccccccagggggttgaatatgcaaaagcagttccgctgggaacccccatccaatcaactgctgtacccatgggggtagtggggttactgtagacaccaagaaccatttgccacaccccgtttagttacagctgaactcctccatcttccaaatcaatcaggcccatccatcccatgcctccctcctccccaccccactccaacagttcctctttcccgagtaaggtggttggggtgttgaagtaccaagtaacctacaagcctcctagttctgaaaagttggaagggcatcatgacctcttggcctctcctttgattctcaatcttcccccaaagcatggtttggtgccagccccttcacctccttccagagcccaagatcaatgctcaagttttggaggacatgatcaccatccccatggtactgatgcttgctggatttagggagggcattttgctaccaagcctcttcccaacgccctggggaccagtcttctgttttgtttttcattgtttgacgtttccactgcatgccttgacttcccccacctcctcctcaaacaagagactccactgcatgttccaagacagtatggggtggtaagataaggaagggaagtgtgtggatgtggatggtgggggcatggacaaagcttgacacatcaagttatcaaggccttggaggaggctctgtatgtcctcaggggactgacaacatcctccagattccagccataaaccaataactaggctggacccttcccactacataatagggctcagcccaggcagccagctttgggctgagctaacaggaccaatggattaaactggcatttcagtccaaggaagctcgaagcaggtttaggaccaggtccccttgagaggtcagaggggcctctgtgggtgctgggtactccagaggtgccactggtggaagggtcagcggagccccagcaggaagggtgggccagccaggccattcttagtccctgggttggggaggcagggagctagggcagggaccaaatgaacagaaagtctcagcccaggatggggcttcttcaacagggcccctgccctcctgaagcctcagtccttcaccttgccaggtgccgtttctcttccgtgaaggccactgcccaggtccccagtgcgccccctagtggccatagcctggttaaagttccccagtgcctccttgtgcatagaccttcttctcccacccccttctgcccctgggtccccggccatccagcggggctgccagagaaccccagacctgcccttacagtagtgtagcgccccctccctctttcggctggtgtagaatagccagtagtgtagtgcggtgtgcttttacgtgatggcgggtgggcagcgggcggcgggctccgcgcagccgtctgtccttgatctgcccgcggcggcccgtgttgtgttttgtgctgtgtccacgcgctaaggcgaccccctcccccgtactgacttctcctataagcgcttctcttcgcatagtcacgtagctcccaccccaccctcttcctgtgtctcacgcaagttttatactctaatatttatatggctttttttcttcgacaaaaaaataataaaacgtttcttctg

SEQ ID NO: 454980 - DNA, 2287 bp, Homo sapiens
gcggggaaagggagataggtgtctccagctgctgtggctgtttggggcgggtcggcttcatccgcgtctcaggagcaagtagagaattagcgggcggcagcaatgctccgcaagcaagccccgcccaacacggactggcgtttctctcaggcccagagacccggcaccagcggctcccaaaatggcgatgacaccggcacctggcccaacaaccagtttgacacagagatgctgcaagccatgatcttggcgtccgccagtgaagctgctgatgggagctccaccctgggagggggtgccggcaccatgggattgagcgcccgctacggaccccagttcaccctgcagcacgtgcccgactaccgccagaatgtctacatcccaggcagcaatgccacactgaccaacgcagctggcaagcgggatggcaaggccccagcaggtggcaatggcaacaagaagaagtcgggcaagaaggagaagaagtaacatggaggccaggccaagagccacagggcggcctctccccaaccagcccagcttctccttacctgcacccaggcctcagagtttcagggctaacccccagaatactggtaggggccaaggccatgctccccttgggaaacagaaacaagtgcccagtcagcacctaccccttcccccccagggggttgaatatgcaaaagcagttccgctgggaacccccatccaatcaactgctgtacccatgggggtagtggggttactgtagacaccaagaaccatttgccacaccccgtttagttacagctgaactcctccatcttccaaatcaatcaggcccatccatcccatgcctccctcctccccaccccactccaacagttcctctttcccgagtaaggtggttggggtgttgaagtaccaagtaacctacaagcctcctagttctgaaaagttggaagggcatcatgacctcttggcctctcctttgattctcaatcttcccccaaagcatggtttggtgccagccccttcacctccttccagagcccaagatcaatgctcaagttttggaggacatgatcaccatccccatggtactgatgcttgctggatttagggagggcattttgctaccaagcctcttcccaacgccctggggaccagtcttctgttttgtttttcattgtttgacgtttccactgcatgccttgacttcccccacctcctcctcaaacaagagactccactgcatgttccaagacagtatggggtggtaagataaggaagggaagtgtgtggatgtggatggtgggggcatggacaaagcttgacacatcaagttatcaaggccttggaggaggctctgtatgtcctcaggggactgacaacatcctccagattccagccataaaccaataactaggctggacccttcccactacataatagggctcagcccaggcagccagctttgggctgagctaacaggaccaatggattaaactggcatttcagtccaaggaagctcgaagcaggtttaggaccaggtccccttgagaggtcagaggggcctctgtgggtgctgggtactccagaggtgccactggtggaagggtcagcggagccccagcaggaagggtgggccagccaggccattcttagtccctgggttggggaggcagggagctagggcagggaccaaatgaacagaaagtctcagcccaggatggggcttcttcaacagggcccctgccctcctgaagcctcagtccttcaccttgccaggtgccgtttctcttccgtgaaggccactgcccaggtccccagtgcgccccctagtggccatagcctggttaaagttccccagtgcctccttgtgcatagaccttcttctcccacccccttctgcccctgggtccccggccatccagcggggctgccagagaaccccagacctgcccttacagtagtgtagcgccccctccctctttcggctggtgtagaatagccagtagtgtagtgcggtgtgcttttacgtgatggcgggtgggcagcgggcggcgggctccgcgcagccgtctgtccttgatctgcccgcggcggcccgtgttgtgttttgtgctgtgtccacgcgctaaggcgaccccctcccccgtactgacttctcctataagcgcttctcttcgcatagtcacgtagctcccaccccaccctcttcctgtgtctcacgcaagttttatactctaatatttatatggctttttttcttcgacaaaaaaataataaaacgtttcttctg

SEQ ID NO: 454981 - DNA, 10189 bp, Homo sapiens
cagggcagccccagctcagactccccagcgccagcctttacaccgcttcctcctcggaaaaagaagaattttttcttgaactggaactgcaactaaagtccgttcggagatccaaaaatctgcaatacagaggttatttgtaacccggcgtctccaggctggtgagcaagctgaggagagcaagagggatggggagcggcgccggggagctgggccgggctgagaggctgccagtgctctttctcttcctgctgtctttgttctgcccggcgctctgtgagcagatccgctacaggattcccgaggaaatgcccaagggctccgtagtggggaacctcgccacggacctggggttcagcgtccaggagttaccgactcgaaaactgcgcgtcagttcggagaagccttacttcaccgtgagcgcagagagcggggagttgcttgtgagcagcaggctagacagggaggagatatgcgggaagaagccagcttgtgctctggaatttgaggctgttgctgaaaatccactgaacttttatcacgtgaatgtggagatcgaggacattaatgaccacacgccaaaattcacgcaaaattcctttgagctgcaaataagtgagtctgcacagcctggcacacgatttatattaggatctgcccatgatgcggatattggtagcaacacactgcagaattaccaactcagtcccagtgatcatttctcactgataaataaagagaaatcagatggcagtaaataccctgagatggtattgaagacacctttggacagagaaaagcagaaatcctaccacttgactttgactgccttggactttggagctccacccctaagcagcactgcacagatacacgttctagtgactgatgccaatgataatgctccagtgttcagtcaagacgtatacagggtgagcctttcagaaaacgtgtacccggggaccacggtgctacaggtgactgccacggaccaggatgagggtgtcaatgccgagattactttctctttcagtgaagctagccagatcacccaatttgacctgaactctaacaccggggaaattactgttttaaatacattagattttgaagaagtcaaagaatattccatagttttggaagcaagggacggtggaggaatgattgcgcaatgcacagtggaggtagaagtcatagatgaaaatgacaacgccccagaagtgatattccagtctctacccaacctaattatggaggacgccgagctgggaacacatattgctttgctcaaagtccgtgacaaggattccagacacaatggagaagtgacttgtaaattggaaggtgatgttccatttaaaatattaacttcttcaagaaacacgtataaattagtgacagatgctgttctagaccgcgagcagaatccagagtacaatataaccgttacggcaacagatcggggcaagcctcccctctcctccagttccagcatcaccctgcacattggtgatgtaaatgacaacgctccggttttctcacagtcttcctatatagtccacgtggccgagaacaacccgcctggagcctctatttcacaagtcagggcttctgatccggacttggggcccaacggccaagtctcttactgcatcatggccagtgacctggagcagcgggagctgtcatcctacgtgtccataagcgcggagagcggggtggtgttcgcgcagcgcgccttcgaccacgagcagctgcgcgccttcgaactcacactgcaggcccgcgaccagggctcgccagcgctcagcgcgaacgtgagcctgcgcgtgttagtggacgaccgcaacgacaatgcgccacgggtgctgtaccccgcgctgggtcccgacggctctgcgctcttcgatatggtgccgcacgctgcagagcctggctacttggtgaccaaggtagtggcggtggacgcagactcaggacacaacgcctggctgtcctaccacgtgctgcaggctagcgagcccgggctcttcagcctggggctgcgcacgggcgaagtgcgcacagcgcgtgccttaggcgacagggacgccgtccgccagcgccttctggtcgccgtgcgtgacggtggacagccaccactctcggccactgccacgttgcacctggtcttcgccgacagcttgcaggaggtgctgccggatatcactgaccgccccgacccctctgacctccaggctgagctgcagttttacctagtggtggccttggccttgatctcagtgctcttcctcgtggccatgattctggccattgccttgcgcctgcgacgctcctccagccccgcctcctggagctgcttccagcctggtctctgtgttaaatccgaatccgtggttccccccaactacagcgaggggactttgccttattcctacaatctatgtgttgcacatacaggaaagacggagtttaatttcctaaaatgtagtgagcagttgagttcaggacaagacatactttgcggtgattcatctggggccttatttccactttgtaattccagtgaattgacttcccatcaggtgagtttcctttaagtataatttaatgctcattgcctacccatttctccatattcacaagaaaatatacatatttgcaggaaaatatataatttttagatgtcatggatcattttaggaaagttgtagtcagttaaaaagctgtcatatcattctacaaaggaggagtaaagtaggagcaattgtgtggcccaacatttgtttgttttttagccaagcttagatttataaagcaatgagggtgtggttttaaccacaaagtgaaagtgttagacagttgttggctctctcctaaaaagtgaatgagatttttcctatacattttccttcttgttgactaatatatgatgaatacttttttcagcttggatataccataaatataaaaataataaagccaaagaatttaagctaaaattcaacacttttcttaactaatttaactggtatggtctccatagtagtccactgttttgtttcctgtgttaacttcccttttgtttcaaaagctcttagaataaggagtcaactggatttttatgtccatggaccccttgtgattatatgcagtgtacgctgtgtgtgcgtgtgtgtgtgtgtgtgtgtgagagagatccttttacttagaaaaaggtctactatgctcattagaagatcaaaagcagattctccttacttgtaacataggagtttcaggattaatctgtattcaagctcattctatatccttcatcaaagaaaagacaatgttttgtgtctgttgtccctctcacacacagccctaatatataatgtgtaactgccttatctgcagccctaaactaatatagctagaggtcttctaatcattctcctacctctaggaaagaaatatagtcttgaaaactgccaatctggtgtgcatacaaaatatatacaaaataccaaggaacattatatgagccttttgctaggtatatctaagcaactgcttcagttaatggccactttacaaattgctgaaagaaggaaacgtctttcgattcttttttttttctttttttttttttgagacagagtctctgtctgttactcaggctgtagtgcagtggcacaatgatagctccctccagcctcaaactcctgggctcaagcattccttctgcatcagcctcctgactagctggaactcaggctcatgccaccagacctggctaatttttctgttttcagtagagaaaatattttctttcactaatttaactggtatggtttccattgtctacccagttttccatatgcataagaaaatatattcacaggaaaatataaagttttcagatttcatgagtggttttaagaaagttttagtcagtgaaaaaactatcataccagtcttcaaaggaagggtgaaataagttcatctgctacgttgcccaggctggtcttgaagggaaacagacttttttgtagtcatacttatcctttggcttcttagtaagtattatatagtcattactttttgcagttttttagatcaaagtgttaatgtaggtaaagttaattttagaatatatgtaaaagtcaagtctgctttaaatttaatcatctctttggtgaaagggatgggatggagctttgctttttatcatatattcatctgtacctttcaagtattcaaatagaaaaatataaacaatgtaaataaaatagcaaaacaatgtaatatctcataaaactgcaatggtaaaagcatttatcctattgaaattccacaatttttatttgaaaatattatcgacatgtaattcaagtggcatttagaagaataatttaaaagcaacaactctatagaaagcttgtaaaatgattaagtagtttaaaccaaataaaacaatttctgagtcagtcatctccagtaggtctattttagtctcaagataaattcatttctggtgacaactgaagttcttagttatttgttagtatatattggagacatttacaataaagcttagagcacaatgggaaatgaaagtatcatgttttttttaagaccaaatgtattgcagaaatgtgagtaatttaatccgatgctacaatctgatcattctgatctaatctgatcatttaataacactaaataaaaccttcatctcacattctttggctgtttcttttaaaatatgggtttacggataaatcaaataaattcaaaacaaagtaataagcaaatgatttttttttctcagtaatctagtagagtattacatttagaagtaatctgtatctcagtgcagtaactatttaggactgtaagcgccgctgttcacctactggaagacaaatgcaaccgaaaacactcagatctcacacctcacgaagacccgcagatgccacaaactaactgctggactgcagcgaaacccgacccctgtttggaggcactccaggtttccggaggattgtcatctccatagctgcggcaagaaactaaataagacccatttatgcacagtgaagattctgagaggattctgcagcaaaacaacaatggccgctccacagagtcgccccagacgcggcgagctgatcctgctgtgcgcgctgctgggaacgctgtgggaaatcgggaggggacagattcgctactctgtgccagaagagacggacaaaggctccttcgtgggtaatatctccaaggacctggggctggacccccggaagctggcgaagcacggagtccgtatcgtctccagaggtaggacgcagctctttgctctgaacccgcgcagcggcagcttgatcaccgcgggcaggatagatcgggaggagctctgcgctcagagcccgcggtgtctgataaatattaacaccctggttgaggataaaggaaaactctttggggtagaaatagaaataattgatattaacgataataacccaaaattccaggtcgaagatctagaagtaaaaattaacgaaatcgcggttcctggagcacgttatccactcccagaagctgttgacccggatgtgggcgtgaactccctccagagctaccagctcagccccaatcaccacttctccctggacgtgcagactggagacaatggagccataaacccagagctggtgctggagcgcgccctggacagggaggaagaggctgctcaccacctggtcctcacggcctcggatggcggcaagccgcctcgctctagcacagtgcgcatccacgtgacagtgttggatacaaatgacaatgccccggtttttcctcacccgatttaccgagtgaaagtccttgagaacatgcccccaggcacgcggctgcttactgtaacagccagcgacccggatgagggaatcaacggaaaagtggcatacaaattccggaaaattaatgaaaaacaaactccgttattccagcttaatgaaaatactggggaaatatcaatagcaaaaagtctagattatgaagaatgttcattttatgaaatggaaatacaagccgaagatgtgggggcacttctggggaggaccaaattgctcatttcggtggaagatgtaaatgacaatagaccagaagtgatcattacgtctttgtttagcccagtgttagaaaattctcttcccgggacagtaattgccttcttgagtgtgcatgaccaagactctggaaagaatggtcaagttgtctgttacacacgtgataatttaccttttaaattagaaaagtcaataggtaattattatagattagtgacaaggaaatatttggaccgagaaaatgtctctatctacaatatcacagtgatggcctcagatctaggaacaccacctctgtccactgaaactcaaatcgctctgcacgtggcagacattaacgacaaccctcctactttccctcatgcctcctactcagcgtatatcctagagaacaacctgagaggagcctccatcttttccttgactgcacacgaccccgacagccaggagaatgcccaggtcacttactctgtgaccgaggacacgctgcagggggcgcccctgtcctcgtatatctccatcaactctgacaccggtgtcctgtatgcgctgcaatctttcgactatgagcagatccgagacctgcagctactggtaacagccagcgacagcggggacccgcccctcagcagcaacatgtcactgagcctgttcgtgctggaccagaatgacaacgcgcccgagatcctgtaccccgccctccccacagacggttccactggcgtggagctggcgccccgctccgcagagcgtggctacctggtgaccaaggtggtggcggtggacagagactcgggccagaacgcctggctgtcctaccgcctgctcaaggccagcgagccgggactcttctcggtgggtctgcacacgggcgaggtgcgcacggcgcgagccctgctggacagagatgcgctcaagcagagcctcgtggtggccgtccaggaccatggccagccccctctctccgccactgtcacgctcaccgtagccgtggctgacagcatccccgaagtcctgaccgagttgggcagtctgaagccttcggtcgacccgaacgattcgagccttacactctatctcgtggtggcagtggctgccatctcctgtgtcttcctcgcctttgtcgctgtgcttctggggctcaggctgaggcgctggcacaagtcacgcctgctccaggattccggtggcagattggtaggcgtgcctgcctcacattttgtgggtgttgaggaggtacaggctttcctgcagacctattcccaggaagtctccctcaccgccgactcgcggaagagtcacctgatctttccccagcccaactacgcagacatgctcatcagtcaggagggctgtgagaaaaatgattctttgttaacatccgtagattttcatgaatataagaatgaagctgatcatggtcagcaagccccgcccaacacggactggcgtttctctcaggcccagagacccggcaccagcggctcccaaaatggcgatgacaccggcacctggcccaacaaccagtttgacacagagatgctgcaagccatgatcttggcgtccgccagtgaagctgctgatgggagctccaccctgggagggggtgccggcaccatgggattgagcgcccgctacggaccccagttcaccctgcagcacgtgcccgactaccgccagaatgtctacatcccaggcagcaatgccacactgaccaacgcagctggcaagcgggatggcaaggccccagcaggtggcaatggcaacaagaagaagtcgggcaagaaggagaagaagtaacatggaggccaggccaagagccacagggcggcctctccccaaccagcccagcttctccttacctgcacccaggcctcagagtttcagggctaacccccagaatactggtaggggccaaggccatgctccccttgggaaacagaaacaagtgcccagtcagcacctaccccttcccccccagggggttgaatatgcaaaagcagttccgctgggaacccccatccaatcaactgctgtacccatgggggtagtggggttactgtagacaccaagaaccatttgccacaccccgtttagttacagctgaactcctccatcttccaaatcaatcaggcccatccatcccatgcctccctcctccccaccccactccaacagttcctctttcccgagtaaggtggttggggtgttgaagtaccaagtaacctacaagcctcctagttctgaaaagttggaagggcatcatgacctcttggcctctcctttgattctcaatcttcccccaaagcatggtttggtgccagccccttcacctccttccagagcccaagatcaatgctcaagttttggaggacatgatcaccatccccatggtactgatgcttgctggatttagggagggcattttgctaccaagcctcttcccaacgccctggggaccagtcttctgttttgtttttcattgtttgacgtttccactgcatgccttgacttcccccacctcctcctcaaacaagagactccactgcatgttccaagacagtatggggtggtaagataaggaagggaagtgtgtggatgtggatggtgggggcatggacaaagcttgacacatcaagttatcaaggccttggaggaggctctgtatgtcctcaggggactgacaacatcctccagattccagccataaaccaataactaggctggacccttcccactacataatagggctcagcccaggcagccagctttgggctgagctaacaggaccaatggattaaactggcatttcagtccaaggaagctcgaagcaggtttaggaccaggtccccttgagaggtcagaggggcctctgtgggtgctgggtactccagaggtgccactggtggaagggtcagcggagccccagcaggaagggtgggccagccaggccattcttagtccctgggttggggaggcagggagctagggcagggaccaaatgaacagaaagtctcagcccaggatggggcttcttcaacagggcccctgccctcctgaagcctcagtccttcaccttgccaggtgccgtttctcttccgtgaaggccactgcccaggtccccagtgcgccccctagtggccatagcctggttaaagttccccagtgcctccttgtgcatagaccttcttctcccacccccttctgcccctgggtccccggccatccagcggggctgccagagaaccccagacctgcccttacagtagtgtagcgccccctccctctttcggctggtgtagaatagccagtagtgtagtgcggtgtgcttttacgtgatggcgggtgggcagcgggcggcgggctccgcgcagccgtctgtccttgatctgcccgcggcggcccgtgttgtgttttgtgctgtgtccacgcgctaaggcgaccccctcccccgtactgacttctcctataagcgcttctcttcgcatagtcacgtagctcccaccccaccctcttcctgtgtctcacgcaagttttatactctaatatttatatggctttttttcttcgacaaaaaaataataaaacgtttcttctgaaaaaaaaaagaaagaaagacaaaaaaaaaggggggggggaaagaaagaaaacagagagggggcacaacgacacgaccaggagaccacaggcgtactatagacacaaaaggtggacaccctaagagagagcagaagcaaataatccacagaccaaacgcatgaggccagcagcgtataacacaaagcagaagaacgaggacgaaccaacgagaacacaggggaaaacatcgtgggtgaagcgacacctacactccgctgggagcgagaccaacaccaaccggggcacaaaaccacccccgcagcagacaaaacaaacagagccgcacgagagcgacaccactgaacaagctgcagaagtgtcagacaagagcgccacaacagacaccggcgacaaaaggcacgcgacagcaaaacgactgacgagcaagcggacgccgaacatcggacaatcaacgacacggcgaccacccgaac

SEQ ID NO: 454982 - DNA, 2922 bp, Homo sapiens
  misc_feature (2922)..(2922): n is a, c, g, or t
attggctgggactctgtgtgccgctgtcggccaatgaagacgctggagatcgggcccctgcccgtcccctttctgcgccccgggatgaggcagagactgaacagccggcgagcaaatcaacggcatccagaaagccatgtcggactcggcgcccagcgcccaagcgctaacccgctgaaagtttctcagcgaaatctcagggacgatctggaccccgctgagaggaactgcttttgagtgagatggtcccagaggcctggaggagcggactggtaagcaccgggagggtagtgggagttttgcttctgcttggtgccttgaacaaggcttccacggtcattcactatgagatcccggaggaaagagagaagggtttcgctgtgggcaacgtggtcgcgaaccttggtttggatctcggtagcctctcagcccgcaggttccgggtggtgtctggagctagccgaagattctttgaggtgaaccgggagaccggagagatgtttgtgaacgaccgtctggatcgagaggagctgtgtgggacactgccctcttgcactgtaactctggagttggtagtggagaacccgctggagctgttcagcgtggaagtggtgatccaggacatcaacgacaacaatcctgctttccctacccaggaaatgaaattggagattagcgaggccgtggctccggggacgcgctttccgctcgagagcgcgcacgatcccgatgtgggaagcaactctttacaaacctatgagctgagccgaaatgaatactttgcgcttcgcgtgcagacgcgggaggacagcaccaagtacgcggagctggtgttggagcgcgccctggaccgagaacgggagcctagtctccagttagtgctgacggcgttggacggagggaccccagctctctccgccagcctgcctattcacatcaaggtgctggacgcgaatgacaatgcgcctgtcttcaaccagtccttgtaccgggcgcgcgtcctggaggatgcaccctccggcacgcgcgtggtacaagtccttgcaacggatctggatgaaggccccaacggtgaaattatttactccttcggcagccacaaccgcgccggcgtgcggcaactattcgccttagaccttgtaaccgggatgctgacaatcaagggtcggctggacttcgaggacaccaaactccatgagatttacatccaggccaaagacaagggcgccaatcccgaaggagcacattgcaaagtgttggtggaggttgtggatgtgaatgacaacgccccggagatcacagtcacctccgtgtacagcccagtacccgaggatgcccctctggggactgtcatcgctttgctcagtgtgactgacctggatgctggcgagaacgggctggtgacctgcgaagttccaccgggtctccctttcagccttacttcttccctcaagaattacttcactttgaaaaccagtgcagacctggatcgggagactgtgccagaatacaacctcagcatcaccgcccgagacgccggaaccccttccctctcagcccttacaatagtgcgtgttcaagtgtccgacatcaatgacaaccctccacaatcttctcaatcttcctacgacgtttacattgaagaaaacaacctccccggggctccaatactaaacctaagtgtctgggaccccgacgccccgcagaatgctcggctttctttctttctcttggagcaaggagctgaaaccgggctagtgggtcgctatttcacaataaatcgtgacaatggcatagtgtcatccttagtgcccctagactatgaggatcggcgggaatttgaattaacagctcatatcagcgatgggggcaccccggtcctagccaccaacatcagcgtgaacatatttgtcactgatcgcaatgacaatgccccccaggtcctatatcctcggccaggtgggagctcggtggagatgctgcctcgaggtacctcagctggccacctagtgtcacgggtggtaggctgggacgcggatgcagggcacaatgcctggctctcctacagtctcttgggatcccctaaccagagcctttttgccatagggctgcacactggtcaaatcagtactgcccgtccagtccaagacacagattcacccaggcagactctcacggtcttgatcaaagacaatggggagccttcgctctccaccactgctaccctcactgtgtcagtaaccgaggactctcctgaagcccgagccgagttcccctctggctctgccccccgggagcagaaaaaaaatctcaccttttatctacttctttctctaatcctggtttctgtggggtttgtggtcacagtgttcggagtaatcatattcaaagtttacaagtggaagcagtctagagacctataccgagccccggtgagctcactgtaccgaacaccagggccctccttgcacgcggacgccgtgcggggaggcctgatgtcgccgcacctttaccatcaggtgtatctcaccacggactcccgccgcagcgacccgctgctgaagaaacctggtgcagccagtccactggccagccgccagaacacgctgcggagctgtgatccggtgttctataggcaggtgttgggtgcagagagcgcccctcccggacaggtaaggtttagcaagtcatgcttgaccctgttagtgcttttttattcctacatcatattgaggaaggaatggagctgtttttttagtgatgaagatgttttcctggtgatgcattcacactttcaactggcccttcctagatcaaagttagtgcctttgtgagatggtggcctgccagagtgtggtttgtggtcccatttcagggggaagatacttgactcatctgtggacctaattcacatcctcagcn

SEQ ID NO: 454983 - DNA, 8007 bp, Homo sapiens
cagggcagccccagctcagactccccagcgccagcctttacaccgcttcctcctcggaaaaagaagaattttttcttgaactggaactgcaactaaagtccgttcggagatccaaaaatctgcaatacagaggttatttgtaacccggcgtctccaggctggtgagcaagctgaggagagcaagagggatggggagcggcgccggggagctgggccgggctgagaggctgccagtgctctttctcttcctgctgtctttgttctgcccggcgctctgtgagcagatccgctacaggattcccgaggaaatgcccaagggctccgtagtggggaacctcgccacggacctggggttcagcgtccaggagttaccgactcgaaaactgcgcgtcagttcggagaagccttacttcaccgtgagcgcagagagcggggagttgcttgtgagcagcaggctagacagggaggagatatgcgggaagaagccagcttgtgctctggaatttgaggctgttgctgaaaatccactgaacttttatcacgtgaatgtggagatcgaggacattaatgaccacacgccaaaattcacgcaaaattcctttgagctgcaaataagtgagtctgcacagcctggcacacgatttatattaggatctgcccatgatgcggatattggtagcaacacactgcagaattaccaactcagtcccagtgatcatttctcactgataaataaagagaaatcagatggcagtaaataccctgagatggtattgaagacacctttggacagagaaaagcagaaatcctaccacttgactttgactgccttggactttggagctccacccctaagcagcactgcacagatacacgttctagtgactgatgccaatgataatgctccagtgttcagtcaagacgtatacagggtgagcctttcagaaaacgtgtacccggggaccacggtgctacaggtgactgccacggaccaggatgagggtgtcaatgccgagattactttctctttcagtgaagctagccagatcacccaatttgacctgaactctaacaccggggaaattactgttttaaatacattagattttgaagaagtcaaagaatattccatagttttggaagcaagggacggtggaggaatgattgcgcaatgcacagtggaggtagaagtcatagatgaaaatgacaacgccccagaagtgatattccagtctctacccaacctaattatggaggacgccgagctgggaacacatattgctttgctcaaagtccgtgacaaggattccagacacaatggagaagtgacttgtaaattggaaggtgatgttccatttaaaatattaacttcttcaagaaacacgtataaattagtgacagatgctgttctagaccgcgagcagaatccagagtacaatataaccgttacggcaacagatcggggcaagcctcccctctcctccagttccagcatcaccctgcacattggtgatgtaaatgacaacgctccggttttctcacagtcttcctatatagtccacgtggccgagaacaacccgcctggagcctctatttcacaagtcagggcttctgatccggacttggggcccaacggccaagtctcttactgcatcatggccagtgacctggagcagcgggagctgtcatcctacgtgtccataagcgcggagagcggggtggtgttcgcgcagcgcgccttcgaccacgagcagctgcgcgccttcgaactcacactgcaggcccgcgaccagggctcgccagcgctcagcgcgaacgtgagcctgcgcgtgttagtggacgaccgcaacgacaatgcgccacgggtgctgtaccccgcgctgggtcccgacggctctgcgctcttcgatatggtgccgcacgctgcagagcctggctacttggtgaccaaggtagtggcggtggacgcagactcaggacacaacgcctggctgtcctaccacgtgctgcaggctagcgagcccgggctcttcagcctggggctgcgcacgggcgaagtgcgcacagcgcgtgccttaggcgacagggacgccgtccgccagcgccttctggtcgccgtgcgtgacggtggacagccaccactctcggccactgccacgttgcacctggtcttcgccgacagcttgcaggaggtgctgccggatatcactgaccgccccgacccctctgacctccaggctgagctgcagttttacctagtggtggccttggccttgatctcagtgctcttcctcgtggccatgattctggccattgccttgcgcctgcgacgctcctccagccccgcctcctggagctgcttccagcctggtctctgtgttaaatccgaatccgtggttccccccaactacagcgaggggactttgccttattcctacaatctatgtgttgcacatacaggaaagacggagtttaatttcctaaaatgtagtgagcagttgagttcaggacaagacatactttgcggtgattcatctggggccttatttccactttgtaattccagtgaattgacttcccatcaggtgagtttcctttaagtataatttaatgctcattgcctacccatttctccatattcacaagaaaatatacatatttgcaggaaaatatataatttttagatgtcatggatcattttaggaaagttgtagtcagttaaaaagctgtcatatcattctacaaaggaggagtaaagtaggagcaattgtgtggcccaacatttgtttgttttttagccaagcttagatttataaagcaatgagggtgtggttttaaccacaaagtgaaagtgttagacagttgttggctctctcctaaaaagtgaatgagatttttcctatacattttccttcttgttgactaatatatgatgaatacttttttcagcttggatataccataaatataaaaataataaagccaaagaatttaagctaaaattcaacacttttcttaactaatttaactggtatggtctccatagtagtccactgttttgtttcctgtgttaacttcccttttgtttcaaaagctcttagaataaggagtcaactggatttttatgtccatggaccccttgtgattatatgcagtgtacgctgtgtgtgcgtgtgtgtgtgtgtgtgtgtgagagagatccttttacttagaaaaaggtctactatgctcattagaagatcaaaagcagattctccttacttgtaacataggagtttcaggattaatctgtattcaagctcattctatatccttcatcaaagaaaagacaatgttttgtgtctgttgtccctctcacacacagccctaatatataatgtgtaactgccttatctgcagccctaaactaatatagctagaggtcttctaatcattctcctacctctaggaaagaaatatagtcttgaaaactgccaatctggtgtgcatacaaaatatatacaaaataccaaggaacattatatgagccttttgctaggtatatctaagcaactgcttcagttaatggccactttacaaattgctgaaagaaggaaacgtctttcgattcttttttttttctttttttttttttgagacagagtctctgtctgttactcaggctgtagtgcagtggcacaatgatagctccctccagcctcaaactcctgggctcaagcattccttctgcatcagcctcctgactagctggaactcaggctcatgccaccagacctggctaatttttctgttttcagtagagaaaatattttctttcactaatttaactggtatggtttccattgtctacccagttttccatatgcataagaaaatatattcacaggaaaatataaagttttcagatttcatgagtggttttaagaaagttttagtcagtgaaaaaactatcataccagtcttcaaaggaagggtgaaataagttcatctgctacgttgcccaggctggtcttgaagggaaacagacttttttgtagtcatacttatcctttggcttcttagtaagtattatatagtcattactttttgcagttttttagatcaaagtgttaatgtaggtaaagttaattttagaatatatgtaaaagtcaagtctgctttaaatttaatcatctctttggtgaaagggatgggatggagctttgctttttatcatatattcatctgtacctttcaagtattcaaatagaaaaatataaacaatgtaaataaaatagcaaaacaatgtaatatctcataaaactgcaatggtaaaagcatttatcctattgaaattccacaatttttatttgaaaatattatcgacatgtaattcaagtggcatttagaagaataatttaaaagcaacaactctatagaaagcttgtaaaatgattaagtagtttaaaccaaataaaacaatttctgagtcagtcatctccagtaggtctattttagtctcaagataaattcatttctggtgacaactgaagttcttagttatttgttagtatatattggagacatttacaataaagcttagagcacaatgggaaatgaaagtatcatgttttttttaagaccaaatgtattgcagaaatgtgagtaatttaatccgatgctacaatctgatcattctgatctaatctgatcatttaataacactaaataaaaccttcatctcacattctttggctgtttcttttaaaatatgggtttacggataaatcaaataaattcaaaacaaagtaataagcaaatgatttttttttctcagtaatctagtagagtattacatttagaagtaatctgtatctcagtgcagtaactatttaggactgtaagcgccgctgttcacctactggaagacaaatgcaaccgaaaacactcagatctcacacctcacgaagacccgcagatgccacaaactaactgctggactgcagcgaaacccgacccctgtttggaggcactccaggtttccggaggattgtcatctccatagctgcggcaagaaactaaataagacccatttatgcacagtgaagattctgagaggattctgcagcaaaacaacaatggccgctccacagagtcgccccagacgcggcgagctgatcctgctgtgcgcgctgctgggaacgctgtgggaaatcgggaggggacagattcgctactctgtgccagaagagacggacaaaggctccttcgtgggtaatatctccaaggacctggggctggacccccggaagctggcgaagcacggagtccgtatcgtctccagaggtaggacgcagctctttgctctgaacccgcgcagcggcagcttgatcaccgcgggcaggatagatcgggaggagctctgcgctcagagcccgcggtgtctgataaatattaacaccctggttgaggataaaggaaaactctttggggtagaaatagaaataattgatattaacgataataacccaaaattccaggtcgaagatctagaagtaaaaattaacgaaatcgcggttcctggagcacgttatccactcccagaagctgttgacccggatgtgggcgtgaactccctccagagctaccagctcagccccaatcaccacttctccctggacgtgcagactggagacaatggagccataaacccagagctggtgctggagcgcgccctggacagggaggaagaggctgctcaccacctggtcctcacggcctcggatggcggcaagccgcctcgctctagcacagtgcgcatccacgtgacagtgttggatacaaatgacaatgccccggtttttcctcacccgatttaccgagtgaaagtccttgagaacatgcccccaggcacgcggctgcttactgtaacagccagcgacccggatgagggaatcaacggaaaagtggcatacaaattccggaaaattaatgaaaaacaaactccgttattccagcttaatgaaaatactggggaaatatcaatagcaaaaagtctagattatgaagaatgttcattttatgaaatggaaatacaagccgaagatgtgggggcacttctggggaggaccaaattgctcatttcggtggaagatgtaaatgacaatagaccagaagtgatcattacgtctttgtttagcccagtgttagaaaattctcttcccgggacagtaattgccttcttgagtgtgcatgaccaagactctggaaagaatggtcaagttgtctgttacacacgtgataatttaccttttaaattagaaaagtcaataggtaattattatagattagtgacaaggaaatatttggaccgagaaaatgtctctatctacaatatcacagtgatggcctcagatctaggaacaccacctctgtccactgaaactcaaatcgctctgcacgtggcagacattaacgacaaccctcctactttccctcatgcctcctactcagcgtatatcctagagaacaacctgagaggagcctccatcttttccttgactgcacacgaccccgacagccaggagaatgcccaggtcacttactctgtgaccgaggacacgctgcagggggcgcccctgtcctcgtatatctccatcaactctgacaccggtgtcctgtatgcgctgcaatctttcgactatgagcagatccgagacctgcagctactggtaacagccagcgacagcggggacccgcccctcagcagcaacatgtcactgagcctgttcgtgctggaccagaatgacaacgcgcccgagatcctgtaccccgccctccccacagacggttccactggcgtggagctggcgccccgctccgcagagcgtggctacctggtgaccaaggtggtggcggtggacagagactcgggccagaacgcctggctgtcctaccgcctgctcaaggccagcgagccgggactcttctcggtgggtctgcacacgggcgaggtgcgcacggcgcgagccctgctggacagagatgcgctcaagcagagcctcgtggtggccgtccaggaccatggccagccccctctctccgccactgtcacgctcaccgtagccgtggctgacagcatccccgaagtcctgaccgagttgggcagtctgaagccttcggtcgacccgaacgattcgagccttacactctatctcgtggtggcagtggctgccatctcctgtgtcttcctcgcctttgtcgctgtgcttctggggctcaggctgaggcgctggcacaagtcacgcctgctccaggattccggtggcagattggtaggcgtgcctgcctcacattttgtgggtgttgaggaggtacaggctttcctgcagacctattcccaggaagtctccctcaccgccgactcgcggaagagtcacctgatctttccccagcccaactacgcagacatgctcatcagtcaggagggctgtgagaaaaatgattctttgttaacatccgtagattttcatgaatataagaatgaagctgatcatggtcagcaagccccgcccaacacggactggcgtttctctcaggcccagagacccggcaccagcggctcccaaaatggcgatgacaccggcacctggcccaacaaccagtttgacacagagatgctgcaagccatgatcttggcgtccgccagtgctccctctttcggctggtgtagaatagccagtagtgtagtgcggtgtgcttttacgtgatggcgggtgggcagcgggcggcgggctccgcgcagccgtctgtccttgatctgcccgcggcggcccgtgttgtgttttgtgctgtgtccacgcgctaaggcgaccccctcccccgtactgacttctcctataagcgcttctcttcgcatagtcacgtagctcccaccccaccctcttcctgtgtctcacgcaagttttatactctaatatttatatggctttttttcttcgacaaaaaaataataaaacgtttcttctg

SEQ ID NO: 454984 - DNA, 1437 bp, Homo sapiens
attggctgggactctgtgtgccgctgtcggccaatgaagacgctggagatcgggcccctgcccgtcccctttctgcgccccgggatgaggcagagactgaacagccggcgagcaaatcaacggcatccagaaagccatgtcggactcggcgcccagcgcccaagcgctaacccgctgaaagtttctcagcgaaatctcagggacgatctggaccccgctgagaggaactgcttttgagtgagatggtcccagaggcctggaggagcggactggtaagcaccgggagggtagtgggagttttgcttctgcttggtgccttgaacaaggcttccacggtcattcactatgagatcccggaggaaagagagaagggtttcgctgtgggcaacgtggtcgcgaaccttggtttggatctcggtagcctctcagcccgcaggttccgggtggtgtctggagctagccgaagattctttgaggtgaaccgggagaccggagagatgtttgtgaacgaccgtctggatcgagaggagctgtgtgggacactgccctcttgcactgtaactctggagttggtagtggagaacccgctggagctgttcagcgtggaagtggtgatccaggacatcaacgacaacaatcctgctttccctacccaggaaatgaaattggagattagcgaggccgtggctccggggacgcgctttccgctcgagagcgcgcacgatcccgatgtgggaagcaactctttacaaacctatgagctgagccgaaatgaatactttgcgcttcgcgtgcagacgcgggaggacagcaccaagtacgcggagctggtgttggagcgcgccctggaccgagaacgggagcctagtctccagttagtgctgacggcgttggacggagggaccccagctctctccgccagcctgcctattcacatcaaggtgctggacgcgaatgacaatgcgcctgtcttcaaccagtccttgtaccgggcgcgcgtcctggaggatgcaccctccggcacgcgcgtggtacaagtccttgcaacggatctggatgaaggccccaacggtgaaattatttactccttcggcatcccggttacaagggacgccgccgaagaagcatcgttaaagtctctcttcaccctgccgtcatgtctaagtcagagtctcctaaagagcccgaacagctgaggaagctcttcattggagggttgagctttgaaacaactgatgagagcctgaggagccattttgagcaatggggaacgctcacggactgtgtggtaatgagagatccaaacaccaagcgctccaggggctttgggtttgtcacatatgccactgtggaggaggtggatgcagctatgaatgcaaggccacacaaggtggatggaagagttgtggaaccaaagagagctgtctccagagaaga

SEQ ID NO: 454985 - DNA, 2489 bp, Homo sapiens
atgaccaattgcctgagtttccgaaatggcagaggactggccctgctgtgcgcgctcctggggacgctgtgcgaaacaggatccggtcagatccgctactcggtgtctgaggagctagataaaggttccttcgtgggcaacatcgctaacgacctggggctagagccccgggagctggcggagcgcggagtccgcatcgtctccagaggtaggacgcagcttttctctctgaatccgcaaagcggcagcttggtcaccgcggagaggatagaccgggaggagctctgcgctcagatcccgctgtgtctggtaaaaattaacattctggttgaggataaattgaaaatttttgaagtagaaatagaaattaaagatattaatgataatgctcctaatttcccaacagaggaattggaaataaaaattggtgaactaacggttcctggaacccgatttccaattaaaactgcttttgacccagatgtaggcattaactccctgcagaactacaagcttagccccaatgactacttctctctggctgtgaatagcgtctctgagggggccaagtatccagagctggtgctggagcgggccctggaccgtgagaaaaaagaaattcaccagcttgtcctggttgcctctgatggtggcgaccctgtccactctggcaacttgcacatccaagtgatagtcctggatgcaaatgacaacccaccaatgtttactcagcctgagtaccgtgtgagtgtttgggagaacgtgcctgtgggtacccggctgctcacggtgaatgccactgaccctgacgagggattcaatgctcaagtgtcttatattctagataaaatgcctgggaaaatcgctgagattttccatcttaactcagtgagtggagaagtatcaatattaaaaagtctagattatgaggatgccatgttctatgaaattaaaattgaagcacaggatggaccaggtcttctttcaagagccaagattctagtcacggttctggatgtgaatgacaatgctccagaaattacaatcacgtctctcacaagctcagtcccagaagagggcaccgttggaagagaaattgctcttatcgacgtgcatgaccgagattctgggcagaatgggcaggttgaagtttttgtcctgggaaatctgccatttaagttagaaaaatcaatagatcaatattaccgcttagtgacggccacatccctggaccgcgaacaaatatcagaatataacattagtctgagagcctcagatgggggaagcccgccactgtccacagaaactcacatcaccctgcatgtgattgacatcaatgacaacccacccaccttccctcatttatcctactccgcctacattccagaaaacaaccccagaggagcctccatcttctcagtgacagcccaggacccagatagcaacaacaacgcccgcatcacttatgcattgaccgaggacactctccagggggcgcccctgtcctccttcgtctctatcaactccaacactggcgtcctatacgcgctgagatccttcgactacgagcaatttagagacttaaagctactggtgacagccagcgacagcgggaaccctccactcagcagcaacgtgtcgctgaacctgttcgtgctggaccagaacgacaacgcgcccgagatcctgtaccccgccctccccacagacggttccactggcgtggagctggcgcctcgctccgcagagcccggctacctggtgaccaaggtggtggcggtggacagagactcgggccagaacgcctggctgtcctaccgcctgctcaaggccagcgagccgggactcttctcggtgggtctgcacacgggcgaggtgcgcacggcgcgagccctgctggacagagacgcgctcaagcagagcctcgtggtggccgtccaggaccacggccagccccctctctccgccactgtcacgctcaccgtggccgtggccgacaggatccccgacatcctggccgacctgggcagcctcgagccctccgccaaacccaacgattcggacctcactctgtacctggtggtggcggtggccgcggtctcctgcgtcttcctggccttcgtcatcgtgctgctggcgctcaggctgcggcgctggcacaagtcacgcctgctgcaggcttcgggaggcggcttggcgagtacgcccggctcgcactttgtgggcgcggacggggttcgggctttcctgcagacctattcccacgaggtctccctcactgcggactcgcggaagagccacctgattttcccccagcccaactatgcggacacgctcatcagccaggagagctgtgagaaaagcgagcctcttctgataactcaggatttacttgaaatgaaaggagattccaacctacttgctggacgaggacgaggatgagcgtgtggaaaaggctgacctgcggcaactcacggagatgggctaac

SEQ ID NO: 454986 - DNA, 642 bp, Homo sapiens
cgcaccgcctcttcctcctggaagctatataatgatatcgcgtcacttccgctctctcttccacaggaggcctacacgccgccgcttgtgctgcagccatgtctctagtgatccctgaaaagttccagcatattttgcgagtactcaacaccaacatcgatgggcggcggaaaatagcctttgccatcactgccattaagggtgtgggccgaagatatgctcatgtggtgttgaggaaagcagacattgacctcaccaagagggcgggagaactcactgaggatgaggtggaacgtgtgatcaccattatgcagaatccacgccagtacaagatcccagactggttcttgaacagacagaaggatgtaaaggatggaaaatacagccaggtcctagccaatggtctggacaacaagctccgtgaagacctggagcgactgaagaagattcgggcccatagagggctgcgtcacttctggggccttcgtgtccgaggccagcacaccaagaccactggccgccgtggccgcaccgtgggtgtgtccaagaagaaataagtctgtaggccttgtctgttaataaatagtttatatacctaaaaaaagtcgacgcggccgcgaatttagtagtagtagggtcagc

SEQ ID NO: 454987 - DNA, 614 bp, Homo sapiens
gacccacgcgtcgcggacgcgtgggtcgacccacgcgtcgcggcggtgcgccgccgcttgtgctgcagccatgtctctagtgatccctgaaaagttccagcatattttgcgagtactcaacaccaacatcgatgggcggcggaaaatagcctttgccatcactgccattaagggtgtgggccgaagatatgctcatgtggtgttgaggaaagcagacattgacctcaccaagagggcgggagaactcactgaggatgaggtggaacgtgtgatcaccattatgcagaatccacgccagtacaagatcccagactggttcttgaacagacagaaggatgtaaaggatggaaaatacagccaggtcctagccaatggtctggacaacaagctccgtgaagacctggagcgactgaagaagattcgggcccatagagggctgcgtcacttctggggccttcgtgtccgaggccagcacaccaagaccactggccgccgtggccgcaccgtgggtgtgtccaagaagaaataagtctgtaggccttgtctgttaataaatagtttatatacctaaaaaaagtcgacgcggccgcgaatttagtagtagtagggtcagc

SEQ ID NO: 454988 - DNA, 716 bp, Homo sapiens
taccatgtcgaccacatgcaaggctgggagaacccgggataccttctggccaaacgcccagtttagcgccctcgggtccagactactgcagctcctgctccaataccagcgccaaacctggcgtgatcttcacgagtgcaacaccaggtctctcgggttgcacaccccccactgtgggccgggggaccgctacacgccgccgcttgtgctgcagccatgtctctagtgatccctgaaaagttccagcatattttgcgagtactcaacaccaacatcgatgggcggcggaaaatagcctttgccatcactgccattaagggtgtgggccgaagatatgctcatgtggtgttgaggaaagcagacattgacctcaccaagagggcgggagaactcactgaggatgaggtggaacgtgtgatcaccattatgcagaatccacgccagtacaagatcccagactggttcttgaacagacagaaggatgtaaaggatggaaaatacagccaggtcctagccaatggtctggacaacaagctccgtgaagacctggagcgactgaagaagattcgggcccatagagggctgcgtcacttctggggccttcgtgtccgaggccagcacaccaagaccactggccgccgtggccgcaccgtgggtgtgtccaagaagaaataagtctgtaggccttgtctgttaataaatagtttatataccta

SEQ ID NO: 454989 - DNA, 456 bp, Homo sapiens
  misc_feature (20)..(20): n is a, c, g, or t
  misc_feature (52)..(52): n is a, c, g, or t
  misc_feature (81)..(81): n is a, c, g, or t
  misc_feature (101)..(101): n is a, c, g, or t
  misc_feature (120)..(120): n is a, c, g, or t
  misc_feature (159)..(159): n is a, c, g, or t
aaggcagcatgagtgagttnaacccctttgggtccaacccatggtctcctgncccctgtagagtgaagggcttcttttttnctttttagttttttttaagncagagtcttaaaaaaattncccaggctctttttttaagagtcttaaaaaaactcttgnccaaaaaaaacgccagtacaagatcccagactggttcttgaacagacagaaggatgtaaaggatggaaaatacagccagtacagccaggtcctagccaatggtctggacaacaagctccgtgaagacctggagcgactgaagaagattcgggcccatagagggctgcgtcacttctggggccttcgtgtccgaggccagcacaccaagaccactggccgccgtggccgcaccgtgggtgtgtccaagaagaaataagtctgtaggccttgtctgttaataaatagtttatataccta

SEQ ID NO: 454990 - DNA, 800 bp, Homo sapiens
ctgcctctttaagactaggactgagagaaagaagaggagagtagaaagaatagggagacgaagtttgagccccaggcttaagcctttccaagagaaataataactaacaactcactcgtgcgcgcggcaggatctggccacgaggaggagggaagcgctttgttttgatcctgattccagtttgcctctctctttgttttcccccaatattattcttacgcctgtattttcctcgcgtgagcccttgcgctcccgtacaccccggacgccagtacaagatcccagactggttcttgaacagacagaaggatgtaaaggatggaaaatacagccagtacagccaggtcctagccaatggtctggacaacaagctccgtgaagacctggagcgactgaagaagattcgggcccatagagggctgcgtcacttctggggccttcgtgtccgaggccagcacaccaagaccactggccgccgtggccgcaccgtgggtgtgtccaagaagaaataagtctgtaggccttgtctgttaataaatagtttatatacctaaaaaaaaaaaaccaaaaaacctcggggatctattatatagacagagatgcgacacacacagaaggtccactacaaacgcggcggacatgtgagtccaacatataccggtgtcttctctgtggaaccccaaaagatttctatgctacaaaaagttggctaaaacttatgcagagagcaccacctataataggtagactccgagacattaacttccaaattaacccaagcggtaaaccctagctttata

SEQ ID NO: 454991 - DNA, 456 bp, Homo sapiens
gcggccgcctactactactactactgctcgaattcaagcttctaacgatgtacggggaggtgtgggccgaagatatgctcatgtggtgttgaggaaagcagacattgacctcaccaagagggcgggagaactcactgaggatgaggtggaacgtgtgatcaccattatgcagaatccacgccagtacaagatcccagactggttcttgaacagacagaaggatgtaaaggatggaaaatacagccaggtcctagccaatggtctggacaacaagctccgtgaagacctggagcgactgaagaagattcgggcccatagagggctgcgtcacttctggggccttcgtgtccgaggccagcacaccaagaccactggccgccgtggccgcaccgtgggtgtgtccaagaagaaataagtctgtaggccttgtctgttaataaatagtttatataccta

SEQ ID NO: 454992 - DNA, 776 bp, Homo sapiens
gcacgagatatggtacagttctttgtacagaaaggcaccattatgttagaataaatttccagaacttagtgggaagaatcaggttttaaccttgtgtgtctgttacttctgagtgcatttctataatataaatgttgatttgcatcaacattataaaagagcacttctgtggctcatttaaaagaaaaaaaaggttaagtcttttaaattttggccttgtttccaaatcctgtcttccatgttgtttttctgcacttcctgaccactcttataaaaagctcacaaacctttgaagaaactggagtaggctgttatttcattaaggtttacaaattaaatgcttgatttctcgtgccgaattcggcacgaggtgtgggccgaagatatgctcatgtggtgttgaggaaagcagacattgacctcaccaagagggcgggagaactcactgaggatgaggtggaacgtgtgatcaccattatgcagaatccacgccagtacaagatcccagactggttcttgaacagacagaaggatgtaaaggatggaaaatacagccagtacagccaggtcctagccaatggtctggacaacaagctccgtgaagacctggagcgactgaagaagattcgggcccatagagggctgcgtcacttctggggccttcgtgtccgaggccagcacaccaagaccactggccgccgtggccgcaccgtgggtgtgtccaagaagaaataagtctgtaggccttgtctgttaataaatagtttatataccta

SEQ ID NO: 454993 - DNA, 598 bp, Homo sapiens
cgcaccgcctcttcctcctggaagctatataatgatatcgcgtcacttccgctctctcttccacaggaggcctacacgccgccgcttgtgctgcagccatgtctctagtgatccctgaaaagttccagcatattttgcgagtactcaacaccaacatcgatgggcggcggaaaatagcctttgccatcactgccattaagggtgtgggccgaagatatgctcatgtggtgttgaggaaagcagacattgacctcaccaagagggcgggagaactcactgaggatgaggtggaacgtgtgatcaccattatgcagaatccacgccagtacaagatcccagactggttcttgaacagacagaaggatgtaaaggatggaaaatacagccaggtcctagccaatggtctggacaacaagctccgtgaagacctggagcgactgaagaagattcgggcccatagagggctgcgtcacttctggggccttcgtgtccgaggccagcacaccaagaccactggccgccgtggccgcaccgtgggtgtgtccaagaagaaataagtctgtaggccttgtctgttaataaatagtttatataccta

SEQ ID NO: 454994 - DNA, 737 bp, Homo sapiens
gagtgaaaagggcccccagaagtttctgggggtgtgagacaaaacgttggtctaaaaaggtttgtgtcaagagtcaggcaatgaaggcttctagctctttggtgtctcctgaatttagctttctgaggagtgacagcgccgccgcttgtgctgcagccatgtctctagtgatccctgaaaagttccagcatattttgcgagtactcaacaccaacatcgatgggcggcggaaaatagcctttgccatcactgccattaagggtgtgggccgaagatatgctcatgtggtgttgaggaaagcagacattgacctcaccaagagggcgggagaactcactgaggatgaggtggaacgtgtgatcaccattatgcagaatccacgccagtacaagatcccagactggttcttgaacagacagaaggatgtaaaggatggaaaatacagccaggtcctagccaatggtctggacaacaagctccgtgaagacctggagcgactgaagaagattcgggcccatagagggctgcgtcacttctggggccttcgtgtccgaggccagcacaccaagaccactggccgccgtggccgcaccgtgggtgtgtccaagaagaaataagtctgtaggccttgtctgttaataaatagtttatatacctaaaaaaaaaaaaacactggcccgcgttttacaactcgtgactgggccctggggtaccccacttaatgcgcttgaggaaat

SEQ ID NO: 454995 - DNA, 502 bp, Homo sapiens
gggctgcaggaattcggcacgagccgccgcttgtgctgcagccatgtctctagtgatccctgaaaagttccagcatattttgcgagtactcaacaccaacatcgatgggcggcggaaaatagcctttgccatcactgccattaagggtgtgggccgaagatatgctcatgtggtgttgaggaaagcagacattgacctcaccaagagggcgggagaactcactgaggatgaggtggaacgtgtgatcaccattatgcagaatccacgccagtacaagatcccagactggttcttgaacagacagaaggatgtaaaggatggaaaatacagccagggagcgactgaagaagattcgggcccatagagggctgcgtcacttctggggccttcgtgtccgaggccagcacaccaagaccactggccgccgtggccgcaccgtgggtgtgtccaagaagaaataagtctgtaggccttgtctgttaataaatagtttatataccta

SEQ ID NO: 454996 - DNA, 654 bp, Homo sapiens
  misc_feature (51)..(51): n is a, c, g, or t
actccttcaaaccatggggtagcactacgaagtttcatctacctcttcagntgtatcgatcactaggctgtgctcattcaactccatctccaactcagctgctttggatgccagctcgtgccgaattcggcacgacgccgcttgtgctgcagccatgtctctagtgatccctgaaaagttccagcatattttgcgagtactcaacaccaacatcgatgggcggcggaaaatagcctttgccatcactgccattaagggtgtgggccgaagatatgctcatgtggtgttgaggaaagcagacattgacctcaccaagagggcgggagaactcactgaggatgaggtggaacgtgtgatcaccattatgcagaatccacgccagtacaagatcccagactggttcttgaacagacagaaggatgtaaaggatggaaaatacagccaggtcctagccaatggtctggacaacaagctccgtgaagacctggagcgactgaagaagattcgggcccatagagggctgcgtcacttctggggccttcgtgtccgaggccagcacaccaagaccactggccgccgtggccgcaccgtgggtgtgtccaagaagaaataagtctgtaggccttgtctgttaataaatagtttatataccta

SEQ ID NO: 454997 - DNA, 548 bp, Homo sapiens
taggctggtggaggcggggtgagtcggacgagggcttgtgctgcagccatgtctctagtgatccctgaaaagttccagcatattttgcgagtactcaacaccaacatcgatgggcggcggaaaatagcctttgccatcactgccattaagggtgtgggccgaagatatgctcatgtggtgttgaggaaagcagacattgacctcaccaagagggcgggagaactcactgaggatgaggtggaacgtgtgatcaccattatgcagaatccacgccagtacaagatcccagactggttcttgaacagacagaaggatgtaaaggatggaaaatacagccaggtcctagccaatggtctggacaacaagctccgtgaagacctggagcgactgaagaagattcgggcccatagagggctgcgtcacttctggggccttcgtgtccgaggccagcacaccaagaccactggccgccgtggccgcaccgtgggtgtgtccaagaagaaataagtctgtaggccttgtctgttaataaatagtttatataccta

SEQ ID NO: 454998 - DNA, 564 bp, Homo sapiens
aaacttacggctaggtacgaggctgggtgtggggaggctacacgccgccgcttgtgctgcagccatgtctctagtgatccctgaaaagttccagcatattttgcgagtactcaacaccaacatcgatgggcggcggaaaatagcctttgccatcactgccattaagggtgtgggccgaagatatgctcatgtggtgttgaggaaagcagacattgacctcaccaagagggcgggagaactcactgaggatgaggtggaacgtgtgatcaccattatgcagaatccacgccagtacaagatcccagactggttcttgaacagacagaaggatgtaaaggatggaaaatacagccaggtcctagccaatggtctggacaacaagctccgtgaagacctggagcgactgaagaagattcgggcccatagagggctgcgtcacttctggggccttcgtgtccgaggccagcacaccaagaccactggccgccgtggccgcaccgtgggtgtgtccaagaagaaataagtctgtaggccttgtctgttaataaatagtttatataccta

SEQ ID NO: 454999 - DNA, 881 bp, Homo sapiens
taggctggtggaggcggggtgagtcggacgagggcttgtgctgcagccatgtctctagtgatccctgaaaagttccagcatattttgcgagtactcaacaccaacatcgatgggcggcggaaaatagcctttgccatcactgccattaagggtgtgggccgaagatatgctcatgtggtgttgaggaaagcagacattgacctcaccaagagggcgggagaactcactgaggatgaggtggaacgtgtgatcaccattatgcagaatccacgccagtacaagatcccagactggttcttgaacagacagaaggatgtaaaggatggaaaatacagccaggtcctagccaatggtctggacaacaagctccgtgaagacctggagcgactgaagaagattcgggcccatagagggctgcgtcacttctggggccttcgtgtccgaggccagcacaccaagaccactggccgccgtggccgcaccgtgggtgtgtccaagaagaaataagtctgtaggccttgtctgttaataaatagtttatatacctaaaaaaaaaaaaaaaaaaaaaaaaaaaaaaaagggggggggaaaaaaattccccgggggggcccaagtttgcgggtcacccgtttttttgaccaagggggccccaataggggagggtggtaaaaaaacgaaaggagagagggccagagtacacacgcgcggggcgtgggaaaactggcgacgcgggcacctgggagaggagcccctacccggtgggcggacactactgcggcagcaacccaaaaaagttaaccgctagggaacattaaccttcccgtgcacggggacccaccatatcgtggcgcaaaaattggcaccagactagacagaattac

SEQ ID NO: 455000 - DNA, 915 bp, Homo sapiens
gctgtaaagagcgcgatgagtattttggcaaggacacccccgtgtcgcgaccggaagtgtaaagcacaatgtgtccctgcctgagacgaggactgcgtcccgacaagagtgttactttggcggggcggcgcaaacaattgccaggggccgcccccgttcacctgtgatggaggaccaattgccgcgtttgcagatgcgccacaagatagtcgcgtgtcttcgttgtcggttccgaaagactctggcaccggatgttgcaacgggacccttggagcggcatggctccgagcgtggactagacaacgctcagccgggcggacacgccccgcttgtgctgcagccatgtctctagtgatccctgaaaagttccagcatattttgcgagtactcaacaccaacatcgatgggcggcggaaaatagcctttgccatcactgccattaagggtgtgggccgaagatatgctcatgtggtgttgaggaaagcagacattgacctcaccaagagggcgggagaactcactgaggatgaggtggaacgtgtgatcaccattatgcagaatccacgccagtacaagatcccagactggttcttgaacagacagaaggatgtaaaggatggaaaatacagccagtacagccaggtcctagccaatggtctggacaacaagctccgtgaagacctggagcgactgaagaagattcgggcccatagagggctgcgtcacttctggggccttcgtgtccgaggccagcacaccaagaccactggccgccgtggccgcaccgtgggtgtgtccaagaagaaataagtctgtaggccttgtctgttaataaatagtttatatacctaaaaggtttgattcatccattttgaagagacgggggagcggggggctcgtctgttccaggagccc

SEQ ID NO: 455001 - DNA, 431 bp, Homo sapiens
gggctgcaggaattcggcacgagctctctagtgatccctgaaaagttccagcatattttgcgagtactcaacaccaacatcgatgggcggcggaaaatagcctttgccatcactgccattaagggtgtgggccgaagatatgctcatgtggtgttgaggaaagcagacattgacctcaccaagagggcgggagaactcactgaggatgaggtggaacgtgtgatcaccattatgcagaatccacgccagtacaagatcccagactggttcttgaacagacagaaggatgtaaaggatggaaaatacagccagcgtggattcagcatattttgcgagtactcaacaccaacatcgatgggcggcggaaaatagcctttgccatcactgccattaagggtgtgggccgaagatatgctcatgtggtgttgatt

SEQ ID NO: 455002 - DNA, 658 bp, Homo sapiens
gagtgaaaagggcccccagaagtttctgggggtgtgagacaaaacgttggtctaaaaaggtttgtgtcaagagtcaggcaatgaaggcttctagctctttggtgtctcctgaatttagctttctgaggagtgacagcgccgccgcttgtgctgcagccatgtctctagtgatccctgaaaagttccagcatattttgcgagtactcaacaccaacatcgatgggcggcggaaaatagcctttgccatcactgccattaagggtgtgggccgaagatatgctcatgtggtgttgaggaaagcagacattgacctcaccaagagggcgggagaactcactgaggatgaggtggaacgtgtgatcaccattatgcagaatccacgccagtacaagatcccagactggttcttgaacagacagaaggatgtaaaggatggaaaatacagccaggtcctagccaatggtctggacaacaagctccgtgaagacctggagcgactgaagaagattcgggcccatagagggctgcgtcacttctggggccttcgtgtccgaggccagcacaccaagaccactggccgccgtggccgcaccgtgggtgtgtccaagaagaaataagtctgtaggccttgtctgttaataaatagtttatataccta

SEQ ID NO: 455003 - DNA, 570 bp, Homo sapiens
gacccacgcgtcgcggacgcgtgggtcgacccacgcgtcgcggcggtgcgccgccgcttgtgctgcagccatgtctctagtgatccctgaaaagttccagcatattttgcgagtactcaacaccaacatcgatgggcggcggaaaatagcctttgccatcactgccattaagggtgtgggccgaagatatgctcatgtggtgttgaggaaagcagacattgacctcaccaagagggcgggagaactcactgaggatgaggtggaacgtgtgatcaccattatgcagaatccacgccagtacaagatcccagactggttcttgaacagacagaaggatgtaaaggatggaaaatacagccaggtcctagccaatggtctggacaacaagctccgtgaagacctggagcgactgaagaagattcgggcccatagagggctgcgtcacttctggggccttcgtgtccgaggccagcacaccaagaccactggccgccgtggccgcaccgtgggtgtgtccaagaagaaataagtctgtaggccttgtctgttaataaatagtttatataccta

SEQ ID NO: 455004 - DNA, 455 bp, Homo sapiens
ctctagagcggccgcctactactactaaattcgcggccgcgtcgacacggtgtgggccgaagatatgctcatgtggtgttgaggaaagcagacattgacctcaccaagagggcgggagaactcactgaggatgaggtggaacgtgtgatcaccattatgcagaatccacgccagtacaagatcccagactggttcttgaacagacagaaggatgtaaaggatggaaaatacagccagtacagccaggtcctagccaatggtctggacaacaagctccgtgaagacctggagcgactgaagaagattcgggcccatagagggctgcgtcacttctggggccttcgtgtccgaggccagcacaccaagaccactggccgccgtggccgcaccgtgggtgtgtccaagaagaaataagtctgtaggccttgtctgttaataaatagtttatataccta

SEQ ID NO: 455005 - DNA, 500 bp, Homo sapiens
ctctagagcggccgcctactactactaaattcgcggccgcgtcgacacatcgatgggcggcggaaaatagcctttgccatcactgccattaagggtgtgggccgaagatatgctcatgtggtgttgaggaaagcagacattgacctcaccaagagggcgggagaactcactgaggatgaggtggaacgtgtgatcaccattatgcagaatccacgccagtacaagatcccagactggttcttgaacagacagaaggatgtaaaggatggaaaatacagccagtacagccaggtcctagccaatggtctggacaacaagctccgtgaagacctggagcgactgaagaagattcgggcccatagagggctgcgtcacttctggggccttcgtgtccgaggccagcacaccaagaccactggccgccgtggccgcaccgtgggtgtgtccaagaagaaataagtctgtaggccttgtctgttaataaatagtttatataccta

SEQ ID NO: 455006 - DNA, 892 bp, Homo sapiens
ctggcttttgccacgcacttttgggaatgggcaggagacctgcttcctctctccagaggttgcattttcccaagcttgaacgcttcatgtgcctactctgcaggactgaggagtttgctctgtggtgtgaaaacctaaggaatggggggcgggtgtcttgccacttgtgtgacaggcttaacctttttgtatgaagttcgtttgccttatcggccttactgtttgatagtttactgtgtctgatttcttcccccgtactttttcaactagttctctagtgatccctgaaaagttccagcatattttgcgagtactcaacaccaacatcgatgggcggcggaaaatagcctttgccatcactgccattaagggtgtgggccgaagatatgctcatgtggtgttgaggaaagcagacattgacctcaccaagagggcgggagaactcactgaggatgaggtggaacgtgtgatcaccattatgcagaatccacgccagtacaagatcccagactggttcttgaacagacagaaggatgtaaaggatggaaaatacagccagtacagccaggtcctagccaatggtctggacaacaagctccgtgaagacctggagcgactgaagaagattcgggcccatagagggctgcgtcacttctggggccttcgtgtccgaggccagcacaccaagaccactggccgccgtggccgcaccgtgggtgtgtccaagaagaaataagtctgtaggccttgtctgttaataaatagtttatatacctaaaaaaaaaaaaactcatagaacctcctcacattcactccgcaacacaaacaaaaaagggggggggcgcccttaaaaaaatttctcccggaggagggccccattttacaatcccct

SEQ ID NO: 455007 - DNA, 529 bp, Homo sapiens
ggagggtttggttgagctgcagctgtttgtctgttcgatcacaggcttgcgggcctggaatcggtgggagacggagaccccacgagtagatgttgtaagccgtggaaatcctcactcctttgggtgtgggccgaagatatgctcatgtggtgttgaggaaagcagacattgacctcaccaagagggcgggagaactcactgaggatgaggtggaacgtgtgatcaccattatgcagaatccacgccagtacaagatcccagactggttcttgaacagacagaaggatgtaaaggatggaaaatacagccagtacagccaggtcctagccaatggtctggacaacaagctccgtgaagacctggagcgactgaagaagattcgggcccatagagggctgcgtcacttctggggccttcgtgtccgaggccagcacaccaagaccactggccgccgtggccgcaccgtgggtgtgtccaagaagaaataagtctgtaggccttgtctgttaataaatagtttatataccta

SEQ ID NO: 455008 - DNA, 576 bp, Homo sapiens
  misc_feature (19)..(19): n is a, c, g, or t
  misc_feature (45)..(45): n is a, c, g, or t
  misc_feature (167)..(167): n is a, c, g, or t
gactcacgcgtgcgccgtntgacatgacccggctcagatccgccngtgatcgctcgaagcgcgagggcccaaggagctaacccgcggtctcaccatttctgtacctgaagtccacaatttgcgagtctcacccactcgatggcgcggaaataccttgcctcatgccnagggtgtgggccgaagatatgctcatgtggtgttgaggaaagcagacattgacctcaccaagagggcgggagaactcactgaggatgaggtggaacgtgtgatcaccattatgcagaatccacgccagtacaagatcccagactggttcttgaacagacagaaggatgtaaaggatggaaaatacagccagtacagccaggtcctagccaatggtctggacaacaagctccgtgaagacctggagcgactgaagaagattcgggcccatagagggctgcgtcacttctggggccttcgtgtccgaggccagcacaccaagaccactggccgccgtggccgcaccgtgggtgtgtccaagaagaaataagtctgtaggccttgtctgttaataaatagtttatataccta

SEQ ID NO: 455009 - DNA, 813 bp, Homo sapiens
aaagcagacattgacctcaccaagagggcggcggaaaatagcctttgggtgtgggccgaagatatgctcatgtggtgttgaggaaagcagacattgacctcaccaagagggcgggagaactcactgaggatgaggtggaacgtgtgatcaccattatgcagaatccacgccagtacaagatcccagactggttcttgaacagacagaaggatgtaaaggatggaaaatacagccagtacagccaggtcctagccaatggtctggacaacaagctccgtgaagacctggagcgactgaagaagattcgggcccatagagggctgcgtcacttctggggccttcgtgtccgaggccagcacaccaagaccactggccgccgtggccgcaccgtgggtgtgtccaagaagaaataagtctgtaggccttgtctgttaataaatagtttatatacctaaaaaaaaaaaaaaaaaaaaaaaaaaaaaaaaaaaaaaaaaaaaaaaaaaaagggggggggggggggaaaaaaattccccgggggggcccaagtttgcgggtcacccgtttttttgaccaagggggccccaataggggagggtggtaaaaaaacgaaaggagagagggccagagtacacacgcgcggggcgtgggaaaactggcgacgcgggcacctgggagaggagcccctacccggtgggcggacactactgcggcagcaacccaaaaaagttaaccgctagggaacattaaccttcccgtgcacggggacccaccatatcgtggcgcaaaaattggcaccagactagacagaattac

SEQ ID NO: 455010 - DNA, 717 bp, Homo sapiens
ctgggctgtagtgcgctatgccgatcgggtgtccgcactaagttcggcatcaatatggtgacctcccgggagcgggggaccaccaggttgcctaaggaggggtgaaccggcccaggtcggaaacagaactcactgaggatgaggtggaacgtgtgatcaccattatgcagaatccacgccagtacaagatcccagactggttcttgaacagacagaaggatgtaaaggatggaaaatacagccagtacagccaggtcctagccaatggtctggacaacaagctccgtgaagacctggagcgactgaagaagattcgggcccatagagggctgcgtcacttctggggccttcgtgtccgaggccagcacaccaagaccactggccgccgtggccgcaccgtgggtgtgtccaagaagaaataagtctgtaggccttgtctgttaataaatagtttatatacctaaaaaaaaaaaaatcacaaattcaatcttacactcttcatcatacctcctcgaccattcctacgcttattcataccctcggagggggggcccgtacccaaattgcgcctatggggggtgtctttccacttccactggccgtcttctataacggtcgtctatgctaaacccctggctaacctcattttaagggcttctactaaaccccttttggcacactgctgtcttaccaaaatggccgacccatcccctttcc

SEQ ID NO: 455011 - DNA, 397 bp, Homo sapiens
tgcggccgctccaacatcagaatggtaatcacacgttccacctcatcctcagtgagttctcccgccctcttggtgaggtggaacgtgtgatcaccattatgcagaatccacgccagtacaagatcccagactggttcttgaacagacagaaggatgtaaaggatggaaaatacagccagtacagccaggtcctagccaatggtctggacaacaagctccgtgaagacctggagcgactgaagaagattcgggcccatagagggctgcgtcacttctggggccttcgtgtccgaggccagcacaccaagaccactggccgccgtggccgcaccgtgggtgtgtccaagaagaaataagtctgtaggccttgtctgttaataaatagtttatataccta

SEQ ID NO: 455012 - DNA, 659 bp, Homo sapiens
ctctagagcggccgcctactactactaaattcgcggccgcgtcgacacggctgcgagaagacgacagaaggggtcttccacaggaggcctacacgccgccgcttgtgctgcagccatgtctctagtgatccctgaaaagttccagcatattttgcgagtactcaacaccaacatcgatgggcggcggaaaatagcctttgccatcactgccattaagggtgtgggccgaagatatgctcatgtggtgttgaggaaagcagacattgacctcaccaagagggcgggagaactcactgaggatgaggtggaacgtgtgatcaccattatgcagaatccacgccagtacaagatcccagactggttcttgaacagacagaaggatgtaaaggatggaaaatacagccaggtcctagccaatggtctggacaacaagctccgtgaagacctggagcgactgaagaagattcgggcccatagagggctgcgtcacttctggggccttcgtgtccgaggccagcacaccaagaccactggccgccgtggccgcaccgtgggtgtgtccaagaagaaataagtctgtaggccttgtctgttaataaatagtttatatacctaaaaaaagtcgacgcggccgcgaatttagtagtagtagggtcagc

SEQ ID NO: 455013 - DNA, 974 bp, Homo sapiens
ctctagagcggccgcctactactactaaattcgcggccgcgtcgacacggctgcgagaagacgacagaaggggtcttccacaggaggcctacacgccgccgcttgtgctgcagccatgtctctagtgatccctgaaaagttccagcatattttgcgagtactcaacaccaacatcgatgggcggcggaaaatagcctttgccatcactgccattaagggtgtgggccgaagatatgctcatgtggtgttgaggaaagcagacattgacctcaccaagagggcgggagaactcactgaggatgaggtggaacgtgtgatcaccattatgcagaatccacgccagtacaagatcccagactggttcttgaacagacagaaggatgtaaaggatggaaaatacagccaggtcctagccaatggtctggacaacaagctccgtgaagacctggagcgactgaagaagattcgggcccatagagggctgcgtcacttctggggccttcgtgtccgaggccagcacaccaagaccactggccgccgtggccgcaccgtgggtgtgtccaagaagaaataagtctgtaggccttgtctgttaataaatagtttatatacctaaaaaaaaaaaaaaaaaaaaaaaaaaaaaaaaaaaaaaaaaaaaaaaaaaaaaaaacagggggggggaaaaaaattccccgggggggcccaagtttgcgggtcacccgtttttttgaccaagggggccccaataggggagggtggtaaaaaaacgaaaggagagagggccagagtacacacgcgcggggcgtgggaaaactggcgacgcgggcacctgggagaggagcccctacccggtgggcggacactactgcggcagcaacccaaaaaagttaaccgctagggaacattaaccttcccgtgcacggggacccaccatatcgtggcgcaaaaattggcaccagactagacagaattac

SEQ ID NO: 455014 - DNA, 1005 bp, Homo sapiens
ctctagagcggccgcctactactactaaattcgcggccgcgtcgacacggctgcgagaagacgacagaaggggtcttccacaggaggcctacacgccgccgcttgtgctgcagccatgtctctagtgatccctgaaaagttccagcatattttgcgagtactcaacaccaacatcgatgggcggcggaaaatagcctttgccatcactgccattaagggtgtgggccgaagatatgctcatgtggtgttgaggaaagcagacattgacctcaccaagagggcgggagaactcactgaggatgaggtggaacgtgtgatcaccattatgcagaatccacgccagtacaagatcccagactggttcttgaacagacagaaggatgtaaaggatggaaaatacagccaggtcctagccaatggtctggacaacaagctccgtgaagacctggagcgactgaagaagattcgggcccatagagggctgcgtcacttctggggccttcgtgtccgaggccagcacaccaagaccactggccgccgtggccgcaccgtgggtgtgtccaagaagaaataagtctgtaggccttgtctgttaataaatagtttatatacctaaaaaaaaaaaaaaaaaaaaaaaaaaaaaaaaaaaaaaaaaaaaaaaaaaaaaaaaaaaaaaaaaaaaaaaaaaaaaaaaaaaaaaaaaaaaaaagaggagggggcggcggccccaaatttctctcccggggggggcacgcgcgcgccccccaagcagttgttgtctgtaacaaaagaggggccgcccctcaatgtagaggcgggctgatatatttattataagacgaggagcgacagggccgccggttcgttttataaacaaagcgtactagtgcggaggaaaaacaagaggcgtgcgacggcgaacattctttgatgagaagagccactatctttctgtgggagaggagaacaactattgacaacacacaccctcacaagagtttaccg

SEQ ID NO: 455015 - DNA, 737 bp, Homo sapiens
  misc_feature (679)..(679): n is a, c, g, or t
  misc_feature (683)..(683): n is a, c, g, or t
  misc_feature (687)..(687): n is a, c, g, or t
ctctagagcggccgcctactactactaaattcgcggccgcgtcgacacggctgcgagaagacgacagaaggggtcttccacaggaggcctacacgccgccgcttgtgctgcagccatgtctctagtgatccctgaaaagttccagcatattttgcgagtactcaacaccaacatcgatgggcggcggaaaatagcctttgccatcactgccattaagggtgtgggccgaagatatgctcatgtggtgttgaggaaagcagacattgacctcaccaagagggcgggagaactcactgaggatgaggtggaacgtgtgatcaccattatgcagaatccacgccagtacaagatcccagactggttcttgaacagacagaaggatgtaaaggatggaaaatacagccaggtcctagccaatggtctggacaacaagctccgtgaagacctggagcgactgaagaagattcgggcccatagagggctgcgtcacttctggggccttcgtgtccgaggccagcacaccaagaccactggccgccgtggccgcaccgtgggtgtgtccaagaagaaataagtctgtaggccttgtctgttaataaatagtttatatacctaaaaaaaaaaaaaaaaaaaaaaaaacaccgcgggggcctatattgggggggggggaaaaaagggnttanaaangggcaggggccaaggtgtttttcgggcacccattttttttgttcccaggg

SEQ ID NO: 455016 - DNA, 802 bp, Homo sapiens
ctctagagcggccgcctactactactaaattcgcggccgcgtcgacacggctgcgagaagacgacagaaggggtcttccacaggaggcctacacgccgccgcttgtgctgcagccatgtctctagtgatccctgaaaagttccagcatattttgcgagtactcaacaccaacatcgatgggcggcggaaaatagcctttgccatcactgccattaagggtgtgggccgaagatatgctcatgtggtgttgaggaaagcagacattgacctcaccaagagggcgggagaactcactgaggatgaggtggaacgtgtgatcaccattatgcagaatccacgccagtacaagatcccagactggttcttgaacagacagaaggatgtaaaggatggaaaatacagccaggtcctagccaatggtctggacaacaagctccgtgaagacctggagcgactgaagaagattcgggcccatagagggctgcgtcacttctggggccttcgtgtccgaggccagcacaccaagaccactggccgccgtggccgcaccgtgggtgtgtccaagaagaaataagtctgtaggccttgtctgttaataaatagtttatatacctaaaaaaaaaaaaaaaaaaaaaaaaacaaaaaaaaaatcgggggggttttatggcgggggggggaaaaaggggtctaggaatgggccactggcaaggtgtgttcccgaacccgtttttctggcacccgggcgaaaactgggcggtcccataaaagggggcgttaaattcctaaaaccgtgtacccgtta

SEQ ID NO: 455017 - DNA, 675 bp, Homo sapiens
ctctagagcggccgcctactactactaaattcgcggccgcgtcgacacggctgcgagaagacgacagaaggggtcttccacaggaggcctacacgccgccgcttgtgctgcagccatgtctctagtgatccctgaaaagttccagcatattttgcgagtactcaacaccaacatcgatgggcggcggaaaatagcctttgccatcactgccattaagggtgtgggccgaagatatgctcatgtggtgttgaggaaagcagacattgacctcaccaagagggcgggagaactcactgaggatgaggtggaacgtgtgatcaccattatgcagaatccacgccagtacaagatcccagactggttcttgaacagacagaaggatgtaaaggatggaaaatacagccaggtcctagccaatggtctggacaacaagctccgtgaagacctggagcgactgaagaagattcgggcccatagagggctgcgtcacttctggggccttcgtgtccgaggccagcacaccaagaccactggccgccgtggccgcaccgtgggtgtgtccaagaagaaataagtctgtaggccttgtctgttaataaatagtttatatacctagaaaaaaaaaacaaacttgaaggggggcccgggccccaattggcctattgggaagggtat

SEQ ID NO: 455018 - DNA, 1009 bp, Homo sapiens
ctctagagcggccgcctactactactaaattcgcggccgcgtcgacacggctgcgagaagacgacagaaggggtcttccacaggaggcctacacgccgccgcttgtgctgcagccatgtctctagtgatccctgaaaagttccagcatattttgcgagtactcaacaccaacatcgatgggcggcggaaaatagcctttgccatcactgccattaagggtgtgggccgaagatatgctcatgtggtgttgaggaaagcagacattgacctcaccaagagggcgggagaactcactgaggatgaggtggaacgtgtgatcaccattatgcagaatccacgccagtacaagatcccagactggttcttgaacagacagaaggatgtaaaggatggaaaatacagccaggtcctagccaatggtctggacaacaagctccgtgaagacctggagcgactgaagaagattcgggcccatagagggctgcgtcacttctggggccttcgtgtccgaggccagcacaccaagaccactggccgccgtggccgcaccgtgggtgtgtccaagaagaaataagtctgtaggccttgtctgttaataaatagtttatatacctaaaaaaaaaaaaaaaaaaaaaaaaaaaaaaaaaaaaaaaaaaaaaaaaaaaaaaaaaaaaaaaaaaaaaacaaaaaaaaaaaaaaaaaaaaaggggggggggaaaaaaattccccgggggggcccaagtttgcgggtcacccgtttttttgaccaagggggccccaataggggagggtggtaaaaaaacgaaaggagagagggccagagtacacacgcgcggggcgtgggaaaactggcgacgcgggcacctgggagaggagcccctacccggtgggcggacactactgcggcagcaacccaaaaaagttaaccgctagggaacattaaccttcccgtgcacggggacccaccatatcgtggcgcaaaaattggcaccagactagacagaattac

SEQ ID NO: 455019 - DNA, 713 bp, Homo sapiens
ctctagagcggccgcctactactactaaattcgcggccgcgtcgacacggctgcgagaagacgacagaaggggtcttccacaggaggcctacacgccgccgcttgtgctgcagccatgtctctagtgatccctgaaaagttccagcatattttgcgagtactcaacaccaacatcgatgggcggcggaaaatagcctttgccatcactgccattaagggtgtgggccgaagatatgctcatgtggtgttgaggaaagcagacattgacctcaccaagagggcgggagaactcactgaggatgaggtggaacgtgtgatcaccattatgcagaatccacgccagtacaagatcccagactggttcttgaacagacagaaggatgtaaaggatggaaaatacagccaggtcctagccaatggtctggacaacaagctccgtgaagacctggagcgactgaagaagattcgggcccatagagggctgcgtcacttctggggccttcgtgtccgaggccagcacaccaagaccactggccgaggctaggacaggctaggaccactggcgaggctaggacaccactggcgaggctaggacactggcgaggctaggacactggcgaggctaggacactggcgaggctaggacactggcgaggctcggacactggcgaggctaggacactggcgaggctaggacactggcgaggctagga

SEQ ID NO: 455020 - DNA, 739 bp, Homo sapiens
ctctagagcggccgcctactactactaaattcgcggccgcgtcgacacggctgcgagaagacgacagaaggggtcttccacaggaggcctacacgccgccgcttgtgctgcagccatgtctctagtgatccctgaaaagttccagcatattttgcgagtactcaacaccaacatcgatgggcggcggaaaatagcctttgccatcactgccattaagggtgtgggccgaagatatgctcatgtggtgttgaggaaagcagacattgacctcaccaagagggcgggagaactcactgaggatgaggtggaacgtgtgatcaccattatgcagaatccacgccagtacaagatcccagactggttcttgaacagacagaaggatgtaaaggatggaaaatacagccaggtcctagccaatggtctggacaacaagctccgtgaagacctggagcgactgaagaagattcgggcccatagagggctgcgtcacttctggggggtgagtggggggtctcatctccctgcctacctcgactcagcattcctcctactcgctcttctttttccccaaccttttgtttctgctgtgcatgacctgtgactcttctctttttacctgcagccttcgtgtccgaggccagcacaccaagaccactggccgccgtggccgcaccgtgggtgtgtccaagaagaaataagtctgtaggccttgtctgttaataaatagtttatataccta

SEQ ID NO: 455021 - DNA, 1048 bp, Homo sapiens
taccatgtcgaccacatgcaaggctgggagaacccgggataccttctggccaaacgcccagtttagcgccctcgggtccagactactgcagctcctgctccaataccagcgccaaacctggcgtgatcttcacgagtgcaacaccaggtctctcgggttgcacaccccccactgtgggccgggggaccgctacacgccgccgcttgtgctgcagccatgtctctagtgatccctgaaaagttccagcatattttgcgagtactcaacaccaacatcgatgggcggcggaaaatagcctttgccatcactgccattaagggtgtgggccgaagatatgctcatgtggtgttgaggaaagcagacattgacctcaccaagagggcgggagaactcactgaggatgaggtggaacgtgtgatcaccattatgcagaatccacgccagtacaagatcccagactggttcttgaacagacagaaggatgtaaaggatggaaaatacagccaggtcctagccaatggtctggacaacaagctccgtgaagacctggagcgactgaagaagattcgggcccatagagggctgcgtcacttctggggccttcgtgtccgaggccagcacaccaagaccactggccgccgtggccgcaccgtgggtgtgtccaagaagaaataagtctgtaggccttgtctgttaataaatagtttatatacctaaaaaaaacaaaaaaaaaaaaaaaaaaaaaggggggggggaaaaaaattccccgggggggcccaagtttgcgggtcacccgtttttttgaccaagggggccccaataggggagggtggtaaaaaaacgaaaggagagagggccagagtacacacgcgcggggcgtgggaaaactggcgacgcgggcacctgggagaggagcccctacccggtgggcggacactactgcggcagcaacccaaaaaagttaaccgctagggaacattaaccttcccgtgcacggggacccaccatatcgtggcgcaaaaattggcaccagactagacagaattac

SEQ ID NO: 455022 - DNA, 624 bp, Homo sapiens
ctctagagcggccgcctactactactaaattcgcggccgcgtcgacacggctgcgagaagacgacagaaggggtcttccacaggaggcctacacgccgccgcttgtgctgcagccatgtctctagtgatccctgaaaagttccagcatattttgcgagtactcaacaccaacatcgatgggcggcggaaaatagcctttgccatcactgccattaagggtgtgggccgaagatatgctcatgtggtgttgaggaaagcagacattgacctcaccaagagggcgggagaactcactgaggatgaggtggaacgtgtgatcaccattatgcagaatccacgccagtacaagatcccagactggttcttgaacagacagaaggatgtaaaggatggaaaatacagccagtacagccaggtcctagccaatggtctggacaacaagctccgtgaagacctggagcgactgaagaagattcgggcccatagagggctgcgtcacttctggggccttcgtgtccgaggccagcacaccaagaccactggccgccgtggccgcaccgtgggtgtgtccaagaagaaataagtctgtaggccttgtctgttaataaatagtttatataccta

SEQ ID NO: 455023 - DNA, 733 bp, Homo sapiens
ctctagagcggccgcctactactactaaattcgcggccgcgtcgacacggctgcgagaagacgacagaaggggtcttccacaggaggcctacacgccgccgcttgtgctgcagccatgtctctagtgatccctgaaaagttccagcatattttgcgagtactcaacaccaacatcgatgggcggcggaaaatagcctttgccatcactgccattaagggtgtgggccgaagatatgctcatgtggtgttgaggaaagcagacattgacctcaccaagagggcgggagaactcactgaggatgaggtggaacgtgtgatcaccattatgcagaatccacgccagtacaagatcccagactggttcttgaacagacagaaggatgtaaaggatggaaaatacagccagtacagccaggtgtgtactgaaatgagggcaggattagaggaagggtggagggtcctaacagaattgggcataggaggtcaggggataaaacatcccttgccccctcctctgaatccaggtcctagccaatggtctggacaacaagctccgtgaagacctggagcgactgaagaagattcgggcccatagagggctgcgtcacttctggggccttcgtgtccgaggccagcacaccaagaccactggccgccgtggccgcaccgtgggtgtgtccaagaagaaataagtctgtaggccttgtctgttaataaatagtttatataccta

SEQ ID NO: 455024 - DNA, 869 bp, Homo sapiens
  misc_feature (804)..(804): n is a, c, g, or t
  misc_feature (851)..(851): n is a, c, g, or t
ctctagagcggccgcctactactactaaattcgcggccgcgtcgacacggctgcgagaagacgacagaaggggtcttccacaggaggcctacacgccgccgcttgtgctgcagccatgtctctagtgatccctgaaaagttccagcatattttgcgagtactcaacaccaacatcgatgggcggcggaaaatagcctttgccatcactgccattaagggtgtgggccgaagatatgctcatgtggtgttgaggaaagcagacattgacctcaccaagagggcgggagaactcactgaggatgaggtggaacgtgtgatcaccattatgcagaatccacgccagtacaagatcccagactggttcttgaacagacagaaggatgtaaaggatggaaaatacagccagtacagccaggtgtgtactgaaatgagggcaggattagaggaagggtggagggtcctaacagaattgggcataggaggtcaggggataaaacatcccttgccccctcctctgaatccaggtcctagccaatggtctggacaacaagctccgtgaagacctggagcgactgaagaagattcgggcccatagagggctgcgtcacttctggggggtgagtggggggtctcatctccctgcctacctcgactcagcattcctcctactcgctcttctttttccccaaccttttgtttctgctgtgcatgacctgtgactcttctctttttacctgcagccttcgtgtccgaggccagcacaccaagaccactggccgggggactcgcaagatggcgccgcanaagacaggaagcccggtcaacctgaagttaatttggaccttctcatncagtagaagaggtttttg

SEQ ID NO: 455025 - DNA, 1081 bp, Homo sapiens
ctctagagcggccgcctactactactaaattcgcggccgcgtcgacacggctgcgagaagacgacagaaggggtcttccacaggaggcctacacgccgccgcttgtgctgcagccatgtctctagtgatccctgaaaagttccagcatattttgcgagtactcaacaccaacatcgatgggcggcggaaaatagcctttgccatcactgccattaagggtgtgggccgaagatatgctcatgtggtgttgaggaaagcagacattgacctcaccaagagggcgggagaactcactgaggatgaggtggaacgtgtgatcaccattatgcagaatccacgccagtacaagatcccagactggttcttgaacagacagaaggatgtaaaggatggaaaatacagccagtacagccaggtcctagccaatggtctggacaacaagctccgtgaagacctggagcgactgaagaagattcgggcccatagagggctgcgtcacttctggggccttcgtgtccgaggccagcacaccaagaccactggccgccgtggccgcaccgtgggtgtgtccaagaagaaataagtctgtaggccttgtctgttaataaatagtttatatacctaaaaaaaaaagtttgctgcggcaaggacgagccggggcgctgaagactatgctccaggaagccaggtgtttcgaggacttgcttctacggttctttgtctgccggaatcagggaagagtgaaaagggtcagcacagaattccaagaagcaaagtccaacaaaaactcctctgattctgaatctgatgatgagggtgacgtttcagaggtcactctcgagtggtgagcaaggcagaagggattcgaaaaccagagtctcatcctttgaaaacgaggccccgagtcagtttcagaaagaagaacttgctggaccgctgtggattatgtcacgagagccacacgcagagaagtccgtacctacaggggatggagaccacccagcccatcgcatcagttggcctcggcagtgcatcttcagcgtcgacccctggcttccacattgcgggacctttcgcagcc

SEQ ID NO: 455026 - DNA, 842 bp, Homo sapiens
ctctagagcggccgcctactactactaaattcgcggccgcgtcgacacggctgcgagaagacgacagaaggggtcttccacaggaggcctacacgccgccgcttgtgctgcagccatgtctctagtgatccctgaaaagttccagcatattttgcgagtactcaacaccaacatcgatgggcggcggaaaatagcctttgccatcactgccattaagggtgtgggccgaagatatgctcatgtggtgttgaggaaagcagacattgacctcaccaagagggcgggagaactcactgaggatgaggtggaacgtgtgatcaccattatgcagaatccacgccagtacaagatcccagactggttcttgaacagacagaaggatgtaaaggatggaaaatacagccagtacagccaggtcctagccaatggtctggacaacaagctccgtgaagacctggagcgactgaagaagattcgggcccatagagggctgcgtcacttctggggccttcgtgtccgaggccagcacaccaagaccactggccgccgtggccgcaccgtgggtgtgtccaagaagaaataagtctgtaggccttgtctgttaataaatagtttatatacctaaaaaaaaaaaaaaaaaaaaaaaaaaaaaaaaaaaaaaaaaaaaaaaaaaaaaaaacaaaaaaaaaatcgggggggttttatggcgggggggggaaaaaggggtctaggaatgggccactggcaaggtgtgttcccgaacccgtttttctggcacccgggcgaaaactgggcggtcccataaaagggggcgttaaattcctaaaaccgtgtacccgtta

SEQ ID NO: 455027 - DNA, 984 bp, Homo sapiens
  misc_feature (895)..(896): n is a, c, g, or t
ctctagagcggccgcctactactactaaattcgcggccgcgtcgacacggctgcgagaagacgacagaaggggtcttccacaggaggcctacacgccgccgcttgtgctgcagccatgtctctagtgatccctgaaaagttccagcatattttgcgagtactcaacaccaacatcgatgggcggcggaaaatagcctttgccatcactgccattaagggtgtgggccgaagatatgctcatgtggtgttgaggaaagcagacattgacctcaccaagagggcgggagaactcactgaggatgaggtggaacgtgtgatcaccattatgcagaatccacgccagtacaagatcccagactggttcttgaacagacagaaggatgtaaaggatggaaaatacagccagtacagccaggtcctagccaatggtctggacaacaagctccgtgaagacctggagcgactgaagaagattcgggcccatagagggctgcgtcacttctggggccttcgtgtccgaggccagcacaccaagaccactggccgccgtggccgcaccgtgggtgtgtccaagaagaaataagtctgtaggccttgtctgttaataaatagtttatatacctatcaccaaactcttcactgggcgtcgataacacagtgggagcgggaaccgtgggttccaagttatcgttgaggcattccctttgcagaggggaaagaaaagccggctatgccttccacgttggccttcatgatggatggaggacatcgtaatcgtactggtaccgctaacaaggaatgaatctaacaaaacgaaggtgttctggaagccaaaagtccccggagtgaggcgacccatggggaagcgaccggtgaaacctctcccactacttcnnagcagacgacaccagctcaaccaaaaaacaccaaagacaaccacaggacaccgcacagcagcgccaagcaccgacaacaacccagagc

SEQ ID NO: 455028 - DNA, 1003 bp, Homo sapiens
ctctagagcggccgcctactactactaaattcgcggccgcgtcgacacggctgcgagaagacgacagaaggggtcttccacaggaggcctacacgccgccgcttgtgctgcagccatgtctctagtgatccctgaaaagttccagcatattttgcgagtactcaacaccaacatcgatgggcggcggaaaatagcctttgccatcactgccattaagggtgtgggccgaagatatgctcatgtggtgttgaggaaagcagacattgacctcaccaagagggcgggagaactcactgaggatgaggtggaacgtgtgatcaccattatgcagaatccacgccagtacaagatcccagactggttcttgaacagacagaaggatgtaaaggatggaaaatacagccagtacagccaggtcctagccaatggtctggacaacaagctccgtgaagacctggagcgactgaagaagattcgggcccatagagggctgcgtcacttctggggccttcgtgtccgaggccagcacaccaagaccactggccgccgtggccgcaccgtgggtgtgtccaagaagaaataagtctgtaggccttgtctgttaataaatagtttatatacctataaacaaaacaaaggaagacccagaacagacacgcacaaaaccacaagagaaacccagcacagcaaacaacagacaggaccacaacacactgacaaagagaccacagaaacacaagcacggggggcggcgggcgccacacaatgcactgcaccggtcgacgcggaaggacggcaccagtacgatgacatgcgcacagcatgaaccatgttgaccgcagccatcgcggcgggggcacgtcaacactgaggcagtagatcaatatacataaacgagcacgagacgagcggccggacctgcgagacaagagagcaggcgcgcggcgagcgccagcaaaatgacggagatctcagcgggtaccgcctcggggagtcgacaacc

SEQ ID NO: 455029 - DNA, 905 bp, Homo sapiens
ctctagagcggccgcctactactactaaattcgcggccgcgtcgacacggctgcgagaagacgacagaaggggtcttccacaggaggcctacacgccgccgcttgtgctgcagccatgtctctagtgatccctgaaaagttccagcatattttgcgagtactcaacaccaacatcgatgggcggcggaaaatagcctttgccatcactgccattaagggtgtgggccgaagatatgctcatgtggtgttgaggaaagcagacattgacctcaccaagagggcgggagaactcactgaggatgaggtggaacgtgtgatcaccattatgcagaatccacgccagtacaagatcccagactggttcttgaacagacagaaggatgtaaaggatggaaaatacagccagtacagccaggtcctagccaatggtctggacaacaagctccgtgaagacctggagcgactgaagaagattcgggcccatagagggctgcgtcacttctggggccttcgtgtccgaggccagcacaccaagaccactggccgccgtggccgcaccgtgggtgtgtccaagaagaaataagtctgtaggccttgtctgttaataaatagtttatatacctaaaaaaaacaaaaaaaaaaaaaaaaaaaaagggcgccgtcgcgatcaaaattagctggggccggaggtgccctgggaaaggccatgggacttcatcggccccgggcccgggccccattaacctctactttcttcattgggtagtgggggtctgtgcactggggatataacttgagggcaacagtgaaacatcttcaagcgggagccatccgctcattaaggccctaccaagggggtcggttccagttctatgcaccctctggggattccaggcagcacttag

SEQ ID NO: 455030 - DNA, 742 bp, Homo sapiens
ctctagagcggccgcctactactactaaattcgcggccgcgtcgacacggctgcgagaagacgacagaaggggtcttccacaggaggcctacacgccgccgcttgtgctgcagccatgtctctagtgatccctgaaaagttccagcatattttgcgagtactcaacaccaacatcgatgggcggcggaaaatagcctttgccatcactgccattaagggtgtgggccgaagatatgctcatgtggtgttgaggaaagcagacattgacctcaccaagagggcgggagaactcactgaggatgaggtggaacgtgtgatcaccattatgcagaatccacgccagtacaagatcccagactggttcttgaacagacagaaggatgtaaaggatggaaaatacagccagtacagccaggtcctagccaatggtctggacaacaagctccgtgaagacctggagcgactgaagaagattcgggcccatagagggctgcgtcacttctggggccttcgtgtccgaggccagcacaccaagaccactggccgccgtggccgcaccgtgggtgtgtccaagaagaaataagtctgtaggccttgtctgttaataaatagtttatatacctaaaaataaataaaaaaaactcgaggggtgtcccggaccccaattgccctaagtgaggtcgattacaactcatctgccgtcgctatacaaccgcttgattggggcctggcgaatatccct

SEQ ID NO: 455031 - DNA, 678 bp, Homo sapiens
ctctagagcggccgcctactactactaaattcgcggccgcgtcgacacggctgcgagaagacgacagaaggggtcttccacaggaggcctacacgccgccgcttgtgctgcagccatgtctctagtgatccctgaaaagttccagcatattttgcgagtactcaacaccaacatcgatgggcggcggaaaatagcctttgccatcactgccattaagggtgtgggccgaagatatgctcatgtggtgttgaggaaagcagacattgacctcaccaagagggcgggagaactcactgaggatgaggtggaacgtgtgatcaccattatgcagaatccacgccagtacaagatcccagactggttcttgaacagacagaaggatgtaaaggatggaaaatacagccagtacagccaggtcctagccaatggtctggacaacaagctccgtgaagacctggagcgactgaagaagattcgggcccatagagggctgcgtcacttctggggccttcgtgtccgaggccagcacaccaagaccactggccgccgtggccgcaccgtgggtgtgtccaagaagaaataagtctgtaggccttgtctgttaataaatagtttatatacctaaaaaaagacatgaacaaagtaaagaaccacgtagcatagacaaacaaaaacaac

SEQ ID NO: 455032 - DNA, 739 bp, Homo sapiens
ctctagagcggccgcctactactactaaattcgcggccgcgtcgacacggctgcgagaagacgacagaaggggtcttccacaggaggcctacacgccgccgcttgtgctgcagccatgtctctagtgatccctgaaaagttccagcatattttgcgagtactcaacaccaacatcgatgggcggcggaaaatagcctttgccatcactgccattaagggtgtgggccgaagatatgctcatgtggtgttgaggaaagcagacattgacctcaccaagagggcgggagaactcactgaggatgaggtggaacgtgtgatcaccattatgcagaatccacgccagtacaagatcccagactggttcttgaacagacagaaggatgtaaaggatggaaaatacagccagtacagccaggtcctagccaatggtctggacaacaagctccgtgaagacctggagcgactgaagaagattcgggcccatagagggctgcgtcacttctggggccttcgtgtccgaggccagcacaccaagaccactggccgccgtggccgcaccgtgggtgtgtccaagaagaaataagtctgtaggccttgtctgttaataaatagtttatatacctaaaaaaaaaaaaactcatagaacctcctcacattcactccgcaacacaaacaaaaaagggggggggcgcccttaaaaaaatttctcccggaggagggccccattttacaatcccct

SEQ ID NO: 455033 - DNA, 894 bp, Homo sapiens
ctctagagcggccgcctactactactaaattcgcggccgcgtcgacacggctgcgagaagacgacagaaggggtcttccacaggaggcctacacgccgccgcttgtgctgcagccatgtctctagtgatccctgaaaagttccagcatattttgcgagtactcaacaccaacatcgatgggcggcggaaaatagcctttgccatcactgccattaagggtgtgggccgaagatatgctcatgtggtgttgaggaaagcagacattgacctcaccaagagggcgggagaactcactgaggatgaggtggaacgtgtgatcaccattatgcagaatccacgccagtacaagatcccagactggttcttgaacagacagaaggatgtaaaggatggaaaatacagccagtacagccaggtcctagccaatggtctggacaacaagctccgtgaagacctggagcgactgaagaagattcgggcccatagagggctgcgtcacttctggggccttcgtgtccgaggccagcacaccaatggtactgaacctacgagtacaccgactacggcggactaatcttcaactcctacatacttcccccattattcctagaaccaggcgaactgcgactccttgacgttgaacaatccgagtagtactccgcgattgaagcccccattcgtataataattacatcacaagacgtcttgcactcattgagctggtcccacatttaggcttaaaaccagatgcaatttcccggaacgtctaaagccaaccactttcccccgctacacgaccggggtatactacggtcaatgtcctgaatcctggggagccaaccacaggttcatgcccatcgtcctagaattaattcccttaaaatctcggcatag

SEQ ID NO: 455034 - DNA, 581 bp, Homo sapiens
ctctagagcggccgcctactactactaaattcgcggccgcgtcgacacggctgcgagaagacgacagaaggggtcttccacaggaggcctacacgccgccgcttgtgctgcagccatgtctctagtgatccctgaaaagttccagcatattttgcgagtactcaacaccaacatcgatgggcggcggaaaatagcctttgccatcactgccattaagggtgtgggccgaagatatgctcatgtggtgttgaggaaagcagacattgacctcaccaagagggcgggagaactcactgaggatgaggtggaacgtgtgatcaccattatgcagaatccacgccagtacaagatcccagactggttcttgaacagacagaaggatgtaaaggatggaaaatacagccagtacagccaggtcctagccaatggtctggacaacaagctccgtgaagacctggagcgactgaagaagattcgggcccatagagggctgcgtcacttctggggaggagccatcgctgtgcacgagaccagcaaatccaagaccagcttggccgccgagtacgaccagggagcagtac

SEQ ID NO: 455035 - DNA, 569 bp, Homo sapiens
ctctagagcggccgcctactactactaaattcgcggccgcgtcgacacggctgcgagaagacgacagaaggggtcttccacaggaggcctacacgccgccgcttgtgctgcagccatgtctctagtgatccctgaaaagttccagcatattttgcgagtactcaacaccaacatcgatgggcggcggaaaatagcctttgccatcactgccattaagggtgtgggccgaagatatgctcatgtggtgttgaggaaagcagacattgacctcaccaagagggcgggagaactcactgaggatgaggtggaacgtgtgatcaccattatgcagaatccacgccagtacaagatcccagactggttcttgaacagacagaaggatgtaaaggatggaaaatacagccagtacagccaggtcctagccaatggtctggacaacaagctccgtgaagacctggagcgactgaagaagattcgggcccatagagggctgcgtcacttctggggcttcgtgtccaggcagcacactagacactgccgcgtgcgcacgtggtgtgtcagagattagt

SEQ ID NO: 455036 - DNA, 1259 bp, Homo sapiens
ctctagagcggccgcctactactactaaattcgcggccgcgtcgacacggctgcgagaagacgacagaaggggtcttccacaggaggcctacacgccgccgcttgtgctgcagccatgtctctagtgatccctgaaaagttccagcatattttgcgagtactcaacaccaacatcgatgggcggcggaaaatagcctttgccatcactgccattaagggtgtgggccgaagatatgctcatgtggtgttgaggaaagcagacattgacctcaccaagagggcgggagaactcactgaggatgaggtggaacgtgtgatcaccattatgcagaatccacgccagtacaagatcccagactggttcttgaacagacagaaggatgtaaaggatggaaaatacagccagtacagccagccttcgtgtccgaggccagcacaccaagaccactggccgccgtggccgcaccgtgggtgtgtccaagaagaaataagtctgtaggccttgtctgttaataaatagtttatatacctaaaaaaaacaaaacaaaaaaaccaaaacaacagaaaaagaccgaagccaccaacaaagcacaaccacgaaaaaccaaagcaagcacaacagacacacacgggggcgggacttacatcaggcggggcggaagaacaacaagcagagcggtcacacaaagcggcgaaccggacagcacaaacacgcgggcgacccgagccacacccaccccccgaccccacacaacaccacgcgcacacccacagggcgcgagactcaacaaagaatgagaggagaacagcaacaattaacaccgcccacacaccagcgcggcatacaactgacgcgcgtaataaagcacaacgcgcagaacccaccgcacagagcacgaacaacgacagacaccagaacagcgccagcaaacgcatacaccagaagcgcgacaacacacagcaagagtacagagaaagcaaaggaggagacaagaaagaaggaaggacagtgggacgtacgaggacaaagcagtgaagaagacagcgagccgcgaaggccggagggaaacgggcgagcaggtgacggattgtccgagacgaggtaagtacgtggtggggggcagggttgggatgtgggttagcgagtggtgagggggggtggggcgacgagatcgggttatgggagatagaagcatagggagagagcgcgggagagagtgtcagagaaggtagaggagggcgacggaggagaggcgggg

SEQ ID NO: 455037 - DNA, 574 bp, Homo sapiens
ctctagagcggccgcctactactactaaattcgcggccgcgtcgacacggctgcgagaagacgacagaaggggtcttccacaggaggcctacacgccgccgcttgtgctgcagccatgtctctagtgatccctgaaaagttccagcatattttgcgagtactcaacaccaacatcgatgggcggcggaaaatagcctttgccatcactgccattaagggtgtgggccgaagatatgctcatgtggtgttgaggaaagcagacattgacctcaccaagagggcgggagaactcactgaggatgaggtggaacgtgtgatcaccattatgcagaatccacgccagtacaagatcccagactggttcttgaacagacagaaggatgtaaaggatggaaaatacagccagggagcgactgaagaagattcgggcccatagagggctgcgtcacttctggggccttcgtgtccgaggccagcacaccaagaccactggccgccgtggccgcaccgtgggtgtgtccaagaagaaataagtctgtaggccttgtctgttaataaatagtttatataccta

SEQ ID NO: 455038 - DNA, 856 bp, Homo sapiens
ctctagagcggccgcctactactactaaattcgcggccgcgtcgacacggctgcgagaagacgacagaaggggtcttccacaggaggcctacacgccgccgcttgtgctgcagccatgtctctagtgatccctgaaaagttccagcatattttgcgagtactcaacaccaacatcgatgggcggcggaaaatagcctttgccatcactgccattaagggtgtgggccgaagatatgctcatgtggtgttgaggaaagcagacattgacctcaccaagagggcgggagaactcactgaggatgaggtggaacgtgtgatcaccattatgcagaatccacgccagtacaagatcccagactggttcttgaacagacagaaggatgtaaaggatggaaaatacagccaggtggatatttgaatggttttaaaccattcaaatatccacatttaatgtacgtaaaagggtgtttttgtaaatgcaaagattaaatcagacagcctctgaattgtagtcttgaaaacattagcaagttcttttaggtccagggtagatactgcagttcacttagccaactttctgcattgagacatccttgccagggatcctgtcagttatgcgaagatgcggcacgagataattcctcttgctgtgatggttcgtcctcaatgacaggtcccttatagtatttaggtacaacaaggtcttttgtgcttggaatgcccttgaaaaagctgcctcacctgtttgtgaagggaaccccaaagagaaagggagaggaagggctgggtgcagtggctcacatctataatcccagcactttgggaggccgaggtgggtggatatttgaatggttta

SEQ ID NO: 455039 - DNA, 943 bp, Homo sapiens
taccatgtcgaccacatgcaaggctgggagaacccgggataccttctggccaaacgcccagtttagcgccctcgggtccagactactgcagctcctgctccaataccagcgccaaacctggcgtgatcttcacgagtgcaacaccaggtctctcgggttgcacaccccccactgtgggccgggggaccgctacacgccgccgcttgtgctgcagccatgtctctagtgatccctgaaaagttccagcatattttgcgagtactcaacaccaacatcgatgggcggcggaaaatagcctttgccatcactgccattaagggtgtgggccgaagatatgctcatgtggtgttgaggaaagcagacattgacctcaccaagagggcgggagaactcactgaggatgaggtggaacgtgtgatcaccattatgcagaatccacgccagtacaagatcccagactggttcttgaacagacagaaggatgtaaaggatggaaaatacagccagtacagccaggtcctagccaatggtctggacaacaagctccgtgaagacctggagcgactgaagaagattcgggcccatagagggctgcgtcacttctggggccttcgtgtccgaggccagcacaccaagaccactggccgccgtggccgcaccgtgggtgtgtccaagaagaaataagtctgtaggccttgtctgttaataaatagtttatatacctaaaaaaaaaaaaaaaaaaaaaaaaaaaaaaaaaaaaaaaaaaaaaaaaaaaaaaaacaaaaaaaaaatcgggggggttttatggcgggggggggaaaaaggggtctaggaatgggccactggcaaggtgtgttcccgaacccgtttttctggcacccgggcgaaaactgggcggtcccataaaagggggcgttaaattcctaaaaccgtgtacccgtta

SEQ ID NO: 455040 - DNA, 1127 bp, Homo sapiens
taccatgtcgaccacatgcaaggctgggagaacccgggataccttctggccaaacgcccagtttagcgccctcgggtccagactactgcagctcctgctccaataccagcgccaaacctggcgtgatcttcacgagtgcaacaccaggtctctcgggttgcacaccccccactgtgggccgggggaccgctacacgccgccgcttgtgctgcagccatgtctctagtgatccctgaaaagttccagcatattttgcgagtactcaacaccaacatcgatgggcggcggaaaatagcctttgccatcactgccattaagggtgtgggccgaagatatgctcatgtggtgttgaggaaagcagacattgacctcaccaagagggcgggagaactcactgaggatgaggtggaacgtgtgatcaccattatgcagaatccacgccagtacaagatcccagactggttcttgaacagacagaaggatgtaaaggatggaaaatacagccagtacagccaggtcctagccaatggtctggacaacaagctccgtgaagacctggagcgactgaagaagattcgggcccatagagggctgcgtcacttctggggccttcgtgtccgaggccagcacaccaagaccactggccgccgtggccgcaccgtgggtgtgtccaagaagaaataagtctgtaggccttgtctgttaataaatagtttatatacctaaaaaaaaaaaaaaaaaaaaaaaaacatcgaaatagttctctctctcggggggggaaaagccttgagcagaaagtttctggggaaccctgtagagggggggcggaaatcctgcacggaaaccagcgcaaagcgccgcaagttcctggagacgggggaggttgcagatcaggcttgaagaacttttgatccccagaaggaaaagggtgtcggggcccgcacagggttaatccattccccgcctaagtctctgtgtgtgtctggggaccaccgctggacgaggtgggccggtatcccattgaatgcagggtagaaatcacagataaactggtcaatggcaattgagttggccaactgttagattccaatcgccgtaaagggaggctccggcaaccaatggcgtgg

SEQ ID NO: 455041 - DNA, 554 bp, Homo sapiens
ctctagagcggccgcctactactactaaattcgcggccgcgtcgacacggctgcgagaagacgacagaaggggtcttccacaggaggcctacacgccgccgcttgtgctgcagccatgtctctagtgatccctgaaaagttccagcatattttgcgagtactcaacaccaacatcgatgggcggcggaaaatagcctttgccatcactgccattaagggtgtgggccgaagatatgctcatgtggtgttgaggaaagcagacattgacctcaccaagagggcgggagaactcactgaggatgaggtggaacgtgtgatcaccattatgcagaatcctacagccaggtcctagccaatggtctggacaacaagctccgtgaagacctggagcgactgaagaagattcgggcccatagagggctgcgtcacttctggggccttcgtgtccgaggccagcacaccaagaccactggccgccgtggccgcaccgtgggtgtgtccaagaagaaataagtctgtaggccttgtctgttaataaatagtttatataccta

SEQ ID NO: 455042 - DNA, 705 bp, Homo sapiens
ctctagagcggccgcctactactactaaattcgcggccgcgtcgacacggctgcgagaagacgacagaaggggtcttccacaggaggcctacacgccgccgcttgtgctgcagccatgtctctagtgatccctgaaaagttccagcatattttgcgagtactcaacaccaacatcgatgggcggcggaaaatagcctttgccatcactgccattaagggtgtgggccgaagatatgctcatgtggtgttgaggaaagcagacattgacctcaccaagagggcgggagaactcactgaggatgaggtgaggacaaggaagggggctgggggtggggtcagcctcagaaaggggtccatctagatctgaccttggtctgcctgccaggtggaacgtgtgatcaccattatgcagaatccacgccagtacaagatcccagactggttcttgaacagacagaaggatgtaaaggatggaaaatacagccagtacagccaggtcctagccaatggtctggacaacaagctccgtgaagacctggagcgactgaagaagattcgggcccatagagggctgcgtcacttctggggccttcgtgtccgaggccagcacaccaagaccactggccgccgtggccgcaccgtgggtgtgtccaagaagaaataagtctgtaggccttgtctgttaataaatagtttatataccta

SEQ ID NO: 455043 - DNA, 1023 bp, Homo sapiens
taccatgtcgaccacatgcaaggctgggagaacccgggataccttctggccaaacgcccagtttagcgccctcgggtccagactactgcagctcctgctccaataccagcgccaaacctggcgtgatcttcacgagtgcaacaccaggtctctcgggttgcacaccccccactgtgggccgggggaccgctacacgccgccgcttgtgctgcagccatgtctctagtgatccctgaaaagttccagcatattttgcgagtactcaacaccaacatcgatgggcggcggaaaatagcctttgccatcactgccattaagtagagacagggtttcaccatgttggccaggctggttttgaactcctgccctcaatgtcatctgcccacttgggcctcccaaagtgctgggattacaggcgtgagccactgcgaccggcccaaagttaaccttctgtcgaacggtttatatctggaaaggtgggtgaggaaagggtgacctaggggattgcaaaatagattattgcagatcctacctttgtgagctttttgaatgaggctataaaggaatttaaaaatcagattcaacactaattccgaaacccctcacttcattcaggggtgtgggccgaagatatgctcatgtggtgttgaggaaagcagacattgacctcaccaagagggcgggagaactcactgaggatgaggtggaacgtgtgatcaccattatgcagaatccacgccagtacaagatcccagactggttcttgaacagacagaaggatgtaaaggatggaaaatacagccagtacagccaggtcctagccaatggtctggacaacaagctccgtgaagacctggagcgactgaagaagattcgggcccatagagggctgcgtcacttctggggccttcgtgtccgaggccagcacaccaagaccactggccgccgtggccgcaccgtgggtgtgtccaagaagaaataagtctgtaggccttgtctgttaataaatagtttatataccta

SEQ ID NO: 455044 - DNA, 419 bp, Homo sapiens
  misc_feature (392)..(393): n is a, c, g, or t
ctctagagcggccgcctactactactaaattcgcggccgcgtcgacacggctgcgagaagacgacagaaggggtcttccacaggaggcctacacgccgccgcttgtgctgcagccatgtctctagtgatccctgaaaagttccagcatattttgcgagtactcaacaccaacatcgatgggcggcggaaaatagcctttgccatcactgccattaagggtgtgggccgaagatatgctcatgtggtgttgaggaaagcagacattgacctcaccaagagggcgggagaactcactgaggatgaggtgacgtgtatcacattatgcagatcacgcagtcaagatccagactggtcttgacagacagaggatgtaagatggaattcagcagtcnngcattgcttgcacagtccttagcctg

SEQ ID NO: 455045 - DNA, 392 bp, Homo sapiens
ctctagagcggccgcctactactactaaattcgcggccgcgtcgacacggctgcgagaagacgacagaaggggtcttccacaggaggcctacacgccgccgcttgtgctgcagccatgtctctagtgatccctgaaaagttccagcatattttgcgagtactcaacaccaacatcgatgggcggcggaaaatagcctttgccatcactgccattaaggtgagtgaagtagggtaaggaatagggaatgtaaatgagaattgggttgtgaagacataagcaaaaatgaagcaaggctggggagacttgagtctcatccagatcaccttgactgctggattaagaaaagaaagtggtttagggagagactgacccctttagcatttaccacaga

SEQ ID NO: 455046 - DNA, 615 bp, Homo sapiens
ctctagagcggccgcctactactactaaattcgcggccgcgtcgacacggctgcgagaagacgacagaaggggtcttccacaggaggcctacacgccgccgcttgtgctgcagccatgtctctagtgatccctgaaaagttccagcatattttgcgagtactcaacaccaacatcgatgggcggcggaaaatagcctttgccatcactgccattaagggtgtgggccgaagatatgctcatgtggtgttgaggaaagcagacattgacctcaccaagagggcgggagaactcactgaggatgaggtggaacgtgtgatcaccattatgcagaatccacgccagtacaagatcccagactggttcttgaacagacagaaggatgtaaaggatggaaaatacagccaggtcctagccaatggtctggacaacaagctccgtgaagacctggagcgactgaagaagattcgggcccatagagggctgcgtcacttctggggccttcgtgtccgaggccagcacaccaagaccactggccgccgtggccgcaccgtgggtgtgtccaagaagaaataagtctgtaggccttgtctgttaataaatagtttatataccta

SEQ ID NO: 455047 - DNA, 903 bp, Homo sapiens
taccatgtcgaccacatgcaaggctgggagaacccgggataccttctggccaaacgcccagtttagcgccctcgggtccagactactgcagctcctgctccaataccagcgccaaacctggcgtgatcttcacgagtgcaacaccaggtctctcgggttgcacaccccccactgtgggccgggggaccgctacacgccgccgcttgtgctgcagccatgtctctagtgatccctgaaaagttccagcatattttgcgagtactcaacaccaacatcgatgggcggcggaaaatagcctttgccatcactgccattaagggtgtgggccgaagatatgctcatgtggtgttgaggaaagcagacattgacctcaccaagagggcgggagaactcactgaggatgaggtggaacgtgtgatcaccattatgcagaatccacgccagtacaagatcccagactggttcttgaacagacagaaggatgtaaaggatggaaaatacagccaggtcctagccaatggtctggacaacaagctccgtgaagacctggagcgactgaagaagattcgggcccatagagggctgcgtcacttctggggccttcgtgtccgaggccagcacaccaagaccactggccgccgtggccgcaccgtgggtgtgtccaagaagaaataagtctgtaggccttgtctgttaataaatagtttatatacctaaaaaaaaaaaaaaaaaaaaaaaaacaaaaaaaaaatcgggggggttttatggcgggggggggaaaaaggggtctaggaatgggccactggcaaggtgtgttcccgaacccgtttttctggcacccgggcgaaaactgggcggtcccataaaagggggcgttaaattcctaaaaccgtgtacccgtta

SEQ ID NO: 455048 - DNA, 690 bp, Homo sapiens
  misc_feature (575)..(575): n is a, c, g, or t
  misc_feature (581)..(581): n is a, c, g, or t
  misc_feature (643)..(643): n is a, c, g, or t
  misc_feature (647)..(647): n is a, c, g, or t
gacccacgcgtcgcggacgcgtgggtcgacccacgcgtcgcggcggtgcgccgccgcttgtgctgcagccatgtctctagtgatccctgaaaagttccagcatattttgcgagtactcaacaccaacatcgatgggcggcggaaaatagcctttgccatcactgccattaagggtgtgggccgaagatatgctcatgtggtgttgaggaaagcagacattgacctcaccaagagggcgggagaactcactgaggatgaggtggaacgtgtgatcaccattatgcagaatccacgccagtacaagatcccagactggttcttgaacagacagaaggatgtaaaggatggaaaatacagccaggtcctagccaatggtctggacaacaagctccgtgaagacctggagcgactgaagaagattcgggcccatagagggctgcgtcacttctggggccttcgtgtccgaggccagcacaccaagaccactggccgccgtggccgcaccgtgggtgtgtccaagaagaaataagtctgtaggccttgtctgttaataaatagtttatatacctagtatntactanacgttacacgctgactgaaactgcgtacactatcgctgagacatccttgcagtgcgatacanaggngacgtcgcttcacagtgcagctatgcatgcaatgagctttgtt

SEQ ID NO: 455049 - DNA, 998 bp, Homo sapiens
  misc_feature (732)..(732): n is a, c, g, or t
aaacttacggctaggtacgaggctgggtgtggggaggctacacgccgccgcttgtgctgcagccatgtctctagtgatccctgaaaagttccagcatattttgcgagtactcaacaccaacatcgatgggcggcggaaaatagcctttgccatcactgccattaagggtgtgggccgaagatatgctcatgtggtgttgaggaaagcagacattgacctcaccaagagggcgggagaactcactgaggatgaggtggaacgtgtgatcaccattatgcagaatccacgccagtacaagatcccagactggttcttgaacagacagaaggatgtaaaggatggaaaatacagccaggtcctagccaatggtctggacaacaagctccgtgaagacctggagcgactgaagaagattcgggcccatagagggctgcgtcacttctggggccttcgtgtccgaggccagcacaccaagaccactggccgccgtggccgcaccgtgggtgtgtccaagaagaaataagtctgtaggccttgtctgttaataaatagtttatatacctaaaaaaaaaaaaaaaaacttccgggctcttttgtgggtggggaaaacggggtttgaatgcccttggtcatagctggttcctgaccagttttttggccagggggaaatttgccggctccctttaagggggcgataattcgaaaagcggtaacggctagattgcgccgaanccggggataaacccgcgacaaatagcggggcaaatgagcaggaggcaacactagtaacaacaaagcggagaccagaaggcaacagcacaaaaccggccacacggggatcgagcagaacacagaaacacactttacagaacaagcaataccagaaacacgaaaagcaccataagagcagacaacgacacaaccgacacagatccaagcaaacacgagacgactacgaaaaagactcagcagaaaaaagacagaacagaccagacgaa

SEQ ID NO: 455050 - DNA, 946 bp, Homo sapiens
  misc_feature (686)..(686): n is a, c, g, or t
taaaactaggctaggtcgagccgggtgttaacgccgccgctgtgctgcagccatgtctctagtgatccctgaaaagttccagcatattttgcgagtactcaacaccaacatcgatgggcggcggaaaatagcctttgccatcactgccattaagggtgtgggccgaagatatgctcatgtggtgttgaggaaagcagacattgacctcaccaagagggcgggagaactcactgaggatgaggtggaacgtgtgatcaccattatgcagaatccacgccagtacaagatcccagactggttcttgaacagacagaaggatgtaaaggatggaaaatacagccagtacagccaggtcctagccaatggtctggacaacaagctccgtgaagacctggagcgactgaagaagattcgggcccatagagggctgcgtcacttctggggccttcgtgtccgaggccagcacaccaagaccactggccgccgtggccgcaccgtgggtgtgtccaagaagaaataagtctgtaggccttgtctgttaataaatagtttatatacctaaaaaaaaaaaaaaaaaaaaaaaatcgggggcatcatatgcgggggggggaaaaaaggggttggaaagggccatgggtcataaggggttccctggaccccgtttttgggtcccaggggggaaattnggcggggtcccccttttaagggggaggcgggtaaaatacttccgggaaacagcgcgggtcaacgggcttgatatctcgcgcgaagaaaacagagagacagaaagcgagcagcgagcaagaacgagccgactcagaaaacgatggacagatacgccgcaggaagacgaaacgactcgagcgacaacgtctgacaagacagaggaaagtactggacaccagaacacaaaacaagccgagagcagagacaggtacaaagaaaa

SEQ ID NO: 455051 - DNA, 851 bp, Homo sapiens
gctgtaaagagcgcgatgagtattttggcaaggacacccccgtgtcgcgaccggaagtgtaaagcacaatgtgtccctgcctgagacgaggactgcgtcccgacaagagtgttactttggcggggcggcgcaaacaattgccaggggccgcccccgttcacctgtgatggaggaccaattgccgcgtttgcagatgcgccacaagatagtcgcgtgtcttcgttgtcggttccgaaagactctggcaccggatgttgcaacgggacccttggagcggcatggctccgagcgtggactagacaacgctcagccgggcggacacgccccgcttgtgctgcagccatgtctctagtgatccctgaaaagttccagcatattttgcgagtactcaacaccaacatcgatgggcggcggaaaatagcctttgccatcactgccattaagggtgtgggccgaagatatgctcatgtggtgttgaggaaagcagacattgacctcaccaagagggcgggagaactcactgaggatgaggtggaacgtgtgatcaccattatgcagaatccacgccagtacaagatcccagactggttcttgaacagacagaaggatgtaaaggatggaaaatacagccagtacagccaggtcctagccaatggtctggacaacaagctccgtgaagacctggagcgactgaagaagattcgggcccatagagggctgcgtcacttctggggccttcgtgtccgaggccagcacaccaagaccactggccgccgtggccgcaccgtgggtgtgtccaagaagaaataagtctgtaggccttgtctgttaataaatagtttatataccta

SEQ ID NO: 455052 - DNA, 933 bp, Homo sapiens
  misc_feature (5)..(5): n is a, c, g, or t
gaatncggcacgagcttgcagccatgtctctagtgatccctgaaaagttccagcatattttgcgagtactcaacaccaacatcgatgggcggcggaaaatagcctttgccatcactgccattaagggtgtgggccgaagatatgctcatgtggtgttgaggaaagcagacattgacctcaccaagagggcgggagaactcactgaggatgaggtggaacgtgtgatcaccattatgcagaatccacgccagtacaagatcccagactggttcttgaacagacagaaggatgtaaaggatggaaaatacagccagtacagccaggtcctagccaatggtctggacaacaagctccgtgaagacctggagcgactgaagaagattcgggcccatagagggctgcgtcacttctggggggtgagtggggggtctcatctccctgcctacctcgactcagcattcctcctactcgctcttctttttccccaaccttttgtttctgctgtgcatgacctgtgactcttctctttttacctgcagccttcgtgtccgaggccagcacaccaagaccactggccgccgtggccgcaccgtgggtgtgtccaagaagaaataagtctgtaggccttgtctgttaataaatagtttatatacctaaaaaaacacacataacgcggtgccccgatccaacagttttcccctccagtaggaggcccaaaggttacggcgtaccacgcattacgtgctcaaactgtgccatcccctaatagggaagtccgaaatcaataccgcctagggcctgtagccggacagttcaaccaaacgtccgtgcacggggaaaaccctgcataccctgtgagcaatccgtgcgcgacagcgacccttaaacctatcctgggatacttttaccctcttcttcggcacacaacttacc

SEQ ID NO: 455053 - DNA, 548 bp, Homo sapiens
gacccacgcgtcgcggacgcgtgggtcgacccacgcgtcgcggcggtgcgctctctagtgatccctgaaaagttccagcatattttgcgagtactcaacaccaacatcgatgggcggcggaaaatagcctttgccatcactgccattaagggtgtgggccgaagatatgctcatgtggtgttgaggaaagcagacattgacctcaccaagagggcgggagaactcactgaggatgaggtggaacgtgtgatcaccattatgcagaatccacgccagtacaagatcccagactggttcttgaacagacagaaggatgtaaaggatggaaaatacagccaggtcctagccaatggtctggacaacaagctccgtgaagacctggagcgactgaagaagattcgggcccatagagggctgcgtcacttctggggccttcgtgtccgaggccagcacaccaagaccactggccgccgtggccgcaccgtgggtgtgtccaagaagaaataagtctgtaggccttgtctgttaataaatagtttatataccta

SEQ ID NO: 455054 - DNA, 500 bp, Homo sapiens
ctttgggtgaaaaattgtcgggatcttctgcagtccagctacaacaaacagcgctttgatcaacctttagaggcttcaacctggctgaagaatttcaaaactacaaatgagcgcttcctgaaccagataaaagttcaagagaagtatgtctggaataagagagaactcactgaggatgaggtggaacgtgtgatcaccattatgcagaatccacgccagtacaagatcccagactggttcttgaacagacagaaggatgtaaaggatggaaaatacagccagtacagccaggtcctagccaatggtctggacaacaagctccgtgaagacctggagcgactgaagaagattcgggcccatagagggctgcgtcacttctggggccttcgtgtccgaggccagcacaccaagaccactggccgccgtggccgcaccgtgggtgtgtccaagaagaaataagtctgtaggccttgtctgttaataaatagtttatataccta

SEQ ID NO: 455055 - DNA, 1014 bp, Homo sapiens
taccatgtcgaccacatgcaaggctgggagaacccgggataccttctggccaaacgcccagtttagcgccctcgggtccagactactgcagctcctgctccaataccagcgccaaacctggcgtgatcttcacgagtgcaacaccaggtctctcgggttgcacaccccccactgtgggccgggggaccgctacacgccgccgcttgtgctgcagccatgtctctagtgatccctgaaaagttccagcatattttgcgagtactcaacaccaacatcgatgggcggcggaaaatagcctttgccatcactgccattaagtagagacagggtttcaccatgttggccaggctggttttgaactcctgccctcaatgtcatctgcccacttgggcctcccaaagtgctgggattacaggcgtgagccactgcgaccggcccaaagttaaccttctgtcgaacggtttatatctggaaaggtgggtgaggaaagggtgacctaggggattgcaaaatagattattgcagatcctacctttgtgagctttttgaatgaggctataaaggaatttaaaaatcagattcaacactaattccgaaacccctcacttcattcaggggtgtgggccgaagatatgctcatgtggtgttgaggaaagcagacattgacctcaccaagagggcgggagaactcactgaggatgaggtggaacgtgtgatcaccattatgcagaatccacgccagtacaagatcccagactggttcttgaacagacagaaggatgtaaaggatggaaaatacagccaggtcctagccaatggtctggacaacaagctccgtgaagacctggagcgactgaagaagattcgggcccatagagggctgcgtcacttctggggccttcgtgtccgaggccagcacaccaagaccactggccgccgtggccgcaccgtgggtgtgtccaagaagaaataagtctgtaggccttgtctgttaataaatagtttatataccta

SEQ ID NO: 455056 - DNA, 964 bp, Homo sapiens
  misc_feature (746)..(746): n is a, c, g, or t
  misc_feature (757)..(757): n is a, c, g, or t
  misc_feature (762)..(763): n is a, c, g, or t
  misc_feature (773)..(773): n is a, c, g, or t
  misc_feature (775)..(775): n is a, c, g, or t
  misc_feature (778)..(778): n is a, c, g, or t
  misc_feature (790)..(790): n is a, c, g, or t
  misc_feature (800)..(800): n is a, c, g, or t
  misc_feature (802)..(802): n is a, c, g, or t
  misc_feature (819)..(819): n is a, c, g, or t
  misc_feature (824)..(825): n is a, c, g, or t
taccatgtcgaccacatgcaaggctgggagaacccgggataccttctggccaaacgcccagtttagcgccctcgggtccagactactgcagctcctgctccaataccagcgccaaacctggcgtgatcttcacgagtgcaacaccaggtctctcgggttgcacaccccccactgtgggccgggggaccgctacacgccgccgcttgtgctgcagccatgtctctagtgatccctgaaaagttccagcatattttgcgagtactcaacaccaacatcgatgggcggcggaaaatagcctttgccatcactgccattaagggtgtgggccgaagatatgctcatgtggtgttgaggaaagcagacattgacctcaccaagagggcgggagaactcactgaggatgaggtggaacgtgtgatcaccattatgcagaatccacgccagtacaagatcccagactggttcttgaacagacagaaggatgtaaaggatggaaaatacagccaggtcctagccaatggtctggacaacaagctccgtgaagacctggagcgactgaagaagattcgggcccatagagggctgcgtcacttctggggccttcgtgtccgaggccagcacaccaagaccactggccgccgtggccgcaccgtgggtgtgtccaagaagaaataagtctgtaggccttgtctgttaataaatagtttatatacctaaaaaaaaaaaaaaaaaaaaaaaaacatcgnggcgaatttgntcccnnataagggatntntcnggaactaggggncatccctcananttgggaaaacccaggcncatgnntaaacatactgggtgtgtggtggacatcgacccattgatgtgtgtgaatgggagcaggttgtgcaagaggtgaatattgggtgaagtctaggcttaagatagatggacgaggaacgctggaaagcttggccttaggtgg

SEQ ID NO: 455057 - DNA, 795 bp, Homo sapiens
taccatgtcgaccacatgcaaggctgggagaacccgggataccttctggccaaacgcccagtttagcgccctcgggtccagactactgcagctcctgctccaataccagcgccaaacctggcgtgatcttcacgagtgcaacaccaggtctctcgggttgcacaccccccactgtgggccgggggaccgctacacgccgccgcttgtgctgcagccatgtctctagtgatccctgaaaagttccagcatattttgcgagtactcaacaccaacatcgatgggcggcggaaaatagcctttgccatcactgccattaagggtgtgggccgaagatatgctcatgtggtgttgaggaaagcagacattgacctcaccaagagggcgggagaactcactgaggatgaggtggaacgtgtgatcaccattatgcagaatccacgccagtacaagatcccagactggttcttgaacagacagaaggatgtaaaggatggaaaatacagccaggtcctagccaatggtctggacaacaagctccgtgaagacctggagcgactgaagaagattcgggcccatagagggctgcgtcacttctggggccttcgtgtccgaggccagcacaccaagaccactggccgccgtggccgcaccgtgggtgtgtccaagaagaaataagtctgtaggccttgtctgttaataaatagtttatatacctaaaaaaaaaaaaacactggcccgcgttttacaactcgtgactgggccctggggtaccccacttaatgcgcttgaggaaat

SEQ ID NO: 455058 - DNA, 857 bp, Homo sapiens
ctctagagcggccgcctactactactaaattcgcggccgcgtcgacacggctgcgagaagacgacagaaggggtcttccacaggaggcctacacgccgccgcttgtgctgcagccatgtctctagtgatccctgaaaagttccagcatattttgcgagtactcaacaccaacatcgatgggcggcggaaaatagcctttgccatcactgccattaagggtgtgggccgaagatatgctcatgtggtgttgaggaaagcagacattgacctcaccaagagggcgggagaactcactgaggatgaggtggaacgtgtgatcaccattatgcagaatccacgccagtacaagatcccagactggttcttgaacagacagaaggatgtaaaggatggaaaatacagccagtacagccaggtgtgtactgaaatgagggcaggattagaggaagggtggagggtcctaacagaattgggcataggaggtcaggggataaaacatcccttgccccctcctctgaatccaggtcctagccaatggtctggacaacaagctccgtgaagacctggagcgactgaagaagattcgggcccatagagggctgcgtcacttctggggggtgagtggggggtctcatctccctgcctacctcgactcagcattcctcctactcgctcttctttttccccaaccttttgtttctgctgtgcatgacctgtgactcttctctttttacctgcagccttcgtgtccgaggccagcacaccaagaccactggccgccgtggccgcaccgtgggtgtgtccaagaagaaataagtctgtaggccttgtctgttaataaatagtttatataccta

SEQ ID NO: 455059 - DNA, 1232 bp, Homo sapiens
ctctagagcggccgcctactactactaaattcgcggccgcgtcgacacggctgcgagaagacgacagaaggggtcttccacaggaggcctacacgccgccgcttgtgctgcagccatgtctctagtgatccctgaaaagttccagcatattttgcgagtactcaacaccaacatcgatgggcggcggaaaatagcctttgccatcactgccattaagggtgtgggccgaagatatgctcatgtggtgttgaggaaagcagacattgacctcaccaagagggcgggagaactcactgaggatgaggtggaacgtgtgatcaccattatgcagaatccacgccagtacaagatcccagactggttcttgaacagacagaaggatgtaaaggatggaaaatacagccagtacagccaggtcctagccaatggtctggacaacaagctccgtgaagacctggagcgactgaagaagattcgggcccatagagggctgcgtcacttctggggccttcgtgtccgaggccagcacaccaagaccactggccgccgtggccgcaccgtgggtgtgtccaagaagaaataagtctgtaggccttgtctgttaataaatagtttatatacctaaacaaaaaaaaaaaaaaattcagaggacatcctactagacaggagtagcaggaaacaaaagggtacatggaaatgggcacatgggacgataagcatagtcccaggaccccaagttacctggtaccaaagggggtaagacactcgccgggtatacccataatagggagcacaggaataaagtgagcaggataaaagacccagggttaaaacccgtggagtcacacggaaacgcgcaagaaaccacgcaccaagcacacaagaaacaaaaacacacaccaagacgaaagcgacgcagacaaaaaccagcaacagaaacgaaaacaccaaaagaagacaaagagagacgaagagcacagaaagaaacaacacaaaaaaaagcaagaagcgaaggaacagaggagaaagaagacaggaacacaagaagaaaagagaaaagaaaacagaaagagaggagaaaaaagaacaaaaaaaaagaaagagaaagcggcgaaaaacgagaaaaggcagaaaacaagagaggaagagggagaaaaggaggaggaggaggaagaagcgggggccaggagcgagaagaagagaacacaccagcacacggaacaccaccacac

SEQ ID NO: 455060 - DNA, 1308 bp, Homo sapiens
ctctagagcggccgcctactactactaaattcgcggccgcgtcgacacggctgcgagaagacgacagaaggggtcttccacaggaggcctacacgccgccgcttgtgctgcagccatgtctctagtgatccctgaaaagttccagcatattttgcgagtactcaacaccaacatcgatgggcggcggaaaatagcctttgccatcactgccattaagggtgtgggccgaagatatgctcatgtggtgttgaggaaagcagacattgacctcaccaagagggcgggagaactcactgaggatgaggtggaacgtgtgatcaccattatgcagaatccacgccagtacaagatcccagactggttcttgaacagacagaaggatgtaaaggatggaaaatacagccagtacagccaggtcctagccaatggtctggacaacaagctccgtgaagacctggagcgactgaagaagattcgggcccatagagggctgcgtcacttctggggccttcgtgtccgaggccagcacaccaagaccactggccgccgtggccgcaccgtgggtgtgtccaagaagaaataagtctgtaggccttgtctgttaataaatagtttatatacctaaaaaaaacaaaaaaaaaaaaaaaaaaaaagaaaaaaaaaaaaaaaaaaaagggggggggggcaaaaatctgggggggagcatcaaaggaaacccgcacttgttgtaccaacgaaaactgggcctccacaagagagggaccgacatagtaaactagaccaggcagcagaggagccgttgcatcaaccctcaggtgagggagggaaacacaccgcagcaagcgggacaacggaagagagggacaccaccccctgcggggcgggacacacactggggcgcacacaaccacgaaaagaaagacaaacaccagggggacaaaaaaaaaaaccacaaggcgacatacgcaggggaacccagccagctacgttatccgacgaacagacaaacaatggcccagaccgcgacattggaaaagaaacataatctgcccgcgagacgcagaacaacagccgccggacgcgaccaggcagggacaaggccacaccgagccaacagcacgaccaccacagccgacccaagacgcgacagcgtagcgcgaagcgcgtccgcaatgacgcgcatcacacacagacacaaccaaagccaccccagacacacacgaaacacacacgcgacccgccacaccagactccacagcgcacccgcagaccaccacgccgcgacgcaccgcccgcccggcaacaaca

SEQ ID NO: 455061 - DNA, 939 bp, Homo sapiens
ctctagagcggccgcctactactactaaattcgcggccgcgtcgacacggctgcgagaagacgacagaaggggtcttccacaggaggcctacacgccgccgcttgtgctgcagccatgtctctagtgatccctgaaaagttccagcatattttgcgagtactcaacaccaacatcgatgggcggcggaaaatagcctttgccatcactgccattaagggtgtgggccgaagatatgctcatgtggtgttgaggaaagcagacattgacctcaccaagagggcgggagaactcactgaggatgaggtggaacgtgtgatcaccattatgcagaatccacgccagtacaagatcccagactggttcttgaacagacagaaggatgtaaaggatggaaaatacagccagtacagccaggtcctagccaatggtctggacaacaagctccgtgaagacctggagcgactgaagaagattcgggcccatagagggctgcgtcacttctggggccttcgtgtccgaggccagcacaccaagaccactggccgccgtggccgcaccgtgggtgtgtccaagaagaaataagtctgtaggccttgtctgttaataaatagtttatatacctaaaacaaaaaacgacacaaaacccaacagaacaccactaacaaacaaatcaacacaacagaaaaacagctaacacatagaacaacaacacaaaaaacaaaaaaccatcgtagtgcgggcgcctaaataaatcatttcatccgtgcgggggcgcacaacgtctgtcagcacacacatttagttttgatacgaagggcgcgcccatgattgggtgcgtgttttatacccagccaggacgacttggccgcatatataacacacgcacgtggcgccggcaaacccacctcattcgtgtcatattaggcgacagccacctc

SEQ ID NO: 455062 - DNA, 1025 bp, Homo sapiens
ctctagagcggccgcctactactactaaattcgcggccgcgtcgacacggctgcgagaagacgacagaaggggtcttccacaggaggcctacacgccgccgcttgtgctgcagccatgtctctagtgatccctgaaaagttccagcatattttgcgagtactcaacaccaacatcgatgggcggcggaaaatagcctttgccatcactgccattaagggtgtgggccgaagatatgctcatgtggtgttgaggaaagcagacattgacctcaccaagagggcgggagaactcactgaggatgaggtggaacgtgtgatcaccattatgcagaatccacgccagtacaagatcccagactggttcttgaacagacagaaggatgtaaaggatggaaaatacagccagtacagccaggtcctagccaatggtctggacaacaagctccgtgaagacctggagcgactgaagaagattcgggcccatagagggctgcgtcacttctggggggtgagtggggggtctcatctccctgcctacctcgactcagcattcctcctactcgctcttctttttccccaaccttttgtttctgctgtgcatgacctgtgactcttctctttttacctgcagccttcgtgtccgaggccagcacaccaagaccactggccgccgtggccgcaccgtgggtgtgtccaagaagaaataagtctgtaggccttgtctgttaataaatagtttatatacctaaaaaaacacacataacgcggtgccccgatccaacagttttcccctccagtaggaggcccaaaggttacggcgtaccacgcattacgtgctcaaactgtgccatcccctaatagggaagtccgaaatcaataccgcctagggcctgtagccggacagttcaaccaaacgtccgtgcacggggaaaaccctgcataccctgtgagcaatccgtgcgcgacagcgacccttaaacctatcctgggatacttttaccctcttcttcggcacacaacttacc

SEQ ID NO: 455063 - DNA, 924 bp, Homo sapiens
ctctagagcggccgcctactactactaaattcgcggccgcgtcgacacggctgcgagaagacgacagaaggggtcttccacaggaggcctacacgccgccgcttgtgctgcagccatgtctctagtgatccctgaaaagttccagcatattttgcgagtactcaacaccaacatcgatgggcggcggaaaatagcctttgccatcactgccattaagggtgtgggccgaagatatgctcatgtggtgttgaggaaagcagacattgacctcaccaagagggcgggagaactcactgaggatgaggtggaacgtgtgatcaccattatgcagaatccacgccagtacaagatcccagactggttcttgaacagacagaaggatgtaaaggatggaaaatacagccagtacagccagcctagccaatggtctggacaaagcaagctcccgggaaaaactctgggaagcgatcggacaaaaatccgggcccatgcagaggcgcgggtgcacactcacgagggcgcctcgcggtgcccagaggcacagacacaccaaagacacagtggacgccgtgggagcgccaccgacgggacgatgtaccacaggacagaccactaacgtctgtacggccctggaccaggacaactaccagtagtgaatcctaccaacgaaacaaagaacgcacaacacacgcaccaccacagagacacccaaaagagaggcgaggccaccaaaacggacggagcacagcaacacacgcggaccaacagggcagacaagagcagctcgcccaaagaaacacaaagcaaaacccaagcacacacagggtgcgacaaacaacagagcggacaccacccaaaaacgaacagaaccaaagacaaccgcaaaaacccacaggaagaaccgaacaaaaagagcggcgaaca

SEQ ID NO: 455064 - DNA, 725 bp, Homo sapiens
taccatgtcgaccacatgcaaggctgggagaacccgggataccttctggccaaacgcccagtttagcgccctcgggtccagactactgcagctcctgctccaataccagcgccaaacctggcgtgatcttcacgagtgcaacaccaggtctctcgggttgcacaccccccactgtgggccgggggaccgctacacgccgccgcttgtgctgcagccatgtctctagtgatccctgaaaagttccagcatattttgcgagtactcaacaccaacatcgatgggcggcggaaaatagcctttgccatcactgccattaagggtgtgggccgaagatatgctcatgtggtgttgaggaaagcagacattgacctcaccaagagggcgggagaactcactgaggatgaggtggaacgtgtgatcaccattatgcagaatccacgccagtacaagatcccagactggttcttgaacagacagaaggatgtaaaggatggaaaatacagccagtacagccaggtcctagccaatggtctggacaacaagctccgtgaagacctggagcgactgaagaagattcgggcccatagagggctgcgtcacttctggggccttcgtgtccgaggccagcacaccaagaccactggccgccgtggccgcaccgtgggtgtgtccaagaagaaataagtctgtaggccttgtctgttaataaatagtttatataccta

SEQ ID NO: 455065 - DNA, 983 bp, Homo sapiens
taccatgtcgaccacatgcaaggctgggagaacccgggataccttctggccaaacgcccagtttagcgccctcgggtccagactactgcagctcctgctccaataccagcgccaaacctggcgtgatcttcacgagtgcaacaccaggtctctcgggttgcacaccccccactgtgggccgggggaccgctacacgccgccgcttgtgctgcagccatgtctctagtgatccctgaaaagttccagcatattttgcgagtactcaacaccaacatcgatgggcggcggaaaatagcctttgccatcactgccattaagggtgtgggccgaagatatgctcatgtggtgttgaggaaagcagacattgacctcaccaagagggcgggagaactcactgaggatgaggtggaacgtgtgatcaccattatgcagaatccacgccagtacaagatcccagactggttcttgaacagacagaaggatgtaaaggatggaaaatacagccagtacagccaggtcctagccaatggtctggacaacaagctccgtgaagacctggagcgactgaagaagattcgggcccatagagggctgcgtcacttctggggccttcgtgtccgaggccagcacaccaagaccactggccgccgtggccgcaccgtgggtgtgtccaagaagaaataagtctgtaggccttgtctgttaataaatagtttatatacctaaaaaaaaaaaaaaaaaaaaaggggggcgcccttttttttttttttctgtacttccactattccactatcactgatcataagtgtaacatagagaccaatatcgacaaacaacaaccacagcatgcatgaacgcaatacccccatagatactaacaaaaaaactagacatcagaccacacaaatcatacctgacaacaacgaccacccgcacccataacggcagccctcaaaaacccccccatcatcatcctataacaa

SEQ ID NO: 455066 - DNA, 675 bp, Homo sapiens
taccatgtcgaccacatgcaaggctgggagaacccgggataccttctggccaaacgcccagtttagcgccctcgggtccagactactgcagctcctgctccaataccagcgccaaacctggcgtgatcttcacgagtgcaacaccaggtctctcgggttgcacaccccccactgtgggccgggggaccgctacacgccgccgcttgtgctgcagccatgtctctagtgatccctgaaaagttccagcatattttgcgagtactcaacaccaacatcgatgggcggcggaaaatagcctttgccatcactgccattaagggtgtgggccgaagatatgctcatgtggtgttgaggaaagcagacattgacctcaccaagagggcgggagaactcactgaggatgaggtggaacgtgtgatcaccattatgcagaatccacgccagtacaagatcccagactggttcttgaacagacagaaggatgtaaaggatggaaaatacagccagggagcgactgaagaagattcgggcccatagagggctgcgtcacttctggggccttcgtgtccgaggccagcacaccaagaccactggccgccgtggccgcaccgtgggtgtgtccaagaagaaataagtctgtaggccttgtctgttaataaatagtttatataccta

SEQ ID NO: 455067 - DNA, 655 bp, Homo sapiens
taccatgtcgaccacatgcaaggctgggagaacccgggataccttctggccaaacgcccagtttagcgccctcgggtccagactactgcagctcctgctccaataccagcgccaaacctggcgtgatcttcacgagtgcaacaccaggtctctcgggttgcacaccccccactgtgggccgggggaccgctacacgccgccgcttgtgctgcagccatgtctctagtgatccctgaaaagttccagcatattttgcgagtactcaacaccaacatcgatgggcggcggaaaatagcctttgccatcactgccattaagggtgtgggccgaagatatgctcatgtggtgttgaggaaagcagacattgacctcaccaagagggcgggagaactcactgaggatgaggtggaacgtgtgatcaccattatgcagaatcctacagccaggtcctagccaatggtctggacaacaagctccgtgaagacctggagcgactgaagaagattcgggcccatagagggctgcgtcacttctggggccttcgtgtccgaggccagcacaccaagaccactggccgccgtggccgcaccgtgggtgtgtccaagaagaaataagtctgtaggccttgtctgttaataaatagtttatataccta

SEQ ID NO: 455068 - DNA, 429 bp, Homo sapiens
  misc_feature (330)..(330): n is a, c, g, or t
taccatgtcgaccacatgcaaggctgggagaacccgggataccttctggccaaacgcccagtttagcgccctcgggtccagactactgcagctcctgctccaataccagcgccaaacctggcgtgatcttcacgagtgcaacaccaggtctctcgggttgcacaccccccactgtgggccgggggaccgctacacgccgccgcttgtgctgcagccatgtctctagtgatccctgaaaagttccagcatattttgcgagtactcaacaccaacatcgatgggcggcggaaaatagcctttgccatcactgccattaaggtttggccgagntatgctcatgtggtttgaggaagcagacattacctaccagaggccggagacctacttaggttaggtgaccgtttatcccttttcagttccccgcatcca

SEQ ID NO: 455069 - DNA, 424 bp, Homo sapiens
tactagcctcgccagtgtcctagcctcgccagtgtcctagcctcgccacgtgtcctagcctcgccagtgtactaatggcttccagttcaacagtgagtgtaggatcaagtgtgaagacagtgatgcctcccagggacttgggagcaatgtcattcattgccggaaagatggcacctggaacggctccttccatgtctgccaggagatgcaaggccagtgctcggttccaaacgagctcaacagcaacctcaaactgcagtgccctgatggctatgccatagggtcggagtgtgccacctcgtgcctggaccacaacagcgagtccatcatcctgccaatgaacgtgaccgtgcgtgacatcccccactggcgaggctaggacagcagtggcgaggctaggacagcagtggcgaggctaggacag

SEQ ID NO: 455070 - DNA, 398 bp, Homo sapiens
ttgcagatgttgagggtctcgggcctgagctgcgcctcatgctgtacttccctcagggtcggagtgtgccacctcgtgcctggaccacaacagcgagtccatcatcctgccaatgaacgtgaccgtgcgtgacatcccccactggctgaaccccacacgggtagaggtgagtgaccagggacatctacccacctgcagctaagggggagggaaatgatattgttgagcacttgctatgtcccggttctgagttcattctttcacacatattacctcatttaatcatcacacctgccctgtgggtgtgtgttgcagggaggtggggtagagtcgggaggagacttattcacaatcatttctctagtccttaattatttaatactttctctctgtcaggt

SEQ ID NO: 455071 - DNA, 13828 bp, Homo sapiens
  misc_feature (13814)..(13814): n is a, c, g, or t
ctgtccaggttgagtgagggtgtccaggatgaggaatgagggtgtccagggtgaggagtgagggagtccagggtgaggagtgagggagtccagggtgaggattgagggtgtcagggtgagtgagagtgtccagggtgaggagtgagggtatccagggtgagtgagggtgtccagggtgaggagtgagggtatccagggtgagtgagggtgtccagggtgagtgagggtgtcagggtgagtgaacgtgtccagggtgtgtgagggtgtccagggtgcagagtgaggtgtccagggtgaggagtgacggtgtctggggtgagtgagggtgtccagggtgaggagtgagggtgtcagggtgagtgagggtgtccagggttgagtgcacatgtgtggtgaggaggtgtttgcagtgcttcaggcgcagcaactctttcatctagtttaaaattgtgctctgaggttagattttagtagaacaaaggccttacaaagaatgtgaaaacattgtgcttccctgcttacaggcaattaaaaaggagaatcaagctgagggtgcctggtgtggggtggggtggagaagaccacagagactattgtgtgttttattcaacagtgtcctgggctgctttctccagaaatgtccctgacacatggatgtaagtgtggctagtttactgggagatgatcccagtgatgcaggacacgcgagccctaagattgaagcatagcccgggagggttcttagctttgcccaggaaggaactcaaggcaagccagtggtgttagcaacttttattgaagcggccggctgtgcacagcagcagcagaggcgctgctccttgcaaagcagggctgccctacaggctgtgcgcccacagtagcagctcagaggcagttctgcagtggtatttgtatccacttttaattatatgcaaatgaaggggcagtttatgcagacatttccagggtgagggtggtaacttctgggtgctgccagagccatcgtgaactgacttgacacaggtcggtgtgtcctatggaaactagcatctgccctggacctattttagctagtgctcagtttggtctgagtgcctgagccccacttccagagttgagtcccacctcctacctcattcccccttcagagattagatactcctccttaatcttaagggggcctcgagaagggcggagtcctgcttttccgtaactacttcctgctgagtttatggcacgtaggccctgcctggcactggaggacgtaaaaatttctggatacctgatctaaggagcccagaggcaggacgatttcattctccgtgtcagtggacaggatgggctggaagccttgtgccagcattgtctctggaactgtggtaatctagaatacacaaactttactaagaggttaaagaagcaaggaccaaacatttgtaacaagacagttgtcaaaggtcctagaagaggtgaaaaacaggtgagacttgggaaggcacttttgatggttgaccagatatagttggggcagtgccctggttatatctatgtaactaggtagcttgctcatagatcttttgaatgttaacctcaacctgtccagagttaatatatgtgcagcaggttttattaataactgcacaagaccccaccttgttcagctagtaaataatccaatgctagtctgttatcaacaactacattttccagagtctggggaactcttgaattctctttaatgcctgatctccgttggtggctaaggattctaggatttgagccaagttctttagcgttaactcatggtaggcaaagcaccccagggtgctgctagtcctattgccaccctgattcctgccagaaataagtaagcaagcaacaggacaatgaactccatgttgcccagatcccactgagagtgaacgtgcagtcatgcccataaccgacacacatcccagtccatgtgggtcagtccttcatcaccctccctgccttctgacaacagcagactccagccattccattatcattcacagcccaacccaagcagtcagtggctgaagaaagagaatcaggtatactctatgtccacatataccttcctgccacagggcttcaccaactggcaggattccccccagcccccaactcctcctcatcccttgttcccaggcgggtcaattggagagtgagcagagatagatggcttgcagaagggtatgcaagatggggagactccaccagaccttagggagagaatggcatctttctccaccttttaagagagacagagcctccctgaggtctcaaagatttttcagggcaacacaagaaacgtttccaagcctcagctgcaggtgttcacctttccactctggggtgtgaggagatggtaagctgaggacaagtgtgttccagatgcaggccaactctgttctccaacagtttgaaccaacttggccttggggttccaagggtaggatgaagggtgtcacggcaggacggggcctggcgtgaggcaacagcaagcagagcgaggacacaacagtggcagcagtgtacagacacaggacgtcagcttcaaacgatgcaacagcagggatatcttgggcacggctctgattcgagccactcccaactctcttgcctccaggatggaggcactgtacatgcaacagtccagagaaagattctagccagtccaagcccaggcacatccagagaaggtgggagctcttcgggttgactccaccgaggaaaacaggcatttgggtatttcagattcccgctccacaataaggcaacttttaaaaaaatattatttccaaaaacaaaacaaaaattccagggggagggaattcagcggatcagtcttaagaggagcttttttttggagcgagaaatcatataaaataaaatgaaataaaacaaggaggaaggcaaccagctgttaggggaaaaataaggcagataaaggagcggggagagaaattaattgccaaccaggaggagttgggctgtatttttcaaaggtggggagagtggagcacacaccttgaggaggaaagcgagaaagaaaagaaaaaagcaagtgaaggggggctcgcccaagaagggtgaagaagcgaagaaagtcgaggcgccgaggctcccaaagctggcagctccgggtggcggtgcaggggcgaaggggggggcggggggaacgtcggacatgcggctctggagttgggtgctgcacctggggctgctgagcgccgcgctgggctgcgggctggccgagcgtccccgccgggcccggagagacccgcgggccggccgacccccgcgccccgccgccggcccggccacctgcgccacccgcggcccgcggccgccgcgcctcgccgccgccgccgccgccgccgggcggtgcctgggaagccgtgcgcgtcccccggcggcggcagcagcgggaggcgaggggcgccaccgaggagccgagcccgccgagccgggcgctctatttcagcgggcgaggcgagcagctgcgcctccgggccgacctcgagctgccccgggacgcgttcacgctgcaagtgtggctgcgagcggaggggggccagaggtctccggcagtgatcacagggctgtatgacaaatgttcttatatctcacgtgaccgaggatgggtcgtgggcattcacaccatcagtgaccaagacaacaaagacccacgctactttttctccttgaagacagaccgagcccggcaagtgaccaccatcaatgcccaccgcagctacctcccaggccagtgggtatacctagctgccacctatgatgggcagttcatgaagctctatgtgaatggtgcccaggtggccacctctggggaacaagtgggtggcatattcagcccactgacccagaagtgcaaagtgctcatgttagggggcagtgccctgaatcacaactaccggggctacatcgagcacttcagtctgtggaaggtggccaggactcagcgggagatactgtctgacatggaaacccatggcgcccacactgctctacctcagctcctcctccaggagaactgggacaatgtgaagcatgcctggtcccccatgaaggatggcagcagccccaaagtggaattcagcaatgcccacggctttctgctggacacgagtctggagcctcctctgtgcggacagacattgtgtgacaacacagaggtcattgccagctacaatcagctctcaagtttccgccagcccaaggtggtgcgctaccgcgtggtcaacctctatgaagatgatcataagaacccgacggtgacgcgcgagcaggtggacttccagcaccatcagctggctgaggccttcaagcaatacaacatctcctgggagctggacgtgctggaggtgagcaactcctcccttcgccgccgcctcatcctggccaactgtgacatcagcaagattggggatgagaactgtgaccccgagtgcaaccacacgctgacgggccacgacggcggggattgccgccacctgcgccaccctgccttcgtgaagaagcagcacaacggggtgtgtgacatggactgcaactatgaacggttcaactttgatggtggagagtgctgtgaccctgaaatcaccaatgtcactcagacttgctttgaccccgactctccacacagagcctacttggatgttaatgagctgaagaacattcttaaattggatggatcaacacatctcaatattttctttgcaaaatcctcagaggaggagttggcaggagtagcaacttggccatgggacaaggaggccctgatgcacttaggtggcattgtcttgaacccatctttctatggcatgcctgggcacacccacaccatgatccatgagattggtcacagcctgggcctctatcacgtcttccgaggcatctcagaaatccagtcctgcagtgacccctgcatggagacagagccctccttcgagactggagacctctgcaatgataccaacccagcccctaaacacaagtcctgtggtgacccagggccaggaaatgacacctgtggctttcatagcttcttcaacactccttacaacaacttcatgagctatgcagatgacgactgtacggactccttcacgcccaatcaagtcgccagaatgcactgttacctggacctggtctaccagggctggcagccctccaggaaaccagcgcctgttgccctcgccccccaagttctgggccacacaacggactctgtgacactggagtggttcccacctatagatggccatttctttgaaagagaattgggatcagcatgtcatctttgcctggaagggagaatcctggtgcagtatgcttccaacgcttcctccccaatgccctgcagcccatcaggacactggagccctcgtgaagcagaaggtcatcctgatgttgaacagccctgtaagtccagtgtccgcacctggagcccaaattcagctgtcaacccacacacggttcctccagcctgccctgagcctcaaggctgctacctcgagctggagttcctctaccccttggtccctgagtctctgaccatttgggtgacctttgtctccactgactgggactctagtggagctgtcaatgacatcaaactgttggctgtcagtgggaagaacatctccctgggtcctcagaatgtcttctgtgatgtcccactgaccatcagactctgggacgtgggcgaggaggtgtatggcatccaaatctacacgctggatgagcacctggagatcgatgctgccatgttgacctccactgcagacaccccactctgtctacagtgtaagcccctgaagtataaggtggtccgggaccctcctctccagatggatgtggcctccatcctacatctcaataggaaattcgtagacatggatctaaatcttggcagtgtgtaccagtattgggtcataactatttcaggaactgaagagagtgagccatcacctgctgtcacatacatccatggaagtgggtactgtggcgatggcattatacaaaaagaccaaggtgaacaatgcgacgacatgaataagatcaatggtgatggctgctcccttttctgccgacaagaagtctccttcaattgtattgatgaacccagccggtgctatttccatgatggtgatggggtatgtgaggagtttgaacaaaaaaccagcattaaggactgtggtgtctacacgccccagggattcctggatcagtgggcatccaatgcttcagtatctcatcaagaccagcaatgcccaggctgggtcatcatcggacagccagcagcatcccaggtgtgtcgaaccaaggtgatagatctcagtgaaggcatttcccagcatgcctggtacccttgcaccatcagctacccatattcccagctggctcagaccactttttggctccgggcgtatttttctcaaccaatggttgccgcagctgtcattgtccacctggtgacggatgggacatattatggggaccaaaagcaggagaccatcagcgtgcagctgcttgataccaaagatcagagccacgatctaggcctccatgtcctgagctgcaggaacaatcccctgattatccctgtggtccatgacctcagccagcccttctaccacagccaggcggtacgtgtgagcttcagttcgcccctggtcgccatctcgggggtggccctccgttccttcgacaactttgaccccgtcaccctgagcagctgccagagaggggagacctacagccctgccgagcagagctgcgtgcacttcgcatgtgagaaaactgactgtccagagctggctgtggagaatgcttatctcaattgctccagcagcgaccgctaccacggtgcccagtgtactgtgagctgccggacaggctacgtgctccagatacggcgggatgatgagctgatcaagagccagacgggacccagcgtcacagtgacctgtacagagggcaagtggaataagcaggtggcctgtgagccagtcgactgcagcatcccagatcaccatcaagtctatgctgcctccttctcctgccctgagggcaccacctttggcagtcaatgttccttccagtgccgtcaccctgcacaattgaaaggcaacaacagcctcctgacctgcatggaggatgggctgtggtccttcccagaggccctgtgtgagctcatgtgcctcgctccaccccctgtgcccaatgcagacctccagaccgcccggtgccgagagaataagcacaaggtgggctccttctgcaaatacaaatgcaagcctggataccatgtgcctggatcctctcggaagtcaaagaaacgggccttcaagactcagtgtacccaggatggcagctggcaggagggagcttgtgttcctgtgacctgtgacccacctccaccaaaattccatgggctctaccagtgtactaatggcttccagttcaacagtgagtgtaggatcaagtgtgaagacagtgatgcctcccagggacttgggagcaatgtcattcattgccggaaagatggcacctggaacggctccttccatgtctgccaggagatgcaaggccagtgctcggttccaaacgagctcaacagcaacctcaaactgcagtgccctgatggctatgccatagggtcggagtgtgccacctcgtgcctggaccacaacagcgagtccatcatcctgccaatgaacgtgaccgtgcgtgacatcccccactggctgaaccccacacgggtagagagagttgtctgcactgctggtctcaagtggtatcctcaccctgctctgattcactgtgtcaaaggctgtgagcccttcatgggagacaattattgtgatgccatcaacaaccgagccttttgcaactatgacggtggggattgctgcacctccacagtgaagaccaaaaaggtcaccccattccctatgtcctgtgacctacaaggtgactgtgcttgtcgggacccccaggcccaagaacacagccggaaagacctccggggatacagccatggctaaggaaggacaagaagttgtcaaagaattcccaacgccaggacccacatccctttggtattgatttcacagtcagctgctcaacggaatggcctctccacaccagggatccttagcacccaaccggtctgcctttaattttacccaggaaggactcacattggggcgaatgaaccaagtttcgccatgctggatgatgaaatggattcccatcccaaagtctgagatggattgcatatacagtgtgcagtcccagagcctcctaaaattctagccatttgtcacacaaccacagcaagaaacgtgttctatatctagagtgtgcccatctgtgtttagtacacatgcatgcatacacacccatacaaacatctgtgtgagggcagttctggagatgagcagagagagaccggaataaactcaatcttttctttcccaagctcctagccaacactatccttgggagaaagaaatttgcagaaactgctaagaccaagtgtggagatgtcaagctagttcacactctgaggctcagaatatgtaggacatgcacaattgtgcagtcctttgggattggaagtgaaacagtctgtgatcccctaccttctagggaactaggacctaggaagaggtaaagattatcaggtatgcaaagcgccccaattcttctgctgccatgggggattttaccccaactccagggttcgaggccaatctgagaatggcttaggattgcaatgtcaaggtattatatcagccccttgcttgaggcttgaggtcataatatccctctaggacttacctgttcccccagatcttgccttgggaccacatttgctgctacttttcctgctgctctatcctatacattgaataatccaagatggtagaactaggttaggaaaaattccacacaaccaaacagtctgccttaaaagtgacccacatttttccatagctcctcactttttagcccttctgcaagagaaaaaccctcatgggtccacatggtgagaagttaagtttcctgtaagtgggcctctcaccctggaaaggagttgagggacatcagatgctggaaccctcactgaaagtccagaatgtctaagccagtgttagattttgtaaacaagtggaacagtgttaaatttctatgatgttggagccatccagagactactggaattgtcgagacttttggattattatccttatccttatcctaatcttcctagcccttcaggctagagtaggcttcgatcctgagaaccttgctgttgctctgaggagatataattctgggagaaagaatcttttataagaacagtacagattgttctcaagagggccatcagaaggaagccaaagagttcacagcctcagcaccaacaactcaacatggtcatcatgttttctatatggtttttccagctagcagtactcccttccatacctgtgactgggcagtgcttttctctctcccatgtctagcctccaaaagttaagtgaaaattagtcaactgcacgtggaagcccccaccactttggggatctctttatttcttttcagccagggacctgtccactccctttgaattaatatgggaagaaattaatacaggatgaactggagagaagggttgagtgtggcatactttctgaaacctggagctgggaattgcggagaagggaaggtctagactagttacatcacatagggattactgtaaatcaagtcatctcaagtctagtgaagacagccaacagaaacaaaacctagcatagggatagaaaataccatgcacgtgtgcagccccacctaattcctgcatccaaggcaggtgttgttaatctatcatagcacttaaaaaaaaaaaaaaagagaccaaaaataactttaggaaccaccatattatatcactcccaatagcactgacctggtgatcaaaaacacttgagaagacatctattggccatctctggccaattacactaagaaacatatcaaggtgcttttggcacaggtgcccacaaatacggatgcagtgctgagatagtttatgagacttgtaccatttcacaaactctgaaattgggttccatattggcaaggctgccacagttgttaagaataatcctctatgtttcttcctcacaaaaccatatctcatttatatccagaccattacttcactataattacaaggacaaattattagcaagaaataagaatagtattagaagaattgatcctattttgaacccctctccagtatcttcacactcttgtcaactctccaggcctctctcttgccctgagttatcagcctgtgtggtgttaactaccttagaaggtacaagctaagaaatgtaacagtatcaaccctcccagttgcttaattatacccataggtaatacaaaaagctctgaagacccaaagatgacattactaatgatgtgatttcaggagccacagaagaaccttaccagcttccctcaaatcagtccttatcctctttctatcttcactcccatcatcatctattttcacactatccagctaagcaaagattcctggaggctgacttgtatcttcagactcacagagtgaattcagctcttctgaatcaagacccacccagtctctttcattcagacctgttgctaacaaatttatatttgccaaggatattaggcaaaagaggctacttgattggtggccaacctcgtgcccacatggaaggtatctttaatagggtcttttcaaaccttagtggaggagggtcagctcaatttgggcaatgcatttgttcccagtttcattttcttcctgggaattaactcgtcatttcattccttcagtcatcttctgtgtaggtgaccggagcactgagaggcagctctgatgcactattgtgtgtcagcagctcaaaggccctaaaacactgaaggttctgcatctgaagtattagattgttagcagcaaaatatgaaagatgaggtggacagtcctctaagccctatttagggaagcttttccaagccacaatcttaactacctacccaaaggatttgcattacccccagattctgtgccaacaaccttttaaggaaatacagtccttgggaaatgagttttgatggtgaattggggtgttaaggaagggaaagattgtcatagatggtagggctttgaaaatgcagggtatcagctgccactcctggcttcaacacattgagtcactgcctagacggttctcttggtcttattcccatcctggccaatgcttaaatactatttgttgaaaataattctttgagacagatttcagctacctcccttccaggttcgatttaacttggttgtaattgtcaatttgttgttataggtcttacctgtgtgaaagaaagaaaaagaaagaaagaaagaaagagaaaggaaattataaggtcaagttaacagttttgaggttttgtgtttttttctggaactacttcaagtgagaaaataaaaaaaaatggtgacaaagctgtacagatagagataatagaagacaaagagattaaaaggaaataaaaatgcatgattaaaaactaagaataaaaaacctatttttatgtttcctaaaggaaattgtttattctacagactcagtaggtagacacaaacataaagatttccctagaagacatagagtgggatttgataacactgtctgttattttctgtacattgtggtaggtccaggaaatatgacattttcccccttgatgtgttattgttgttgttgggtggggtgggcattttgtttatttgtttggtggcaatcagtggtagtagggagtgggagggcttatattggtttttccagctattaaggggacatattgtgtcgttgtgcttttcacgttataaaatgtttatatttaccagtacagcactgggctttataaagactgcactcagaaccacactgcacagtccagttttttaaaaagctgctacatgacagacaggtaatcccactgagtgagttttgagaaacaaatcaaacgaagtaaacaagaaacataaaaaccaaatagcaaatgaataaaagcctgttcttgtaacttattcaacttttgccaaattcctaccaatcacttgctttttaaaagaaatgtataatagccaaaagagaaattatgtccctgttgtacagaagttagaatttttgactccaggcagcagtttgctcagtgatcttgaacaagttatccaattgcctctacatttgcatcagtttctctagctgcaaaatggggataatactatatacctacctcacagtgggagggcaggagattttgaggccctgaggttttaggtgggctgtgagggccaacgcttgacacaaagtccatgggttattattcaagaatgcacaggcccatcggccttttagaaagacaagacagggagtgcttgtttgatatttcaaggaataaagccggagctcctgaattgtagtccaccttaaaagagagacctgtattggagaatattttatttttttggcaaatttgatcttaccctttaccagttctataatttggttaaaagctgattacgtcctacaatgtcaaagtcagctaactgtcgtctacttaagacttctggtcatttccaacttatagaggaagggagtctctaaaatctcttcttcagaaggcacctcacttctcagacttaaaattccacatcaagtgttccattaaaagaagataaggcattctgagtgcaaacaaatgggggcttcttaaactacacaccagcagtcagtgaggaaaactttgaacaattattgagttgctttcttgggtctctataatcaataacctgtctgcagatatctatctatataaagatattatatataaatataaatttacatatatatgcacatgtatatatagttgtacatatatgtgtgtatatatatacttaaatgtaatatttacaaaataaaactgtgatctcgtctagagaaaatgtattcatattacaaactgctcttccatatttatgtaccatattatacctttttattattgttataattattatgggtatttctaattaatatgatgttgaaacctgtttggcaccttctggaagctaccaaaaaaatgacactccattgaagtgcttaaaagctgttctcataagaattctactggcctattgtaaaaaagaaaaaaaaaagaaaaagaagaaagacacaaagaaaataatctaaacaccaaaaactaaacacaattccaatcctttttctgtacctcacgcgcataaatttggctgctcctatttttttttctgtttatgtgtttttatggatctaagttaaatcttttggcaatatataaaaatgtaaatagtaaactttatttattaagaatgtcatcttttttaatttatatttacacaattgttcatctaatttattttttctatacagttttaaatactcagacatattttgctgttcatgatatttttatcctgttctcatggatttgttttcccatactgttttctctgatctcaattacaggttggatctcacaaataataatgtcagagacagaaatattttgccactgttgattactatactttaaagttctatattatgaaaatatataatagcttgtacgctggcatggattgggtccgngctcgattctatct

SEQ ID NO: 455072 - DNA, 13944 bp, Homo sapiens
ctgtccaggttgagtgagggtgtccaggatgaggaatgagggtgtccagggtgaggagtgagggagtccagggtgaggagtgagggagtccagggtgaggattgagggtgtcagggtgagtgagagtgtccagggtgaggagtgagggtatccagggtgagtgagggtgtccagggtgaggagtgagggtatccagggtgagtgagggtgtccagggtgagtgagggtgtcagggtgagtgaacgtgtccagggtgtgtgagggtgtccagggtgcagagtgaggtgtccagggtgaggagtgacggtgtctggggtgagtgagggtgtccagggtgaggagtgagggtgtcagggtgagtgagggtgtccagggttgagtgcacatgtgtggtgaggaggtgtttgcagtgcttcaggcgcagcaactctttcatctagtttaaaattgtgctctgaggttagattttagtagaacaaaggccttacaaagaatgtgaaaacattgtgcttccctgcttacaggcaattaaaaaggagaatcaagctgagggtgcctggtgtggggtggggtggagaagaccacagagactattgtgtgttttattcaacagtgtcctgggctgctttctccagaaatgtccctgacacatggatgtaagtgtggctagtttactgggagatgatcccagtgatgcaggacacgcgagccctaagattgaagcatagcccgggagggttcttagctttgcccaggaaggaactcaaggcaagccagtggtgttagcaacttttattgaagcggccggctgtgcacagcagcagcagaggcgctgctccttgcaaagcagggctgccctacaggctgtgcgcccacagtagcagctcagaggcagttctgcagtggtatttgtatccacttttaattatatgcaaatgaaggggcagtttatgcagacatttccagggtgagggtggtaacttctgggtgctgccagagccatcgtgaactgacttgacacaggtcggtgtgtcctatggaaactagcatctgccctggacctattttagctagtgctcagtttggtctgagtgcctgagccccacttccagagttgagtcccacctcctacctcattcccccttcagagattagatactcctccttaatcttaagggggcctcgagaagggcggagtcctgcttttccgtaactacttcctgctgagtttatggcacgtaggccctgcctggcactggaggacgtaaaaatttctggatacctgatctaaggagcccagaggcaggacgatttcattctccgtgtcagtggacaggatgggctggaagccttgtgccagcattgtctctggaactgtggtaatctagaatacacaaactttactaagaggttaaagaagcaaggaccaaacatttgtaacaagacagttgtcaaaggtcctagaagaggtgaaaaacaggtgagacttgggaaggcacttttgatggttgaccagatatagttggggcagtgccctggttatatctatgtaactaggtagcttgctcatagatcttttgaatgttaacctcaacctgtccagagttaatatatgtgcagcaggttttattaataactgcacaagaccccaccttgttcagctagtaaataatccaatgctagtctgttatcaacaactacattttccagagtctggggaactcttgaattctctttaatgcctgatctccgttggtggctaaggattctaggatttgagccaagttctttagcgttaactcatggtaggcaaagcaccccagggtgctgctagtcctattgccaccctgattcctgccagaaataagtaagcaagcaacaggacaatgaactccatgttgcccagatcccactgagagtgaacgtgcagtcatgcccataaccgacacacatcccagtccatgtgggtcagtccttcatcaccctccctgccttctgacaacagcagactccagccattccattatcattcacagcccaacccaagcagtcagtggctgaagaaagagaatcaggtatactctatgtccacatataccttcctgccacagggcttcaccaactggcaggattccccccagcccccaactcctcctcatcccttgttcccaggcgggtcaattggagagtgagcagagatagatggcttgcagaagggtatgcaagatggggagactccaccagaccttagggagagaatggcatctttctccaccttttaagagagacagagcctccctgaggtctcaaagatttttcagggcaacacaagaaacgtttccaagcctcagctgcaggtgttcacctttccactctggggtgtgaggagatggtaagctgaggacaagtgtgttccagatgcaggccaactctgttctccaacagtttgaaccaacttggccttggggttccaagggtaggatgaagggtgtcacggcaggacggggcctggcgtgaggcaacagcaagcagagcgaggacacaacagtggcagcagtgtacagacacaggacgtcagcttcaaacgatgcaacagcagggatatcttgggcacggctctgattcgagccactcccaactctcttgcctccaggatggaggcactgtacatgcaacagtccagagaaagattctagccagtccaagcccaggcacatccagagaaggtgggagctcttcgggttgactccaccgaggaaaacaggcatttgggtatttcagattcccgctccacaataaggcaacttttaaaaaaatattatttccaaaaacaaaacaaaaattccagggggagggaattcagcggatcagtcttaagaggagcttttttttggagcgagaaatcatataaaataaaatgaaataaaacaaggaggaaggcaaccagctgttaggggaaaaataaggcagataaaggagcggggagagaaattaattgccaaccaggaggagttgggctgtatttttcaaaggtggggagagtggagcacacaccttgaggaggaaagcgagaaagaaaagaaaaaagcaagtgaaggggggctcgcccaagaagggtgaagaagcgaagaaagtcgaggcgccgaggctcccaaagctggcagctccgggtggcggtgcaggggcgaaggggggggcggggggaacgtcggacatgcggctctggagttgggtgctgcacctggggctgctgagcgccgcgctgggctgcgggctggccgagcgtccccgccgggcccggagagacccgcgggccggccgacccccgcgccccgccgccggcccggccacctgcgccacccgcggcccgcggccgccgcgcctcgccgccgccgccgccgccgccgggcggtgcctgggaagccgtgcgcgtcccccggcggcggcagcagcgggaggcgaggggcgccaccgaggagccgagcccgccgagccgggcgctctatttcagcgggcgaggcgagcagctgcgcctccgggccgacctcgagctgccccgggacgcgttcacgctgcaagtgtggctgcgagcggaggggggccagaggtctccggcagtgatcacagggctgtatgacaaatgttcttatatctcacgtgaccgaggatgggtcgtgggcattcacaccatcagtgaccaagacaacaaagacccacgctactttttctccttgaagacagaccgagcccggcaagtgaccaccatcaatgcccaccgcagctacctcccaggccagtgggtatacctagctgccacctatgatgggcagttcatgaagctctatgtgaatggtgcccaggtggccacctctggggaacaagtgggtggcatattcagcccactgacccagaagtgcaaagtgctcatgttagggggcagtgccctgaatcacaactaccggggctacatcgagcacttcagtctgtggaaggtggccaggactcagcgggagatactgtctgacatggaaacccatggcgcccacactgctctacctcagctcctcctccaggagaactgggacaatgtgaagcatgcctggtcccccatgaaggatggcagcagccccaaagtggaattcagcaatgcccacggctttctgctggacacgagtctggagcctcctctgtgcggacagacattgtgtgacaacacagaggtcattgccagctacaatcagctctcaagtttccgccagcccaaggtggtgcgctaccgcgtggtcaacctctatgaagatgatcataagaacccgacggtgacgcgcgagcaggtggacttccagcaccatcagctggctgaggccttcaagcaatacaacatctcctgggagctggacgtgctggaggtgagcaactcctcccttcgccgccgcctcatcctggccaactgtgacatcagcaagattggggatgagaactgtgaccccgagtgcaaccacacgctgacgggccacgacggcggggattgccgccacctgcgccaccctgccttcgtgaagaagcagcacaacggggtgtgtgacatggactgcaactatgaacggttcaactttgatggtggagagtgctgtgaccctgaaatcaccaatgtcactcagacttgctttgaccccgactctccacacagagcctacttggatgttaatgagctgaagaacattcttaaattggatggatcaacacatctcaatattttctttgcaaaatcctcagaggaggagttggcaggagtagcaacttggccatgggacaaggaggccctgatgcacttaggtggcattgtcttgaacccatctttctatggcatgcctgggcacacccacaccatgatccatgagattggtcacagcctgggcctctatcacgtcttccgaggcatctcagaaatccagtcctgcagtgacccctgcatggagacagagccctccttcgagactggagacctctgcaatgataccaacccagcccctaaacacaagtcctgtggtgacccagggccaggaaatgacacctgtggctttcatagcttcttcaacactccttacaacaacttcatgagctatgcagatgacgactgtacggactccttcacgcccaatcaagtcgccagaatgcactgttacctggacctggtctaccagggctggcagccctccaggaaaccagcgcctgttgccctcgccccccaagttctgggccacacaacggactctgtgacactggagtggttcccacctatagatggccatttctttgaaagagaattgggatcagcatgtcatctttgcctggaagggagaatcctggtgcagtatgcttccaacgcttcctccccaatgccctgcagcccatcaggacactggagccctcgtgaagcagaaggtcatcctgatgttgaacagccctgtaagtccagtgtccgcacctggagcccaaattcagctgtcaacccacacacggttcctccagcctgccctgagcctcaaggctgctacctcgagctggagttcctctaccccttggtccctgagtctctgaccatttgggtgacctttgtctccactgactgggactctagtggagctgtcaatgacatcaaactgttggctgtcagtgggaagaacatctccctgggtcctcagaatgtcttctgtgatgtcccactgaccatcagactctgggacgtgggcgaggaggtgtatggcatccaaatctacacgctggatgagcacctggagatcgatgctgccatgttgacctccactgcagacaccccactctgtctacagtgtaagcccctgaagtataaggtggtccgggaccctcctctccagatggatgtggcctccatcctacatctcaataggaaattcgtagacatggatctaaatcttggcagtgtgtaccagtattgggtcataactatttcaggaactgaagagagtgagccatcacctgctgtcacatacatccatggaagtgggtactgtggcgatggcattatacaaaaagaccaaggtgaacaatgcgacgacatgaataagatcaatggtgatggctgctcccttttctgccgacaagaagtctccttcaattgtattgatgaacccagccggtgctatttccatgatggtgatggggtatgtgaggagtttgaacaaaaaaccagcattaaggactgtggtgtctacacgccccagggattcctggatcagtgggcatccaatgcttcagtatctcatcaagaccagcaatgcccaggctgggtcatcatcggacagccagcagcatcccaggtgtgtcgaaccaaggtgatagatctcagtgaaggcatttcccagcatgcctggtacccttgcaccatcagctacccatattcccagctggctcagaccactttttggctccgggcgtatttttctcaaccaatggttgccgcagctgtcattgtccacctggtgacggatgggacatattatggggaccaaaagcaggagaccatcagcgtgcagctgcttgataccaaagatcagagccacgatctaggcctccatgtcctgagctgcaggaacaatcccctgattatccctgtggtccatgacctcagccagcccttctaccacagccaggcggtacgtgtgagcttcagttcgcccctggtcgccatctcgggggtggccctccgttccttcgacaactttgaccccgtcaccctgagcagctgccagagaggggagacctacagccctgccgagcagagctgcgtgcacttcgcatgtgagaaaactgactgtccagagctggctgtggagaatgcttatctcaattgctccagcagcgaccgctaccacggtgcccagtgtactgtgagctgccggacaggctacgtgctccagatacggcgggatgatgagctgatcaagagccagacgggacccagcgtcacagtgacctgtacagagggcaagtggaataagcaggtggcctgtgagccagtcgactgcagcatcccagatcaccatcaagtctatgctgcctccttctcctgccctgagggcaccacctttggcagtcaatgttccttccagtgccgtcaccctgcacaattgaaaggcaacaacagcctcctgacctgcatggaggatgggctgtggtccttcccagaggccctgtgtgagctcatgtgcctcgctccaccccctgtgcccaatgcagacctccagaccgcccggtgccgagagaataagcacaaggtgggctccttctgcaaatacaaatgcaagcctggataccatgtgcctggatcctctcggaagtcaaagaaacgggccttcaagactcagtgtacccaggatggcagctggcaggagggagcttgtgttcctgtgacctgtgacccacctccaccaaaattccatgggctctaccagtgtactaatggcttccagttcaacagtgagtgtaggatcaagtgtgaagacagtgatgcctcccagggacttgggagcaatgtcattcattgccggaaagatggcacctggaacggctccttccatgtctgccaggagatgcaaggccagtgctcggttccaaacgagctcaacagcaacctcaaactgcagtgccctgatggctatgccatagggtcggagtgtgccacctcgtgcctggaccacaacagcgagtccatcatcctgccaatgaacgtgaccgtgcgtgacatcccccactggctgaaccccacacgggtagagagagttgtctgcactgctggtctcaagtggtatcctcaccctgctctgattcactgtgtcaaaggctgtgagcccttcatgggagacaattattgtgatgccatcaacaaccgagccttttgcaactatgacggtggggattgctgcacctccacagtgaagaccaaaaaggtcaccccattccctatgtcctgtgacctacaaggtgactgtgcttgtcgggacccccaggcccaagaacacagccggaaagacctccggggatacagccatggctaaggaaggacaagaagttgtcaaagaattcccaacgccaggacccacatccctttggtattgatttcacagtcagctgctcaacggaatggcctctccacaccagggatccttagcacccaaccggtctgcctttaattttacccaggaaggactcacattggggcgaatgaaccaagtttcgccatgctggatgatgaaatggattcccatcccaaagtctgagatggattgcatatacagtgtgcagtcccagagcctcctaaaattctagccatttgtcacacaaccacagcaagaaacgtgttctatatctagagtgtgcccatctgtgtttagtacacatgcatgcatacacacccatacaaacatctgtgtgagggcagttctggagatgagcagagagagaccggaataaactcaatcttttctttcccaagctcctagccaacactatccttgggagaaagaaatttgcagaaactgctaagaccaagtgtggagatgtcaagctagttcacactctgaggctcagaatatgtaggacatgcacaattgtgcagtcctttgggattggaagtgaaacagtctgtgatcccctaccttctagggaactaggacctaggaagaggtaaagattatcaggtatgcaaagcgccccaattcttctgctgccatgggggattttaccccaactccagggttcgaggccaatctgagaatggcttaggattgcaatgtcaaggtattatatcagccccttgcttgaggcttgaggtcataatatccctctaggacttacctgttcccccagatcttgccttgggaccacatttgctgctacttttcctgctgctctatcctatacattgaataatccaagatggtagaactaggttaggaaaaattccacacaaccaaacagtctgccttaaaagtgacccacatttttccatagctcctcactttttagcccttctgcaagagaaaaaccctcatgggtccacatggtgagaagttaagtttcctgtaagtgggcctctcaccctggaaaggagttgagggacatcagatgctggaaccctcactgaaagtccagaatgtctaagccagtgttagattttgtaaacaagtggaacagtgttaaatttctatgatgttggagccatccagagactactggaattgtcgagacttttggattattatccttatccttatcctaatcttcctagcccttcaggctagagtaggcttcgatcctgagaaccttgctgttgctctgaggagatataattctgggagaaagaatcttttataagaacagtacagattgttctcaagagggccatcagaaggaagccaaagagttcacagcctcagcaccaacaactcaacatggtcatcatgttttctatatggtttttccagctagcagtactcccttccatacctgtgactgggcagtgcttttctctctcccatgtctagcctccaaaagttaagtgaaaattagtcaactgcacgtggaagcccccaccactttggggatctctttatttcttttcagccagggacctgtccactccctttgaattaatatgggaagaaattaatacaggatgaactggagagaagggttgagtgtggcatactttctgaaacctggagctgggaattgcggagaagggaaggtctagactagttacatcacatagggattactgtaaatcaagtcatctcaagtctagtgaagacagccaacagaaacaaaacctagcatagggatagaaaataccatgcacgtgtgcagccccacctaattcctgcatccaaggcaggtgttgttaatctatcatagcacttaaaaaaaaaaaaaaagagaccaaaaataactttaggaaccaccatattatatcactcccaatagcactgacctggtgatcaaaaacacttgagaagacatctattggccatctctggccaattacactaagaaacatatcaaggtgcttttggcacaggtgcccacaaatacggatgcagtgctgagatagtttatgagacttgtaccatttcacaaactctgaaattgggttccatattggcaaggctgccacagttgttaagaataatcctctatgtttcttcctcacaaaaccatatctcatttatatccagaccattacttcactataattacaaggacaaattattagcaagaaataagaatagtattagaagaattgatcctattttgaacccctctccagtatcttcacactcttgtcaactctccaggcctctctcttgccctgagttatcagcctgtgtggtgttaactaccttagaaggtacaagctaagaaatgtaacagtatcaaccctcccagttgcttaattatacccataggtaatacaaaaagctctgaagacccaaagatgacattactaatgatgtgatttcaggagccacagaagaaccttaccagcttccctcaaatcagtccttatcctctttctatcttcactcccatcatcatctattttcacactatccagctaagcaaagattcctggaggctgacttgtatcttcagactcacagagtgaattcagctcttctgaatcaagacccacccagtctctttcattcagacctgttgctaacaaatttatatttgccaaggatattaggcaaaagaggctacttgattggtggccaacctcgtgcccacatggaaggtatctttaatagggtcttttcaaaccttagtggaggagggtcagctcaatttgggcaatgcatttgttcccagtttcattttcttcctgggaattaactcgtcatttcattccttcagtcatcttctgtgtaggtgaccggagcactgagaggcagctctgatgcactattgtgtgtcagcagctcaaaggccctaaaacactgaaggttctgcatctgaagtattagattgttagcagcaaaatatgaaagatgaggtggacagtcctctaagccctatttagggaagcttttccaagccacaatcttaactacctacccaaaggatttgcattacccccagattctgtgccaacaaccttttaaggaaatacagtccttgggaaatgagttttgatggtgaattggggtgttaaggaagggaaagattgtcatagatggtagggctttgaaaatgcagggtatcagctgccactcctggcttcaacacattgagtcactgcctagacggttctcttggtcttattcccatcctggccaatgcttaaatactatttgttgaaaataattctttgagacagatttcagctacctcccttccaggttcgatttaacttggttgtaattgtcaatttgttgttataggtcttacctgtgtgaaagaaagaaaaagaaagaaagaaagaaagagaaaggaaattataaggtcaagttaacagttttgaggttttgtgtttttttctggaactacttcaagtgagaaaataaaaaaaaatggtgacaaagctgtacagatagagataatagaagacaaagagattaaaaggaaataaaaatgcatgattaaaaactaagaataaaaaacctatttttatgtttcctaaaggaaattgtttattctacagactcagtaggtagacacaaacataaagatttccctagaagacatagagtgggatttgataacactgtctgttattttctgtacattgtggtaggtccaggaaatatgacattttcccccttgatgtgttattgttgttgttgggtggggtgggcattttgtttatttgtttggtggcaatcagtggtagtagggagtgggagggcttatattggtttttccagctattaaggggacatattgtgtcgttgtgcttttcacgttataaaatgtttatatttaccagtacagcactgggctttataaagactgcactcagaaccacactgcacagtccagttttttaaaaagctgctacatgacagacaggtaatcccactgagtgagttttgagaaacaaatcaaacgaagtaaacaagaaacataaaaaccaaatagcaaatgaataaaagcctgttcttgtaacttattcaacttttgccaaattcctaccaatcacttgctttttaaaagaaatgtataatagccaaaagagaaattatgtccctgttgtacagaagttagaatttttgactccaggcagcagtttgctcagtgatcttgaacaagttatccaattgcctctacatttgcatcagtttctctagctgcaaaatggggataatactatatacctacctcacagtgggagggcaggagattttgaggccctgaggttttaggtgggctgtgagggccaacgcttgacacaaagtccatgggttattattcaagaatgcacaggcccatcggccttttagaaagacaagacagggagtgcttgtttgatatttcaaggaataaagccggagctcctgaattgtagtccaccttaaaagagagacctgtattggagaatattttatttttttggcaaatttgatcttaccctttaccagttctataatttggttaaaagctgattacgtcctacaatgtcaaagtcagctaactgtcgtctacttaagacttctggtcatttccaacttatagaggaagggagtctctaaaatctcttcttcagaaggcacctcacttctcagacttaaaattccacatcaagtgttccattaaaagaagataaggcattctgagtgcaaacaaatgggggcttcttaaactacacaccagcagtcagtgaggaaaactttgaacaattattgagttgctttcttgggtctctataatcaataacctgtctgcagatatctatctatataaagatattatatataaatataaatttacatatatatgcacatgtatatatagttgtacatatatgtgtgtatatatatacttaaatgtaatatttacaaaataaaactgtgatctcgtctagagaaaatgtattcatattacaaactgctcttccatatttatgtaccatattatacctttttattattgttataattattatgggtatttctaattaatatgatgttgaaacctgtttggcaccttctggaagctaccaaaaaaatgacactccattgaagtgcttaaaagctgttctcataagaattctactggcctattgtaaaaaagaaaaaaaaaagaaaaagaagaaagacacaaagaaaataatctaaacaccaaaaactaaacacaattccaatcctttttctgtacctcacgcgcataaatttggctgctcctatttttttttctgtttatgtgtttttatggatctaagttaaatcttttggcaatatataaaaatgtaaatagtaaactttatttattaagaatgtcatcttttttaatttatatttacacaattgttcatctaatttattttttctatacagttttaaatactcagacatattttgctgttcatgatatttttatcctgttctcatggatttgttttcccatactgttttctctgatctcaattacaggttggatctcacaaataataatgtcagagacagaaatattttgccactgttgattactatactttaaagttctatattatgaaaatatataatagcttgtacgctaaaaccacaccaacacactcccaaaaccaaccttctggcgcccgccccgcgcctccaaaaactctctacaaaccatctcgttggggccccgggccccactggtcgtacggcacctgcgcccacacgggtttcccagaggaacaccggc

SEQ ID NO: 455073 - DNA, 13743 bp, Homo sapiens
ctgtccaggttgagtgagggtgtccaggatgaggaatgagggtgtccagggtgaggagtgagggagtccagggtgaggagtgagggagtccagggtgaggattgagggtgtcagggtgagtgagagtgtccagggtgaggagtgagggtatccagggtgagtgagggtgtccagggtgaggagtgagggtatccagggtgagtgagggtgtccagggtgagtgagggtgtcagggtgagtgaacgtgtccagggtgtgtgagggtgtccagggtgcagagtgaggtgtccagggtgaggagtgacggtgtctggggtgagtgagggtgtccagggtgaggagtgagggtgtcagggtgagtgagggtgtccagggttgagtgcacatgtgtggtgaggaggtgtttgcagtgcttcaggcgcagcaactctttcatctagtttaaaattgtgctctgaggttagattttagtagaacaaaggccttacaaagaatgtgaaaacattgtgcttccctgcttacaggcaattaaaaaggagaatcaagctgagggtgcctggtgtggggtggggtggagaagaccacagagactattgtgtgttttattcaacagtgtcctgggctgctttctccagaaatgtccctgacacatggatgtaagtgtggctagtttactgggagatgatcccagtgatgcaggacacgcgagccctaagattgaagcatagcccgggagggttcttagctttgcccaggaaggaactcaaggcaagccagtggtgttagcaacttttattgaagcggccggctgtgcacagcagcagcagaggcgctgctccttgcaaagcagggctgccctacaggctgtgcgcccacagtagcagctcagaggcagttctgcagtggtatttgtatccacttttaattatatgcaaatgaaggggcagtttatgcagacatttccagggtgagggtggtaacttctgggtgctgccagagccatcgtgaactgacttgacacaggtcggtgtgtcctatggaaactagcatctgccctggacctattttagctagtgctcagtttggtctgagtgcctgagccccacttccagagttgagtcccacctcctacctcattcccccttcagagattagatactcctccttaatcttaagggggcctcgagaagggcggagtcctgcttttccgtaactacttcctgctgagtttatggcacgtaggccctgcctggcactggaggacgtaaaaatttctggatacctgatctaaggagcccagaggcaggacgatttcattctccgtgtcagtggacaggatgggctggaagccttgtgccagcattgtctctggaactgtggtaatctagaatacacaaactttactaagaggttaaagaagcaaggaccaaacatttgtaacaagacagttgtcaaaggtcctagaagaggtgaaaaacaggtgagacttgggaaggcacttttgatggttgaccagatatagttggggcagtgccctggttatatctatgtaactaggtagcttgctcatagatcttttgaatgttaacctcaacctgtccagagttaatatatgtgcagcaggttttattaataactgcacaagaccccaccttgttcagctagtaaataatccaatgctagtctgttatcaacaactacattttccagagtctggggaactcttgaattctctttaatgcctgatctccgttggtggctaaggattctaggatttgagccaagttctttagcgttaactcatggtaggcaaagcaccccagggtgctgctagtcctattgccaccctgattcctgccagaaataagtaagcaagcaacaggacaatgaactccatgttgcccagatcccactgagagtgaacgtgcagtcatgcccataaccgacacacatcccagtccatgtgggtcagtccttcatcaccctccctgccttctgacaacagcagactccagccattccattatcattcacagcccaacccaagcagtcagtggctgaagaaagagaatcaggtatactctatgtccacatataccttcctgccacagggcttcaccaactggcaggattccccccagcccccaactcctcctcatcccttgttcccaggcgggtcaattggagagtgagcagagatagatggcttgcagaagggtatgcaagatggggagactccaccagaccttagggagagaatggcatctttctccaccttttaagagagacagagcctccctgaggtctcaaagatttttcagggcaacacaagaaacgtttccaagcctcagctgcaggtgttcacctttccactctggggtgtgaggagatggtaagctgaggacaagtgtgttccagatgcaggccaactctgttctccaacagtttgaaccaacttggccttggggttccaagggtaggatgaagggtgtcacggcaggacggggcctggcgtgaggcaacagcaagcagagcgaggacacaacagtggcagcagtgtacagacacaggacgtcagcttcaaacgatgcaacagcagggatatcttgggcacggctctgattcgagccactcccaactctcttgcctccaggatggaggcactgtacatgcaacagtccagagaaagattctagccagtccaagcccaggcacatccagagaaggtgggagctcttcgggttgactccaccgaggaaaacaggcatttgggtatttcagattcccgctccacaataaggcaacttttaaaaaaatattatttccaaaaacaaaacaaaaattccagggggagggaattcagcggatcagtcttaagaggagcttttttttggagcgagaaatcatataaaataaaatgaaataaaacaaggaggaaggcaaccagctgttaggggaaaaataaggcagataaaggagcggggagagaaattaattgccaaccaggaggagttgggctgtatttttcaaaggtggggagagtggagcacacaccttgaggaggaaagcgagaaagaaaagaaaaaagcaagtgaaggggggctcgcccaagaagggtgaagaagcgaagaaagtcgaggcgccgaggctcccaaagctggcagctccgggtggcggtgcaggggcgaaggggggggcggggggaacgtcggacatgcggctctggagttgggtgctgcacctggggctgctgagcgccgcgctgggctgcgggctggccgagcgtccccgccgggcccggagagacccgcgggccggccgacccccgcgccccgccgccggcccggccacctgcgccacccgcggcccgcggccgccgcgcctcgccgccgccgccgccgccgccgggcggtgcctgggaagccgtgcgcgtcccccggcggcggcagcagcgggaggcgaggggcgccaccgaggagccgagcccgccgagccgggcgctctatttcagcgggcgaggcgagcagctgcgcctccgggccgacctcgagctgccccgggacgcgttcacgctgcaagtgtggctgcgagcggaggggggccagaggtctccggcagtgatcacagggctgtatgacaaatgttcttatatctcacgtgaccgaggatgggtcgtgggcattcacaccatcagtgaccaagacaacaaagacccacgctactttttctccttgaagacagaccgagcccggcaagtgaccaccatcaatgcccaccgcagctacctcccaggccagtgggtatacctagctgccacctatgatgggcagttcatgaagctctatgtgaatggtgcccaggtggccacctctggggaacaagtgggtggcatattcagcccactgacccagaagtgcaaagtgctcatgttagggggcagtgccctgaatcacaactaccggggctacatcgagcacttcagtctgtggaaggtggccaggactcagcgggagatactgtctgacatggaaacccatggcgcccacactgctctacctcagctcctcctccaggagaactgggacaatgtgaagcatgcctggtcccccatgaaggatggcagcagccccaaagtggaattcagcaatgcccacggctttctgctggacacgagtctggagcctcctctgtgcggacagacattgtgtgacaacacagaggtcattgccagctacaatcagctctcaagtttccgccagcccaaggtggtgcgctaccgcgtggtcaacctctatgaagatgatcataagaacccgacggtgacgcgcgagcaggtggacttccagcaccatcagctggctgaggccttcaagcaatacaacatctcctgggagctggacgtgctggaggtgagcaactcctcccttcgccgccgcctcatcctggccaactgtgacatcagcaagattggggatgagaactgtgaccccgagtgcaaccacacgctgacgggccacgacggcggggattgccgccacctgcgccaccctgccttcgtgaagaagcagcacaacggggtgtgtgacatggactgcaactatgaacggttcaactttgatggtggagagtgctgtgaccctgaaatcaccaatgtcactcagacttgctttgaccccgactctccacacagagcctacttggatgttaatgagctgaagaacattcttaaattggatggatcaacacatctcaatattttctttgcaaaatcctcagaggaggagttggcaggagtagcaacttggccatgggacaaggaggccctgatgcacttaggtggcattgtcttgaacccatctttctatggcatgcctgggcacacccacaccatgatccatgagattggtcacagcctgggcctctatcacgtcttccgaggcatctcagaaatccagtcctgcagtgacccctgcatggagacagagccctccttcgagactggagacctctgcaatgataccaacccagcccctaaacacaagtcctgtggtgacccagggccaggaaatgacacctgtggctttcatagcttcttcaacactccttacaacaacttcatgagctatgcagatgacgactgtacggactccttcacgcccaatcaagtcgccagaatgcactgttacctggacctggtctaccagggctggcagccctccaggaaaccagcgcctgttgccctcgccccccaagttctgggccacacaacggactctgtgacactggagtggttcccacctatagatggccatttctttgaaagagaattgggatcagcatgtcatctttgcctggaagggagaatcctggtgcagtatgcttccaacgcttcctccccaatgccctgcagcccatcaggacactggagccctcgtgaagcagaaggtcatcctgatgttgaacagccctgtaagtccagtgtccgcacctggagcccaaattcagctgtcaacccacacacggttcctccagcctgccctgagcctcaaggctgctacctcgagctggagttcctctaccccttggtccctgagtctctgaccatttgggtgacctttgtctccactgactgggactctagtggagctgtcaatgacatcaaactgttggctgtcagtgggaagaacatctccctgggtcctcagaatgtcttctgtgatgtcccactgaccatcagactctgggacgtgggcgaggaggtgtatggcatccaaatctacacgctggatgagcacctggagatcgatgctgccatgttgacctccactgcagacaccccactctgtctacagtgtaagcccctgaagtataaggtggtccgggaccctcctctccagatggatgtggcctccatcctacatctcaataggaaattcgtagacatggatctaaatcttggcagtgtgtaccagtattgggtcataactatttcaggaactgaagagagtgagccatcacctgctgtcacatacatccatggaagtgggtactgtggcgatggcattatacaaaaagaccaaggtgaacaatgcgacgacatgaataagatcaatggtgatggctgctcccttttctgccgacaagaagtctccttcaattgtattgatgaacccagccggtgctatttccatgatggtgatggggtatgtgaggagtttgaacaaaaaaccagcattaaggactgtggtgtctacacgccccagggattcctggatcagtgggcatccaatgcttcagtatctcatcaagaccagcaatgcccaggctgggtcatcatcggacagccagcagcatcccaggtgtgtcgaaccaaggtgatagatctcagtgaaggcatttcccagcatgcctggtacccttgcaccatcagctacccatattcccagctggctcagaccactttttggctccgggcgtatttttctcaaccaatggttgccgcagctgtcattgtccacctggtgacggatgggacatattatggggaccaaaagcaggagaccatcagcgtgcagctgcttgataccaaagatcagagccacgatctaggcctccatgtcctgagctgcaggaacaatcccctgattatccctgtggtccatgacctcagccagcccttctaccacagccaggcggtacgtgtgagcttcagttcgcccctggtcgccatctcgggggtggccctccgttccttcgacaactttgaccccgtcaccctgagcagctgccagagaggggagacctacagccctgccgagcagagctgcgtgcacttcgcatgtgagaaaactgactgtccagagctggctgtggagaatgcttatctcaattgctccagcagcgaccgctaccacggtgcccagtgtactgtgagctgccggacaggctacgtgctccagatacggcgggatgatgagctgatcaagagccagacgggacccagcgtcacagtgacctgtacagagggcaagtggaataagcaggtggcctgtgagccagtcgactgcagcatcccagatcaccatcaagtctatgctgcctccttctcctgccctgagggcaccacctttggcagtcaatgttccttccagtgccgtcaccctgcacaattgaaaggcaacaacagcctcctgacctgcatggaggatgggctgtggtccttcccagaggccctgtgtgagctcatgtgcctcgctccaccccctgtgcccaatgcagacctccagaccgcccggtgccgagagaataagcacaaggtgggctccttctgcaaatacaaatgcaagcctggataccatgtgcctggatcctctcggaagtcaaagaaacgggccttcaagactcagtgtacccaggatggcagctggcaggagggagcttgtgttcctgtgacctgtgacccacctccaccaaaattccatgggctctaccagtgtactaatggcttccagttcaacagtgagtgtaggatcaagtgtgaagacagtgatgcctcccagggacttgggagcaatgtcattcattgccggaaagatggcacctggaacggctccttccatgtctgccaggagatgcaaggccagtgctcggttccaaacgagctcaacagcaacctcaaactgcagtgccctgatggctatgccatagggtcggagtgtgccacctcgtgcctggaccacaacagcgagtccatcatcctgccaatgaacgtgaccgtgcgtgacatcccccactggctgaaccccacacgggtagagagagttgtctgcactgctggtctcaagtggtatcctcaccctgctctgattcactgtgtcaaaggctgtgagcccttcatgggagacaattattgtgatgccatcaacaaccgagccttttgcaactatgacggtggggattgctgcacctccacagtgaagaccaaaaaggtcaccccattccctatgtcctgtgacctacaaggtgactgtgcttgtcgggacccccaggcccaagaacacagccggaaagacctccggggatacagccatggctaaggaaggacaagaagttgtcaaagaattcccaacgccaggacccacatccctttggtattgatttcacagtcagctgctcaacggaatggcctctccacaccagggatccttagcacccaaccggtctgcctttaattttacccaggaaggactcacattggggcgaatgaaccaagtttcgccatgctggatgatgaaatggattcccatcccaaagtctgagatggattgcatatacagtgtgcagtcccagagcctcctaaaattctagccatttgtcacacaaccacagcaagaaacgtgttctatatctagagtgtgcccatctgtgtttagtacacatgcatgcatacacacccatacaaacatctgtgtgagggcagttctggagatgagcagagagagaccggaataaactcaatcttttctttcccaagctcctagccaacactatccttgggagaaagaaatttgcagaaactgctaagaccaagtgtggagatgtcaagctagttcacactctgaggctcagaatatgtaggacatgcacaattgtgcagtcctttgggattggaagtgaaacagtctgtgatcccctaccttctagggaactaggacctaggaagaggtaaagattatcaggtatgcaaagcgccccaattcttctgctgccatgggggattttaccccaactccagggttcgaggccaatctgagaatggcttaggattgcaatgtcaaggtattatatcagccccttgcttgaggcttgaggtcataatatccctctaggacttacctgttcccccagatcttgccttgggaccacatttgctgctacttttcctgctgctctatcctatacattgaataatccaagatggtagaactaggttaggaaaaattccacacaaccaaacagtctgccttaaaagtgacccacatttttccatagctcctcactttttagcccttctgcaagagaaaaaccctcatgggtccacatggtgagaagttaagtttcctgtaagtgggcctctcaccctggaaaggagttgagggacatcagatgctggaaccctcactgaaagtccagaatgtctaagccagtgttagattttgtaaacaagtggaacagtgttaaatttctatgatgttggagccatccagagactactggaattgtcgagacttttggattattatccttatccttatcctaatcttcctagcccttcaggctagagtaggcttcgatcctgagaaccttgctgttgctctgaggagatataattctgggagaaagaatcttttataagaacagtacagattgttctcaagagggccatcagaaggaagccaaagagttcacagcctcagcaccaacaactcaacatggtcatcatgttttctatatggtttttccagctagcagtactcccttccatacctgtgactgggcagtgcttttctctctcccatgtctagcctccaaaagttaagtgaaaattagtcaactgcacgtggaagcccccaccactttggggatctctttatttcttttcagccagggacctgtccactccctttgaattaatatgggaagaaattaatacaggatgaactggagagaagggttgagtgtggcatactttctgaaacctggagctgggaattgcggagaagggaaggtctagactagttacatcacatagggattactgtaaatcaagtcatctcaagtctagtgaagacagccaacagaaacaaaacctagcatagggatagaaaataccatgcacgtgtgcagccccacctaattcctgcatccaaggcaggtgttgttaatctatcatagcacttaaaaaaaaaaaaaaagagaccaaaaataactttaggaaccaccatattatatcactcccaatagcactgacctggtgatcaaaaacacttgagaagacatctattggccatctctggccaattacactaagaaacatatcaaggtgcttttggcacaggtgcccacaaatacggatgcagtgctgagatagtttatgagacttgtaccatttcacaaactctgaaattgggttccatattggcaaggctgccacagttgttaagaataatcctctatgtttcttcctcacaaaaccatatctcatttatatccagaccattacttcactataattacaaggacaaattattagcaagaaataagaatagtattagaagaattgatcctattttgaacccctctccagtatcttcacactcttgtcaactctccaggcctctctcttgccctgagttatcagcctgtgtggtgttaactaccttagaaggtacaagctaagaaatgtaacagtatcaaccctcccagttgcttaattatacccataggtaatacaaaaagctctgaagacccaaagatgacattactaatgatgtgatttcaggagccacagaagaaccttaccagcttccctcaaatcagtccttatcctctttctatcttcactcccatcatcatctattttcacactatccagctaagcaaagattcctggaggctgacttgtatcttcagactcacagagtgaattcagctcttctgaatcaagacccacccagtctctttcattcagacctgttgctaacaaatttatatttgccaaggatattaggcaaaagaggctacttgattggtggccaacctcgtgcccacatggaaggtatctttaatagggtcttttcaaaccttagtggaggagggtcagctcaatttgggcaatgcatttgttcccagtttcattttcttcctgggaattaactcgtcatttcattccttcagtcatcttctgtgtaggtgaccggagcactgagaggcagctctgatgcactattgtgtgtcagcagctcaaaggccctaaaacactgaaggttctgcatctgaagtattagattgttagcagcaaaatatgaaagatgaggtggacagtcctctaagccctatttagggaagcttttccaagccacaatcttaactacctacccaaaggatttgcattacccccagattctgtgccaacaaccttttaaggaaatacagtccttgggaaatgagttttgatggtgaattggggtgttaaggaagggaaagattgtcatagatggtagggctttgaaaatgcagggtatcagctgccactcctggcttcaacacattgagtcactgcctagacggttctcttggtcttattcccatcctggccaatgcttaaatactatttgttgaaaataattctttgagacagatttcagctacctcccttccaggttcgatttaacttggttgtaattgtcaatttgttgttataggtcttacctgtgtgaaagaaagaaaaagaaagaaagaaagaaagagaaaggaaattataaggtcaagttaacagttttgaggttttgtgtttttttctggaactacttcaagtgagaaaataaaaaaaaatggtgacaaagctgtacagatagagataatagaagacaaagagattaaaaggaaataaaaatgcatgattaaaaactaagaataaaaaacctatttttatgtttcctaaaggaaattgtttattctacagactcagtaggtagacacaaacataaagatttccctagaagacatagagtgggatttgataacactgtctgttattttctgtacattgtggtaggtccaggaaatatgacattttcccccttgatgtgttattgttgttgttgggtggggtgggcattttgtttatttgtttggtggcaatcagtggtagtagggagtgggagggcttatattggtttttccagctattaaggggacatattgtgtcgttgtgcttttcacgttataaaatgtttatatttaccagtacagcactgggctttataaagactgcactcagaaccacactgcacagtccagttttttaaaaagctgctacatgacagacaggtaatcccactgagtgagttttgagaaacaaatcaaacgaagtaaacaagaaacataaaaaccaaatagcaaatgaataaaagcctgttcttgtaacttattcaacttttgccaaattcctaccaatcacttgctttttaaaagaaatgtataatagccaaaagagaaattatgtccctgttgtacagaagttagaatttttgactccaggcagcagtttgctcagtgatcttgaacaagttatccaattgcctctacatttgcatcagtttctctagctgcaaaatggggataatactatatacctacctcacagtgggagggcaggagattttgaggccctgaggttttaggtgggctgtgagggccaacgcttgacacaaagtccatgggttattattcaagaatgcacaggcccatcggccttttagaaagacaagacagggagtgcttgtttgatatttcaaggaataaagccggagctcctgaattgtagtccaccttaaaagagagacctgtattggagaatattttatttttttggcaaatttgatcttaccctttaccagttctataatttggttaaaagctgattacgtcctacaatgtcaaagtcagctaactgtcgtctacttaagacttctggtcatttccaacttatagaggaagggagtctctaaaatctcttcttcagaaggcacctcacttctcagacttaaaattccacatcaagtgttccattaaaagaagataaggcattctgagtgcaaacaaatgggggcttcttaaactacacaccagcagtcagtgaggaaaactttgaacaattattgagttgctttcttgggtctctataatcaataacctgtctgcagatatctatctatataaagatatatatgtgtgtatatatatacttaaatgtaatatttacaaaataaaactgtgatctcgtctagagaaaatgtattcatattacaaactgctcttccatatttatgtaccatattatacctttttattattgttataattattatgggtatttctaattaatatgatgttgaaacctgtttggcaccttctggaagctaccaaaaaaatgacactccattgaagtgcttaaaagctgttctcataagaattctactggcctattgtaaaaaagaaaaaaaaaagaaaaagaagaaagacacaaagaaaataatctaaacaccaaaaactaaacacaattccaatcctttttctgtacctcacgcgcataaatttggctgctcctatttttttttctgtttatgtgtttttatggatctaagttaaatcttttggcaatatataaaaatgtaaatagtaaactttatttattaagaatgtcatcttttttaatttatatttacacaattgttcatctaatttattttttctatacagttttaaatactcagacatattttgctgttcatgatatttttatcctgttctcatggatttgttttcccatactgttttctctgatctcaattacaggttggatctcacaaataataatgtcagagacagaaatattttgccactgttgattactatactttaaagttctatattatgaaaatatataatagcttgtacgct

SEQ ID NO: 455074 - DNA, 10400 bp, Homo sapiens
cgtccctgccccccgcggcaggagcttgcttcgttgccctggctggagtgcagtgaaagtgataatggctcactgcaaccttgaacctctggggctcaagcgaccctatcagcatcagcctacgcgagcagctgcgcctccgggccgacctcgagctgccccgggacgcgttcacgctgcaagtgtggctgcgagcggaggggggccagaggtctccggcagtgatcacagggctgtatgacaaatgttcttatatctcacgtgaccgaggatgggtcgtgggcattcacaccatcagtgaccaagacaacaaagacccacgctactttttctccttgaagacagaccgagcccggcaagtgaccaccatcaatgcccaccgcagctacctcccaggccagtgggtatacctagctgccacctatgatgggcagttcatgaagctctatgtgaatggtgcccaggtggccacctctggggaacaagtgggtggcatattcagcccactgacccagaagtgcaaagtgctcatgttagggggcagtgccctgaatcacaactaccggggctacatcgagcacttcagtctgtggaaggtggccaggactcagcgggagatactgtctgacatggaaacccatggcgcccacactgctctacctcagctcctcctccaggagaactgggacaatgtgaagcatgcctggtcccccatgaaggatggcagcagccccaaagtggaattcagcaatgcccacggctttctgctggacacgagtctggagcctcctctgtgcggacagacattgtgtgacaacacagaggtcattgccagctacaatcagctctcaagtttccgccagcccaaggtggtgcgctaccgcgtggtcaacctctatgaagatgatcataagaacccgacggtgacgcgcgagcaggtggacttccagcaccatcagctggctgaggccttcaagcaatacaacatctcctgggagctggacgtgctggaggtgagcaactcctcccttcgccgccgcctcatcctggccaactgtgacatcagcaagattggggatgagaactgtgaccccgagtgcaaccacacgctgacgggccacgacggcggggattgccgccacctgcgccaccctgccttcgtgaagaagcagcacaacggggtgtgtgacatggactgcaactatgaacggttcaactttgatggtggagagtgctgtgaccctgaaatcaccaatgtcactcagacttgctttgaccccgactctccacacagagcctacttggatgttaatgagctgaagaacattcttaaattggatggatcaacacatctcaatattttctttgcaaaatcctcagaggaggagttggcaggagtagcaacttggccatgggacaaggaggccctgatgcacttaggtggcattgtcttgaacccatctttctatggcatgcctgggcacacccacaccatgatccatgagattggtcacagcctgggcctctatcacgtcttccgaggcatctcagaaatccagtcctgcagtgacccctgcatggagacagagccctccttcgagactggagacctctgcaatgataccaacccagcccctaaacacaagtcctgtggtgacccagggccaggaaatgacacctgtggctttcatagcttcttcaacactccttacaacaacttcatgagctatgcagatgacgactgtacggactccttcacgcccaatcaagtcgccagaatgcactgttacctggacctggtctaccagggctggcagccctccaggaaaccagcgcctgttgccctcgccccccaagttctgggccacacaacggactctgtgacactggagtggttcccacctatagatggccatttctttgaaagagaattgggatcagcatgtcatctttgcctggaagggagaatcctggtgcagtatgcttccaacgcttcctccccaatgccctgcagcccatcaggacactggagccctcgtgaagcagaaggtcatcctgatgttgaacagccctgtaagtccagtgtccgcacctggagcccaaattcagctgtcaacccacacacggttcctccagcctgccctgagcctcaaggctgctacctcgagctggagttcctctaccccttggtccctgagtctctgaccatttgggtgacctttgtctccactgactgggactctagtggagctgtcaatgacatcaaactgttggctgtcagtgggaagaacatctccctgggtcctcagaatgtcttctgtgatgtcccactgaccatcagactctgggacgtgggcgaggaggtgtatggcatccaaatctacacgctggatgagcacctggagatcgatgctgccatgttgacctccactgcagacaccccactctgtctacagtgtaagcccctgaagtataaggtggtccgggaccctcctctccagatggatgtggcctccatcctacatctcaataggaaattcgtagacatggatctaaatcttggcagtgtgtaccagtattgggtcataactatttcaggaactgaagagagtgagccatcacctgctgtcacatacatccatggaagtgggtactgtggcgatggcattatacaaaaagaccaaggtgaacaatgcgacgacatgaataagatcaatggtgatggctgctcccttttctgccgacaagaagtctccttcaattgtattgatgaacccagccggtgctatttccatgatggtgatggggtatgtgaggagtttgaacaaaaaaccagcattaaggactgtggtgtctacacgccccagggattcctggatcagtgggcatccaatgcttcagtatctcatcaagaccagcaatgcccaggctgggtcatcatcggacagccagcagcatcccaggtgtgtcgaaccaaggtgatagatctcagtgaaggcatttcccagcatgcctggtacccttgcaccatcagctacccatattcccagctggctcagaccactttttggctccgggcgtatttttctcaaccaatggttgccgcagctgtcattgtccacctggtgacggatgggacatattatggggaccaaaagcaggagaccatcagcgtgcagctgcttgataccaaagatcagagccacgatctaggcctccatgtcctgagctgcaggaacaatcccctgattatccctgtggtccatgacctcagccagcccttctaccacagccaggcggtacgtgtgagcttcagttcgcccctggtcgccatctcgggggtggccctccgttccttcgacaactttgaccccgtcaccctgagcagctgccagagaggggagacctacagccctgccgagcagagctgcgtgcacttcgcatgtgagaaaactgactgtccagagctggctgtggagaatgcttatctcaattgctccagcagcgaccgctaccacggtgcccagtgtactgtgagctgccggacaggctacgtgctccagatacggcgggatgatgagctgatcaagagccagacgggacccagcgtcacagtgacctgtacagagggcaagtggaataagcaggtggcctgtgagccagtcgactgcagcatcccagatcaccatcaagtctatgctgcctccttctcctgccctgagggcaccacctttggcagtcaatgttccttccagtgccgtcaccctgcacaattgaaaggcaacaacagcctcctgacctgcatggaggatgggctgtggtccttcccagaggccctgtgtgagctcatgtgcctcgctccaccccctgtgcccaatgcagacctccagaccgcccggtgccgagagaataagcacaaggtgggctccttctgcaaatacaaatgcaagcctggataccatgtgcctggatcctctcggaagtcaaagaaacgggccttcaagactcagtgtacccaggatggcagctggcaggagggagcttgtgttcctgtgacctgtgacccacctccaccaaaattccatgggctctaccagtgtactaatggcttccagttcaacagtgagtgtaggatcaagtgtgaagacagtgatgcctcccagggacttgggagcaatgtcattcattgccggaaagatggcacctggaacggctccttccatgtctgccaggagatgcaaggccagtgctcggttccaaacgagctcaacagcaacctcaaactgcagtgccctgatggctatgccatagggtcggagtgtgccacctcgtgcctggaccacaacagcgagtccatcatcctgccaatgaacgtgaccgtgcgtgacatcccccactggctgaaccccacacgggtagagagagttgtctgcactgctggtctcaagtggtatcctcaccctgctctgattcactgtgtcaaaggctgtgagcccttcatgggagacaattattgtgatgccatcaacaaccgagccttttgcaactatgacggtggggattgctgcacctccacagtgaagaccaaaaaggtcaccccattccctatgtcctgtgacctacaaggtgactgtgcttgtcgggacccccaggcccaagaacacagccggaaagacctccggggatacagccatggctaaggaaggacaagaagttgtcaaagaattcccaacgccaggacccacatccctttggtattgatttcacagtcagctgctcaacggaatggcctctccacaccagggatccttagcacccaaccggtctgcctttaattttacccaggaaggactcacattggggcgaatgaaccaagtttcgccatgctggatgatgaaatggattcccatcccaaagtctgagatggattgcatatacagtgtgcagtcccagagcctcctaaaattctagccatttgtcacacaaccacagcaagaaacgtgttctatatctagagtgtgcccatctgtgtttagtacacatgcatgcatacacacccatacaaacatctgtgtgagggcagttctggagatgagcagagagagaccggaataaactcaatcttttctttcccaagctcctagccaacactatccttgggagaaagaaatttgcagaaactgctaagaccaagtgtggagatgtcaagctagttcacactctgaggctcagaatatgtaggacatgcacaattgtgcagtcctttgggattggaagtgaaacagtctgtgatcccctaccttctagggaactaggacctaggaagaggtaaagattatcaggtatgcaaagcgccccaattcttctgctgccatgggggattttaccccaactccagggttcgaggccaatctgagaatggcttaggattgcaatgtcaaggtattatatcagccccttgcttgaggcttgaggtcataatatccctctaggacttacctgttcccccagatcttgccttgggaccacatttgctgctacttttcctgctgctctatcctatacattgaataatccaagatggtagaactaggttaggaaaaattccacacaaccaaacagtctgccttaaaagtgacccacatttttccatagctcctcactttttagcccttctgcaagagaaaaaccctcatgggtccacatggtgagaagttaagtttcctgtaagtgggcctctcaccctggaaaggagttgagggacatcagatgctggaaccctcactgaaagtccagaatgtctaagccagtgttagattttgtaaacaagtggaacagtgttaaatttctatgatgttggagccatccagagactactggaattgtcgagacttttggattattatccttatccttatcctaatcttcctagcccttcaggctagagtaggcttcgatcctgagaaccttgctgttgctctgaggagatataattctgggagaaagaatcttttataagaacagtacagattgttctcaagagggccatcagaaggaagccaaagagttcacagcctcagcaccaacaactcaacatggtcatcatgttttctatatggtttttccagctagcagtactcccttccatacctgtgactgggcagtgcttttctctctcccatgtctagcctccaaaagttaagtgaaaattagtcaactgcacgtggaagcccccaccactttggggatctctttatttcttttcagccagggacctgtccactccctttgaattaatatgggaagaaattaatacaggatgaactggagagaagggttgagtgtggcatactttctgaaacctggagctgggaattgcggagaagggaaggtctagactagttacatcacatagggattactgtaaatcaagtcatctcaagtctagtgaagacagccaacagaaacaaaacctagcatagggatagaaaataccatgcacgtgtgcagccccacctaattcctgcatccaaggcaggtgttgttaatctatcatagcacttaaaaaaaaaaaaaaagagaccaaaaataactttaggaaccaccatattatatcactcccaatagcactgacctggtgatcaaaaacacttgagaagacatctattggccatctctggccaattacactaagaaacatatcaaggtgcttttggcacaggtgcccacaaatacggatgcagtgctgagatagtttatgagacttgtaccatttcacaaactctgaaattgggttccatattggcaaggctgccacagttgttaagaataatcctctatgtttcttcctcacaaaaccatatctcatttatatccagaccattacttcactataattacaaggacaaattattagcaagaaataagaatagtattagaagaattgatcctattttgaacccctctccagtatcttcacactcttgtcaactctccaggcctctctcttgccctgagttatcagcctgtgtggtgttaactaccttagaaggtacaagctaagaaatgtaacagtatcaaccctcccagttgcttaattatacccataggtaatacaaaaagctctgaagacccaaagatgacattactaatgatgtgatttcaggagccacagaagaaccttaccagcttccctcaaatcagtccttatcctctttctatcttcactcccatcatcatctattttcacactatccagctaagcaaagattcctggaggctgacttgtatcttcagactcacagagtgaattcagctcttctgaatcaagacccacccagtctctttcattcagacctgttgctaacaaatttatatttgccaaggatattaggcaaaagaggctacttgattggtggccaacctcgtgcccacatggaaggtatctttaatagggtcttttcaaaccttagtggaggagggtcagctcaatttgggcaatgcatttgttcccagtttcattttcttcctgggaattaactcgtcatttcattccttcagtcatcttctgtgtaggtgaccggagcactgagaggcagctctgatgcactattgtgtgtcagcagctcaaaggccctaaaacactgaaggttctgcatctgaagtattagattgttagcagcaaaatatgaaagatgaggtggacagtcctctaagccctatttagggaagcttttccaagccacaatcttaactacctacccaaaggatttgcattacccccagattctgtgccaacaaccttttaaggaaatacagtccttgggaaatgagttttgatggtgaattggggtgttaaggaagggaaagattgtcatagatggtagggctttgaaaatgcagggtatcagctgccactcctggcttcaacacattgagtcactgcctagacggttctcttggtcttattcccatcctggccaatgcttaaatactatttgttgaaaataattctttgagacagatttcagctacctcccttccaggttcgatttaacttggttgtaattgtcaatttgttgttataggtcttacctgtgtgaaagaaagaaaaagaaagaaagaaagaaagagaaaggaaattataaggtcaagttaacagttttgaggttttgtgtttttttctggaactacttcaagtgagaaaataaaaaaaaatggtgacaaagctgtacagatagagataatagaagacaaagagattaaaaggaaataaaaatgcatgattaaaaactaagaataaaaaacctatttttatgtttcctaaaggaaattgtttattctacagactcagtaggtagacacaaacataaagatttccctagaagacatagagtgggatttgataacactgtctgttattttctgtacattgtggtaggtccaggaaatatgacattttcccccttgatgtgttattgttgttgttgggtggggtgggcattttgtttatttgtttggtggcaatcagtggtagtagggagtgggagggcttatattggtttttccagctattaaggggacatattgtgtcgttgtgcttttcacgttataaaatgtttatatttaccagtacagcactgggctttataaagactgcactcagaaccacactgcacagtccagttttttaaaaagctgctacatgacagacaggtaatcccactgagtgagttttgagaaacaaatcaaacgaagtaaacaagaaacataaaaaccaaatagcaaatgaataaaagcctgttcttgtaacttattcaacttttgccaaattcctaccaatcacttgctttttaaaagaaatgtataatagccaaaagagaaattatgtccctgttgtacagaagttagaatttttgactccaggcagcagtttgctcagtgatcttgaacaagttatccaattgcctctacatttgcatcagtttctctagctgcaaaatggggataatactatatacctacctcacagtgggagggcaggagattttgaggccctgaggttttaggtgggctgtgagggccaacgcttgacacaaagtccatgggttattattcaagaatgcacaggcccatcggccttttagaaagacaagacagggagtgcttgtttgatatttcaaggaataaagccggagctcctgaattgtagtccaccttaaaagagagacctgtattggagaatattttatttttttggcaaatttgatcttaccctttaccagttctataatttggttaaaagctgattacgtcctacaatgtcaaagtcagctaactgtcgtctacttaagacttctggtcatttccaacttatagaggaagggagtctctaaaatctcttcttcagaaggcacctcacttctcagacttaaaattccacatcaagtgttccattaaaagaagataaggcattctgagtgcaaacaaatgggggcttcttaaactacacaccagcagtcagtgaggaaaactttgaacaattattgagttgctttcttgggtctctataatcaataacctgtctgcagatatctatctatataaagatattatatataaatataaatttacatatatatgcacatgtatatatagttgtacatatatgtgtgtatatatatacttaaatgtaatatttacaaaataaaactgtgatctcgtctagagaaaatgtattcatattacaaactgctcttccatatttatgtaccatattatacctttttattattgttataattattatgggtatttctaattaatatgatgttgaaacctgtttggcaccttctggaagctaccaaaaaaatgacactccattgaagtgcttaaaagctgttctcataagaattctactggcctattgtaaaaaagaaaaaaaaaagaaaaagaagaaagacacaaagaaaataatctaaacaccaaaaactaaacacaattccaatcctttttctgtacctcacgcgcataaatttggctgctcctatttttttttctgtttatgtgtttttatggatctaagttaaatcttttggcaatatataaaaatgtaaatagtaaactttatttattaagaatgtcatcttttttaatttatatttacacaattgttcatctaatttattttttctatacagttttaaatactcagacatattttgctgttcatgatatttttatcctgttctcatggatttgttttcccatactgttttctctgatctcaattacaggttggatctcacaaataataatgtcagagacagaaatattttgccactgttgattactatactttaaagttctatattatgaaaatatataatagcttgtacgct

SEQ ID NO: 455075 - DNA, 12416 bp, Homo sapiens
ctgtccaggttgagtgagggtgtccaggatgaggaatgagggtgtccagggtgaggagtgagggagtccagggtgaggagtgagggagtccagggtgaggattgagggtgtcagggtgagtgagagtgtccagggtgaggagtgagggtatccagggtgagtgagggtgtccagggtgaggagtgagggtatccagggtgagtgagggtgtccagggtgagtgagggtgtcagggtgagtgaacgtgtccagggtgtgtgagggtgtccagggtgcagagtgaggtgtccagggtgaggagtgacggtgtctggggtgagtgagggtgtccagggtgaggagtgagggtgtcagggtgagtgagggtgtccagggttgagtgcacatgtgtggtgaggaggtgtttgcagtgcttcaggcgcagcaactctttcatctagtttaaaattgtgctctgaggttagattttagtagaacaaaggccttacaaagaatgtgaaaacattgtgcttccctgcttacaggcaattaaaaaggagaatcaagctgagggtgcctggtgtggggtggggtggagaagaccacagagactattgtgtgttttattcaacagtgtcctgggctgctttctccagaaatgtccctgacacatggatgtaagtgtggctagtttactgggagatgatcccagtgatgcaggacacgcgagccctaagattgaagcatagcccgggagggttcttagctttgcccaggaaggaactcaaggcaagccagtggtgttagcaacttttattgaagcggccggctgtgcacagcagcagcagaggcgctgctccttgcaaagcagggctgccctacaggctgtgcgcccacagtagcagctcagaggcagttctgcagtggtatttgtatccacttttaattatatgcaaatgaaggggcagtttatgcagacatttccagggtgagggtggtaacttctgggtgctgccagagccatcgtgaactgacttgacacaggtcggtgtgtcctatggaaactagcatctgccctggacctattttagctagtgctcagtttggtctgagtgcctgagccccacttccagagttgagtcccacctcctacctcattcccccttcagagattagatactcctccttaatcttaagggggcctcgagaagggcggagtcctgcttttccgtaactacttcctgctgagtttatggcacgtaggccctgcctggcactggaggacgtaaaaatttctggatacctgatctaaggagcccagaggcaggacgatttcattctccgtgtcagtggacaggatgggctggaagccttgtgccagcattgtctctggaactgtggtaatctagaatacacaaactttactaagaggttaaagaagcaaggaccaaacatttgtaacaagacagttgtcaaaggtcctagaagaggtgaaaaacaggtgagacttgggaaggcacttttgatggttgaccagatatagttggggcagtgccctggttatatctatgtaactaggtagcttgctcatagatcttttgaatgttaacctcaacctgtccagagttaatatatgtgcagcaggttttattaataactgcacaagaccccaccttgttcagctagtaaataatccaatgctagtctgttatcaacaactacattttccagagtctggggaactcttgaattctctttaatgcctgatctccgttggtggctaaggattctaggatttgagccaagttctttagcgttaactcatggtaggcaaagcaccccagggtgctgctagtcctattgccaccctgattcctgccagaaataagtaagcaagcaacaggacaatgaactccatgttgcccagatcccactgagagtgaacgtgcagtcatgcccataaccgacacacatcccagtccatgtgggtcagtccttcatcaccctccctgccttctgacaacagcagactccagccattccattatcattcacagcccaacccaagcagtcagtggctgaagaaagagaatcaggtatactctatgtccacatataccttcctgccacagggcttcaccaactggcaggattccccccagcccccaactcctcctcatcccttgttcccaggcgggtcaattggagagtgagcagagatagatggcttgcagaagggtatgcaagatggggagactccaccagaccttagggagagaatggcatctttctccaccttttaagagagacagagcctccctgaggtctcaaagatttttcagggcaacacaagaaacgtttccaagcctcagctgcaggtgttcacctttccactctggggtgtgaggagatggtaagctgaggacaagtgtgttccagatgcaggccaactctgttctccaacagtttgaaccaacttggccttggggttccaagggtaggatgaagggtgtcacggcaggacggggcctggcgtgaggcaacagcaagcagagcgaggacacaacagtggcagcagtgtacagacacaggacgtcagcttcaaacgatgcaacagcagggatatcttgggcacggctctgattcgagccactcccaactctcttgcctccaggatggaggcactgtacatgcaacagtccagagaaagattctagccagtccaagcccaggcacatccagagaaggtgggagctcttcgggttgactccaccgaggaaaacaggcatttgggtatttcagattcccgctccacaataaggcaacttttaaaaaaatattatttccaaaaacaaaacaaaaattccagggggagggaattcagcggatcagtcttaagaggagcttttttttggagcgagaaatcatataaaataaaatgaaataaaacaaggaggaaggcaaccagctgttaggggaaaaataaggcagataaaggagcggggagagaaattaattgccaaccaggaggagttgggctgtatttttcaaaggtggggagagtggagcacacaccttgaggaggaaagcgagaaagaaaagaaaaaagcaagtgaaggggggctcgcccaagaagggtgaagaagcgaagaaagtcgaggcgccgaggctcccaaagctggcagctccgggtggcggtgcaggggcgaaggggggggcggggggaacgtcggacatgcggctctggagttgggtgctgcacctggggctgctgagcgccgcgctgggctgcgggctggccgagcgtccccgccgggcccggagagacccgcgggccggccgacccccgcgccccgccgccggcccggccacctgcgccacccgcggcccgcggccgccgcgcctcgccgccgccgccgccgccgccgggcggtgcctgggaagccgtgcgcgtcccccggcggcggcagcagcgggaggcgaggggcgccaccgaggagccgagcccgccgagccgggcgctctatttcagcgggcgaggcgagcagctgcgcctccgggccgacctcgagctgccccgggacgcgttcacgctgcaagtgtggctgcgagcggaggggggccagaggtctccggcagtgatcacagggctgtatgacaaatgttcttatatctcacgtgaccgaggatgggtcgtgggcattcacaccatcagtgaccaagacaacaaagacccacgctactttttctccttgaagacagaccgagcccggcaagtgaccaccatcaatgcccaccgcagctacctcccaggccagtgggtatacctagctgccacctatgatgggcagttcatgaagctctatgtgaatggtgcccaggtggccacctctggggaacaagtgggtggcatattcagcccactgacccagaagtgcaaagtgctcatgttagggggcagtgccctgaatcacaactaccggggctacatcgagcacttcagtctgtggaaggtggccaggactcagcgggagatactgtctgacatggaaacccatggcgcccacactgctctacctcagctcctcctccaggagaactgggacaatgtgaagcatgcctggtcccccatgaaggatggcagcagccccaaagtggaattcagcaatgcccacggctttctgctggacacgagtctggagcctcctctgtgcggacagacattgtgtgacaacacagaggtcattgccagctacaatcagctctcaagtttccgccagcccaaggtggtgcgctaccgcgtggtcaacctctatgaagatgatcataagaacccgacggtgacgcgcgagcaggtggacttccagcaccatcagctggctgaggccttcaagcaatacaacatctcctgggagctggacgtgctggaggtgagcaactcctcccttcgccgccgcctcatcctggccaactgtgacatcagcaagattggggatgagaactgtgaccccgagtgcaaccacacgctgacgggccacgacggcggggattgccgccacctgcgccaccctgccttcgtgaagaagcagcacaacggggtgtgtgacatggactgcaactatgaacggttcaactttgatggtggagagtgctgtgaccctgaaatcaccaatgtcactcagacttgctttgaccccgactctccacacagagcctacttggatgttaatgagctgaagaacattcttaaattggatggatcaacacatctcaatattttctttgcaaaatcctcagaggaggagttggcaggagtagcaacttggccatgggacaaggaggccctgatgcacttaggtggcattgtcttgaacccatctttctatggcatgcctgggcacacccacaccatgatccatgagattggtcacagcctgggcctctatcacgtcttccgaggcatctcagaaatccagtcctgcagtgacccctgcatggagacagagccctccttcgagactggagacctctgcaatgataccaacccagcccctaaacacaagtcctgtggtgacccagggccaggaaatgacacctgtggctttcatagcttcttcaacactccttacaacaacttcatgagctatgcagatgacgactgtacggactccttcacgcccaatcaagtcgccagaatgcactgttacctggacctggtctaccagggctggcagccctccaggaaaccagcgcctgttgccctcgccccccaagttctgggccacacaacggactctgtgacactggagtggttcccacctatagatggccatttctttgaaagagaattgggatcagcatgtcatctttgcctggaagggagaatcctggtgcagtatgcttccaacgcttcctccccaatgccctgcagcccatcaggacactggagccctcgtgaagcagaaggtcatcctgatgttgaacagccctgtaagtccagtgtccgcacctggagcccaaattcagctgtcaacccacacacggttcctccagcctgccctgagcctcaaggctgctacctcgagctggagttcctctaccccttggtccctgagtctctgaccatttgggtgacctttgtctccactgactgggactctagtggagctgtcaatgacatcaaactgttggctgtcagtgggaagaacatctccctgggtcctcagaatgtcttctgtgatgtcccactgaccatcagactctgggacgtgggcgaggaggtgtatggcatccaaatctacacgctggatgagcacctggagatcgatgctgccatgttgacctccactgcagacaccccactctgtctacagtgtaagcccctgaagtataaggtggtccgggaccctcctctccagatggatgtggcctccatcctacatctcaataggaaattcgtagacatggatctaaatcttggcagtgtgtaccagtattgggtcataactatttcaggaactgaagagagtgagccatcacctgctgtcacatacatccatggaagtgggtactgtggcgatggcattatacaaaaagaccaaggtgaacaatgcgacgacatgaataagatcaatggtgatggctgctcccttttctgccgacaagaagtctccttcaattgtattgatgaacccagccggtgctatttccatgatggtgatggggtatgtgaggagtttgaacaaaaaaccagcattaaggactgtggtgtctacacgccccagggattcctggatcagtgggcatccaatgcttcagtatctcatcaagaccagcaatgcccaggctgggtcatcatcggacagccagcagcatcccaggtgtgtcgaaccaaggtgatagatctcagtgaaggcatttcccagcatgcctggtacccttgcaccatcagctacccatattcccagctggctcagaccactttttggctccgggcgtatttttctcaaccaatggttgccgcagctgtcattgtccacctggtgacggatgggacatattatggggaccaaaagcaggagaccatcagcgtgcagctgcttgataccaaagatcagagccacgatctaggcctccatgtcctgagctgcaggaacaatcccctgattatccctgtggtccatgacctcagccagcccttctaccacagccaggcggtacgtgtgagcttcagttcgcccctggtcgccatctcgggggtggccctccgttccttcgacaactttgaccccgtcaccctgagcagctgccagagaggggagacctacagccctgccgagcagagctgcgtgcacttcgcatgtgagaaaactgactgtccagagctggctgtggagaatgcttatctcaattgctccagcagcgaccgctaccacggtgcccagtgtactgtgagctgccggacaggctacgtgctccagatacggcgggatgatgagctgatcaagagccagacgggacccagcgtcacagtgacctgtacagagggcaagtggaataagcaggtggcctgtgagccagtcgactgcagcatcccagatcaccatcaagtctatgctgcctccttctcctgccctgagggcaccacctttggcagtcaatgttccttccagtgccgtcaccctgcacaattgaaaggcaacaacagcctcctgacctgcatggaggatgggctgtggtccttcccagaggccctgtgtgagctcatgtgcctcgctccaccccctgtgcccaatgcagacctccagaccgcccggtgccgagagaataagcacaaggtgggctccttctgcaaatacaaatgcaagcctggataccatgtgcctggatcctctcggaagtcaaagaaacgggccttcaagactcagtgtacccaggatggcagctggcaggagggagcttgtgttcctgtgacctgtgacccacctccaccaaaattccatgggctctaccagtgtactaatggcttccagttcaacagtgagtgtaggatcaagtgtgaagacagtgatgcctcccagggacttgggagcaatgtcattcattgccggaaagatggcacctggaacggctccttccatgtctgccaggagatgcaaggccagtgctcggttccaaacgagctcaacagcaacctcaaactgcagtgccctgatggctatgccatagggtcggagtgtgccacctcgtgcctggaccacaacagcgagtccatcatcctgccaatgaacgtgaccgtgcgtgacatcccccactggctgaaccccacacgggtagagagagttgtctgcactgctggtctcaagtggtatcctcaccctgctctgattcactgtgtcaaaggctgtgagcccttcatgggagacaattattgtgatgccatcaacaaccgagccttttgcaactatgacggtggggattgctgcacctccacagtgaagaccaaaaaggtcaccccattccctatgtcctgtgacctacaaggtgactgtgcttgtcgggacccccaggcccaagaacacagccggaaagacctccggggatacagccatggctaaggaaggacaagaagttgtcaaagaattcccaacgccaggacccacatccctttggtattgatttcacagtcagctgctcaacggaatggcctctccacaccagggatccttagcacccaaccggtctgcctttaattttacccaggaaggactcacattggggcgaatgaaccaagtttcgccatgctggatgatgaaatggattcccatcccaaagtctgagatggattgcatatacagtgtgcagtcccagagcctcctaaaattctagccatttgtcacacaaccacagcaagaaacgtgttctatatctagagtgtgcccatctgtgtttagtacacatgcatgcatacacacccatacaaacatctgtgtgagggcagttctggagatgagcagagagagaccggaataaactcaatcttttctttcccaagctcctagccaacactatccttgggagaaagaaatttgcagaaactgctaagaccaagtgtggagatgtcaagctagttcacactctgaggctcagaatatgtaggacatgcacaattgtgcagtcctttgggattggaagtgaaacagtctgtgatcccctaccttctagggaactaggacctaggaagaggtaaagattatcaggtatgcaaagcgccccaattcttctgctgccatgggggattttaccccaactccagggttcgaggccaatctgagaatggcttaggattgcaatgtcaaggtattatatcagccccttgcttgaggcttgaggtcataatatccctctaggacttacctgttcccccagatcttgccttgggaccacatttgctgctacttttcctgctgctctatcctatacattgaataatccaagatggtagaactaggttaggaaaaattccacacaaccaaacagtctgccttaaaagtgacccacatttttccatagctcctcactttttagcccttctgcaagagaaaaaccctcatgggtccacatggtgagaagttaagtttcctgtaagtgggcctctcaccctggaaaggagttgagggacatcagatgctggaaccctcactgaaagtccagaatgtctaagccagtgttagattttgtaaacaagtggaacagtgttaaatttctatgatgttggagccatccagagactactggaattgtcgagacttttggattattatccttatccttatcctaatcttcctagcccttcaggctagagtaggcttcgatcctgagaaccttgctgttgctctgaggagatataattctgggagaaagaatcttttataagaacagtacagattgttctcaagagggccatcagaaggaagccaaagagttcacagcctcagcaccaacaactcaacatggtcatcatgttttctatatggtttttccagctagcagtactcccttccatacctgtgactgggcagtgcttttctctctcccatgtctagcctccaaaagttaagtgaaaattagtcaactgcacgtggaagcccccaccactttggggatctctttatttcttttcagccagggacctgtccactccctttgaattaatatgggaagaaattaatacaggatgaactggagagaagggttgagtgtggcatactttctgaaacctggagctgggaattgcggagaagggaaggtctagactagttacatcacatagggattactgtaaatcaagtcatctcaagtctagtgaagacagccaacagaaacaaaacctagcatagggatagaaaataccatgcacgtgtgcagccccacctaattcctgcatccaaggcaggtgttgttaatctatcatagcacttaaaaaaaaaaaaaaagagaccaaaaataactttaggaaccaccatattatatcactcccaatagcactgacctggtgatcaaaaacacttgagaagacatctattggccatctctggccaattacactaagaaacatatcaaggtgcttttggcacaggtgcccacaaatacggatgcagtgctgagatagtttatgagacttgtaccatttcacaaactctgaaattgggttccatattggcaaggctgccacagttgttaagaataatcctctatgtttcttcctcacaaaaccatatctcatttatatccagaccattacttcactataattacaaggacaaattattagcaagaaataagaatagtattagaagaattgatcctattttgaacccctctccagtatcttcacactcttgtcaactctccaggcctctctcttgccctgagttatcagcctgtgtggtgttaactaccttagaaggtacaagctaagaaatgtaacagtatcaaccctcccagttgcttaattatacccataggtaatacaaaaagctctgaagacccaaagatgacattactaatgatgtgatttcaggagccacagaagaaccttaccagcttccctcaaatcagtccttatcctctttctatcttcactcccatcatcatctattttcacactatccagctaagcaaagattcctggaggctgacttgtatcttcagactcacagagtgaattcagctcttctgaatcaagacccacccagtctctttcattcagacctgttgctaacaaatttatatttgccaaggatattaggcaaaagaggctacttgattggtggccaacctcgtgcccacatggaaggtatctttaatagggtcttttcaaaccttagtggaggagggtcagctcaatttgggcaatgcatttgttcccagtttcattttcttcctgggaattaactcgtcatttcattccttcagtcatcttctgtgtaggtgaccggagcactgagaggcagctctgatgcactattgtgtgtcagcagctcaaaggccctaaaacactgaaggttctgcatctgaagtattagattgttagcagcaaaatatgaaagatgaggtggacagtcctctaagccctatttagggaagcttttccaagccacaatcttaactacctacccaaaggatttgcattacccccagattctgtgccaacaaccttttaaggaaatacagtccttgggaaatgagttttgatggtgaattggggtgttaaggaagggaaagattgtcatagatggtagggctttgaaaatgcagggtatcagctgccactcctggcttcaacacattgagtcactgcctagacggttctcttggtcttattcccatcctggccaatgcttaaatactatttgttgaaaataattctttgagacagatttcagctacctcccttccaggttcgatttaacttggttgtaattgtcaatttgttgttataggtcttacctgtgtgaaagaaagaaaaagaaagaaagaaagaaagagaaaggaaattataaggtcaagttaacagttttgaggttttgtgtttttttctggaactacttcaagtgagaaaataaaaaaaaatggtgacaaagctgtacagatagagataatagaagacaaagagattaaaaggaaataaaaatgcatgattaaaaactaagaataaaaaacctatttttatgtttcctaaaggaaattgtttattctacagactcagtaggtagacacaaacataaagatttccctagaagacatagagtgggatttgataacactgtctgttattttctgtacattgtggtaggtccaggaaatatgacattttcccccttgatgtgttattgttgttgttgggtggggtgggcattttgtttatttgtttggtggcaatcagtggtagtagggagtgggagggcttatattggtttttccagctattaaggggacatattgtgtcgttgtgcttttcacgttataaaatgtttatatttaccagtacagcactgggctttataaagactgcactcagaaccacactgcacagtccagttttttaaaaagctgctacatgacagacaggtaatcccactgagtgagttttgagaaacaaatcaaacgaagtaaacaagaaacataaaaaccaaatagcaaatgaataaaagcctgttcttgtaacttattcaacttttgcctatgtggatggggtatgtcgatatgtttatggtacatctctaggaggggaagggccatatctgacttcttggaaactcaggtacatggtagccatgtaataatgaatgggttaaggatgtaattacttccctggggccctagaaaccccattttggcacattcaatgtggccaatcaaggggtaccgagctc

SEQ ID NO: 455076 - DNA, 11720 bp, Homo sapiens
ctgtccaggttgagtgagggtgtccaggatgaggaatgagggtgtccagggtgaggagtgagggagtccagggtgaggagtgagggagtccagggtgaggattgagggtgtcagggtgagtgagagtgtccagggtgaggagtgagggtatccagggtgagtgagggtgtccagggtgaggagtgagggtatccagggtgagtgagggtgtccagggtgagtgagggtgtcagggtgagtgaacgtgtccagggtgtgtgagggtgtccagggtgcagagtgaggtgtccagggtgaggagtgacggtgtctggggtgagtgagggtgtccagggtgaggagtgagggtgtcagggtgagtgagggtgtccagggttgagtgcacatgtgtggtgaggaggtgtttgcagtgcttcaggcgcagcaactctttcatctagtttaaaattgtgctctgaggttagattttagtagaacaaaggccttacaaagaatgtgaaaacattgtgcttccctgcttacaggcaattaaaaaggagaatcaagctgagggtgcctggtgtggggtggggtggagaagaccacagagactattgtgtgttttattcaacagtgtcctgggctgctttctccagaaatgtccctgacacatggatgtaagtgtggctagtttactgggagatgatcccagtgatgcaggacacgcgagccctaagattgaagcatagcccgggagggttcttagctttgcccaggaaggaactcaaggcaagccagtggtgttagcaacttttattgaagcggccggctgtgcacagcagcagcagaggcgctgctccttgcaaagcagggctgccctacaggctgtgcgcccacagtagcagctcagaggcagttctgcagtggtatttgtatccacttttaattatatgcaaatgaaggggcagtttatgcagacatttccagggtgagggtggtaacttctgggtgctgccagagccatcgtgaactgacttgacacaggtcggtgtgtcctatggaaactagcatctgccctggacctattttagctagtgctcagtttggtctgagtgcctgagccccacttccagagttgagtcccacctcctacctcattcccccttcagagattagatactcctccttaatcttaagggggcctcgagaagggcggagtcctgcttttccgtaactacttcctgctgagtttatggcacgtaggccctgcctggcactggaggacgtaaaaatttctggatacctgatctaaggagcccagaggcaggacgatttcattctccgtgtcagtggacaggatgggctggaagccttgtgccagcattgtctctggaactgtggtaatctagaatacacaaactttactaagaggttaaagaagcaaggaccaaacatttgtaacaagacagttgtcaaaggtcctagaagaggtgaaaaacaggtgagacttgggaaggcacttttgatggttgaccagatatagttggggcagtgccctggttatatctatgtaactaggtagcttgctcatagatcttttgaatgttaacctcaacctgtccagagttaatatatgtgcagcaggttttattaataactgcacaagaccccaccttgttcagctagtaaataatccaatgctagtctgttatcaacaactacattttccagagtctggggaactcttgaattctctttaatgcctgatctccgttggtggctaaggattctaggatttgagccaagttctttagcgttaactcatggtaggcaaagcaccccagggtgctgctagtcctattgccaccctgattcctgccagaaataagtaagcaagcaacaggacaatgaactccatgttgcccagatcccactgagagtgaacgtgcagtcatgcccataaccgacacacatcccagtccatgtgggtcagtccttcatcaccctccctgccttctgacaacagcagactccagccattccattatcattcacagcccaacccaagcagtcagtggctgaagaaagagaatcaggtatactctatgtccacatataccttcctgccacagggcttcaccaactggcaggattccccccagcccccaactcctcctcatcccttgttcccaggcgggtcaattggagagtgagcagagatagatggcttgcagaagggtatgcaagatggggagactccaccagaccttagggagagaatggcatctttctccaccttttaagagagacagagcctccctgaggtctcaaagatttttcagggcaacacaagaaacgtttccaagcctcagctgcaggtgttcacctttccactctggggtgtgaggagatggtaagctgaggacaagtgtgttccagatgcaggccaactctgttctccaacagtttgaaccaacttggccttggggttccaagggtaggatgaagggtgtcacggcaggacggggcctggcgtgaggcaacagcaagcagagcgaggacacaacagtggcagcagtgtacagacacaggacgtcagcttcaaacgatgcaacagcagggatatcttgggcacggctctgattcgagccactcccaactctcttgcctccaggatggaggcactgtacatgcaacagtccagagaaagattctagccagtccaagcccaggcacatccagagaaggtgggagctcttcgggttgactccaccgaggaaaacaggcatttgggtatttcagattcccgctccacaataaggcaacttttaaaaaaatattatttccaaaaacaaaacaaaaattccagggggagggaattcagcggatcagtcttaagaggagcttttttttggagcgagaaatcatataaaataaaatgaaataaaacaaggaggaaggcaaccagctgttaggggaaaaataaggcagataaaggagcggggagagaaattaattgccaaccaggaggagttgggctgtatttttcaaaggtggggagagtggagcacacaccttgaggaggaaagcgagaaagaaaagaaaaaagcaagtgaaggggggctcgcccaagaagggtgaagaagcgaagaaagtcgaggcgccgaggctcccaaagctggcagctccgggtggcggtgcaggggcgaaggggggggcggggggaacgtcggacatgcggctctggagttgggtgctgcacctggggctgctgagcgccgcgctgggctgcgggctggccgagcgtccccgccgggcccggagagacccgcgggccggccgacccccgcgccccgccgccggcccggccacctgcgccacccgcggcccgcggccgccgcgcctcgccgccgccgccgccgccgccgggcggtgcctgggaagccgtgcgcgtcccccggcggcggcagcagcgggaggcgaggggcgccaccgaggagccgagcccgccgagccgggcgctctatttcagcgggcgaggcgagcagctgcgcctccgggccgacctcgagctgccccgggacgcgttcacgctgcaagtgtggctgcgagcggaggggggccagaggtctccggcagtgatcacagggctgtatgacaaatgttcttatatctcacgtgaccgaggatgggtcgtgggcattcacaccatcagtgaccaagacaacaaagacccacgctactttttctccttgaagacagaccgagcccggcaagtgaccaccatcaatgcccaccgcagctacctcccaggccagtgggtatacctagctgccacctatgatgggcagttcatgaagctctatgtgaatggtgcccaggtggccacctctggggaacaagtgggtggcatattcagcccactgacccagaagtgcaaagtgctcatgttagggggcagtgccctgaatcacaactaccggggctacatcgagcacttcagtctgtggaaggtggccaggactcagcgggagatactgtctgacatggaaacccatggcgcccacactgctctacctcagctcctcctccaggagaactgggacaatgtgaagcatgcctggtcccccatgaaggatggcagcagccccaaagtggaattcagcaatgcccacggctttctgctggacacgagtctggagcctcctctgtgcggacagacattgtgtgacaacacagaggtcattgccagctacaatcagctctcaagtttccgccagcccaaggtggtgcgctaccgcgtggtcaacctctatgaagatgatcataagaacccgacggtgacgcgcgagcaggtggacttccagcaccatcagctggctgaggccttcaagcaatacaacatctcctgggagctggacgtgctggaggtgagcaactcctcccttcgccgccgcctcatcctggccaactgtgacatcagcaagattggggatgagaactgtgaccccgagtgcaaccacacgctgacgggccacgacggcggggattgccgccacctgcgccaccctgccttcgtgaagaagcagcacaacggggtgtgtgacatggactgcaactatgaacggttcaactttgatggtggagagtgctgtgaccctgaaatcaccaatgtcactcagacttgctttgaccccgactctccacacagagcctacttggatgttaatgagctgaagaacattcttaaattggatggatcaacacatctcaatattttctttgcaaaatcctcagaggaggagttggcaggagtagcaacttggccatgggacaaggaggccctgatgcacttaggtggcattgtcttgaacccatctttctatggcatgcctgggcacacccacaccatgatccatgagattggtcacagcctgggcctctatcacgtcttccgaggcatctcagaaatccagtcctgcagtgacccctgcatggagacagagccctccttcgagactggagacctctgcaatgataccaacccagcccctaaacacaagtcctgtggtgacccagggccaggaaatgacacctgtggctttcatagcttcttcaacactccttacaacaacttcatgagctatgcagatgacgactgtacggactccttcacgcccaatcaagtcgccagaatgcactgttacctggacctggtctaccagggctggcagccctccaggaaaccagcgcctgttgccctcgccccccaagttctgggccacacaacggactctgtgacactggagtggttcccacctatagatggccatttctttgaaagagaattgggatcagcatgtcatctttgcctggaagggagaatcctggtgcagtatgcttccaacgcttcctccccaatgccctgcagcccatcaggacactggagccctcgtgaagcagaaggtcatcctgatgttgaacagccctgtaagtccagtgtccgcacctggagcccaaattcagctgtcaacccacacacggttcctccagcctgccctgagcctcaaggctgctacctcgagctggagttcctctaccccttggtccctgagtctctgaccatttgggtgacctttgtctccactgactgggactctagtggagctgtcaatgacatcaaactgttggctgtcagtgggaagaacatctccctgggtcctcagaatgtcttctgtgatgtcccactgaccatcagactctgggacgtgggcgaggaggtgtatggcatccaaatctacacgctggatgagcacctggagatcgatgctgccatgttgacctccactgcagacaccccactctgtctacagtgtaagcccctgaagtataaggtggtccgggaccctcctctccagatggatgtggcctccatcctacatctcaataggaaattcgtagacatggatctaaatcttggcagtgtgtaccagtattgggtcataactatttcaggaactgaagagagtgagccatcacctgctgtcacatacatccatggaagtgggtactgtggcgatggcattatacaaaaagaccaaggtgaacaatgcgacgacatgaataagatcaatggtgatggctgctcccttttctgccgacaagaagtctccttcaattgtattgatgaacccagccggtgctatttccatgatggtgatggggtatgtgaggagtttgaacaaaaaaccagcattaaggactgtggtgtctacacgccccagggattcctggatcagtgggcatccaatgcttcagtatctcatcaagaccagcaatgcccaggctgggtcatcatcggacagccagcagcatcccaggtgtgtcgaaccaaggtgatagatctcagtgaaggcatttcccagcatgcctggtacccttgcaccatcagctacccatattcccagctggctcagaccactttttggctccgggcgtatttttctcaaccaatggttgccgcagctgtcattgtccacctggtgacggatgggacatattatggggaccaaaagcaggagaccatcagcgtgcagctgcttgataccaaagatcagagccacgatctaggcctccatgtcctgagctgcaggaacaatcccctgattatccctgtggtccatgacctcagccagcccttctaccacagccaggcggtacgtgtgagcttcagttcgcccctggtcgccatctcgggggtggccctccgttccttcgacaactttgaccccgtcaccctgagcagctgccagagaggggagacctacagccctgccgagcagagctgcgtgcacttcgcatgtgagaaaactgactgtccagagctggctgtggagaatgcttatctcaattgctccagcagcgaccgctaccacggtgcccagtgtactgtgagctgccggacaggctacgtgctccagatacggcgggatgatgagctgatcaagagccagacgggacccagcgtcacagtgacctgtacagagggcaagtggaataagcaggtggcctgtgagccagtcgactgcagcatcccagatcaccatcaagtctatgctgcctccttctcctgccctgagggcaccacctttggcagtcaatgttccttccagtgccgtcaccctgcacaattgaaaggcaacaacagcctcctgacctgcatggaggatgggctgtggtccttcccagaggccctgtgtgagctcatgtgcctcgctccaccccctgtgcccaatgcagacctccagaccgcccggtgccgagagaataagcacaaggtgggctccttctgcaaatacaaatgcaagcctggataccatgtgcctggatcctctcggaagtcaaagaaacgggccttcaagactcagtgtacccaggatggcagctggcaggagggagcttgtgttcctgtgacctgtgacccacctccaccaaaattccatgggctctaccagtgtactaatggcttccagttcaacagtgagtgtaggatcaagtgtgaagacagtgatgcctcccagggacttgggagcaatgtcattcattgccggaaagatggcacctggaacggctccttccatgtctgccaggagatgcaaggccagtgctcggttccaaacgagctcaacagcaacctcaaactgcagtgccctgatggctatgccatagggtcggagtgtgccacctcgtgcctggaccacaacagcgagtccatcatcctgccaatgaacgtgaccgtgcgtgacatcccccactggctgaaccccacacgggtagagagagttgtctgcactgctggtctcaagtggtatcctcaccctgctctgattcactgtgtcaaaggctgtgagcccttcatgggagacaattattgtgatgccatcaacaaccgagccttttgcaactatgacggtggggattgctgcacctccacagtgaagaccaaaaaggtcaccccattccctatgtcctgtgacctacaaggtgactgtgcttgtcgggacccccaggcccaagaacacagccggaaagacctccggggatacagccatggctaaggaaggacaagaagttgtcaaagaattcccaacgccaggacccacatccctttggtattgatttcacagtcagctgctcaacggaatggcctctccacaccagggatccttagcacccaaccggtctgcctttaattttacccaggaaggactcacattggggcgaatgaaccaagtttcgccatgctggatgatgaaatggattcccatcccaaagtctgagatggattgcatatacagtgtgcagtcccagagcctcctaaaattctagccatttgtcacacaaccacagcaagaaacgtgttctatatctagagtgtgcccatctgtgtttagtacacatgcatgcatacacacccatacaaacatctgtgtgagggcagttctggagatgagcagagagagaccggaataaactcaatcttttctttcccaagctcctagccaacactatccttgggagaaagaaatttgcagaaactgctaagaccaagtgtggagatgtcaagctagttcacactctgaggctcagaatatgtaggacatgcacaattgtgcagtcctttgggattggaagtgaaacagtctgtgatcccctaccttctagggaactaggacctaggaagaggtaaagattatcaggtatgcaaagcgccccaattcttctgctgccatgggggattttaccccaactccagggttcgaggccaatctgagaatggcttaggattgcaatgtcaaggtattatatcagccccttgcttgaggcttgaggtcataatatccctctaggacttacctgttcccccagatcttgccttgggaccacatttgctgctacttttcctgctgctctatcctatacattgaataatccaagatggtagaactaggttaggaaaaattccacacaaccaaacagtctgccttaaaagtgacccacatttttccatagctcctcactttttagcccttctgcaagagaaaaaccctcatgggtccacatggtgagaagttaagtttcctgtaagtgggcctctcaccctggaaaggagttgagggacatcagatgctggaaccctcactgaaagtccagaatgtctaagccagtgttagattttgtaaacaagtggaacagtgttaaatttctatgatgttggagccatccagagactactggaattgtcgagacttttggattattatccttatccttatcctaatcttcctagcccttcaggctagagtaggcttcgatcctgagaaccttgctgttgctctgaggagatataattctgggagaaagaatcttttataagaacagtacagattgttctcaagagggccatcagaaggaagccaaagagttcacagcctcagcaccaacaactcaacatggtcatcatgttttctatatggtttttccagctagcagtactcccttccatacctgtgactgggcagtgcttttctctctcccatgtctagcctccaaaagttaagtgaaaattagtcaactgcacgtggaagcccccaccactttggggatctctttatttcttttcagccagggacctgtccactccctttgaattaatatgggaagaaattaatacaggatgaactggagagaagggttgagtgtggcatactttctgaaacctggagctgggaattgcggagaagggaaggtctagactagttacatcacatagggattactgtaaatcaagtcatctcaagtctagtgaagacagccaacagaaacaaaacctagcatagggatagaaaataccatgcacgtgtgcagccccacctaattcctgcatccaaggcaggtgttgttaatctatcatagcacttaaaaaaaaaaaaaaagagaccaaaaataactttaggaaccaccatattatatcactcccaatagcactgacctggtgatcaaaaacacttgagaagacatctattggccatctctggccaattacactaagaaacatatcaaggtgcttttggcacaggtgcccacaaatacggatgcagtgctgagatagtttatgagacttgtaccatttcacaaactctgaaattgggttccatattggcaaggctgccacagttgttaagaataatcctctatgtttcttcctcacaaaaccatatctcatttatatccagaccattacttcactataattacaaggacaaattattagcaagaaataagaatagtattagaagaattgatcctattttgaacccctctccagtatcttcacactcttgtcaactctccaggcctctctcttgccctgagttatcagcctgtgtggtgttaactaccttagaaggtacaagctaagaaatgtaacagtatcaaccctcccagttgcttaattatacccataggtaatacaaaaagctctgaagacccaaagatgacattactaatgatgtgatttcaggagccacagaagaaccttaccagcttccctcaaatcagtccttatcctctttctatcttcactcccatcatcatctattttcacactatccagctaagcaaagattcctggaggctgacttgtatcttcagactcacagagtgaattcagctcttctgaatcaagacccacccagtctctttcattcagacctgttgctaacaaatttatatttgccaaggatattaggcaaaagaggctacttgattggtggccaacctcgtgcccacatggaaggtatctttaatagggtcttttcaaaccttagtggaggagggtcagctcaatttgggcaatgcatttgttcccagtttcattttcttcctgggaattaactcgtcatttcattccttcagtcatcttctgtgtaggtgaccggagcactgagaggcagctctgatgcactattgtgtgtcagcagctcaaaggccctaaaacactgaaggttctgcatctgaagtattagattgttagcagcaaaatatgaaagatgaggtggacagtcctctaagccctatttagggaagcttttccaagccacaatcttaactacctacccaaaggatttgcattacccccagattctgtgccaacaaccttttaaggaaatacagtccttgggaaatgagttttgatggtgaattggggtgttaaggaagggaaagattgtcatagatggtagggctttgaaaatgcagggtatcagctgccactcctggcttcaacacattgagtcactgcctagacggttctcttggtcttattcccatcctggccaatgcttaaatactatttgttgaaaataattctttgagacagatttcagctacctcccttccaggttcgatttaacttggttgtaattgtcaatttgttgttataggtcttacctgtgtgaaagaaagaaaaagaaagaaagaaagaaagagaaaggaaattataaggtcaagttaacagttttgaggttttgtgtttttttctggaactacttcaagtgagaaaataaaaaaaaatggtgacaaagctgtacagatagagataatagaagacaaagagattaaaaggaaataaaaatgcatgattaaaaactatgtgctggggatcctctgatacagccccg

SEQ ID NO: 455077 - DNA, 13899 bp, Homo sapiens
ctgtccaggttgagtgagggtgtccaggatgaggaatgagggtgtccagggtgaggagtgagggagtccagggtgaggagtgagggagtccagggtgaggattgagggtgtcagggtgagtgagagtgtccagggtgaggagtgagggtatccagggtgagtgagggtgtccagggtgaggagtgagggtatccagggtgagtgagggtgtccagggtgagtgagggtgtcagggtgagtgaacgtgtccagggtgtgtgagggtgtccagggtgcagagtgaggtgtccagggtgaggagtgacggtgtctggggtgagtgagggtgtccagggtgaggagtgagggtgtcagggtgagtgagggtgtccagggttgagtgcacatgtgtggtgaggaggtgtttgcagtgcttcaggcgcagcaactctttcatctagtttaaaattgtgctctgaggttagattttagtagaacaaaggccttacaaagaatgtgaaaacattgtgcttccctgcttacaggcaattaaaaaggagaatcaagctgagggtgcctggtgtggggtggggtggagaagaccacagagactattgtgtgttttattcaacagtgtcctgggctgctttctccagaaatgtccctgacacatggatgtaagtgtggctagtttactgggagatgatcccagtgatgcaggacacgcgagccctaagattgaagcatagcccgggagggttcttagctttgcccaggaaggaactcaaggcaagccagtggtgttagcaacttttattgaagcggccggctgtgcacagcagcagcagaggcgctgctccttgcaaagcagggctgccctacaggctgtgcgcccacagtagcagctcagaggcagttctgcagtggtatttgtatccacttttaattatatgcaaatgaaggggcagtttatgcagacatttccagggtgagggtggtaacttctgggtgctgccagagccatcgtgaactgacttgacacaggtcggtgtgtcctatggaaactagcatctgccctggacctattttagctagtgctcagtttggtctgagtgcctgagccccacttccagagttgagtcccacctcctacctcattcccccttcagagattagatactcctccttaatcttaagggggcctcgagaagggcggagtcctgcttttccgtaactacttcctgctgagtttatggcacgtaggccctgcctggcactggaggacgtaaaaatttctggatacctgatctaaggagcccagaggcaggacgatttcattctccgtgtcagtggacaggatgggctggaagccttgtgccagcattgtctctggaactgtggtaatctagaatacacaaactttactaagaggttaaagaagcaaggaccaaacatttgtaacaagacagttgtcaaaggtcctagaagaggtgaaaaacaggtgagacttgggaaggcacttttgatggttgaccagatatagttggggcagtgccctggttatatctatgtaactaggtagcttgctcatagatcttttgaatgttaacctcaacctgtccagagttaatatatgtgcagcaggttttattaataactgcacaagaccccaccttgttcagctagtaaataatccaatgctagtctgttatcaacaactacattttccagagtctggggaactcttgaattctctttaatgcctgatctccgttggtggctaaggattctaggatttgagccaagttctttagcgttaactcatggtaggcaaagcaccccagggtgctgctagtcctattgccaccctgattcctgccagaaataagtaagcaagcaacaggacaatgaactccatgttgcccagatcccactgagagtgaacgtgcagtcatgcccataaccgacacacatcccagtccatgtgggtcagtccttcatcaccctccctgccttctgacaacagcagactccagccattccattatcattcacagcccaacccaagcagtcagtggctgaagaaagagaatcaggtatactctatgtccacatataccttcctgccacagggcttcaccaactggcaggattccccccagcccccaactcctcctcatcccttgttcccaggcgggtcaattggagagtgagcagagatagatggcttgcagaagggtatgcaagatggggagactccaccagaccttagggagagaatggcatctttctccaccttttaagagagacagagcctccctgaggtctcaaagatttttcagggcaacacaagaaacgtttccaagcctcagctgcaggtgttcacctttccactctggggtgtgaggagatggtaagctgaggacaagtgtgttccagatgcaggccaactctgttctccaacagtttgaaccaacttggccttggggttccaagggtaggatgaagggtgtcacggcaggacggggcctggcgtgaggcaacagcaagcagagcgaggacacaacagtggcagcagtgtacagacacaggacgtcagcttcaaacgatgcaacagcagggatatcttgggcacggctctgattcgagccactcccaactctcttgcctccaggatggaggcactgtacatgcaacagtccagagaaagattctagccagtccaagcccaggcacatccagagaaggtgggagctcttcgggttgactccaccgaggaaaacaggcatttgggtatttcagattcccgctccacaataaggcaacttttaaaaaaatattatttccaaaaacaaaacaaaaattccagggggagggaattcagcggatcagtcttaagaggagcttttttttggagcgagaaatcatataaaataaaatgaaataaaacaaggaggaaggcaaccagctgttaggggaaaaataaggcagataaaggagcggggagagaaattaattgccaaccaggaggagttgggctgtatttttcaaaggtggggagagtggagcacacaccttgaggaggaaagcgagaaagaaaagaaaaaagcaagtgaaggggggctcgcccaagaagggtgaagaagcgaagaaagtcgaggcgccgaggctcccaaagctggcagctccgggtggcggtgcaggggcgaaggggggggcggggggaacgtcggacatgcggctctggagttgggtgctgcacctggggctgctgagcgccgcgctgggctgcgggctggccgagcgtccccgccgggcccggagagacccgcgggccggccgacccccgcgccccgccgccggcccggccacctgcgccacccgcggcccgcggccgccgcgcctcgccgccgccgccgccgccgccgggcggtgcctgggaagccgtgcgcgtcccccggcggcggcagcagcgggaggcgaggggcgccaccgaggagccgagcccgccgagccgggcgctctatttcagcgggcgaggcgagcagctgcgcctccgggccgacctcgagctgccccgggacgcgttcacgctgcaagtgtggctgcgagcggaggggggccagaggtctccggcagtgatcacagggctgtatgacaaatgttcttatatctcacgtgaccgaggatgggtcgtgggcattcacaccatcagtgaccaagacaacaaagacccacgctactttttctccttgaagacagaccgagcccggcaagtgaccaccatcaatgcccaccgcagctacctcccaggccagtgggtatacctagctgccacctatgatgggcagttcatgaagctctatgtgaatggtgcccaggtggccacctctggggaacaagtgggtggcatattcagcccactgacccagaagtgcaaagtgctcatgttagggggcagtgccctgaatcacaactaccggggctacatcgagcacttcagtctgtggaaggtggccaggactcagcgggagatactgtctgacatggaaacccatggcgcccacactgctctacctcagctcctcctccaggagaactgggacaatgtgaagcatgcctggtcccccatgaaggatggcagcagccccaaagtggaattcagcaatgcccacggctttctgctggacacgagtctggagcctcctctgtgcggacagacattgtgtgacaacacagaggtcattgccagctacaatcagctctcaagtttccgccagcccaaggtggtgcgctaccgcgtggtcaacctctatgaagatgatcataagaacccgacggtgacgcgcgagcaggtggacttccagcaccatcagctggctgaggccttcaagcaatacaacatctcctgggagctggacgtgctggaggtgagcaactcctcccttcgccgccgcctcatcctggccaactgtgacatcagcaagattggggatgagaactgtgaccccgagtgcaaccacacgctgacgggccacgacggcggggattgccgccacctgcgccaccctgccttcgtgaagaagcagcacaacggggtgtgtgacatggactgcaactatgaacggttcaactttgatggtggagagtgctgtgaccctgaaatcaccaatgtcactcagacttgctttgaccccgactctccacacagagcctacttggatgttaatgagctgaagaacattcttaaattggatggatcaacacatctcaatattttctttgcaaaatcctcagaggaggagttggcaggagtagcaacttggccatgggacaaggaggccctgatgcacttaggtggcattgtcttgaacccatctttctatggcatgcctgggcacacccacaccatgatccatgagattggtcacagcctgggcctctatcacgtcttccgaggcatctcagaaatccagtcctgcagtgacccctgcatggagacagagccctccttcgagactggagacctctgcaatgataccaacccagcccctaaacacaagtcctgtggtgacccagggccaggaaatgacacctgtggctttcatagcttcttcaacactccttacaacaacttcatgagctatgcagatgacgactgtacggactccttcacgcccaatcaagtcgccagaatgcactgttacctggacctggtctaccagggctggcagccctccaggaaaccagcgcctgttgccctcgccccccaagttctgggccacacaacggactctgtgacactggagtggttcccacctatagatggccatttctttgaaagagaattgggatcagcatgtcatctttgcctggaagggagaatcctggtgcagtatgcttccaacgcttcctccccaatgccctgcagcccatcaggacactggagccctcgtgaagcagaaggtcatcctgatgttgaacagccctgtaagtccagtgtccgcacctggagcccaaattcagctgtcaacccacacacggttcctccagcctgccctgagcctcaaggctgctacctcgagctggagttcctctaccccttggtccctgagtctctgaccatttgggtgacctttgtctccactgactgggactctagtggagctgtcaatgacatcaaactgttggctgtcagtgggaagaacatctccctgggtcctcagaatgtcttctgtgatgtcccactgaccatcagactctgggacgtgggcgaggaggtgtatggcatccaaatctacacgctggatgagcacctggagatcgatgctgccatgttgacctccactgcagacaccccactctgtctacagtgtaagcccctgaagtataaggtggtccgggaccctcctctccagatggatgtggcctccatcctacatctcaataggaaattcgtagacatggatctaaatcttggcagtgtgtaccagtattgggtcataactatttcaggaactgaagagagtgagccatcacctgctgtcacatacatccatggaagtgggtactgtggcgatggcattatacaaaaagaccaaggtgaacaatgcgacgacatgaataagatcaatggtgatggctgctcccttttctgccgacaagaagtctccttcaattgtattgatgaacccagccggtgctatttccatgatggtgatggggtatgtgaggagtttgaacaaaaaaccagcattaaggactgtggtgtctacacgccccagggattcctggatcagtgggcatccaatgcttcagtatctcatcaagaccagcaatgcccaggctgggtcatcatcggacagccagcagcatcccaggtgtgtcgaaccaaggtgatagatctcagtgaaggcatttcccagcatgcctggtacccttgcaccatcagctacccatattcccagctggctcagaccactttttggctccgggcgtatttttctcaaccaatggttgccgcagctgtcattgtccacctggtgacggatgggacatattatggggaccaaaagcaggagaccatcagcgtgcagctgcttgataccaaagatcagagccacgatctagaccccaagaaggagagagactgagtaagagccatttccccgttgtacatgtcaccatctgagacccaaagagaggcactgagagaccccaagtcacatggcaggcctccatgtcctgagctgcaggaacaatcccctgattatccctgtggtccatgacctcagccagcccttctaccacagccaggcggtacgtgtgagcttcagttcgcccctggtcgccatctcgggggtggccctccgttccttcgacaactttgaccccgtcaccctgagcagctgccagagaggggagacctacagccctgccgagcagagctgcgtgcacttcgcatgtgagaaaactgactgtccagagctggctgtggagaatgcttatctcaattgctccagcagcgaccgctaccacggtgcccagtgtactgtgagctgccggacaggctacgtgctccagatacggcgggatgatgagctgatcaagagccagacgggacccagcgtcacagtgacctgtacagagggcaagtggaataagcaggtggcctgtgagccagtcgactgcagcatcccagatcaccatcaagtctatgctgcctccttctcctgccctgagggcaccacctttggcagtcaatgttccttccagtgccgtcaccctgcacaattgaaaggcaacaacagcctcctgacctgcatggaggatgggctgtggtccttcccagaggccctgtgtgagctcatgtgcctcgctccaccccctgtgcccaatgcagacctccagaccgcccggtgccgagagaataagcacaaggtgggctccttctgcaaatacaaatgcaagcctggataccatgtgcctggatcctctcggaagtcaaagaaacgggccttcaagactcagtgtacccaggatggcagctggcaggagggagcttgtgttcctgtgacctgtgacccacctccaccaaaattccatgggctctaccagtgtactaatggcttccagttcaacagtgagtgtaggatcaagtgtgaagacagtgatgcctcccagggacttgggagcaatgtcattcattgccggaaagatggcacctggaacggctccttccatgtctgccaggagatgcaaggccagtgctcggttccaaacgagctcaacagcaacctcaaactgcagtgccctgatggctatgccatagggtcggagtgtgccacctcgtgcctggaccacaacagcgagtccatcatcctgccaatgaacgtgaccgtgcgtgacatcccccactggctgaaccccacacgggtagagagagttgtctgcactgctggtctcaagtggtatcctcaccctgctctgattcactgtgtcaaaggctgtgagcccttcatgggagacaattattgtgatgccatcaacaaccgagccttttgcaactatgacggtggggattgctgcacctccacagtgaagaccaaaaaggtcaccccattccctatgtcctgtgacctacaaggtgactgtgcttgtcgggacccccaggcccaagaacacagccggaaagacctccggggatacagccatggctaaggaaggacaagaagttgtcaaagaattcccaacgccaggacccacatccctttggtattgatttcacagtcagctgctcaacggaatggcctctccacaccagggatccttagcacccaaccggtctgcctttaattttacccaggaaggactcacattggggcgaatgaaccaagtttcgccatgctggatgatgaaatggattcccatcccaaagtctgagatggattgcatatacagtgtgcagtcccagagcctcctaaaattctagccatttgtcacacaaccacagcaagaaacgtgttctatatctagagtgtgcccatctgtgtttagtacacatgcatgcatacacacccatacaaacatctgtgtgagggcagttctggagatgagcagagagagaccggaataaactcaatcttttctttcccaagctcctagccaacactatccttgggagaaagaaatttgcagaaactgctaagaccaagtgtggagatgtcaagctagttcacactctgaggctcagaatatgtaggacatgcacaattgtgcagtcctttgggattggaagtgaaacagtctgtgatcccctaccttctagggaactaggacctaggaagaggtaaagattatcaggtatgcaaagcgccccaattcttctgctgccatgggggattttaccccaactccagggttcgaggccaatctgagaatggcttaggattgcaatgtcaaggtattatatcagccccttgcttgaggcttgaggtcataatatccctctaggacttacctgttcccccagatcttgccttgggaccacatttgctgctacttttcctgctgctctatcctatacattgaataatccaagatggtagaactaggttaggaaaaattccacacaaccaaacagtctgccttaaaagtgacccacatttttccatagctcctcactttttagcccttctgcaagagaaaaaccctcatgggtccacatggtgagaagttaagtttcctgtaagtgggcctctcaccctggaaaggagttgagggacatcagatgctggaaccctcactgaaagtccagaatgtctaagccagtgttagattttgtaaacaagtggaacagtgttaaatttctatgatgttggagccatccagagactactggaattgtcgagacttttggattattatccttatccttatcctaatcttcctagcccttcaggctagagtaggcttcgatcctgagaaccttgctgttgctctgaggagatataattctgggagaaagaatcttttataagaacagtacagattgttctcaagagggccatcagaaggaagccaaagagttcacagcctcagcaccaacaactcaacatggtcatcatgttttctatatggtttttccagctagcagtactcccttccatacctgtgactgggcagtgcttttctctctcccatgtctagcctccaaaagttaagtgaaaattagtcaactgcacgtggaagcccccaccactttggggatctctttatttcttttcagccagggacctgtccactccctttgaattaatatgggaagaaattaatacaggatgaactggagagaagggttgagtgtggcatactttctgaaacctggagctgggaattgcggagaagggaaggtctagactagttacatcacatagggattactgtaaatcaagtcatctcaagtctagtgaagacagccaacagaaacaaaacctagcatagggatagaaaataccatgcacgtgtgcagccccacctaattcctgcatccaaggcaggtgttgttaatctatcatagcacttaaaaaaaaaaaaaaagagaccaaaaataactttaggaaccaccatattatatcactcccaatagcactgacctggtgatcaaaaacacttgagaagacatctattggccatctctggccaattacactaagaaacatatcaaggtgcttttggcacaggtgcccacaaatacggatgcagtgctgagatagtttatgagacttgtaccatttcacaaactctgaaattgggttccatattggcaaggctgccacagttgttaagaataatcctctatgtttcttcctcacaaaaccatatctcatttatatccagaccattacttcactataattacaaggacaaattattagcaagaaataagaatagtattagaagaattgatcctattttgaacccctctccagtatcttcacactcttgtcaactctccaggcctctctcttgccctgagttatcagcctgtgtggtgttaactaccttagaaggtacaagctaagaaatgtaacagtatcaaccctcccagttgcttaattatacccataggtaatacaaaaagctctgaagacccaaagatgacattactaatgatgtgatttcaggagccacagaagaaccttaccagcttccctcaaatcagtccttatcctctttctatcttcactcccatcatcatctattttcacactatccagctaagcaaagattcctggaggctgacttgtatcttcagactcacagagtgaattcagctcttctgaatcaagacccacccagtctctttcattcagacctgttgctaacaaatttatatttgccaaggatattaggcaaaagaggctacttgattggtggccaacctcgtgcccacatggaaggtatctttaatagggtcttttcaaaccttagtggaggagggtcagctcaatttgggcaatgcatttgttcccagtttcattttcttcctgggaattaactcgtcatttcattccttcagtcatcttctgtgtaggtgaccggagcactgagaggcagctctgatgcactattgtgtgtcagcagctcaaaggccctaaaacactgaaggttctgcatctgaagtattagattgttagcagcaaaatatgaaagatgaggtggacagtcctctaagccctatttagggaagcttttccaagccacaatcttaactacctacccaaaggatttgcattacccccagattctgtgccaacaaccttttaaggaaatacagtccttgggaaatgagttttgatggtgaattggggtgttaaggaagggaaagattgtcatagatggtagggctttgaaaatgcagggtatcagctgccactcctggcttcaacacattgagtcactgcctagacggttctcttggtcttattcccatcctggccaatgcttaaatactatttgttgaaaataattctttgagacagatttcagctacctcccttccaggttcgatttaacttggttgtaattgtcaatttgttgttataggtcttacctgtgtgaaagaaagaaaaagaaagaaagaaagaaagagaaaggaaattataaggtcaagttaacagttttgaggttttgtgtttttttctggaactacttcaagtgagaaaataaaaaaaaatggtgacaaagctgtacagatagagataatagaagacaaagagattaaaaggaaataaaaatgcatgattaaaaactaagaataaaaaacctatttttatgtttcctaaaggaaattgtttattctacagactcagtaggtagacacaaacataaagatttccctagaagacatagagtgggatttgataacactgtctgttattttctgtacattgtggtaggtccaggaaatatgacattttcccccttgatgtgttattgttgttgttgggtggggtgggcattttgtttatttgtttggtggcaatcagtggtagtagggagtgggagggcttatattggtttttccagctattaaggggacatattgtgtcgttgtgcttttcacgttataaaatgtttatatttaccagtacagcactgggctttataaagactgcactcagaaccacactgcacagtccagttttttaaaaagctgctacatgacagacaggtaatcccactgagtgagttttgagaaacaaatcaaacgaagtaaacaagaaacataaaaaccaaatagcaaatgaataaaagcctgttcttgtaacttattcaacttttgccaaattcctaccaatcacttgctttttaaaagaaatgtataatagccaaaagagaaattatgtccctgttgtacagaagttagaatttttgactccaggcagcagtttgctcagtgatcttgaacaagttatccaattgcctctacatttgcatcagtttctctagctgcaaaatggggataatactatatacctacctcacagtgggagggcaggagattttgaggccctgaggttttaggtgggctgtgagggccaacgcttgacacaaagtccatgggttattattcaagaatgcacaggcccatcggccttttagaaagacaagacagggagtgcttgtttgatatttcaaggaataaagccggagctcctgaattgtagtccaccttaaaagagagacctgtattggagaatattttatttttttggcaaatttgatcttaccctttaccagttctataatttggttaaaagctgattacgtcctacaatgtcaaagtcagctaactgtcgtctacttaagacttctggtcatttccaacttatagaggaagggagtctctaaaatctcttcttcagaaggcacctcacttctcagacttaaaattccacatcaagtgttccattaaaagaagataaggcattctgagtgcaaacaaatgggggcttcttaaactacacaccagcagtcagtgaggaaaactttgaacaattattgagttgctttcttgggtctctataatcaataacctgtctgcagatatctatctatataaagatattatatataaatataaatttacatatatatgcacatgtatatatagttgtacatatatgtgtgtatatatatacttaaatgtaatatttacaaaataaaactgtgatctcgtctagagaaaatgtattcatattacaaactgctcttccatatttatgtaccatattatacctttttattattgttataattattatgggtatttctaattaatatgatgttgaaacctgtttggcaccttctggaagctaccaaaaaaatgacactccattgaagtgcttaaaagctgttctcataagaattctactggcctattgtaaaaaagaaaaaaaaaagaaaaagaagaaagacacaaagaaaataatctaaacaccaaaaactaaacacaattccaatcctttttctgtacctcacgcgcataaatttggctgctcctatttttttttctgtttatgtgtttttatggatctaagttaaatcttttggcaatatataaaaatgtaaatagtaaactttatttattaagaatgtcatcttttttaatttatatttacacaattgttcatctaatttattttttctatacagttttaaatactcagacatattttgctgttcatgatatttttatcctgttctcatggatttgttttcccatactgttttctctgatctcaattacaggttggatctcacaaataataatgtcagagacagaaatattttgccactgttgattactatactttaaagttctatattatgaaaatatataatagcttgtacgct

SEQ ID NO: 455078 - DNA, 13678 bp, Homo sapiens
ctgtccaggttgagtgagggtgtccaggatgaggaatgagggtgtccagggtgaggagtgagggagtccagggtgaggagtgagggagtccagggtgaggattgagggtgtcagggtgagtgagagtgtccagggtgaggagtgagggtatccagggtgagtgagggtgtccagggtgaggagtgagggtatccagggtgagtgagggtgtccagggtgagtgagggtgtcagggtgagtgaacgtgtccagggtgtgtgagggtgtccagggtgcagagtgaggtgtccagggtgaggagtgacggtgtctggggtgagtgagggtgtccagggtgaggagtgagggtgtcagggtgagtgagggtgtccagggttgagtgcacatgtgtggtgaggaggtgtttgcagtgcttcaggcgcagcaactctttcatctagtttaaaattgtgctctgaggttagattttagtagaacaaaggccttacaaagaatgtgaaaacattgtgcttccctgcttacaggcaattaaaaaggagaatcaagctgagggtgcctggtgtggggtggggtggagaagaccacagagactattgtgtgttttattcaacagtgtcctgggctgctttctccagaaatgtccctgacacatggatgtaagtgtggctagtttactgggagatgatcccagtgatgcaggacacgcgagccctaagattgaagcatagcccgggagggttcttagctttgcccaggaaggaactcaaggcaagccagtggtgttagcaacttttattgaagcggccggctgtgcacagcagcagcagaggcgctgctccttgcaaagcagggctgccctacaggctgtgcgcccacagtagcagctcagaggcagttctgcagtggtatttgtatccacttttaattatatgcaaatgaaggggcagtttatgcagacatttccagggtgagggtggtaacttctgggtgctgccagagccatcgtgaactgacttgacacaggtcggtgtgtcctatggaaactagcatctgccctggacctattttagctagtgctcagtttggtctgagtgcctgagccccacttccagagttgagtcccacctcctacctcattcccccttcagagattagatactcctccttaatcttaagggggcctcgagaagggcggagtcctgcttttccgtaactacttcctgctgagtttatggcacgtaggccctgcctggcactggaggacgtaaaaatttctggatacctgatctaaggagcccagaggcaggacgatttcattctccgtgtcagtggacaggatgggctggaagccttgtgccagcattgtctctggaactgtggtaatctagaatacacaaactttactaagaggttaaagaagcaaggaccaaacatttgtaacaagacagttgtcaaaggtcctagaagaggtgaaaaacaggtgagacttgggaaggcacttttgatggttgaccagatatagttggggcagtgccctggttatatctatgtaactaggtagcttgctcatagatcttttgaatgttaacctcaacctgtccagagttaatatatgtgcagcaggttttattaataactgcacaagaccccaccttgttcagctagtaaataatccaatgctagtctgttatcaacaactacattttccagagtctggggaactcttgaattctctttaatgcctgatctccgttggtggctaaggattctaggatttgagccaagttctttagcgttaactcatggtaggcaaagcaccccagggtgctgctagtcctattgccaccctgattcctgccagaaataagtaagcaagcaacaggacaatgaactccatgttgcccagatcccactgagagtgaacgtgcagtcatgcccataaccgacacacatcccagtccatgtgggtcagtccttcatcaccctccctgccttctgacaacagcagactccagccattccattatcattcacagcccaacccaagcagtcagtggctgaagaaagagaatcaggtatactctatgtccacatataccttcctgccacagggcttcaccaactggcaggattccccccagcccccaactcctcctcatcccttgttcccaggcgggtcaattggagagtgagcagagatagatggcttgcagaagggtatgcaagatggggagactccaccagaccttagggagagaatggcatctttctccaccttttaagagagacagagcctccctgaggtctcaaagatttttcagggcaacacaagaaacgtttccaagcctcagctgcaggtgttcacctttccactctggggtgtgaggagatggtaagctgaggacaagtgtgttccagatgcaggccaactctgttctccaacagtttgaaccaacttggccttggggttccaagggtaggatgaagggtgtcacggcaggacggggcctggcgtgaggcaacagcaagcagagcgaggacacaacagtggcagcagtgtacagacacaggacgtcagcttcaaacgatgcaacagcagggatatcttgggcacggctctgattcgagccactcccaactctcttgcctccaggatggaggcactgtacatgcaacagtccagagaaagattctagccagtccaagcccaggcacatccagagaaggtgggagctcttcgggttgactccaccgaggaaaacaggcatttgggtatttcagattcccgctccacaataaggcaacttttaaaaaaatattatttccaaaaacaaaacaaaaattccagggggagggaattcagcggatcagtcttaagaggagcttttttttggagcgagaaatcatataaaataaaatgaaataaaacaaggaggaaggcaaccagctgttaggggaaaaataaggcagataaaggagcggggagagaaattaattgccaaccaggaggagttgggctgtatttttcaaaggtggggagagtggagcacacaccttgaggaggaaagcgagaaagaaaagaaaaaagcaagtgaaggggggctcgcccaagaagggtgaagaagcgaagaaagtcgaggcgccgaggctcccaaagctggcagctccgggtggcggtgcaggggcgaaggggggggcggggggaacgtcggacatgcggctctggagttgggtgctgcacctggggctgctgagcgccgcgctgggctgcgggctggccgagcgtccccgccgggcccggagagacccgcgggccggccgacccccgcgccccgccgccggcccggccacctgcgccacccgcggcccgcggccgccgcgcctcgccgccgccgccgccgccgccgggcggtgcctgggaagccgtgcgcgtcccccggcggcggcagcagcgggaggcgaggggcgccaccgaggagccgagcccgccgagccgggcgctctatttcagcgggcgaggcgagcagctgcgcctccgggccgacctcgagctgccccgggacgcgttcacgctgcaagtgtggctgcgagcggaggggggccagaggtctccggcagtgatcacagggctgtatgacaaatgttcttatatctcacgtgaccgaggatgggtcgtgggcattcacaccatcagtgaccaagacaacaaagacccacgctactttttctccttgaagacagaccgagcccggcaagtgaccaccatcaatgcccaccgcagctacctcccaggccagtgggtatacctagctgccacctatgatgggcagttcatgaagctctatgtgaatggtgcccaggtggccacctctggggaacaagtgggtggcatattcagcccactgacccagaagtgcaaagtgctcatgttagggggcagtgccctgaatcacaactaccggggctacatcgagcacttcagtctgtggaaggtggccaggactcagcgggagatactgtctgacatggaaacccatggcgcccacactgctctacctcagctcctcctccaggagaactgggacaatgtgaagcatgcctggtcccccatgaaggatggcagcagccccaaagtggaattcagcaatgcccacggctttctgctggacacgagtctggagcctcctctgtgcggacagacattgtgtgacaacacagaggtcattgccagctacaatcagctctcaagtttccgccagcccaaggtggtgcgctaccgcgtggtcaacctctatgaagatgatcataagaacccgacggtgacgcgcgagcaggtggacttccagcaccatcagctggctgaggccttcaagcaatacaacatctcctgggagctggacgtgctggaggtgagcaactcctcccttcgccgccgcctcatcctggccaactgtgacatcagcaagattggggatgagaactgtgaccccgagtgcaaccacacgctgacgggccacgacggcggggattgccgccacctgcgccaccctgccttcgtgaagaagcagcacaacggggtgtgtgacatggactgcaactatgaacggttcaactttgatggtggagagtgctgtgaccctgaaatcaccaatgtcactcagacttgctttgaccccgactctccacacagagcctacttggatgttaatgagctgaagaacattcttaaattggatggatcaacacatctcaatattttctttgcaaaatcctcagaggaggagttggcaggagtagcaacttggccatgggacaaggaggccctgatgcacttaggtggcattgtcttgaacccatctttctatggcatgcctgggcacacccacaccatgatccatgagattggtcacagcctgggcctctatcacgtcttccgaggcatctcagaaatccagtcctgcagtgacccctgcatggagacagagccctccttcgagactggagacctctgcaatgataccaacccagcccctaaacacaagtcctgtggtgacccagggccaggaaatgacacctgtggctttcatagcttcttcaacactccttacaacaacttcatgagctatgcagatgacgactgtacggactccttcacgcccaatcaagtcgccagaatgcactgttacctggacctggtctaccagggctggcagccctccaggaaaccagcgcctgttgccctcgccccccaagttctgggccacacaacggactctgtgacactggagtggttcccacctatagatggccatttctttgaaagagaattgggatcagcatgtcatctttgcctggaagggagaatcctggtgcagtatgcttccaacgcttcctccccaatgccctgcagcccatcaggacactggagccctcgtgaagcagaaggtcatcctgatgttgaacagccctgtaagtccagtgtccgcacctggagcccaaattcagctgtcaacccacacacggttcctccagcctgccctgagcctcaaggctgctacctcgagctggagttcctctaccccttggtccctgagtctctgaccatttgggtgacctttgtctccactgactgggactctagtggagctgtcaatgacatcaaactgttggctgtcagtgggaagaacatctccctgggtcctcagaatgtcttctgtgatgtcccactgaccatcagactctgggacgtgggcgaggaggtgtatggcatccaaatctacacgctggatgagcacctggagatcgatgctgccatgttgacctccactgcagacaccccactctgtctacagtgtaagcccctgaagtataaggtggtccgggaccctcctctccagatggatgtggcctccatcctacatctcaataggaaattcgtagacatggatctaaatcttggcagtgtgtaccagtattgggtcataactatttcaggaactgaagagagtgagccatcacctgctgtcacatacatccatggaagtgggtactgtggcgatggcattatacaaaaagaccaaggtgaacaatgcgacgacatgaataagatcaatggtgatggctgctcccttttctgccgacaagaagtctccttcaattgtattgatgaacccagccggtgctatttccatgatggtgatggggtatgtgaggagtttgaacaaaaaaccagcattaaggagtgtgtcgaaccaaggtgatagatctcagtgaaggcatttcccagcatgcctggtacccttgcaccatcagctacccatattcccagctggctcagaccactttttggctccgggcgtatttttctcaaccaatggttgccgcagctgtcattgtccacctggtgacggatgggacatattatggggaccaaaagcaggagaccatcagcgtgcagctgcttgataccaaagatcagagccacgatctaggcctccatgtcctgagctgcaggaacaatcccctgattatccctgtggtccatgacctcagccagcccttctaccacagccaggcggtacgtgtgagcttcagttcgcccctggtcgccatctcgggggtggccctccgttccttcgacaactttgaccccgtcaccctgagcagctgccagagaggggagacctacagccctgccgagcagagctgcgtgcacttcgcatgtgagaaaactgactgtccagagctggctgtggagaatgcttatctcaattgctccagcagcgaccgctaccacggtgcccagtgtactgtgagctgccggacaggctacgtgctccagatacggcgggatgatgagctgatcaagagccagacgggacccagcgtcacagtgacctgtacagagggcaagtggaataagcaggtggcctgtgagccagtcgactgcagcatcccagatcaccatcaagtctatgctgcctccttctcctgccctgagggcaccacctttggcagtcaatgttccttccagtgccgtcaccctgcacaattgaaaggcaacaacagcctcctgacctgcatggaggatgggctgtggtccttcccagaggccctgtgtgagctcatgtgcctcgctccaccccctgtgcccaatgcagacctccagaccgcccggtgccgagagaataagcacaaggtgggctccttctgcaaatacaaatgcaagcctggataccatgtgcctggatcctctcggaagtcaaagaaacgggccttcaagactcagtgtacccaggatggcagctggcaggagggagcttgtgttcctgtgacctgtgacccacctccaccaaaattccatgggctctaccagtgtactaatggcttccagttcaacagtgagtgtaggatcaagtgtgaagacagtgatgcctcccagggacttgggagcaatgtcattcattgccggaaagatggcacctggaacggctccttccatgtctgccaggagatgcaaggccagtgctcggttccaaacgagctcaacagcaacctcaaactgcagtgccctgatggctatgccatagggtcggagtgtgccacctcgtgcctggaccacaacagcgagtccatcatcctgccaatgaacgtgaccgtgcgtgacatcccccactggctgaaccccacacgggtagagagagttgtctgcactgctggtctcaagtggtatcctcaccctgctctgattcactgtgtcaaaggctgtgagcccttcatgggagacaattattgtgatgccatcaacaaccgagccttttgcaactatgacggtggggattgctgcacctccacagtgaagaccaaaaaggtcaccccattccctatgtcctgtgacctacaaggtgactgtgcttgtcgggacccccaggcccaagaacacagccggaaagacctccggggatacagccatggctaaggaaggacaagaagttgtcaaagaattcccaacgccaggacccacatccctttggtattgatttcacagtcagctgctcaacggaatggcctctccacaccagggatccttagcacccaaccggtctgcctttaattttacccaggaaggactcacattggggcgaatgaaccaagtttcgccatgctggatgatgaaatggattcccatcccaaagtctgagatggattgcatatacagtgtgcagtcccagagcctcctaaaattctagccatttgtcacacaaccacagcaagaaacgtgttctatatctagagtgtgcccatctgtgtttagtacacatgcatgcatacacacccatacaaacatctgtgtgagggcagttctggagatgagcagagagagaccggaataaactcaatcttttctttcccaagctcctagccaacactatccttgggagaaagaaatttgcagaaactgctaagaccaagtgtggagatgtcaagctagttcacactctgaggctcagaatatgtaggacatgcacaattgtgcagtcctttgggattggaagtgaaacagtctgtgatcccctaccttctagggaactaggacctaggaagaggtaaagattatcaggtatgcaaagcgccccaattcttctgctgccatgggggattttaccccaactccagggttcgaggccaatctgagaatggcttaggattgcaatgtcaaggtattatatcagccccttgcttgaggcttgaggtcataatatccctctaggacttacctgttcccccagatcttgccttgggaccacatttgctgctacttttcctgctgctctatcctatacattgaataatccaagatggtagaactaggttaggaaaaattccacacaaccaaacagtctgccttaaaagtgacccacatttttccatagctcctcactttttagcccttctgcaagagaaaaaccctcatgggtccacatggtgagaagttaagtttcctgtaagtgggcctctcaccctggaaaggagttgagggacatcagatgctggaaccctcactgaaagtccagaatgtctaagccagtgttagattttgtaaacaagtggaacagtgttaaatttctatgatgttggagccatccagagactactggaattgtcgagacttttggattattatccttatccttatcctaatcttcctagcccttcaggctagagtaggcttcgatcctgagaaccttgctgttgctctgaggagatataattctgggagaaagaatcttttataagaacagtacagattgttctcaagagggccatcagaaggaagccaaagagttcacagcctcagcaccaacaactcaacatggtcatcatgttttctatatggtttttccagctagcagtactcccttccatacctgtgactgggcagtgcttttctctctcccatgtctagcctccaaaagttaagtgaaaattagtcaactgcacgtggaagcccccaccactttggggatctctttatttcttttcagccagggacctgtccactccctttgaattaatatgggaagaaattaatacaggatgaactggagagaagggttgagtgtggcatactttctgaaacctggagctgggaattgcggagaagggaaggtctagactagttacatcacatagggattactgtaaatcaagtcatctcaagtctagtgaagacagccaacagaaacaaaacctagcatagggatagaaaataccatgcacgtgtgcagccccacctaattcctgcatccaaggcaggtgttgttaatctatcatagcacttaaaaaaaaaaaaaaagagaccaaaaataactttaggaaccaccatattatatcactcccaatagcactgacctggtgatcaaaaacacttgagaagacatctattggccatctctggccaattacactaagaaacatatcaaggtgcttttggcacaggtgcccacaaatacggatgcagtgctgagatagtttatgagacttgtaccatttcacaaactctgaaattgggttccatattggcaaggctgccacagttgttaagaataatcctctatgtttcttcctcacaaaaccatatctcatttatatccagaccattacttcactataattacaaggacaaattattagcaagaaataagaatagtattagaagaattgatcctattttgaacccctctccagtatcttcacactcttgtcaactctccaggcctctctcttgccctgagttatcagcctgtgtggtgttaactaccttagaaggtacaagctaagaaatgtaacagtatcaaccctcccagttgcttaattatacccataggtaatacaaaaagctctgaagacccaaagatgacattactaatgatgtgatttcaggagccacagaagaaccttaccagcttccctcaaatcagtccttatcctctttctatcttcactcccatcatcatctattttcacactatccagctaagcaaagattcctggaggctgacttgtatcttcagactcacagagtgaattcagctcttctgaatcaagacccacccagtctctttcattcagacctgttgctaacaaatttatatttgccaaggatattaggcaaaagaggctacttgattggtggccaacctcgtgcccacatggaaggtatctttaatagggtcttttcaaaccttagtggaggagggtcagctcaatttgggcaatgcatttgttcccagtttcattttcttcctgggaattaactcgtcatttcattccttcagtcatcttctgtgtaggtgaccggagcactgagaggcagctctgatgcactattgtgtgtcagcagctcaaaggccctaaaacactgaaggttctgcatctgaagtattagattgttagcagcaaaatatgaaagatgaggtggacagtcctctaagccctatttagggaagcttttccaagccacaatcttaactacctacccaaaggatttgcattacccccagattctgtgccaacaaccttttaaggaaatacagtccttgggaaatgagttttgatggtgaattggggtgttaaggaagggaaagattgtcatagatggtagggctttgaaaatgcagggtatcagctgccactcctggcttcaacacattgagtcactgcctagacggttctcttggtcttattcccatcctggccaatgcttaaatactatttgttgaaaataattctttgagacagatttcagctacctcccttccaggttcgatttaacttggttgtaattgtcaatttgttgttataggtcttacctgtgtgaaagaaagaaaaagaaagaaagaaagaaagagaaaggaaattataaggtcaagttaacagttttgaggttttgtgtttttttctggaactacttcaagtgagaaaataaaaaaaaatggtgacaaagctgtacagatagagataatagaagacaaagagattaaaaggaaataaaaatgcatgattaaaaactaagaataaaaaacctatttttatgtttcctaaaggaaattgtttattctacagactcagtaggtagacacaaacataaagatttccctagaagacatagagtgggatttgataacactgtctgttattttctgtacattgtggtaggtccaggaaatatgacattttcccccttgatgtgttattgttgttgttgggtggggtgggcattttgtttatttgtttggtggcaatcagtggtagtagggagtgggagggcttatattggtttttccagctattaaggggacatattgtgtcgttgtgcttttcacgttataaaatgtttatatttaccagtacagcactgggctttataaagactgcactcagaaccacactgcacagtccagttttttaaaaagctgctacatgacagacaggtaatcccactgagtgagttttgagaaacaaatcaaacgaagtaaacaagaaacataaaaaccaaatagcaaatgaataaaagcctgttcttgtaacttattcaacttttgccaaattcctaccaatcacttgctttttaaaagaaatgtataatagccaaaagagaaattatgtccctgttgtacagaagttagaatttttgactccaggcagcagtttgctcagtgatcttgaacaagttatccaattgcctctacatttgcatcagtttctctagctgcaaaatggggataatactatatacctacctcacagtgggagggcaggagattttgaggccctgaggttttaggtgggctgtgagggccaacgcttgacacaaagtccatgggttattattcaagaatgcacaggcccatcggccttttagaaagacaagacagggagtgcttgtttgatatttcaaggaataaagccggagctcctgaattgtagtccaccttaaaagagagacctgtattggagaatattttatttttttggcaaatttgatcttaccctttaccagttctataatttggttaaaagctgattacgtcctacaatgtcaaagtcagctaactgtcgtctacttaagacttctggtcatttccaacttatagaggaagggagtctctaaaatctcttcttcagaaggcacctcacttctcagacttaaaattccacatcaagtgttccattaaaagaagataaggcattctgagtgcaaacaaatgggggcttcttaaactacacaccagcagtcagtgaggaaaactttgaacaattattgagttgctttcttgggtctctataatcaataacctgtctgcagatatctatctatataaagatattatatataaatataaatttacatatatatgcacatgtatatatagttgtacatatatgtgtgtatatatatacttaaatgtaatatttacaaaataaaactgtgatctcgtctagagaaaatgtattcatattacaaactgctcttccatatttatgtaccatattatacctttttattattgttataattattatgggtatttctaattaatatgatgttgaaacctgtttggcaccttctggaagctaccaaaaaaatgacactccattgaagtgcttaaaagctgttctcataagaattctactggcctattgtaaaaaagaaaaaaaaaagaaaaagaagaaagacacaaagaaaataatctaaacaccaaaaactaaacacaattccaatcctttttctgtacctcacgcgcataaatttggctgctcctatttttttttctgtttatgtgtttttatggatctaagttaaatcttttggcaatatataaaaatgtaaatagtaaactttatttattaagaatgtcatcttttttaatttatatttacacaattgttcatctaatttattttttctatacagttttaaatactcagacatattttgctgttcatgatatttttatcctgttctcatggatttgttttcccatactgttttctctgatctcaattacaggttggatctcacaaataataatgtcagagacagaaatattttgccactgttgattactatactttaaagttctatattatgaaaatatataatagcttgtacgct

SEQ ID NO: 455079 - DNA, 11567 bp, Homo sapiens
ctgtccaggttgagtgagggtgtccaggatgaggaatgagggtgtccagggtgaggagtgagggagtccagggtgaggagtgagggagtccagggtgaggattgagggtgtcagggtgagtgagagtgtccagggtgaggagtgagggtatccagggtgagtgagggtgtccagggtgaggagtgagggtatccagggtgagtgagggtgtccagggtgagtgagggtgtcagggtgagtgaacgtgtccagggtgtgtgagggtgtccagggtgcagagtgaggtgtccagggtgaggagtgacggtgtctggggtgagtgagggtgtccagggtgaggagtgagggtgtcagggtgagtgagggtgtccagggttgagtgcacatgtgtggtgaggaggtgtttgcagtgcttcaggcgcagcaactctttcatctagtttaaaattgtgctctgaggttagattttagtagaacaaaggccttacaaagaatgtgaaaacattgtgcttccctgcttacaggcaattaaaaaggagaatcaagctgagggtgcctggtgtggggtggggtggagaagaccacagagactattgtgtgttttattcaacagtgtcctgggctgctttctccagaaatgtccctgacacatggatgtaagtgtggctagtttactgggagatgatcccagtgatgcaggacacgcgagccctaagattgaagcatagcccgggagggttcttagctttgcccaggaaggaactcaaggcaagccagtggtgttagcaacttttattgaagcggccggctgtgcacagcagcagcagaggcgctgctccttgcaaagcagggctgccctacaggctgtgcgcccacagtagcagctcagaggcagttctgcagtggtatttgtatccacttttaattatatgcaaatgaaggggcagtttatgcagacatttccagggtgagggtggtaacttctgggtgctgccagagccatcgtgaactgacttgacacaggtcggtgtgtcctatggaaactagcatctgccctggacctattttagctagtgctcagtttggtctgagtgcctgagccccacttccagagttgagtcccacctcctacctcattcccccttcagagattagatactcctccttaatcttaagggggcctcgagaagggcggagtcctgcttttccgtaactacttcctgctgagtttatggcacgtaggccctgcctggcactggaggacgtaaaaatttctggatacctgatctaaggagcccagaggcaggacgatttcattctccgtgtcagtggacaggatgggctggaagccttgtgccagcattgtctctggaactgtggtaatctagaatacacaaactttactaagaggttaaagaagcaaggaccaaacatttgtaacaagacagttgtcaaaggtcctagaagaggtgaaaaacaggtgagacttgggaaggcacttttgatggttgaccagatatagttggggcagtgccctggttatatctatgtaactaggtagcttgctcatagatcttttgaatgttaacctcaacctgtccagagttaatatatgtgcagcaggttttattaataactgcacaagaccccaccttgttcagctagtaaataatccaatgctagtctgttatcaacaactacattttccagagtctggggaactcttgaattctctttaatgcctgatctccgttggtggctaaggattctaggatttgagccaagttctttagcgttaactcatggtaggcaaagcaccccagggtgctgctagtcctattgccaccctgattcctgccagaaataagtaagcaagcaacaggacaatgaactccatgttgcccagatcccactgagagtgaacgtgcagtcatgcccataaccgacacacatcccagtccatgtgggtcagtccttcatcaccctccctgccttctgacaacagcagactccagccattccattatcattcacagcccaacccaagcagtcagtggctgaagaaagagaatcaggtatactctatgtccacatataccttcctgccacagggcttcaccaactggcaggattccccccagcccccaactcctcctcatcccttgttcccaggcgggtcaattggagagtgagcagagatagatggcttgcagaagggtatgcaagatggggagactccaccagaccttagggagagaatggcatctttctccaccttttaagagagacagagcctccctgaggtctcaaagatttttcagggcaacacaagaaacgtttccaagcctcagctgcaggtgttcacctttccactctggggtgtgaggagatggtaagctgaggacaagtgtgttccagatgcaggccaactctgttctccaacagtttgaaccaacttggccttggggttccaagggtaggatgaagggtgtcacggcaggacggggcctggcgtgaggcaacagcaagcagagcgaggacacaacagtggcagcagtgtacagacacaggacgtcagcttcaaacgatgcaacagcagggatatcttgggcacggctctgattcgagccactcccaactctcttgcctccaggatggaggcactgtacatgcaacagtccagagaaagattctagccagtccaagcccaggcacatccagagaaggtgggagctcttcgggttgactccaccgaggaaaacaggcatttgggtatttcagattcccgctccacaataaggcaacttttaaaaaaatattatttccaaaaacaaaacaaaaattccagggggagggaattcagcggatcagtcttaagaggagcttttttttggagcgagaaatcatataaaataaaatgaaataaaacaaggaggaaggcaaccagctgttaggggaaaaataaggcagataaaggagcggggagagaaattaattgccaaccaggaggagttgggctgtatttttcaaaggtggggagagtggagcacacaccttgaggaggaaagcgagaaagaaaagaaaaaagcaagtgaaggggggctcgcccaagaagggtgaagaagcgaagaaagtcgaggcgccgaggctcccaaagctggcagctccgggtggcggtgcaggggcgaaggggggggcggggggaacgtcggacatgcggctctggagttgggtgctgcacctggggctgctgagcgccgcgctgggctgcgggctggccgagcgtccccgccgggcccggagagacccgcgggccggccgacccccgcgccccgccgccggcccggccacctgcgccacccgcggcccgcggccgccgcgcctcgccgccgccgccgccgccgccgggcggtgcctgggaagccgtgcgcgtcccccggcggcggcagcagcgggaggcgaggggcgccaccgaggagccgagcccgccgagccgggcgctctatttcagcgggcgaggcgagcagctgcgcctccgggccgacctcgagctgccccgggacgcgttcacgctgcaagtgtggctgcgagcggaggggggccagaggtctccggcagtgatcacagggctgtatgacaaatgttcttatatctcacgtgaccgaggatgggtcgtgggcattcacaccatcagtgaccaagacaacaaagacccacgctactttttctccttgaagacagaccgagcccggcaagtgaccaccatcaatgcccaccgcagctacctcccaggccagtgggtatacctagctgccacctatgatgggcagttcatgaagctctatgtgaatggtgcccaggtggccacctctggggaacaagtgggtggcatattcagcccactgacccagaagtgcaaagtgctcatgttagggggcagtgccctgaatcacaactaccggggctacatcgagcacttcagtctgtggaaggtggccaggactcagcgggagatactgtctgacatggaaacccatggcgcccacactgctctacctcagctcctcctccaggagaactgggacaatgtgaagcatgcctggtcccccatgaaggatggcagcagccccaaagtggaattcagcaatgcccacggctttctgctggacacgagtctggagcctcctctgtgcggacagacattgtgtgacaacacagaggtcattgccagctacaatcagctctcaagtttccgccagcccaaggtggtgcgctaccgcgtggtcaacctctatgaagatgatcataagaacccgacggtgacgcgcgagcaggtggacttccagcaccatcagctggctgaggccttcaagcaatacaacatctcctgggagctggacgtgctggaggtgagcaactcctcccttcgccgccgcctcatcctggccaactgtgacatcagcaagattggggatgagaactgtgaccccgagtgcaaccacacgctgacgggccacgacggcggggattgccgccacctgcgccaccctgccttcgtgaagaagcagcacaacggggtgtgtgacatggactgcaactatgaacggttcaactttgatggtggagagtgctgtgaccctgaaatcaccaatgtcactcagacttgctttgaccccgactctccacacagagcctacttggatgttaatgagctgaagaacattcttaaattggatggatcaacacatctcaatattttctttgcaaaatcctcagaggaggagttggcaggagtagcaacttggccatgggacaaggaggccctgatgcacttaggtggcattgtcttgaacccatctttctatggcatgcctgggcacacccacaccatgatccatgagattggtcacagcctgggcctctatcacgtcttccgaggcatctcagaaatccagtcctgcagtgacccctgcatggagacagagccctccttcgagactggagacctctgcaatgataccaacccagcccctaaacacaagtcctgtggtgacccagggccaggaaatgacacctgtggctttcatagcttcttcaacactccttacaacaacttcatgagctatgcagatgacgactgtacggactccttcacgcccaatcaagtcgccagaatgcactgttacctggacctggtctaccagggctggcagccctccaggaaaccagcgcctgttgccctcgccccccaagttctgggccacacaacggactctgtgacactggagtggttcccacctatagatggccatttctttgaaagagaattgggatcagcatgtcatctttgcctggaagggagaatcctggtgcagtatgcttccaacgcttcctccccaatgccctgcagcccatcaggacactggagccctcgtgaagcagaaggtcatcctgatgttgaacagccctgtaagtccagtgtccgcacctggagcccaaattcagctgtcaacccacacacggttcctccagcctgccctgagcctcaaggctgctacctcgagctggagttcctctaccccttggtccctgagtctctgaccatttgggtgacctttgtctccactgactgggactctagtggagctgtcaatgacatcaaactgttggctgtcagtgggaagaacatctccctgggtcctcagaatgtcttctgtgatgtcccactgaccatcagactctgggacgtgggcgaggaggtgtatggcatccaaatctacacgctggatgagcacctggagatcgatgctgccatgttgacctccactgcagacaccccactctgtctacagtgtaagcccctgaagtataaggtggtccgggaccctcctctccagatggatgtggcctccatcctacatctcaataggaaattcgtagacatggatctaaatcttggcagtgtgtaccagtattgggtcataactatttcaggaactgaagagagtgagccatcacctgctgtcacatacatccatggaagtgggtactgtggcgatggcattatacaaaaagaccaaggtgaacaatgcgacgacatgaataagatcaatggtgatggctgctcccttttctgccgacaagaagtctccttcaattgtattgatgaacccagccggtgctatttccatgatggtgatggggtatgtgaggagtttgaacaaaaaaccagcattaaggactgtggtgtctacacgccccagggattcctggatcagtgggcatccaatgcttcagtatctcatcaagaccagcaatgcccaggctgggtcatcatcggacagccagcagcatcccaggtgtgtcgaaccaaggtgatagatctcagtgaaggcatttcccagcatgcctggtacccttgcaccatcagctacccatattcccagctggctcagaccactttttggctccgggcgtatttttctcaaccaatggttgccgcagctgtcattgtccacctggtgacggatgggacatattatggggaccaaaagcaggagaccatcagcgtgcagctgcttgataccaaagatcagagccacgatctaggcctccatgtcctgagctgcaggaacaatcccctgattatccctgtggtccatgacctcagccagcccttctaccacagccaggcggtacgtgtgagcttcagttcgcccctggtcgccatctcgggggtggccctccgttccttcgacaactttgaccccgtcaccctgagcagctgccagagaggggagacctacagccctgccgagcagagctgcgtgcacttcgcatgtgagaaaactgactgtccagagctggctgtggagaatgcttatctcaattgctccagcagcgaccgctaccacggtgcccagtgtactgtgagctgccggacaggctacgtgctccagatacggcgggatgatgagctgatcaagagccagacgggacccagcgtcacagtgacctgtacagagggcaagtggaataagcaggtggcctgtgagccagtcgactgcagcatcccagatcaccatcaagtctatgctgcctccttctcctgccctgagggcaccacctttggcagtcaatgttccttccagtgccgtcaccctgcacaattgaaaggcaacaacagcctcctgacctgcatggaggatgggctgtggtccttcccagaggccctgtgtgagctcatgtgcctcgctccaccccctgtgcccaatgcagacctccagaccgcccggtgccgagagaataagcacaaggtgggctccttctgcaaatacaaatgcaagcctggataccatgtgcctggatcctctcggaagtcaaagaaacgggccttcaagactcagtgtacccaggatggcagctggcaggagggagcttgtgttcctgtgacctgtgacccacctccaccaaaattccatgggctctaccagtgtactaatggcttccagttcaacagtgagtgtaggatcaagtgtgaagacagtgatgcctcccagggacttgggagcaatgtcattcattgccggaaagatggcacctggaacggctccttccatgtctgccaggagatgcaaggccagtgctcggttccaaacgagctcaacagcaacctcaaactgcagtgccctgatggctatgccatagggtcggagtgtgccacctcgtgcctggaccacaacagcgagtccatcatcctgccaatgaacgtgaccgtgcgtgacatcccccactggctgaaccccacacgggtagagagagttgtctgcactgctggtctcaagtggtatcctcaccctgctctgattcactgtgtcaaaggctgtgagcccttcatgggagacaattattgtgatgccatcaacaaccgagccttttgcaactatgacggtggggattgctgcacctccacagtgaagaccaaaaaggtcaccccattccctatgtcctgtgacctacaaggtgactgtgcttgtcgggacccccaggcccaagaacacagccggaaagacctccggggatacagccatggctaaggaaggacaagaagttgtcaaagaattcccaacgccaggacccacatccctttggtattgatttcacagtcagctgctcaacggaatggcctctccacaccagggatccttagcacccaaccggtctgcctttaattttacccaggaaggactcacattggggcgaatgaaccaagtttcgccatgctggatgatgaaatggattcccatcccaaagtctgagatggattgcatatacagtgtgcagtcccagagcctcctaaaattctagccatttgtcacacaaccacagcaagaaacgtgttctatatctagagtgtgcccatctgtgtttagtacacatgcatgcatacacacccatacaaacatctgtgtgagggcagttctggagatgagcagagagagaccggaataaactcaatcttttctttcccaagctcctagccaacactatccttgggagaaagaaatttgcagaaactgctaagaccaagtgtggagatgtcaagctagttcacactctgaggctcagaatatgtaggacatgcacaattgtgcagtcctttgggattggaagtgaaacagtctgtgatcccctaccttctagggaactaggacctaggaagaggtaaagattatcaggtatgcaaagcgccccaattcttctgctgccatgggggattttaccccaactccagggttcgaggccaatctgagaatggcttaggattgcaatgtcaaggtattatatcagccccttgcttgaggcttgaggtcataatatccctctaggacttacctgttcccccagatcttgccttgggaccacatttgctgctacttttcctgctgctctatcctatacattgaataatccaagatggtagaactaggttaggaaaaattccacacaaccaaacagtctgccttaaaagtgacccacatttttccatagctcctcactttttagcccttctgcaagagaaaaaccctcatgggtccacatggtgagaagttaagtttcctgtaagtgggcctctcaccctggaaaggagttgagggacatcagatgctggaaccctcactgaaagtccagaatgtctaagccagtgttagattttgtaaacaagtggaacagtgttaaatttctatgatgttggagccatccagagactactggaattgtcgagacttttggattattatccttatccttatcctaatcttcctagcccttcaggctagagtaggcttcgatcctgagaaccttgctgttgctctgaggagatataattctgggagaaagaatcttttataagaacagtacagattgttctcaagagggccatcagaaggaagccaaagagttcacagcctcagcaccaacaactcaacatggtcatcatgttttctatatggtttttccagctagcagtactcccttccatacctgtgactgggcagtgcttttctctctcccatgtctagcctccaaaagttaagtgaaaattagtcaactgcacgtggaagcccccaccactttggggatctctttatttcttttcagccagggacctgtccactccctttgaattaatatgggaagaaattaatacaggatgaactggagagaagggttgagtgtggcatactttctgaaacctggagctgggaattgcggagaagggaaggtctagactagttacatcacatagggattactgtaaatcaagtcatctcaagtctagtgaagacagccaacagaaacaaaacctagcatagggatagaaaataccatgcacgtgtgcagccccacctaattcctgcatccaaggcaggtgttgttaatctatcatagcacttaaaaaaaaaaaaaaagagaccaaaaataactttaggaaccaccatattatatcactcccaatagcactgacctggtgatcaaaaacacttgagaagacatctattggccatctctggccaattacactaagaaacatatcaaggtgcttttggcacaggtgcccacaaatacggatgcagtgctgagatagtttatgagacttgtaccatttcacaaactctgaaattgggttccatattggcaaggctgccacagttgttaagaataatcctctatgtttcttcctcacaaaaccatatctcatttatatccagaccattacttcactataattacaaggacaaattattagcaagaaataagaatagtattagaagaattgatcctattttgaacccctctccagtatcttcacactcttgtcaactctccaggcctctctcttgccctgagttatcagcctgtgtggtgttaactaccttagaaggtacaagctaagaaatgtaacagtatcaaccctcccagttgcttaattatacccataggtaatacaaaaagctctgaagacccaaagatgacattactaatgatgtgatttcaggagccacagaagaaccttaccagcttccctcaaatcagtccttatcctctttctatcttcactcccatcatcatctattttcacactatccagctaagcaaagattcctggaggctgacttgtatcttcagactcacagagtgaattcagctcttctgaatcaagacccacccagtctctttcattcagacctgttgctaacaaatttatatttgccaaggatattaggcaaaagaggctacttgattggtggccaacctcgtgcccacatggaaggtatctttaatagggtcttttcaaaccttagtggaggagggtcagctcaatttgggcaatgcatttgttcccagtttcattttcttcctgggaattaactcgtcatttcattccttcagtcatcttctgtgtaggtgaccggagcactgagaggcagctctgatgcactattgtgtgtcagcagctcaaaggccctaaaacactgaaggttctgcatctgaagtattagattgttagcagcaaaatatgaaagatgaggtggacagtcctctaagccctatttagggaagcttttccaagccacaatcttaactacctacccaaaggatttgcattacccccagattctgtgccaacaaccttttaaggaaatacagtccttgggaaatgagttttgatggtgaattggggtgttaaggaagggaaagattgtcatagatggtagggctttgaaaatgcagggtatcagctgccactcctggcttcaacacattgagtcactgcctagacggttctcttggtcttattccttttgtagaactctggacgttgaggattcattatgctgtggttaactttaaatatttttgaattccaaatatctgaattaatgagccttgtctttacaaatatgtgccattgtgcaacatcggtggattttctaaaaataatgtaaatgtcttctattaaatgttgagtgcaataaaatacagaagaattcaaaaaaaaa

SEQ ID NO: 455080 - DNA, 13119 bp, Homo sapiens
ctgtccaggttgagtgagggtgtccaggatgaggaatgagggtgtccagggtgaggagtgagggagtccagggtgaggagtgagggagtccagggtgaggattgagggtgtcagggtgagtgagagtgtccagggtgaggagtgagggtatccagggtgagtgagggtgtccagggtgaggagtgagggtatccagggtgagtgagggtgtccagggtgagtgagggtgtcagggtgagtgaacgtgtccagggtgtgtgagggtgtccagggtgcagagtgaggtgtccagggtgaggagtgacggtgtctggggtgagtgagggtgtccagggtgaggagtgagggtgtcagggtgagtgagggtgtccagggttgagtgcacatgtgtggtgaggaggtgtttgcagtgcttcaggcgcagcaactctttcatctagtttaaaattgtgctctgaggttagattttagtagaacaaaggccttacaaagaatgtgaaaacattgtgcttccctgcttacaggcaattaaaaaggagaatcaagctgagggtgcctggtgtggggtggggtggagaagaccacagagactattgtgtgttttattcaacagtgtcctgggctgctttctccagaaatgtccctgacacatggatgtaagtgtggctagtttactgggagatgatcccagtgatgcaggacacgcgagccctaagattgaagcatagcccgggagggttcttagctttgcccaggaaggaactcaaggcaagccagtggtgttagcaacttttattgaagcggccggctgtgcacagcagcagcagaggcgctgctccttgcaaagcagggctgccctacaggctgtgcgcccacagtagcagctcagaggcagttctgcagtggtatttgtatccacttttaattatatgcaaatgaaggggcagtttatgcagacatttccagggtgagggtggtaacttctgggtgctgccagagccatcgtgaactgacttgacacaggtcggtgtgtcctatggaaactagcatctgccctggacctattttagctagtgctcagtttggtctgagtgcctgagccccacttccagagttgagtcccacctcctacctcattcccccttcagagattagatactcctccttaatcttaagggggcctcgagaagggcggagtcctgcttttccgtaactacttcctgctgagtttatggcacgtaggccctgcctggcactggaggacgtaaaaatttctggatacctgatctaaggagcccagaggcaggacgatttcattctccgtgtcagtggacaggatgggctggaagccttgtgccagcattgtctctggaactgtggtaatctagaatacacaaactttactaagaggttaaagaagcaaggaccaaacatttgtaacaagacagttgtcaaaggtcctagaagaggtgaaaaacaggtgagacttgggaaggcacttttgatggttgaccagatatagttggggcagtgccctggttatatctatgtaactaggtagcttgctcatagatcttttgaatgttaacctcaacctgtccagagttaatatatgtgcagcaggttttattaataactgcacaagaccccaccttgttcagctagtaaataatccaatgctagtctgttatcaacaactacattttccagagtctggggaactcttgaattctctttaatgcctgatctccgttggtggctaaggattctaggatttgagccaagttctttagcgttaactcatggtaggcaaagcaccccagggtgctgctagtcctattgccaccctgattcctgccagaaataagtaagcaagcaacaggacaatgaactccatgttgcccagatcccactgagagtgaacgtgcagtcatgcccataaccgacacacatcccagtccatgtgggtcagtccttcatcaccctccctgccttctgacaacagcagactccagccattccattatcattcacagcccaacccaagcagtcagtggctgaagaaagagaatcaggtatactctatgtccacatataccttcctgccacagggcttcaccaactggcaggattccccccagcccccaactcctcctcatcccttgttcccaggcgggtcaattggagagtgagcagagatagatggcttgcagaagggtatgcaagatggggagactccaccagaccttagggagagaatggcatctttctccaccttttaagagagacagagcctccctgaggtctcaaagatttttcagggcaacacaagaaacgtttccaagcctcagctgcaggtgttcacctttccactctggggtgtgaggagatggtaagctgaggacaagtgtgttccagatgcaggccaactctgttctccaacagtttgaaccaacttggccttggggttccaagggtaggatgaagggtgtcacggcaggacggggcctggcgtgaggcaacagcaagcagagcgaggacacaacagtggcagcagtgtacagacacaggacgtcagcttcaaacgatgcaacagcagggatatcttgggcacggctctgattcgagccactcccaactctcttgcctccaggatggaggcactgtacatgcaacagtccagagaaagattctagccagtccaagcccaggcacatccagagaaggtgggagctcttcgggttgactccaccgaggaaaacaggcatttgggtatttcagattcccgctccacaataaggcaacttttaaaaaaatattatttccaaaaacaaaacaaaaattccagggggagggaattcagcggatcagtcttaagaggagcttttttttggagcgagaaatcatataaaataaaatgaaataaaacaaggaggaaggcaaccagctgttaggggaaaaataaggcagataaaggagcggggagagaaattaattgccaaccaggaggagttgggctgtatttttcaaaggtggggagagtggagcacacaccttgaggaggaaagcgagaaagaaaagaaaaaagcaagtgaaggggggctcgcccaagaagggtgaagaagcgaagaaagtcgaggcgccgaggctcccaaagctggcagctccgggtggcggtgcaggggcgaaggggggggcggggggaacgtcggacatgcggctctggagttgggtgctgcacctggggctgctgagcgccgcgctgggctgcgggctggccgagcgtccccgccgggcccggagagacccgcgggccggccgacccccgcgccccgccgccggcccggccacctgcgccacccgcggcccgcggccgccgcgcctcgccgccgccgccgccgccgccgggcggtgcctgggaagccgtgcgcgtcccccggcggcggcagcagcgggaggcgaggggcgccaccgaggagccgagcccgccgagccgggcgctctatttcagcgggcgaggcgagcagctgcgcctccgggccgacctcgagctgccccgggacgcgttcacgctgcaagtgtggctgcgagcggaggggggccagaggtctccggcagtgatcacagggctgtatgacaaatgttcttatatctcacgtgaccgaggatgggtcgtgggcattcacaccatcagtgaccaagacaacaaagacccacgctactttttctccttgaagacagaccgagcccggcaagtgaccaccatcaatgcccaccgcagctacctcccaggccagtgggtatacctagctgccacctatgatgggcagttcatgaagctctatgtgaatggtgcccaggtggccacctctggggaacaagtgggtggcatattcagcccactgacccagaagtgcaaagtgctcatgttagggggcagtgccctgaatcacaactaccggggctacatcgagcacttcagtctgtggaaggtggccaggactcagcgggagatactgtctgacatggaaacccatggcgcccacactgctctacctcagctcctcctccaggagaactgggacaatgtgaagcatgcctggtcccccatgaaggatggcagcagccccaaagtggaattcagcaatgcccacggctttctgctggacacgagtctggagcctcctctgtgcggacagacattgtgtgacaacacagaggtcattgccagctacaatcagctctcaagtttccgccagcccaaggtggtgcgctaccgcgtggtcaacctctatgaagatgatcataagaacccgacggtgacgcgcgagcaggtggacttccagcaccatcagctggctgaggccttcaagcaatacaacatctcctgggagctggacgtgctggaggtgagcaactcctcccttcgccgccgcctcatcctggccaactgtgacatcagcaagattggggatgagaactgtgaccccgagtgcaaccacacgctgacgggccacgacggcggggattgccgccacctgcgccaccctgccttcgtgaagaagcagcacaacggggtgtgtgacatggactgcaactatgaacggttcaactttgatggtggagagtgctgtgaccctgaaatcaccaatgtcactcagacttgctttgaccccgactctccacacagagcctacttggatgttaatgagctgaagaacattcttaaattggatggatcaacacatctcaatattttctttgcaaaatcctcagaggaggagttggcaggagtagcaacttggccatgggacaaggaggccctgatgcacttaggtggcattgtcttgaacccatctttctatggcatgcctgggcacacccacaccatgatccatgagattggtcacagcctgggcctctatcacgtcttccgaggcatctcagaaatccagtcctgcagtgacccctgcatggagacagagccctccttcgagactggagacctctgcaatgataccaacccagcccctaaacacaagtcctgtggtgacccagggccaggaaatgacacctgtggctttcatagcttcttcaacactccttacaacaacttcatgagctatgcagatgacgactgtacggactccttcacgcccaatcaagtcgccagaatgcactgttacctggacctggtctaccagggctggcagccctccaggaaaccagcgcctgttgccctcgccccccaagttctgggccacacaacggactctgtgacactggagtggttcccacctatagatggccatttctttgaaagagaattgggatcagcatgtcatctttgcctggaagggagaatcctggtgcagtatgcttccaacgcttcctccccaatgccctgcagcccatcaggacactggagccctcgtgaagcagaaggtcatcctgatgttgaacagccctgtaagtccagtgtccgcacctggagcccaaattcagctgtcaacccacacacggttcctccagcctgccctgagcctcaaggctgctacctcgagctggagttcctctaccccttggtccctgagtctctgaccatttgggtgacctttgtctccactgactgggactctagtggagctgtcaatgacatcaaactgttggctgtcagtgggaagaacatctccctgggtcctcagaatgtcttctgtgatgtcccactgaccatcagactctgggacgtgggcgaggaggtgtatggcatccaaatctacacgctggatgagcacctggagatcgatgctgccatgttgacctccactgcagacaccccactctgtctacagtgtaagcccctgaagtataaggtggtccgggaccctcctctccagatggatgtggcctccatcctacatctcaataggaaattcgtagacatggatctaaatcttggcagtgtgtaccagtattgggtcataactatttcaggaactgaagagagtgagccatcacctgctgtcacatacatccatggaagtgggtactgtggcgatggcattatacaaaaagaccaaggtgaacaatgcgacgacatgaataagatcaatggtgatggctgctcccttttctgccgacaagaagtctccttcaattgtattgatgaacccagccggtgctatttccatgatggtgatggggtatgtgaggagtttgaacaaaaaaccagcattaaggactgtggtgtctacacgccccagggattcctggatcagtgggcatccaatgcttcagtatctcatcaagaccagcaatgcccaggctgggtcatcatcggacagccagcagcatcccaggtgtgtcgaaccaaggtgatagatctcagtgaaggcatttcccagcatgcctggtacccttgcaccatcagctacccatattcccagctggctcagaccactttttggctccgggcgtatttttctcaaccaatggttgccgcagctgtcattgtccacctggtgacggatgggacatattatggggaccaaaagcaggagaccatcagcgtgcagctgcttgataccaaagatcagagccacgatctaggcctccatgtcctgagctgcaggaacaatcccctgattatccctgtggtccatgacctcagccagcccttctaccacagccaggcggtacgtgtgagcttcagttcgcccctggtcgccatctcgggggtggccctccgttccttcgacaactttgaccccgtcaccctgagcagctgccagagaggggagacctacagccctgccgagcagagctgcgtgcacttcgcatgtgagaaaactgactgtccagagctggctgtggagaatgcttatctcaattgctccagcagcgaccgctaccacggtgcccagtgtactgtgagctgccggacaggctacgtgctccagatacggcgggatgatgagctgatcaagagccagacgggacccagcgtcacagtgacctgtacagagggcaagtggaataagcaggtggcctgtgagccagtcgactgcagcatcccagatcaccatcaagtctatgctgcctccttctcctgccctgagggcaccacctttggcagtcaatgttccttccagtgccgtcaccctgcacaattgaaaggcaacaacagcctcctgacctgcatggaggatgggctgtggtccttcccagaggccctgtgtgagctcatgtgcctcgctccaccccctgtgcccaatgcagacctccagaccgcccggtgccgagagaataagcacaaggtgggctccttctgcaaatacaaatgcaagcctggataccatgtgcctggatcctctcggaagtcaaagaaacgggccttcaagactcagtgtacccaggatggcagctggcaggagggagcttgtgttcctgtgacctgtgacccacatccctttggtattgatttcacagtcagctgctcaacggaatggcctctccacaccagggatccttagcacccaaccggtctgcctttaattttacccaggaaggactcacattggggcgaatgaaccaagtttcgccatgctggatgatgaaatggattcccatcccaaagtctgagatggattgcatatacagtgtgcagtcccagagcctcctaaaattctagccatttgtcacacaaccacagcaagaaacgtgttctatatctagagtgtgcccatctgtgtttagtacacatgcatgcatacacacccatacaaacatctgtgtgagggcagttctggagatgagcagagagagaccggaataaactcaatcttttctttcccaagctcctagccaacactatccttgggagaaagaaatttgcagaaactgctaagaccaagtgtggagatgtcaagctagttcacactctgaggctcagaatatgtaggacatgcacaattgtgcagtcctttgggattggaagtgaaacagtctgtgatcccctaccttctagggaactaggacctaggaagaggtaaagattatcaggtatgcaaagcgccccaattcttctgctgccatgggggattttaccccaactccagggttcgaggccaatctgagaatggcttaggattgcaatgtcaaggtattatatcagccccttgcttgaggcttgaggtcataatatccctctaggacttacctgttcccccagatcttgccttgggaccacatttgctgctacttttcctgctgctctatcctatacattgaataatccaagatggtagaactaggttaggaaaaattccacacaaccaaacagtctgccttaaaagtgacccacatttttccatagctcctcactttttagcccttctgcaagagaaaaaccctcatgggtccacatggtgagaagttaagtttcctgtaagtgggcctctcaccctggaaaggagttgagggacatcagatgctggaaccctcactgaaagtccagaatgtctaagccagtgttagattttgtaaacaagtggaacagtgttaaatttctatgatgttggagccatccagagactactggaattgtcgagacttttggattattatccttatccttatcctaatcttcctagcccttcaggctagagtaggcttcgatcctgagaaccttgctgttgctctgaggagatataattctgggagaaagaatcttttataagaacagtacagattgttctcaagagggccatcagaaggaagccaaagagttcacagcctcagcaccaacaactcaacatggtcatcatgttttctatatggtttttccagctagcagtactcccttccatacctgtgactgggcagtgcttttctctctcccatgtctagcctccaaaagttaagtgaaaattagtcaactgcacgtggaagcccccaccactttggggatctctttatttcttttcagccagggacctgtccactccctttgaattaatatgggaagaaattaatacaggatgaactggagagaagggttgagtgtggcatactttctgaaacctggagctgggaattgcggagaagggaaggtctagactagttacatcacatagggattactgtaaatcaagtcatctcaagtctagtgaagacagccaacagaaacaaaacctagcatagggatagaaaataccatgcacgtgtgcagccccacctaattcctgcatccaaggcaggtgttgttaatctatcatagcacttaaaaaaaaaaaaaaagagaccaaaaataactttaggaaccaccatattatatcactcccaatagcactgacctggtgatcaaaaacacttgagaagacatctattggccatctctggccaattacactaagaaacatatcaaggtgcttttggcacaggtgcccacaaatacggatgcagtgctgagatagtttatgagacttgtaccatttcacaaactctgaaattgggttccatattggcaaggctgccacagttgttaagaataatcctctatgtttcttcctcacaaaaccatatctcatttatatccagaccattacttcactataattacaaggacaaattattagcaagaaataagaatagtattagaagaattgatcctattttgaacccctctccagtatcttcacactcttgtcaactctccaggcctctctcttgccctgagttatcagcctgtgtggtgttaactaccttagaaggtacaagctaagaaatgtaacagtatcaaccctcccagttgcttaattatacccataggtaatacaaaaagctctgaagacccaaagatgacattactaatgatgtgatttcaggagccacagaagaaccttaccagcttccctcaaatcagtccttatcctctttctatcttcactcccatcatcatctattttcacactatccagctaagcaaagattcctggaggctgacttgtatcttcagactcacagagtgaattcagctcttctgaatcaagacccacccagtctctttcattcagacctgttgctaacaaatttatatttgccaaggatattaggcaaaagaggctacttgattggtggccaacctcgtgcccacatggaaggtatctttaatagggtcttttcaaaccttagtggaggagggtcagctcaatttgggcaatgcatttgttcccagtttcattttcttcctgggaattaactcgtcatttcattccttcagtcatcttctgtgtaggtgaccggagcactgagaggcagctctgatgcactattgtgtgtcagcagctcaaaggccctaaaacactgaaggttctgcatctgaagtattagattgttagcagcaaaatatgaaagatgaggtggacagtcctctaagccctatttagggaagcttttccaagccacaatcttaactacctacccaaaggatttgcattacccccagattctgtgccaacaaccttttaaggaaatacagtccttgggaaatgagttttgatggtgaattggggtgttaaggaagggaaagattgtcatagatggtagggctttgaaaatgcagggtatcagctgccactcctggcttcaacacattgagtcactgcctagacggttctcttggtcttattcccatcctggccaatgcttaaatactatttgttgaaaataattctttgagacagatttcagctacctcccttccaggttcgatttaacttggttgtaattgtcaatttgttgttataggtcttacctgtgtgaaagaaagaaaaagaaagaaagaaagaaagagaaaggaaattataaggtcaagttaacagttttgaggttttgtgtttttttctggaactacttcaagtgagaaaataaaaaaaaatggtgacaaagctgtacagatagagataatagaagacaaagagattaaaaggaaataaaaatgcatgattaaaaactaagaataaaaaacctatttttatgtttcctaaaggaaattgtttattctacagactcagtaggtagacacaaacataaagatttccctagaagacatagagtgggatttgataacactgtctgttattttctgtacattgtggtaggtccaggaaatatgacattttcccccttgatgtgttattgttgttgttgggtggggtgggcattttgtttatttgtttggtggcaatcagtggtagtagggagtgggagggcttatattggtttttccagctattaaggggacatattgtgtcgttgtgcttttcacgttataaaatgtttatatttaccagtacagcactgggctttataaagactgcactcagaaccacactgcacagtccagttttttaaaaagctgctacatgacagacaggtaatcccactgagtgagttttgagaaacaaatcaaacgaagtaaacaagaaacataaaaaccaaatagcaaatgaataaaagcctgttcttgtaacttattcaacttttgccaaattcctaccaatcacttgctttttaaaagaaatgtataatagccaaaagagaaattatgtccctgttgtacagaagttagaatttttgactccaggcagcagtttgctcagtgatcttgaacaagttatccaattgcctctacatttgcatcagtttctctagctgcaaaatggggataatactatatacctacctcacagtgggagggcaggagattttgaggccctgaggttttaggtgggctgtgagggccaacgcttgacacaaagtccatgggttattattcaagaatgcacaggcccatcggccttttagaaagacaagacagggagtgcttgtttgatatttcaaggaataaagccggagctcctgaattgtagtccaccttaaaagagagacctgtattggagaatattttatttttttggcaaatttgatcttaccctttaccagttctataatttggttaaaagctgattacgtcctacaatgtcaaagtcagctaactgtcgtctacttaagacttctggtcatttccaacttatagaggaagggagtctctaaaatctcttcttcagaaggcacctcacttctcagacttaaaattccacatcaagtgttccattaaaagaagataaggcattctgagtgcaaacaaatgggggcttcttaaactacacaccagcagtcagtgaggaaaactttgaacaattattgagttgctttcttgggtctctataatcaataacctgtctgcagatatctatctatataaagatattatatataaatataaatttacatatatatgcacatgtatatatagttgtacatatatgtgtgtatatatatacttaaatgtaatatttacaaaataaaactgtgatctcgtctagagaaaatgtattcatattacaaactgctcttccatatttatgtaccatattatacctttttattattgttataattattatgggtatttctaattaatatgatgttgaaacctgtttggcaccttctggaagctaccaaaaaaatgacactccattgaagtgcttaaaagctgttctcataagaattctactggcctattgtaaaaaagaaaaaaaaaagaaaaagaagaaagacacaaagaaaataatctaaacaccaaaaactaaacacaattccaatcctttttctgtacctcacgcgcataaatttggctgctcctatttttttttctgtttatgtgtttttatggatctaagttaaatcttttggcaatatataaaaatgtaaatagtaaactttatttattaagaatgtcatcttttttaatttatatttacacaattgttcatctaatttattttttctatacagttttaaatactcagacatattttgctgttcatgatatttttatcctgttctcatggatttgttttcccatactgttttctctgatctcaattacaggttggatctcacaaataataatgtcagagacagaaatattttgccactgttgattactatactttaaagttctatattatgaaaatatataatagcttgtacgct

SEQ ID NO: 455081 - DNA, 13502 bp, Homo sapiens
ctgtccaggttgagtgagggtgtccaggatgaggaatgagggtgtccagggtgaggagtgagggagtccagggtgaggagtgagggagtccagggtgaggattgagggtgtcagggtgagtgagagtgtccagggtgaggagtgagggtatccagggtgagtgagggtgtccagggtgaggagtgagggtatccagggtgagtgagggtgtccagggtgagtgagggtgtcagggtgagtgaacgtgtccagggtgtgtgagggtgtccagggtgcagagtgaggtgtccagggtgaggagtgacggtgtctggggtgagtgagggtgtccagggtgaggagtgagggtgtcagggtgagtgagggtgtccagggttgagtgcacatgtgtggtgaggaggtgtttgcagtgcttcaggcgcagcaactctttcatctagtttaaaattgtgctctgaggttagattttagtagaacaaaggccttacaaagaatgtgaaaacattgtgcttccctgcttacaggcaattaaaaaggagaatcaagctgagggtgcctggtgtggggtggggtggagaagaccacagagactattgtgtgttttattcaacagtgtcctgggctgctttctccagaaatgtccctgacacatggatgtaagtgtggctagtttactgggagatgatcccagtgatgcaggacacgcgagccctaagattgaagcatagcccgggagggttcttagctttgcccaggaaggaactcaaggcaagccagtggtgttagcaacttttattgaagcggccggctgtgcacagcagcagcagaggcgctgctccttgcaaagcagggctgccctacaggctgtgcgcccacagtagcagctcagaggcagttctgcagtggtatttgtatccacttttaattatatgcaaatgaaggggcagtttatgcagacatttccagggtgagggtggtaacttctgggtgctgccagagccatcgtgaactgacttgacacaggtcggtgtgtcctatggaaactagcatctgccctggacctattttagctagtgctcagtttggtctgagtgcctgagccccacttccagagttgagtcccacctcctacctcattcccccttcagagattagatactcctccttaatcttaagggggcctcgagaagggcggagtcctgcttttccgtaactacttcctgctgagtttatggcacgtaggccctgcctggcactggaggacgtaaaaatttctggatacctgatctaaggagcccagaggcaggacgatttcattctccgtgtcagtggacaggatgggctggaagccttgtgccagcattgtctctggaactgtggtaatctagaatacacaaactttactaagaggttaaagaagcaaggaccaaacatttgtaacaagacagttgtcaaaggtcctagaagaggtgaaaaacaggtgagacttgggaaggcacttttgatggttgaccagatatagttggggcagtgccctggttatatctatgtaactaggtagcttgctcatagatcttttgaatgttaacctcaacctgtccagagttaatatatgtgcagcaggttttattaataactgcacaagaccccaccttgttcagctagtaaataatccaatgctagtctgttatcaacaactacattttccagagtctggggaactcttgaattctctttaatgcctgatctccgttggtggctaaggattctaggatttgagccaagttctttagcgttaactcatggtaggcaaagcaccccagggtgctgctagtcctattgccaccctgattcctgccagaaataagtaagcaagcaacaggacaatgaactccatgttgcccagatcccactgagagtgaacgtgcagtcatgcccataaccgacacacatcccagtccatgtgggtcagtccttcatcaccctccctgccttctgacaacagcagactccagccattccattatcattcacagcccaacccaagcagtcagtggctgaagaaagagaatcaggtatactctatgtccacatataccttcctgccacagggcttcaccaactggcaggattccccccagcccccaactcctcctcatcccttgttcccaggcgggtcaattggagagtgagcagagatagatggcttgcagaagggtatgcaagatggggagactccaccagaccttagggagagaatggcatctttctccaccttttaagagagacagagcctccctgaggtctcaaagatttttcagggcaacacaagaaacgtttccaagcctcagctgcaggtgttcacctttccactctggggtgtgaggagatggtaagctgaggacaagtgtgttccagatgcaggccaactctgttctccaacagtttgaaccaacttggccttggggttccaagggtaggatgaagggtgtcacggcaggacggggcctggcgtgaggcaacagcaagcagagcgaggacacaacagtggcagcagtgtacagacacaggacgtcagcttcaaacgatgcaacagcagggatatcttgggcacggctctgattcgagccactcccaactctcttgcctccaggatggaggcactgtacatgcaacagtccagagaaagattctagccagtccaagcccaggcacatccagagaaggtgggagctcttcgggttgactccaccgaggaaaacaggcatttgggtatttcagattcccgctccacaataaggcaacttttaaaaaaatattatttccaaaaacaaaacaaaaattccagggggagggaattcagcggatcagtcttaagaggagcttttttttggagcgagaaatcatataaaataaaatgaaataaaacaaggaggaaggcaaccagctgttaggggaaaaataaggcagataaaggagcggggagagaaattaattgccaaccaggaggagttgggctgtatttttcaaaggtggggagagtggagcacacaccttgaggaggaaagcgagaaagaaaagaaaaaagcaagtgaaggggggctcgcccaagaagggtgaagaagcgaagaaagtcgaggcgccgaggctcccaaagctggcagctccgggtggcggtgcaggggcgaaggggggggcggggggaacgtcggacatgcggctctggagttgggtgctgcacctggggctgctgagcgccgcgctgggctgcgggctggccgagcgtccccgccgggcccggagagacccgcgggccggccgacccccgcgccccgccgccggcccggccacctgcgccacccgcggcccgcggccgccgcgcctcgccgccgccgccgccgccgccgggcggtgcctgggaagccgtgcgcgtcccccggcggcggcagcagcgggaggcgaggggcgccaccgaggagccgagcccgccgagccgggcgctctatttcagcgggcgaggcgagcagctgcgcctccgggccgacctcgagctgccccgggacgcgttcacgctgcaagtgtggctgcgagcggaggggggccagaggtctccggcagtgatcacagggctgtatgacaaatgttcttatatctcacgtgaccgaggatgggtcgtgggcattcacaccatcagtgaccaagacaacaaagacccacgctactttttctccttgaagacagaccgagcccggcaagtgaccaccatcaatgcccaccgcagctacctcccaggccagtgggtatacctagctgccacctatgatgggcagttcatgaagctctatgtgaatggtgcccaggtggccacctctggggaacaagtgggtggcatattcagcccactgacccagaagtgcaaagtgctcatgttagggggcagtgccctgaatcacaactaccggggctacatcgagcacttcagtctgtggaaggtggccaggactcagcgggagatactgtctgacatggaaacccatggcgcccacactgctctacctcagctcctcctccaggagaactgggacaatgtgaagcatgcctggtcccccatgaaggatggcagcagccccaaagtggaattcagcaatgcccacggctttctgctggacacgagtctggagcctcctctgtgcggacagacattgtgtgacaacacagaggtcattgccagctacaatcagctctcaagtttccgccagcccaaggtggtgcgctaccgcgtggtcaacctctatgaagatgatcataagaacccgacggtgacgcgcgagcaggtggacttccagcaccatcagctggctgaggccttcaagcaatacaacatctcctgggagctggacgtgctggaggtgagcaactcctcccttcgccgccgcctcatcctggccaactgtgacatcagcaagattggggatgagaactgtgaccccgagtgcaaccacacgctgacgggccacgacggcggggattgccgccacctgcgccaccctgccttcgtgaagaagcagcacaacggggtgtgtgacatggactgcaactatgaacggttcaactttgatggtggagagtgctgtgaccctgaaatcaccaatgtcactcagacttgctttgaccccgactctccacacagagcctacttggatgttaatgagctgaagaacattcttaaattggatggatcaacacatctcaatattttctttgcaaaatcctcagaggaggagttggcaggagtagcaacttggccatgggacaaggaggccctgatgcacttagatgacgactgtacggactccttcacgcccaatcaagtcgccagaatgcactgttacctggacctggtctaccagggctggcagccctccaggaaaccagcgcctgttgccctcgccccccaagttctgggccacacaacggactctgtgacactggagtggttcccacctatagatggccatttctttgaaagagaattgggatcagcatgtcatctttgcctggaagggagaatcctggtgcagtatgcttccaacgcttcctccccaatgccctgcagcccatcaggacactggagccctcgtgaagcagaaggtcatcctgatgttgaacagccctgtaagtccagtgtccgcacctggagcccaaattcagctgtcaacccacacacggttcctccagcctgccctgagcctcaaggctgctacctcgagctggagttcctctaccccttggtccctgagtctctgaccatttgggtgacctttgtctccactgactgggactctagtggagctgtcaatgacatcaaactgttggctgtcagtgggaagaacatctccctgggtcctcagaatgtcttctgtgatgtcccactgaccatcagactctgggacgtgggcgaggaggtgtatggcatccaaatctacacgctggatgagcacctggagatcgatgctgccatgttgacctccactgcagacaccccactctgtctacagtgtaagcccctgaagtataaggtggtccgggaccctcctctccagatggatgtggcctccatcctacatctcaataggaaattcgtagacatggatctaaatcttggcagtgtgtaccagtattgggtcataactatttcaggaactgaagagagtgagccatcacctgctgtcacatacatccatggaagtgggtactgtggcgatggcattatacaaaaagaccaaggtgaacaatgcgacgacatgaataagatcaatggtgatggctgctcccttttctgccgacaagaagtctccttcaattgtattgatgaacccagccggtgctatttccatgatggtgatggggtatgtgaggagtttgaacaaaaaaccagcattaaggactgtggtgtctacacgccccagggattcctggatcagtgggcatccaatgcttcagtatctcatcaagaccagcaatgcccaggctgggtcatcatcggacagccagcagcatcccaggtgtgtcgaaccaaggtgatagatctcagtgaaggcatttcccagcatgcctggtacccttgcaccatcagctacccatattcccagctggctcagaccactttttggctccgggcgtatttttctcaaccaatggttgccgcagctgtcattgtccacctggtgacggatgggacatattatggggaccaaaagcaggagaccatcagcgtgcagctgcttgataccaaagatcagagccacgatctaggcctccatgtcctgagctgcaggaacaatcccctgattatccctgtggtccatgacctcagccagcccttctaccacagccaggcggtacgtgtgagcttcagttcgcccctggtcgccatctcgggggtggccctccgttccttcgacaactttgaccccgtcaccctgagcagctgccagagaggggagacctacagccctgccgagcagagctgcgtgcacttcgcatgtgagaaaactgactgtccagagctggctgtggagaatgcttatctcaattgctccagcagcgaccgctaccacggtgcccagtgtactgtgagctgccggacaggctacgtgctccagatacggcgggatgatgagctgatcaagagccagacgggacccagcgtcacagtgacctgtacagagggcaagtggaataagcaggtggcctgtgagccagtcgactgcagcatcccagatcaccatcaagtctatgctgcctccttctcctgccctgagggcaccacctttggcagtcaatgttccttccagtgccgtcaccctgcacaattgaaaggcaacaacagcctcctgacctgcatggaggatgggctgtggtccttcccagaggccctgtgtgagctcatgtgcctcgctccaccccctgtgcccaatgcagacctccagaccgcccggtgccgagagaataagcacaaggtgggctccttctgcaaatacaaatgcaagcctggataccatgtgcctggatcctctcggaagtcaaagaaacgggccttcaagactcagtgtacccaggatggcagctggcaggagggagcttgtgttcctgtgacctgtgacccacctccaccaaaattccatgggctctaccagtgtactaatggcttccagttcaacagtgagtgtaggatcaagtgtgaagacagtgatgcctcccagggacttgggagcaatgtcattcattgccggaaagatggcacctggaacggctccttccatgtctgccaggagatgcaaggccagtgctcggttccaaacgagctcaacagcaacctcaaactgcagtgccctgatggctatgccatagggtcggagtgtgccacctcgtgcctggaccacaacagcgagtccatcatcctgccaatgaacgtgaccgtgcgtgacatcccccactggctgaaccccacacgggtagagagagttgtctgcactgctggtctcaagtggtatcctcaccctgctctgattcactgtgtcaaaggctgtgagcccttcatgggagacaattattgtgatgccatcaacaaccgagccttttgcaactatgacggtggggattgctgcacctccacagtgaagaccaaaaaggtcaccccattccctatgtcctgtgacctacaaggtgactgtgcttgtcgggacccccaggcccaagaacacagccggaaagacctccggggatacagccatggctaaggaaggacaagaagttgtcaaagaattcccaacgccaggacccacatccctttggtattgatttcacagtcagctgctcaacggaatggcctctccacaccagggatccttagcacccaaccggtctgcctttaattttacccaggaaggactcacattggggcgaatgaaccaagtttcgccatgctggatgatgaaatggattcccatcccaaagtctgagatggattgcatatacagtgtgcagtcccagagcctcctaaaattctagccatttgtcacacaaccacagcaagaaacgtgttctatatctagagtgtgcccatctgtgtttagtacacatgcatgcatacacacccatacaaacatctgtgtgagggcagttctggagatgagcagagagagaccggaataaactcaatcttttctttcccaagctcctagccaacactatccttgggagaaagaaatttgcagaaactgctaagaccaagtgtggagatgtcaagctagttcacactctgaggctcagaatatgtaggacatgcacaattgtgcagtcctttgggattggaagtgaaacagtctgtgatcccctaccttctagggaactaggacctaggaagaggtaaagattatcaggtatgcaaagcgccccaattcttctgctgccatgggggattttaccccaactccagggttcgaggccaatctgagaatggcttaggattgcaatgtcaaggtattatatcagccccttgcttgaggcttgaggtcataatatccctctaggacttacctgttcccccagatcttgccttgggaccacatttgctgctacttttcctgctgctctatcctatacattgaataatccaagatggtagaactaggttaggaaaaattccacacaaccaaacagtctgccttaaaagtgacccacatttttccatagctcctcactttttagcccttctgcaagagaaaaaccctcatgggtccacatggtgagaagttaagtttcctgtaagtgggcctctcaccctggaaaggagttgagggacatcagatgctggaaccctcactgaaagtccagaatgtctaagccagtgttagattttgtaaacaagtggaacagtgttaaatttctatgatgttggagccatccagagactactggaattgtcgagacttttggattattatccttatccttatcctaatcttcctagcccttcaggctagagtaggcttcgatcctgagaaccttgctgttgctctgaggagatataattctgggagaaagaatcttttataagaacagtacagattgttctcaagagggccatcagaaggaagccaaagagttcacagcctcagcaccaacaactcaacatggtcatcatgttttctatatggtttttccagctagcagtactcccttccatacctgtgactgggcagtgcttttctctctcccatgtctagcctccaaaagttaagtgaaaattagtcaactgcacgtggaagcccccaccactttggggatctctttatttcttttcagccagggacctgtccactccctttgaattaatatgggaagaaattaatacaggatgaactggagagaagggttgagtgtggcatactttctgaaacctggagctgggaattgcggagaagggaaggtctagactagttacatcacatagggattactgtaaatcaagtcatctcaagtctagtgaagacagccaacagaaacaaaacctagcatagggatagaaaataccatgcacgtgtgcagccccacctaattcctgcatccaaggcaggtgttgttaatctatcatagcacttaaaaaaaaaaaaaaagagaccaaaaataactttaggaaccaccatattatatcactcccaatagcactgacctggtgatcaaaaacacttgagaagacatctattggccatctctggccaattacactaagaaacatatcaaggtgcttttggcacaggtgcccacaaatacggatgcagtgctgagatagtttatgagacttgtaccatttcacaaactctgaaattgggttccatattggcaaggctgccacagttgttaagaataatcctctatgtttcttcctcacaaaaccatatctcatttatatccagaccattacttcactataattacaaggacaaattattagcaagaaataagaatagtattagaagaattgatcctattttgaacccctctccagtatcttcacactcttgtcaactctccaggcctctctcttgccctgagttatcagcctgtgtggtgttaactaccttagaaggtacaagctaagaaatgtaacagtatcaaccctcccagttgcttaattatacccataggtaatacaaaaagctctgaagacccaaagatgacattactaatgatgtgatttcaggagccacagaagaaccttaccagcttccctcaaatcagtccttatcctctttctatcttcactcccatcatcatctattttcacactatccagctaagcaaagattcctggaggctgacttgtatcttcagactcacagagtgaattcagctcttctgaatcaagacccacccagtctctttcattcagacctgttgctaacaaatttatatttgccaaggatattaggcaaaagaggctacttgattggtggccaacctcgtgcccacatggaaggtatctttaatagggtcttttcaaaccttagtggaggagggtcagctcaatttgggcaatgcatttgttcccagtttcattttcttcctgggaattaactcgtcatttcattccttcagtcatcttctgtgtaggtgaccggagcactgagaggcagctctgatgcactattgtgtgtcagcagctcaaaggccctaaaacactgaaggttctgcatctgaagtattagattgttagcagcaaaatatgaaagatgaggtggacagtcctctaagccctatttagggaagcttttccaagccacaatcttaactacctacccaaaggatttgcattacccccagattctgtgccaacaaccttttaaggaaatacagtccttgggaaatgagttttgatggtgaattggggtgttaaggaagggaaagattgtcatagatggtagggctttgaaaatgcagggtatcagctgccactcctggcttcaacacattgagtcactgcctagacggttctcttggtcttattcccatcctggccaatgcttaaatactatttgttgaaaataattctttgagacagatttcagctacctcccttccaggttcgatttaacttggttgtaattgtcaatttgttgttataggtcttacctgtgtgaaagaaagaaaaagaaagaaagaaagaaagagaaaggaaattataaggtcaagttaacagttttgaggttttgtgtttttttctggaactacttcaagtgagaaaataaaaaaaaatggtgacaaagctgtacagatagagataatagaagacaaagagattaaaaggaaataaaaatgcatgattaaaaactaagaataaaaaacctatttttatgtttcctaaaggaaattgtttattctacagactcagtaggtagacacaaacataaagatttccctagaagacatagagtgggatttgataacactgtctgttattttctgtacattgtggtaggtccaggaaatatgacattttcccccttgatgtgttattgttgttgttgggtggggtgggcattttgtttatttgtttggtggcaatcagtggtagtagggagtgggagggcttatattggtttttccagctattaaggggacatattgtgtcgttgtgcttttcacgttataaaatgtttatatttaccagtacagcactgggctttataaagactgcactcagaaccacactgcacagtccagttttttaaaaagctgctacatgacagacaggtaatcccactgagtgagttttgagaaacaaatcaaacgaagtaaacaagaaacataaaaaccaaatagcaaatgaataaaagcctgttcttgtaacttattcaacttttgccaaattcctaccaatcacttgctttttaaaagaaatgtataatagccaaaagagaaattatgtccctgttgtacagaagttagaatttttgactccaggcagcagtttgctcagtgatcttgaacaagttatccaattgcctctacatttgcatcagtttctctagctgcaaaatggggataatactatatacctacctcacagtgggagggcaggagattttgaggccctgaggttttaggtgggctgtgagggccaacgcttgacacaaagtccatgggttattattcaagaatgcacaggcccatcggccttttagaaagacaagacagggagtgcttgtttgatatttcaaggaataaagccggagctcctgaattgtagtccaccttaaaagagagacctgtattggagaatattttatttttttggcaaatttgatcttaccctttaccagttctataatttggttaaaagctgattacgtcctacaatgtcaaagtcagctaactgtcgtctacttaagacttctggtcatttccaacttatagaggaagggagtctctaaaatctcttcttcagaaggcacctcacttctcagacttaaaattccacatcaagtgttccattaaaagaagataaggcattctgagtgcaaacaaatgggggcttcttaaactacacaccagcagtcagtgaggaaaactttgaacaattattgagttgctttcttgggtctctataatcaataacctgtctgcagatatctatctatataaagatattatatataaatataaatttacatatatatgcacatgtatatatagttgtacatatatgtgtgtatatatatacttaaatgtaatatttacaaaataaaactgtgatctcgtctagagaaaatgtattcatattacaaactgctcttccatatttatgtaccatattatacctttttattattgttataattattatgggtatttctaattaatatgatgttgaaacctgtttggcaccttctggaagctaccaaaaaaatgacactccattgaagtgcttaaaagctgttctcataagaattctactggcctattgtaaaaaagaaaaaaaaaagaaaaagaagaaagacacaaagaaaataatctaaacaccaaaaactaaacacaattccaatcctttttctgtacctcacgcgcataaatttggctgctcctatttttttttctgtttatgtgtttttatggatctaagttaaatcttttggcaatatataaaaatgtaaatagtaaactttatttattaagaatgtcatcttttttaatttatatttacacaattgttcatctaatttattttttctatacagttttaaatactcagacatattttgctgttcatgatatttttatcctgttctcatggatttgttttcccatactgttttctctgatctcaattacaggttggatctcacaaataataatgtcagagacagaaatattttgccactgttgattactatactttaaagttctatattatgaaaatatataatagcttgtacgct

SEQ ID NO: 455082 - DNA, 12609 bp, Homo sapiens
ctgtccaggttgagtgagggtgtccaggatgaggaatgagggtgtccagggtgaggagtgagggagtccagggtgaggagtgagggagtccagggtgaggattgagggtgtcagggtgagtgagagtgtccagggtgaggagtgagggtatccagggtgagtgagggtgtccagggtgaggagtgagggtatccagggtgagtgagggtgtccagggtgagtgagggtgtcagggtgagtgaacgtgtccagggtgtgtgagggtgtccagggtgcagagtgaggtgtccagggtgaggagtgacggtgtctggggtgagtgagggtgtccagggtgaggagtgagggtgtcagggtgagtgagggtgtccagggttgagtgcacatgtgtggtgaggaggtgtttgcagtgcttcaggcgcagcaactctttcatctagtttaaaattgtgctctgaggttagattttagtagaacaaaggccttacaaagaatgtgaaaacattgtgcttccctgcttacaggcaattaaaaaggagaatcaagctgagggtgcctggtgtggggtggggtggagaagaccacagagactattgtgtgttttattcaacagtgtcctgggctgctttctccagaaatgtccctgacacatggatgtaagtgtggctagtttactgggagatgatcccagtgatgcaggacacgcgagccctaagattgaagcatagcccgggagggttcttagctttgcccaggaaggaactcaaggcaagccagtggtgttagcaacttttattgaagcggccggctgtgcacagcagcagcagaggcgctgctccttgcaaagcagggctgccctacaggctgtgcgcccacagtagcagctcagaggcagttctgcagtggtatttgtatccacttttaattatatgcaaatgaaggggcagtttatgcagacatttccagggtgagggtggtaacttctgggtgctgccagagccatcgtgaactgacttgacacaggtcggtgtgtcctatggaaactagcatctgccctggacctattttagctagtgctcagtttggtctgagtgcctgagccccacttccagagttgagtcccacctcctacctcattcccccttcagagattagatactcctccttaatcttaagggggcctcgagaagggcggagtcctgcttttccgtaactacttcctgctgagtttatggcacgtaggccctgcctggcactggaggacgtaaaaatttctggatacctgatctaaggagcccagaggcaggacgatttcattctccgtgtcagtggacaggatgggctggaagccttgtgccagcattgtctctggaactgtggtaatctagaatacacaaactttactaagaggttaaagaagcaaggaccaaacatttgtaacaagacagttgtcaaaggtcctagaagaggtgaaaaacaggtgagacttgggaaggcacttttgatggttgaccagatatagttggggcagtgccctggttatatctatgtaactaggtagcttgctcatagatcttttgaatgttaacctcaacctgtccagagttaatatatgtgcagcaggttttattaataactgcacaagaccccaccttgttcagctagtaaataatccaatgctagtctgttatcaacaactacattttccagagtctggggaactcttgaattctctttaatgcctgatctccgttggtggctaaggattctaggatttgagccaagttctttagcgttaactcatggtaggcaaagcaccccagggtgctgctagtcctattgccaccctgattcctgccagaaataagtaagcaagcaacaggacaatgaactccatgttgcccagatcccactgagagtgaacgtgcagtcatgcccataaccgacacacatcccagtccatgtgggtcagtccttcatcaccctccctgccttctgacaacagcagactccagccattccattatcattcacagcccaacccaagcagtcagtggctgaagaaagagaatcaggtatactctatgtccacatataccttcctgccacagggcttcaccaactggcaggattccccccagcccccaactcctcctcatcccttgttcccaggcgggtcaattggagagtgagcagagatagatggcttgcagaagggtatgcaagatggggagactccaccagaccttagggagagaatggcatctttctccaccttttaagagagacagagcctccctgaggtctcaaagatttttcagggcaacacaagaaacgtttccaagcctcagctgcaggtgttcacctttccactctggggtgtgaggagatggtaagctgaggacaagtgtgttccagatgcaggccaactctgttctccaacagtttgaaccaacttggccttggggttccaagggtaggatgaagggtgtcacggcaggacggggcctggcgtgaggcaacagcaagcagagcgaggacacaacagtggcagcagtgtacagacacaggacgtcagcttcaaacgatgcaacagcagggatatcttgggcacggctctgattcgagccactcccaactctcttgcctccaggatggaggcactgtacatgcaacagtccagagaaagattctagccagtccaagcccaggcacatccagagaaggtgggagctcttcgggttgactccaccgaggaaaacaggcatttgggtatttcagattcccgctccacaataaggcaacttttaaaaaaatattatttccaaaaacaaaacaaaaattccagggggagggaattcagcggatcagtcttaagaggagcttttttttggagcgagaaatcatataaaataaaatgaaataaaacaaggaggaaggcaaccagctgttaggggaaaaataaggcagataaaggagcggggagagaaattaattgccaaccaggaggagttgggctgtatttttcaaaggtggggagagtggagcacacaccttgaggaggaaagcgagaaagaaaagaaaaaagcaagtgaaggggggctcgcccaagaagggtgaagaagcgaagaaagtcgaggcgccgaggctcccaaagctggcagctccgggtggcggtgcaggggcgaaggggggggcggggggaacgtcggacatgcggctctggagttgggtgctgcacctggggctgctgagcgccgcgctgggctgcgggctggccgagcgtccccgccgggcccggagagacccgcgggccggccgacccccgcgccccgccgccggcccggccacctgcgccacccgcggcccgcggccgccgcgcctcgccgccgccgccgccgccgccgggcggtgcctgggaagccgtgcgcgtcccccggcggcggcagcagcgggaggcgaggggcgccaccgaggagccgagcccgccgagccgggcgctctatttcagcgggcgaggcgagcagctgcgcctccgggccgacctcgagctgccccgggacgcgttcacgctgcaagtgtggctgcgagcggaggggggccagaggtctccggcagtgatcacagggctgtatgacaaatgttcttatatctcacgtgaccgaggatgggtcgtgggcattcacaccatcagtgaccaagacaacaaagacccacgctactttttctccttgaagacagaccgagcccggcaagtgaccaccatcaatgcccaccgcagctacctcccaggccagtgggtatacctagctgccacctatgatgggcagttcatgaagctctatgtgaatggtgcccaggtggccacctctggggaacaagtgggtggcatattcagcccactgacccagaagtgcaaagtgctcatgttagggggcagtgccctgaatcacaactaccggggctacatcgagcacttcagtctgtggaaggtggccaggactcagcgggagatactgtctgacatggaaacccatggcgcccacactgctctacctcagctcctcctccaggagaactgggacaatgtgaagcatgcctggtcccccatgaaggatggcagcagccccaaagtggaattcagcaatgcccacggctttctgctggacacgagtctggagcctcctctgtgcggacagacattgtgtgacaacacagaggtcattgccagctacaatcagctctcaagtttccgccagcccaaggtggtgcgctaccgcgtggtcaacctctatgaagatgatcataagaacccgacggtgacgcgcgagcaggtggacttccagcaccatcagctggctgaggccttcaagcaatacaacatctcctgggagctggacgtgctggaggtgagcaactcctcccttcgccgccgcctcatcctggccaactgtgacatcagcaagattggggatgagaactgtgaccccgagtgcaaccacacgctgacgggccacgacggcggggattgccgccacctgcgccaccctgccttcgtgaagaagcagcacaacggggtgtgtgacatggactgcaactatgaacggttcaactttgatggtggagagtgctgtgaccctgaaatcaccaatgtcactcagacttgctttgaccccgactctccacacagagcctacttggatgttaatgagctgaagaacattcttaaattggatggatcaacacatctcaatattttctttgcaaaatcctcagaggaggagttggcaggagtagcaacttggccatgggacaaggaggccctgatgcacttaggtggcattgtcttgaacccatctttctatggcatgcctgggcacacccacaccatgatccatgagattggtcacagcctgggcctctatcacgtcttccgaggcatctcagaaatccagtcctgcagtgacccctgcatggagacagagccctccttcgagactggagacctctgcaatgataccaacccagcccctaaacacaagtcctgtggtgacccagggccaggaaatgacacctgtggctttcatagcttcttcaacactccttacaacaacttcatgagctatgcagatgacgactgtacggactccttcacgcccaatcaagtcgccagaatgcactgttacctggacctggtctaccagggctggcagccctccaggaaaccagcgcctgttgccctcgccccccaagttctgggccacacaacggactctgtgacactggagtggttcccacctatagatggccatttctttgaaagagaattgggatcagcatgtcatctttgcctggaagggagaatcctggtgcagtatgcttccaacgcttcctccccaatgccctgcagcccatcaggacactggagccctcgtgaagcagaaggtcatcctgatgttgaacagccctgtaagtccagtgtccgcacctggagcccaaattcagctgtcaacccacacacggttcctccagcctgccctgagcctcaaggctgctacctcgagctggagttcctctaccccttggtccctgagtagctgccagagaggggagacctacagccctgccgagcagagctgcgtgcacttcgcatgtgagaaaactgactgtccagagctggctgtggagaatgcttatctcaattgctccagcagcgaccgctaccacggtgcccagtgtactgtgagctgccggacaggctacgtgctccagatacggcgggatgatgagctgatcaagagccagacgggacccagcgtcacagtgacctgtacagagggcaagtggaataagcaggtggcctgtgagccagtcgactgcagcatcccagatcaccatcaagtctatgctgcctccttctcctgccctgagggcaccacctttggcagtcaatgttccttccagtgccgtcaccctgcacaattgaaaggcaacaacagcctcctgacctgcatggaggatgggctgtggtccttcccagaggccctgtgtgagctcatgtgcctcgctccaccccctgtgcccaatgcagacctccagaccgcccggtgccgagagaataagcacaaggtgggctccttctgcaaatacaaatgcaagcctggataccatgtgcctggatcctctcggaagtcaaagaaacgggccttcaagactcagtgtacccaggatggcagctggcaggagggagcttgtgttcctgtgacctgtgacccacctccaccaaaattccatgggctctaccagtgtactaatggcttccagttcaacagtgagtgtaggatcaagtgtgaagacagtgatgcctcccagggacttgggagcaatgtcattcattgccggaaagatggcacctggaacggctccttccatgtctgccaggagatgcaaggccagtgctcggttccaaacgagctcaacagcaacctcaaactgcagtgccctgatggctatgccatagggtcggagtgtgccacctcgtgcctggaccacaacagcgagtccatcatcctgccaatgaacgtgaccgtgcgtgacatcccccactggctgaaccccacacgggtagagagagttgtctgcactgctggtctcaagtggtatcctcaccctgctctgattcactgtgtcaaaggctgtgagcccttcatgggagacaattattgtgatgccatcaacaaccgagccttttgcaactatgacggtggggattgctgcacctccacagtgaagaccaaaaaggtcaccccattccctatgtcctgtgacctacaaggtgactgtgcttgtcgggacccccaggcccaagaacacagccggaaagacctccggggatacagccatggctaaggaaggacaagaagttgtcaaagaattcccaacgccaggacccacatccctttggtattgatttcacagtcagctgctcaacggaatggcctctccacaccagggatccttagcacccaaccggtctgcctttaattttacccaggaaggactcacattggggcgaatgaaccaagtttcgccatgctggatgatgaaatggattcccatcccaaagtctgagatggattgcatatacagtgtgcagtcccagagcctcctaaaattctagccatttgtcacacaaccacagcaagaaacgtgttctatatctagagtgtgcccatctgtgtttagtacacatgcatgcatacacacccatacaaacatctgtgtgagggcagttctggagatgagcagagagagaccggaataaactcaatcttttctttcccaagctcctagccaacactatccttgggagaaagaaatttgcagaaactgctaagaccaagtgtggagatgtcaagctagttcacactctgaggctcagaatatgtaggacatgcacaattgtgcagtcctttgggattggaagtgaaacagtctgtgatcccctaccttctagggaactaggacctaggaagaggtaaagattatcaggtatgcaaagcgccccaattcttctgctgccatgggggattttaccccaactccagggttcgaggccaatctgagaatggcttaggattgcaatgtcaaggtattatatcagccccttgcttgaggcttgaggtcataatatccctctaggacttacctgttcccccagatcttgccttgggaccacatttgctgctacttttcctgctgctctatcctatacattgaataatccaagatggtagaactaggttaggaaaaattccacacaaccaaacagtctgccttaaaagtgacccacatttttccatagctcctcactttttagcccttctgcaagagaaaaaccctcatgggtccacatggtgagaagttaagtttcctgtaagtgggcctctcaccctggaaaggagttgagggacatcagatgctggaaccctcactgaaagtccagaatgtctaagccagtgttagattttgtaaacaagtggaacagtgttaaatttctatgatgttggagccatccagagactactggaattgtcgagacttttggattattatccttatccttatcctaatcttcctagcccttcaggctagagtaggcttcgatcctgagaaccttgctgttgctctgaggagatataattctgggagaaagaatcttttataagaacagtacagattgttctcaagagggccatcagaaggaagccaaagagttcacagcctcagcaccaacaactcaacatggtcatcatgttttctatatggtttttccagctagcagtactcccttccatacctgtgactgggcagtgcttttctctctcccatgtctagcctccaaaagttaagtgaaaattagtcaactgcacgtggaagcccccaccactttggggatctctttatttcttttcagccagggacctgtccactccctttgaattaatatgggaagaaattaatacaggatgaactggagagaagggttgagtgtggcatactttctgaaacctggagctgggaattgcggagaagggaaggtctagactagttacatcacatagggattactgtaaatcaagtcatctcaagtctagtgaagacagccaacagaaacaaaacctagcatagggatagaaaataccatgcacgtgtgcagccccacctaattcctgcatccaaggcaggtgttgttaatctatcatagcacttaaaaaaaaaaaaaaagagaccaaaaataactttaggaaccaccatattatatcactcccaatagcactgacctggtgatcaaaaacacttgagaagacatctattggccatctctggccaattacactaagaaacatatcaaggtgcttttggcacaggtgcccacaaatacggatgcagtgctgagatagtttatgagacttgtaccatttcacaaactctgaaattgggttccatattggcaaggctgccacagttgttaagaataatcctctatgtttcttcctcacaaaaccatatctcatttatatccagaccattacttcactataattacaaggacaaattattagcaagaaataagaatagtattagaagaattgatcctattttgaacccctctccagtatcttcacactcttgtcaactctccaggcctctctcttgccctgagttatcagcctgtgtggtgttaactaccttagaaggtacaagctaagaaatgtaacagtatcaaccctcccagttgcttaattatacccataggtaatacaaaaagctctgaagacccaaagatgacattactaatgatgtgatttcaggagccacagaagaaccttaccagcttccctcaaatcagtccttatcctctttctatcttcactcccatcatcatctattttcacactatccagctaagcaaagattcctggaggctgacttgtatcttcagactcacagagtgaattcagctcttctgaatcaagacccacccagtctctttcattcagacctgttgctaacaaatttatatttgccaaggatattaggcaaaagaggctacttgattggtggccaacctcgtgcccacatggaaggtatctttaatagggtcttttcaaaccttagtggaggagggtcagctcaatttgggcaatgcatttgttcccagtttcattttcttcctgggaattaactcgtcatttcattccttcagtcatcttctgtgtaggtgaccggagcactgagaggcagctctgatgcactattgtgtgtcagcagctcaaaggccctaaaacactgaaggttctgcatctgaagtattagattgttagcagcaaaatatgaaagatgaggtggacagtcctctaagccctatttagggaagcttttccaagccacaatcttaactacctacccaaaggatttgcattacccccagattctgtgccaacaaccttttaaggaaatacagtccttgggaaatgagttttgatggtgaattggggtgttaaggaagggaaagattgtcatagatggtagggctttgaaaatgcagggtatcagctgccactcctggcttcaacacattgagtcactgcctagacggttctcttggtcttattcccatcctggccaatgcttaaatactatttgttgaaaataattctttgagacagatttcagctacctcccttccaggttcgatttaacttggttgtaattgtcaatttgttgttataggtcttacctgtgtgaaagaaagaaaaagaaagaaagaaagaaagagaaaggaaattataaggtcaagttaacagttttgaggttttgtgtttttttctggaactacttcaagtgagaaaataaaaaaaaatggtgacaaagctgtacagatagagataatagaagacaaagagattaaaaggaaataaaaatgcatgattaaaaactaagaataaaaaacctatttttatgtttcctaaaggaaattgtttattctacagactcagtaggtagacacaaacataaagatttccctagaagacatagagtgggatttgataacactgtctgttattttctgtacattgtggtaggtccaggaaatatgacattttcccccttgatgtgttattgttgttgttgggtggggtgggcattttgtttatttgtttggtggcaatcagtggtagtagggagtgggagggcttatattggtttttccagctattaaggggacatattgtgtcgttgtgcttttcacgttataaaatgtttatatttaccagtacagcactgggctttataaagactgcactcagaaccacactgcacagtccagttttttaaaaagctgctacatgacagacaggtaatcccactgagtgagttttgagaaacaaatcaaacgaagtaaacaagaaacataaaaaccaaatagcaaatgaataaaagcctgttcttgtaacttattcaacttttgccaaattcctaccaatcacttgctttttaaaagaaatgtataatagccaaaagagaaattatgtccctgttgtacagaagttagaatttttgactccaggcagcagtttgctcagtgatcttgaacaagttatccaattgcctctacatttgcatcagtttctctagctgcaaaatggggataatactatatacctacctcacagtgggagggcaggagattttgaggccctgaggttttaggtgggctgtgagggccaacgcttgacacaaagtccatgggttattattcaagaatgcacaggcccatcggccttttagaaagacaagacagggagtgcttgtttgatatttcaaggaataaagccggagctcctgaattgtagtccaccttaaaagagagacctgtattggagaatattttatttttttggcaaatttgatcttaccctttaccagttctataatttggttaaaagctgattacgtcctacaatgtcaaagtcagctaactgtcgtctacttaagacttctggtcatttccaacttatagaggaagggagtctctaaaatctcttcttcagaaggcacctcacttctcagacttaaaattccacatcaagtgttccattaaaagaagataaggcattctgagtgcaaacaaatgggggcttcttaaactacacaccagcagtcagtgaggaaaactttgaacaattattgagttgctttcttgggtctctataatcaataacctgtctgcagatatctatctatataaagatattatatataaatataaatttacatatatatgcacatgtatatatagttgtacatatatgtgtgtatatatatacttaaatgtaatatttacaaaataaaactgtgatctcgtctagagaaaatgtattcatattacaaactgctcttccatatttatgtaccatattatacctttttattattgttataattattatgggtatttctaattaatatgatgttgaaacctgtttggcaccttctggaagctaccaaaaaaatgacactccattgaagtgcttaaaagctgttctcataagaattctactggcctattgtaaaaaagaaaaaaaaaagaaaaagaagaaagacacaaagaaaataatctaaacaccaaaaactaaacacaattccaatcctttttctgtacctcacgcgcataaatttggctgctcctatttttttttctgtttatgtgtttttatggatctaagttaaatcttttggcaatatataaaaatgtaaatagtaaactttatttattaagaatgtcatcttttttaatttatatttacacaattgttcatctaatttattttttctatacagttttaaatactcagacatattttgctgttcatgatatttttatcctgttctcatggatttgttttcccatactgttttctctgatctcaattacaggttggatctcacaaataataatgtcagagacagaaatattttgccactgttgattactatactttaaagttctatattatgaaaatatataatagcttgtacgct

SEQ ID NO: 455083 - DNA, 12542 bp, Homo sapiens
ctgtccaggttgagtgagggtgtccaggatgaggaatgagggtgtccagggtgaggagtgagggagtccagggtgaggagtgagggagtccagggtgaggattgagggtgtcagggtgagtgagagtgtccagggtgaggagtgagggtatccagggtgagtgagggtgtccagggtgaggagtgagggtatccagggtgagtgagggtgtccagggtgagtgagggtgtcagggtgagtgaacgtgtccagggtgtgtgagggtgtccagggtgcagagtgaggtgtccagggtgaggagtgacggtgtctggggtgagtgagggtgtccagggtgaggagtgagggtgtcagggtgagtgagggtgtccagggttgagtgcacatgtgtggtgaggaggtgtttgcagtgcttcaggcgcagcaactctttcatctagtttaaaattgtgctctgaggttagattttagtagaacaaaggccttacaaagaatgtgaaaacattgtgcttccctgcttacaggcaattaaaaaggagaatcaagctgagggtgcctggtgtggggtggggtggagaagaccacagagactattgtgtgttttattcaacagtgtcctgggctgctttctccagaaatgtccctgacacatggatgtaagtgtggctagtttactgggagatgatcccagtgatgcaggacacgcgagccctaagattgaagcatagcccgggagggttcttagctttgcccaggaaggaactcaaggcaagccagtggtgttagcaacttttattgaagcggccggctgtgcacagcagcagcagaggcgctgctccttgcaaagcagggctgccctacaggctgtgcgcccacagtagcagctcagaggcagttctgcagtggtatttgtatccacttttaattatatgcaaatgaaggggcagtttatgcagacatttccagggtgagggtggtaacttctgggtgctgccagagccatcgtgaactgacttgacacaggtcggtgtgtcctatggaaactagcatctgccctggacctattttagctagtgctcagtttggtctgagtgcctgagccccacttccagagttgagtcccacctcctacctcattcccccttcagagattagatactcctccttaatcttaagggggcctcgagaagggcggagtcctgcttttccgtaactacttcctgctgagtttatggcacgtaggccctgcctggcactggaggacgtaaaaatttctggatacctgatctaaggagcccagaggcaggacgatttcattctccgtgtcagtggacaggatgggctggaagccttgtgccagcattgtctctggaactgtggtaatctagaatacacaaactttactaagaggttaaagaagcaaggaccaaacatttgtaacaagacagttgtcaaaggtcctagaagaggtgaaaaacaggtgagacttgggaaggcacttttgatggttgaccagatatagttggggcagtgccctggttatatctatgtaactaggtagcttgctcatagatcttttgaatgttaacctcaacctgtccagagttaatatatgtgcagcaggttttattaataactgcacaagaccccaccttgttcagctagtaaataatccaatgctagtctgttatcaacaactacattttccagagtctggggaactcttgaattctctttaatgcctgatctccgttggtggctaaggattctaggatttgagccaagttctttagcgttaactcatggtaggcaaagcaccccagggtgctgctagtcctattgccaccctgattcctgccagaaataagtaagcaagcaacaggacaatgaactccatgttgcccagatcccactgagagtgaacgtgcagtcatgcccataaccgacacacatcccagtccatgtgggtcagtccttcatcaccctccctgccttctgacaacagcagactccagccattccattatcattcacagcccaacccaagcagtcagtggctgaagaaagagaatcaggtatactctatgtccacatataccttcctgccacagggcttcaccaactggcaggattccccccagcccccaactcctcctcatcccttgttcccaggcgggtcaattggagagtgagcagagatagatggcttgcagaagggtatgcaagatggggagactccaccagaccttagggagagaatggcatctttctccaccttttaagagagacagagcctccctgaggtctcaaagatttttcagggcaacacaagaaacgtttccaagcctcagctgcaggtgttcacctttccactctggggtgtgaggagatggtaagctgaggacaagtgtgttccagatgcaggccaactctgttctccaacagtttgaaccaacttggccttggggttccaagggtaggatgaagggtgtcacggcaggacggggcctggcgtgaggcaacagcaagcagagcgaggacacaacagtggcagcagtgtacagacacaggacgtcagcttcaaacgatgcaacagcagggatatcttgggcacggctctgattcgagccactcccaactctcttgcctccaggatggaggcactgtacatgcaacagtccagagaaagattctagccagtccaagcccaggcacatccagagaaggtgggagctcttcgggttgactccaccgaggaaaacaggcatttgggtatttcagattcccgctccacaataaggcaacttttaaaaaaatattatttccaaaaacaaaacaaaaattccagggggagggaattcagcggatcagtcttaagaggagcttttttttggagcgagaaatcatataaaataaaatgaaataaaacaaggaggaaggcaaccagctgttaggggaaaaataaggcagataaaggagcggggagagaaattaattgccaaccaggaggagttgggctgtatttttcaaaggtggggagagtggagcacacaccttgaggaggaaagcgagaaagaaaagaaaaaagcaagtgaaggggggctcgcccaagaagggtgaagaagcgaagaaagtcgaggcgccgaggctcccaaagctggcagctccgggtggcggtgcaggggcgaaggggggggcggggggaacgtcggacatgcggctctggagttgggtgctgcacctggggctgctgagcgccgcgctgggctgcgggctggccgagcgtccccgccgggcccggagagacccgcgggccggccgacccccgcgccccgccgccggcccggccacctgcgccacccgcggcccgcggccgccgcgcctcgccgccgccgccgccgccgccgggcggtgcctgggaagccgtgcgcgtcccccggcggcggcagcagcgggaggcgaggggcgccaccgaggagccgagcccgccgagccgggcgctctatttcagcgggcgaggcgagcagctgcgcctccgggccgacctcgagctgccccgggacgcgttcacgctgcaagtgtggctgcgagcggaggggggccagaggtctccggcagtgatcacagggctgtatgacaaatgttcttatatctcacgtgaccgaggatgggtcgtgggcattcacaccatcagtgaccaagacaacaaagacccacgctactttttctccttgaagacagaccgagcccggcaagtgaccaccatcaatgcccaccgcagctacctcccaggccagtgggtatacctagctgccacctatgatgggcagttcatgaagctctatgtgaatggtgcccaggtggccacctctggggaacaagtgggtggcatattcagcccactgacccagaagtgcaaagtgctcatgttagggggcagtgccctgaatcacaactaccggggctacatcgagcacttcagtctgtggaaggtggccaggactcagcgggagatactgtctgacatggaaacccatggcgcccacactgctctacctcagctcctcctccaggagaactgggacaatgtgaagcatgcctggtcccccatgaaggatggcagcagccccaaagtggaattcagcaatgcccacggctttctgctggacacgagtctggagcctcctctgtgcggacagacattgtgtgacaacacagaggtcattgccagctacaatcagctctcaagtttccgccagcccaaggtggtgcgctaccgcgtggtcaacctctatgaagatgatcataagaacccgacggtgacgcgcgagcaggtggacttccagcaccatcagctggctgaggccttcaagcaatacaacatctcctgggagctggacgtgctggaggtgagcaactcctcccttcgccgccgcctcatcctggccaactgtgacatcagcaagattggggatgagaactgtgaccccgagtgcaaccacacgctgacgggccacgacggcggggattgccgccacctgcgccaccctgccttcgtgaagaagcagcacaacggggtgtgtgacatggactgcaactatgaacggttcaactttgatggtggagagtgctgtgaccctgaaatcaccaatgtcactcagacttgctttgaccccgactctccacacagggatctaaatcttggcagtgtgtaccagtattgggtcataactatttcaggaactgaagagagtgagccatcacctgctgtcacatacatccatggaagtgggtactgtggcgatggcattatacaaaaagaccaaggtgaacaatgcgacgacatgaataagatcaatggtgatggctgctcccttttctgccgacaagaagtctccttcaattgtattgatgaacccagccggtgctatttccatgatggtgatggggtatgtgaggagtttgaacaaaaaaccagcattaaggactgtggtgtctacacgccccagggattcctggatcagtgggcatccaatgcttcagtatctcatcaagaccagcaatgcccaggctgggtcatcatcggacagccagcagcatcccaggtgtgtcgaaccaaggtgatagatctcagtgaaggcatttcccagcatgcctggtacccttgcaccatcagctacccatattcccagctggctcagaccactttttggctccgggcgtatttttctcaaccaatggttgccgcagctgtcattgtccacctggtgacggatgggacatattatggggaccaaaagcaggagaccatcagcgtgcagctgcttgataccaaagatcagagccacgatctaggcctccatgtcctgagctgcaggaacaatcccctgattatccctgtggtccatgacctcagccagcccttctaccacagccaggcggtacgtgtgagcttcagttcgcccctggtcgccatctcgggggtggccctccgttccttcgacaactttgaccccgtcaccctgagcagctgccagagaggggagacctacagccctgccgagcagagctgcgtgcacttcgcatgtgagaaaactgactgtccagagctggctgtggagaatgcttatctcaattgctccagcagcgaccgctaccacggtgcccagtgtactgtgagctgccggacaggctacgtgctccagatacggcgggatgatgagctgatcaagagccagacgggacccagcgtcacagtgacctgtacagagggcaagtggaataagcaggtggcctgtgagccagtcgactgcagcatcccagatcaccatcaagtctatgctgcctccttctcctgccctgagggcaccacctttggcagtcaatgttccttccagtgccgtcaccctgcacaattgaaaggcaacaacagcctcctgacctgcatggaggatgggctgtggtccttcccagaggccctgtgtgagctcatgtgcctcgctccaccccctgtgcccaatgcagacctccagaccgcccggtgccgagagaataagcacaaggtgggctccttctgcaaatacaaatgcaagcctggataccatgtgcctggatcctctcggaagtcaaagaaacgggccttcaagactcagtgtacccaggatggcagctggcaggagggagcttgtgttcctgtgacctgtgacccacctccaccaaaattccatgggctctaccagtgtactaatggcttccagttcaacagtgagtgtaggatcaagtgtgaagacagtgatgcctcccagggacttgggagcaatgtcattcattgccggaaagatggcacctggaacggctccttccatgtctgccaggagatgcaaggccagtgctcggttccaaacgagctcaacagcaacctcaaactgcagtgccctgatggctatgccatagggtcggagtgtgccacctcgtgcctggaccacaacagcgagtccatcatcctgccaatgaacgtgaccgtgcgtgacatcccccactggctgaaccccacacgggtagagagagttgtctgcactgctggtctcaagtggtatcctcaccctgctctgattcactgtgtcaaaggctgtgagcccttcatgggagacaattattgtgatgccatcaacaaccgagccttttgcaactatgacggtggggattgctgcacctccacagtgaagaccaaaaaggtcaccccattccctatgtcctgtgacctacaaggtgactgtgcttgtcgggacccccaggcccaagaacacagccggaaagacctccggggatacagccatggctaaggaaggacaagaagttgtcaaagaattcccaacgccaggacccacatccctttggtattgatttcacagtcagctgctcaacggaatggcctctccacaccagggatccttagcacccaaccggtctgcctttaattttacccaggaaggactcacattggggcgaatgaaccaagtttcgccatgctggatgatgaaatggattcccatcccaaagtctgagatggattgcatatacagtgtgcagtcccagagcctcctaaaattctagccatttgtcacacaaccacagcaagaaacgtgttctatatctagagtgtgcccatctgtgtttagtacacatgcatgcatacacacccatacaaacatctgtgtgagggcagttctggagatgagcagagagagaccggaataaactcaatcttttctttcccaagctcctagccaacactatccttgggagaaagaaatttgcagaaactgctaagaccaagtgtggagatgtcaagctagttcacactctgaggctcagaatatgtaggacatgcacaattgtgcagtcctttgggattggaagtgaaacagtctgtgatcccctaccttctagggaactaggacctaggaagaggtaaagattatcaggtatgcaaagcgccccaattcttctgctgccatgggggattttaccccaactccagggttcgaggccaatctgagaatggcttaggattgcaatgtcaaggtattatatcagccccttgcttgaggcttgaggtcataatatccctctaggacttacctgttcccccagatcttgccttgggaccacatttgctgctacttttcctgctgctctatcctatacattgaataatccaagatggtagaactaggttaggaaaaattccacacaaccaaacagtctgccttaaaagtgacccacatttttccatagctcctcactttttagcccttctgcaagagaaaaaccctcatgggtccacatggtgagaagttaagtttcctgtaagtgggcctctcaccctggaaaggagttgagggacatcagatgctggaaccctcactgaaagtccagaatgtctaagccagtgttagattttgtaaacaagtggaacagtgttaaatttctatgatgttggagccatccagagactactggaattgtcgagacttttggattattatccttatccttatcctaatcttcctagcccttcaggctagagtaggcttcgatcctgagaaccttgctgttgctctgaggagatataattctgggagaaagaatcttttataagaacagtacagattgttctcaagagggccatcagaaggaagccaaagagttcacagcctcagcaccaacaactcaacatggtcatcatgttttctatatggtttttccagctagcagtactcccttccatacctgtgactgggcagtgcttttctctctcccatgtctagcctccaaaagttaagtgaaaattagtcaactgcacgtggaagcccccaccactttggggatctctttatttcttttcagccagggacctgtccactccctttgaattaatatgggaagaaattaatacaggatgaactggagagaagggttgagtgtggcatactttctgaaacctggagctgggaattgcggagaagggaaggtctagactagttacatcacatagggattactgtaaatcaagtcatctcaagtctagtgaagacagccaacagaaacaaaacctagcatagggatagaaaataccatgcacgtgtgcagccccacctaattcctgcatccaaggcaggtgttgttaatctatcatagcacttaaaaaaaaaaaaaaagagaccaaaaataactttaggaaccaccatattatatcactcccaatagcactgacctggtgatcaaaaacacttgagaagacatctattggccatctctggccaattacactaagaaacatatcaaggtgcttttggcacaggtgcccacaaatacggatgcagtgctgagatagtttatgagacttgtaccatttcacaaactctgaaattgggttccatattggcaaggctgccacagttgttaagaataatcctctatgtttcttcctcacaaaaccatatctcatttatatccagaccattacttcactataattacaaggacaaattattagcaagaaataagaatagtattagaagaattgatcctattttgaacccctctccagtatcttcacactcttgtcaactctccaggcctctctcttgccctgagttatcagcctgtgtggtgttaactaccttagaaggtacaagctaagaaatgtaacagtatcaaccctcccagttgcttaattatacccataggtaatacaaaaagctctgaagacccaaagatgacattactaatgatgtgatttcaggagccacagaagaaccttaccagcttccctcaaatcagtccttatcctctttctatcttcactcccatcatcatctattttcacactatccagctaagcaaagattcctggaggctgacttgtatcttcagactcacagagtgaattcagctcttctgaatcaagacccacccagtctctttcattcagacctgttgctaacaaatttatatttgccaaggatattaggcaaaagaggctacttgattggtggccaacctcgtgcccacatggaaggtatctttaatagggtcttttcaaaccttagtggaggagggtcagctcaatttgggcaatgcatttgttcccagtttcattttcttcctgggaattaactcgtcatttcattccttcagtcatcttctgtgtaggtgaccggagcactgagaggcagctctgatgcactattgtgtgtcagcagctcaaaggccctaaaacactgaaggttctgcatctgaagtattagattgttagcagcaaaatatgaaagatgaggtggacagtcctctaagccctatttagggaagcttttccaagccacaatcttaactacctacccaaaggatttgcattacccccagattctgtgccaacaaccttttaaggaaatacagtccttgggaaatgagttttgatggtgaattggggtgttaaggaagggaaagattgtcatagatggtagggctttgaaaatgcagggtatcagctgccactcctggcttcaacacattgagtcactgcctagacggttctcttggtcttattcccatcctggccaatgcttaaatactatttgttgaaaataattctttgagacagatttcagctacctcccttccaggttcgatttaacttggttgtaattgtcaatttgttgttataggtcttacctgtgtgaaagaaagaaaaagaaagaaagaaagaaagagaaaggaaattataaggtcaagttaacagttttgaggttttgtgtttttttctggaactacttcaagtgagaaaataaaaaaaaatggtgacaaagctgtacagatagagataatagaagacaaagagattaaaaggaaataaaaatgcatgattaaaaactaagaataaaaaacctatttttatgtttcctaaaggaaattgtttattctacagactcagtaggtagacacaaacataaagatttccctagaagacatagagtgggatttgataacactgtctgttattttctgtacattgtggtaggtccaggaaatatgacattttcccccttgatgtgttattgttgttgttgggtggggtgggcattttgtttatttgtttggtggcaatcagtggtagtagggagtgggagggcttatattggtttttccagctattaaggggacatattgtgtcgttgtgcttttcacgttataaaatgtttatatttaccagtacagcactgggctttataaagactgcactcagaaccacactgcacagtccagttttttaaaaagctgctacatgacagacaggtaatcccactgagtgagttttgagaaacaaatcaaacgaagtaaacaagaaacataaaaaccaaatagcaaatgaataaaagcctgttcttgtaacttattcaacttttgccaaattcctaccaatcacttgctttttaaaagaaatgtataatagccaaaagagaaattatgtccctgttgtacagaagttagaatttttgactccaggcagcagtttgctcagtgatcttgaacaagttatccaattgcctctacatttgcatcagtttctctagctgcaaaatggggataatactatatacctacctcacagtgggagggcaggagattttgaggccctgaggttttaggtgggctgtgagggccaacgcttgacacaaagtccatgggttattattcaagaatgcacaggcccatcggccttttagaaagacaagacagggagtgcttgtttgatatttcaaggaataaagccggagctcctgaattgtagtccaccttaaaagagagacctgtattggagaatattttatttttttggcaaatttgatcttaccctttaccagttctataatttggttaaaagctgattacgtcctacaatgtcaaagtcagctaactgtcgtctacttaagacttctggtcatttccaacttatagaggaagggagtctctaaaatctcttcttcagaaggcacctcacttctcagacttaaaattccacatcaagtgttccattaaaagaagataaggcattctgagtgcaaacaaatgggggcttcttaaactacacaccagcagtcagtgaggaaaactttgaacaattattgagttgctttcttgggtctctataatcaataacctgtctgcagatatctatctatataaagatattatatataaatataaatttacatatatatgcacatgtatatatagttgtacatatatgtgtgtatatatatacttaaatgtaatatttacaaaataaaactgtgatctcgtctagagaaaatgtattcatattacaaactgctcttccatatttatgtaccatattatacctttttattattgttataattattatgggtatttctaattaatatgatgttgaaacctgtttggcaccttctggaagctaccaaaaaaatgacactccattgaagtgcttaaaagctgttctcataagaattctactggcctattgtaaaaaagaaaaaaaaaagaaaaagaagaaagacacaaagaaaataatctaaacaccaaaaactaaacacaattccaatcctttttctgtacctcacgcgcataaatttggctgctcctatttttttttctgtttatgtgtttttatggatctaagttaaatcttttggcaatatataaaaatgtaaatagtaaactttatttattaagaatgtcatcttttttaatttatatttacacaattgttcatctaatttattttttctatacagttttaaatactcagacatattttgctgttcatgatatttttatcctgttctcatggatttgttttcccatactgttttctctgatctcaattacaggttggatctcacaaataataatgtcagagacagaaatattttgccactgttgattactatactttaaagttctatattatgaaaatatataatagcttgtacgct

SEQ ID NO: 455084 - DNA, 8375 bp, Homo sapiens
gacagagtgcggagaagctcagtggtcatcctgatgttgaacagccctgtaagtccagtgtccgcacctggagcccaaattcagctgtcaacccacacacggttcctccagcctgccctgagcctcaaggctgctacctcgagctggagttcctctaccccttggtccctgagtctctgaccatttgggtgacctttgtctccactgactgggactctagtggagctgtcaatgacatcaaactgttggctgtcagtgggaagaacatctccctgggtcctcagaatgtcttctgtgatgtcccactgaccatcagactctgggacgtgggcgaggaggtgtatggcatccaaatctacacgctggatgagcacctggagatcgatgctgccatgttgacctccactgcagacaccccactctgtctacagtgtaagcccctgaagtataaggtggtccgggaccctcctctccagatggatgtggcctccatcctacatctcaataggaaattcgtagacatggatctaaatcttggcagtgtgtaccagtattgggtcataactatttcaggaactgaagagagtgagccatcacctgctgtcacatacatccatggaagtgggtactgtggcgatggcattatacaaaaagaccaaggtgaacaatgcgacgacatgaataagatcaatggtgatggctgctcccttttctgccgacaagaagtctccttcaattgtattgatgaacccagccggtgctatttccatgatggtgatggggtatgtgaggagtttgaacaaaaaaccagcattaaggactgtggtgtctacacgccccagggattcctggatcagtgggcatccaatgcttcagtatctcatcaagaccagcaatgcccaggctgggtcatcatcggacagccagcagcatcccaggtgtgtcgaaccaaggtgatagatctcagtgaaggcatttcccagcatgcctggtacccttgcaccatcagctacccatattcccagctggctcagaccactttttggctccgggcgtatttttctcaaccaatggttgccgcagctgtcattgtccacctggtgacggatgggacatattatggggaccaaaagcaggagaccatcagcgtgcagctgcttgataccaaagatcagagccacgatctaggcctccatgtcctgagctgcaggaacaatcccctgattatccctgtggtccatgacctcagccagcccttctaccacagccaggcggtacgtgtgagcttcagttcgcccctggtcgccatctcgggggtggccctccgttccttcgacaactttgaccccgtcaccctgagcagctgccagagaggggagacctacagccctgccgagcagagctgcgtgcacttcgcatgtgagaaaactgactgtccagagctggctgtggagaatgcttatctcaattgctccagcagcgaccgctaccacggtgcccagtgtactgtgagctgccggacaggctacgtgctccagatacggcgggatgatgagctgatcaagagccagacgggacccagcgtcacagtgacctgtacagagggcaagtggaataagcaggtggcctgtgagccagtcgactgcagcatcccagatcaccatcaagtctatgctgcctccttctcctgccctgagggcaccacctttggcagtcaatgttccttccagtgccgtcaccctgcacaattgaaaggcaacaacagcctcctgacctgcatggaggatgggctgtggtccttcccagaggccctgtgtgagctcatgtgcctcgctccaccccctgtgcccaatgcagacctccagaccgcccggtgccgagagaataagcacaaggtgggctccttctgcaaatacaaatgcaagcctggataccatgtgcctggatcctctcggaagtcaaagaaacgggccttcaagactcagtgtacccaggatggcagctggcaggagggagcttgtgttcctgtgacctgtgacccacctccaccaaaattccatgggctctaccagtgtactaatggcttccagttcaacagtgagtgtaggatcaagtgtgaagacagtgatgcctcccagggacttgggagcaatgtcattcattgccggaaagatggcacctggaacggctccttccatgtctgccaggagatgcaaggccagtgctcggttccaaacgagctcaacagcaacctcaaactgcagtgccctgatggctatgccatagggtcggagtgtgccacctcgtgcctggaccacaacagcgagtccatcatcctgccaatgaacgtgaccgtgcgtgacatcccccactggctgaaccccacacgggtagagagagttgtctgcactgctggtctcaagtggtatcctcaccctgctctgattcactgtgtcaaaggctgtgagcccttcatgggagacaattattgtgatgccatcaacaaccgagccttttgcaactatgacggtggggattgctgcacctccacagtgaagaccaaaaaggtcaccccattccctatgtcctgtgacctacaaggtgactgtgcttgtcgggacccccaggcccaagaacacagccggaaagacctccggggatacagccatggctaaggaaggacaagaagttgtcaaagaattcccaacgccaggacccacatccctttggtattgatttcacagtcagctgctcaacggaatggcctctccacaccagggatccttagcacccaaccggtctgcctttaattttacccaggaaggactcacattggggcgaatgaaccaagtttcgccatgctggatgatgaaatggattcccatcccaaagtctgagatggattgcatatacagtgtgcagtcccagagcctcctaaaattctagccatttgtcacacaaccacagcaagaaacgtgttctatatctagagtgtgcccatctgtgtttagtacacatgcatgcatacacacccatacaaacatctgtgtgagggcagttctggagatgagcagagagagaccggaataaactcaatcttttctttcccaagctcctagccaacactatccttgggagaaagaaatttgcagaaactgctaagaccaagtgtggagatgtcaagctagttcacactctgaggctcagaatatgtaggacatgcacaattgtgcagtcctttgggattggaagtgaaacagtctgtgatcccctaccttctagggaactaggacctaggaagaggtaaagattatcaggtatgcaaagcgccccaattcttctgctgccatgggggattttaccccaactccagggttcgaggccaatctgagaatggcttaggattgcaatgtcaaggtattatatcagccccttgcttgaggcttgaggtcataatatccctctaggacttacctgttcccccagatcttgccttgggaccacatttgctgctacttttcctgctgctctatcctatacattgaataatccaagatggtagaactaggttaggaaaaattccacacaaccaaacagtctgccttaaaagtgacccacatttttccatagctcctcactttttagcccttctgcaagagaaaaaccctcatgggtccacatggtgagaagttaagtttcctgtaagtgggcctctcaccctggaaaggagttgagggacatcagatgctggaaccctcactgaaagtccagaatgtctaagccagtgttagattttgtaaacaagtggaacagtgttaaatttctatgatgttggagccatccagagactactggaattgtcgagacttttggattattatccttatccttatcctaatcttcctagcccttcaggctagagtaggcttcgatcctgagaaccttgctgttgctctgaggagatataattctgggagaaagaatcttttataagaacagtacagattgttctcaagagggccatcagaaggaagccaaagagttcacagcctcagcaccaacaactcaacatggtcatcatgttttctatatggtttttccagctagcagtactcccttccatacctgtgactgggcagtgcttttctctctcccatgtctagcctccaaaagttaagtgaaaattagtcaactgcacgtggaagcccccaccactttggggatctctttatttcttttcagccagggacctgtccactccctttgaattaatatgggaagaaattaatacaggatgaactggagagaagggttgagtgtggcatactttctgaaacctggagctgggaattgcggagaagggaaggtctagactagttacatcacatagggattactgtaaatcaagtcatctcaagtctagtgaagacagccaacagaaacaaaacctagcatagggatagaaaataccatgcacgtgtgcagccccacctaattcctgcatccaaggcaggtgttgttaatctatcatagcacttaaaaaaaaaaaaaaagagaccaaaaataactttaggaaccaccatattatatcactcccaatagcactgacctggtgatcaaaaacacttgagaagacatctattggccatctctggccaattacactaagaaacatatcaaggtgcttttggcacaggtgcccacaaatacggatgcagtgctgagatagtttatgagacttgtaccatttcacaaactctgaaattgggttccatattggcaaggctgccacagttgttaagaataatcctctatgtttcttcctcacaaaaccatatctcatttatatccagaccattacttcactataattacaaggacaaattattagcaagaaataagaatagtattagaagaattgatcctattttgaacccctctccagtatcttcacactcttgtcaactctccaggcctctctcttgccctgagttatcagcctgtgtggtgttaactaccttagaaggtacaagctaagaaatgtaacagtatcaaccctcccagttgcttaattatacccataggtaatacaaaaagctctgaagacccaaagatgacattactaatgatgtgatttcaggagccacagaagaaccttaccagcttccctcaaatcagtccttatcctctttctatcttcactcccatcatcatctattttcacactatccagctaagcaaagattcctggaggctgacttgtatcttcagactcacagagtgaattcagctcttctgaatcaagacccacccagtctctttcattcagacctgttgctaacaaatttatatttgccaaggatattaggcaaaagaggctacttgattggtggccaacctcgtgcccacatggaaggtatctttaatagggtcttttcaaaccttagtggaggagggtcagctcaatttgggcaatgcatttgttcccagtttcattttcttcctgggaattaactcgtcatttcattccttcagtcatcttctgtgtaggtgaccggagcactgagaggcagctctgatgcactattgtgtgtcagcagctcaaaggccctaaaacactgaaggttctgcatctgaagtattagattgttagcagcaaaatatgaaagatgaggtggacagtcctctaagccctatttagggaagcttttccaagccacaatcttaactacctacccaaaggatttgcattacccccagattctgtgccaacaaccttttaaggaaatacagtccttgggaaatgagttttgatggtgaattggggtgttaaggaagggaaagattgtcatagatggtagggctttgaaaatgcagggtatcagctgccactcctggcttcaacacattgagtcactgcctagacggttctcttggtcttattcccatcctggccaatgcttaaatactatttgttgaaaataattctttgagacagatttcagctacctcccttccaggttcgatttaacttggttgtaattgtcaatttgttgttataggtcttacctgtgtgaaagaaagaaaaagaaagaaagaaagaaagagaaaggaaattataaggtcaagttaacagttttgaggttttgtgtttttttctggaactacttcaagtgagaaaataaaaaaaaatggtgacaaagctgtacagatagagataatagaagacaaagagattaaaaggaaataaaaatgcatgattaaaaactaagaataaaaaacctatttttatgtttcctaaaggaaattgtttattctacagactcagtaggtagacacaaacataaagatttccctagaagacatagagtgggatttgataacactgtctgttattttctgtacattgtggtaggtccaggaaatatgacattttcccccttgatgtgttattgttgttgttgggtggggtgggcattttgtttatttgtttggtggcaatcagtggtagtagggagtgggagggcttatattggtttttccagctattaaggggacatattgtgtcgttgtgcttttcacgttataaaatgtttatatttaccagtacagcactgggctttataaagactgcactcagaaccacactgcacagtccagttttttaaaaagctgctacatgacagacaggtaatcccactgagtgagttttgagaaacaaatcaaacgaagtaaacaagaaacataaaaaccaaatagcaaatgaataaaagcctgttcttgtaacttattcaacttttgccaaattcctaccaatcacttgctttttaaaagaaatgtataatagccaaaagagaaattatgtccctgttgtacagaagttagaatttttgactccaggcagcagtttgctcagtgatcttgaacaagttatccaattgcctctacatttgcatcagtttctctagctgcaaaatggggataatactatatacctacctcacagtgggagggcaggagattttgaggccctgaggttttaggtgggctgtgagggccaacgcttgacacaaagtccatgggttattattcaagaatgcacaggcccatcggccttttagaaagacaagacagggagtgcttgtttgatatttcaaggaataaagccggagctcctgaattgtagtccaccttaaaagagagacctgtattggagaatattttatttttttggcaaatttgatcttaccctttaccagttctataatttggttaaaagctgattacgtcctacaatgtcaaagtcagctaactgtcgtctacttaagacttctggtcatttccaacttatagaggaagggagtctctaaaatctcttcttcagaaggcacctcacttctcagacttaaaattccacatcaagtgttccattaaaagaagataaggcattctgagtgcaaacaaatgggggcttcttaaactacacaccagcagtcagtgaggaaaactttgaacaattattgagttgctttcttgggtctctataatcaataacctgtctgcagatatctatctatataaagatattatatataaatataaatttacatatatatgcacatgtatatatagttgtacatatatgtgtgtatatatatacttaaatgtaatatttacaaaataaaactgtgatctcgtctagagaaaatgtattcatattacaaactgctcttccatatttatgtaccatattatacctttttattattgttataattattatgggtatttctaattaatatgatgttgaaacctgtttggcaccttctggaagctaccaaaaaaatgacactccattgaagtgcttaaaagctgttctcataagaattctactggcctattgtaaaaaagaaaaaaaaaagaaaaagaagaaagacacaaagaaaataatctaaacaccaaaaactaaacacaattccaatcctttttctgtacctcacgcgcataaatttggctgctcctatttttttttctgtttatgtgtttttatggatctaagttaaatcttttggcaatatataaaaatgtaaatagtaaactttatttattaagaatgtcatcttttttaatttatatttacacaattgttcatctaatttattttttctatacagttttaaatactcagacatattttgctgttcatgatatttttatcctgttctcatggatttgttttcccatactgttttctctgatctcaattacaggttggatctcacaaataataatgtcagagacagaaatattttgccactgttgattactatactttaaagttctatattatgaaaatatataatagcttgtacgct

SEQ ID NO: 455085 - DNA, 8544 bp, Homo sapiens
gctgctggacagccgctgaccaggtacatcttctgtcttctgtttctgctgctggggagcattagactgtcctatggactctcctaagcctcctagaggcagttggctgatggtcttcaacagattgtctttctgtcctctccactctgcctctcctgttttgacctctgtcctctacaccattgcccagaaggtcatcctgatgttgaacagccctgtaagtccagtgtccgcacctggagcccaaattcagctgtcaacccacacacggttcctccagcctgccctgagcctcaaggctgctacctcgagctggagttcctctaccccttggtccctgagtctctgaccatttgggtgacctttgtctccactgactgggactctagtggagctgtcaatgacatcaaactgttggctgtcagtgggaagaacatctccctgggtcctcagaatgtcttctgtgatgtcccactgaccatcagactctgggacgtgggcgaggaggtgtatggcatccaaatctacacgctggatgagcacctggagatcgatgctgccatgttgacctccactgcagacaccccactctgtctacagtgtaagcccctgaagtataaggtggtccgggaccctcctctccagatggatgtggcctccatcctacatctcaataggaaattcgtagacatggatctaaatcttggcagtgtgtaccagtattgggtcataactatttcaggaactgaagagagtgagccatcacctgctgtcacatacatccatggaagtgggtactgtggcgatggcattatacaaaaagaccaaggtgaacaatgcgacgacatgaataagatcaatggtgatggctgctcccttttctgccgacaagaagtctccttcaattgtattgatgaacccagccggtgctatttccatgatggtgatggggtatgtgaggagtttgaacaaaaaaccagcattaaggactgtggtgtctacacgccccagggattcctggatcagtgggcatccaatgcttcagtatctcatcaagaccagcaatgcccaggctgggtcatcatcggacagccagcagcatcccaggtgtgtcgaaccaaggtgatagatctcagtgaaggcatttcccagcatgcctggtacccttgcaccatcagctacccatattcccagctggctcagaccactttttggctccgggcgtatttttctcaaccaatggttgccgcagctgtcattgtccacctggtgacggatgggacatattatggggaccaaaagcaggagaccatcagcgtgcagctgcttgataccaaagatcagagccacgatctaggcctccatgtcctgagctgcaggaacaatcccctgattatccctgtggtccatgacctcagccagcccttctaccacagccaggcggtacgtgtgagcttcagttcgcccctggtcgccatctcgggggtggccctccgttccttcgacaactttgaccccgtcaccctgagcagctgccagagaggggagacctacagccctgccgagcagagctgcgtgcacttcgcatgtgagaaaactgactgtccagagctggctgtggagaatgcttatctcaattgctccagcagcgaccgctaccacggtgcccagtgtactgtgagctgccggacaggctacgtgctccagatacggcgggatgatgagctgatcaagagccagacgggacccagcgtcacagtgacctgtacagagggcaagtggaataagcaggtggcctgtgagccagtcgactgcagcatcccagatcaccatcaagtctatgctgcctccttctcctgccctgagggcaccacctttggcagtcaatgttccttccagtgccgtcaccctgcacaattgaaaggcaacaacagcctcctgacctgcatggaggatgggctgtggtccttcccagaggccctgtgtgagctcatgtgcctcgctccaccccctgtgcccaatgcagacctccagaccgcccggtgccgagagaataagcacaaggtgggctccttctgcaaatacaaatgcaagcctggataccatgtgcctggatcctctcggaagtcaaagaaacgggccttcaagactcagtgtacccaggatggcagctggcaggagggagcttgtgttcctgtgacctgtgacccacctccaccaaaattccatgggctctaccagtgtactaatggcttccagttcaacagtgagtgtaggatcaagtgtgaagacagtgatgcctcccagggacttgggagcaatgtcattcattgccggaaagatggcacctggaacggctccttccatgtctgccaggagatgcaaggccagtgctcggttccaaacgagctcaacagcaacctcaaactgcagtgccctgatggctatgccatagggtcggagtgtgccacctcgtgcctggaccacaacagcgagtccatcatcctgccaatgaacgtgaccgtgcgtgacatcccccactggctgaaccccacacgggtagagagagttgtctgcactgctggtctcaagtggtatcctcaccctgctctgattcactgtgtcaaaggctgtgagcccttcatgggagacaattattgtgatgccatcaacaaccgagccttttgcaactatgacggtggggattgctgcacctccacagtgaagaccaaaaaggtcaccccattccctatgtcctgtgacctacaaggtgactgtgcttgtcgggacccccaggcccaagaacacagccggaaagacctccggggatacagccatggctaaggaaggacaagaagttgtcaaagaattcccaacgccaggacccacatccctttggtattgatttcacagtcagctgctcaacggaatggcctctccacaccagggatccttagcacccaaccggtctgcctttaattttacccaggaaggactcacattggggcgaatgaaccaagtttcgccatgctggatgatgaaatggattcccatcccaaagtctgagatggattgcatatacagtgtgcagtcccagagcctcctaaaattctagccatttgtcacacaaccacagcaagaaacgtgttctatatctagagtgtgcccatctgtgtttagtacacatgcatgcatacacacccatacaaacatctgtgtgagggcagttctggagatgagcagagagagaccggaataaactcaatcttttctttcccaagctcctagccaacactatccttgggagaaagaaatttgcagaaactgctaagaccaagtgtggagatgtcaagctagttcacactctgaggctcagaatatgtaggacatgcacaattgtgcagtcctttgggattggaagtgaaacagtctgtgatcccctaccttctagggaactaggacctaggaagaggtaaagattatcaggtatgcaaagcgccccaattcttctgctgccatgggggattttaccccaactccagggttcgaggccaatctgagaatggcttaggattgcaatgtcaaggtattatatcagccccttgcttgaggcttgaggtcataatatccctctaggacttacctgttcccccagatcttgccttgggaccacatttgctgctacttttcctgctgctctatcctatacattgaataatccaagatggtagaactaggttaggaaaaattccacacaaccaaacagtctgccttaaaagtgacccacatttttccatagctcctcactttttagcccttctgcaagagaaaaaccctcatgggtccacatggtgagaagttaagtttcctgtaagtgggcctctcaccctggaaaggagttgagggacatcagatgctggaaccctcactgaaagtccagaatgtctaagccagtgttagattttgtaaacaagtggaacagtgttaaatttctatgatgttggagccatccagagactactggaattgtcgagacttttggattattatccttatccttatcctaatcttcctagcccttcaggctagagtaggcttcgatcctgagaaccttgctgttgctctgaggagatataattctgggagaaagaatcttttataagaacagtacagattgttctcaagagggccatcagaaggaagccaaagagttcacagcctcagcaccaacaactcaacatggtcatcatgttttctatatggtttttccagctagcagtactcccttccatacctgtgactgggcagtgcttttctctctcccatgtctagcctccaaaagttaagtgaaaattagtcaactgcacgtggaagcccccaccactttggggatctctttatttcttttcagccagggacctgtccactccctttgaattaatatgggaagaaattaatacaggatgaactggagagaagggttgagtgtggcatactttctgaaacctggagctgggaattgcggagaagggaaggtctagactagttacatcacatagggattactgtaaatcaagtcatctcaagtctagtgaagacagccaacagaaacaaaacctagcatagggatagaaaataccatgcacgtgtgcagccccacctaattcctgcatccaaggcaggtgttgttaatctatcatagcacttaaaaaaaaaaaaaaagagaccaaaaataactttaggaaccaccatattatatcactcccaatagcactgacctggtgatcaaaaacacttgagaagacatctattggccatctctggccaattacactaagaaacatatcaaggtgcttttggcacaggtgcccacaaatacggatgcagtgctgagatagtttatgagacttgtaccatttcacaaactctgaaattgggttccatattggcaaggctgccacagttgttaagaataatcctctatgtttcttcctcacaaaaccatatctcatttatatccagaccattacttcactataattacaaggacaaattattagcaagaaataagaatagtattagaagaattgatcctattttgaacccctctccagtatcttcacactcttgtcaactctccaggcctctctcttgccctgagttatcagcctgtgtggtgttaactaccttagaaggtacaagctaagaaatgtaacagtatcaaccctcccagttgcttaattatacccataggtaatacaaaaagctctgaagacccaaagatgacattactaatgatgtgatttcaggagccacagaagaaccttaccagcttccctcaaatcagtccttatcctctttctatcttcactcccatcatcatctattttcacactatccagctaagcaaagattcctggaggctgacttgtatcttcagactcacagagtgaattcagctcttctgaatcaagacccacccagtctctttcattcagacctgttgctaacaaatttatatttgccaaggatattaggcaaaagaggctacttgattggtggccaacctcgtgcccacatggaaggtatctttaatagggtcttttcaaaccttagtggaggagggtcagctcaatttgggcaatgcatttgttcccagtttcattttcttcctgggaattaactcgtcatttcattccttcagtcatcttctgtgtaggtgaccggagcactgagaggcagctctgatgcactattgtgtgtcagcagctcaaaggccctaaaacactgaaggttctgcatctgaagtattagattgttagcagcaaaatatgaaagatgaggtggacagtcctctaagccctatttagggaagcttttccaagccacaatcttaactacctacccaaaggatttgcattacccccagattctgtgccaacaaccttttaaggaaatacagtccttgggaaatgagttttgatggtgaattggggtgttaaggaagggaaagattgtcatagatggtagggctttgaaaatgcagggtatcagctgccactcctggcttcaacacattgagtcactgcctagacggttctcttggtcttattcccatcctggccaatgcttaaatactatttgttgaaaataattctttgagacagatttcagctacctcccttccaggttcgatttaacttggttgtaattgtcaatttgttgttataggtcttacctgtgtgaaagaaagaaaaagaaagaaagaaagaaagagaaaggaaattataaggtcaagttaacagttttgaggttttgtgtttttttctggaactacttcaagtgagaaaataaaaaaaaatggtgacaaagctgtacagatagagataatagaagacaaagagattaaaaggaaataaaaatgcatgattaaaaactaagaataaaaaacctatttttatgtttcctaaaggaaattgtttattctacagactcagtaggtagacacaaacataaagatttccctagaagacatagagtgggatttgataacactgtctgttattttctgtacattgtggtaggtccaggaaatatgacattttcccccttgatgtgttattgttgttgttgggtggggtgggcattttgtttatttgtttggtggcaatcagtggtagtagggagtgggagggcttatattggtttttccagctattaaggggacatattgtgtcgttgtgcttttcacgttataaaatgtttatatttaccagtacagcactgggctttataaagactgcactcagaaccacactgcacagtccagttttttaaaaagctgctacatgacagacaggtaatcccactgagtgagttttgagaaacaaatcaaacgaagtaaacaagaaacataaaaaccaaatagcaaatgaataaaagcctgttcttgtaacttattcaacttttgccaaattcctaccaatcacttgctttttaaaagaaatgtataatagccaaaagagaaattatgtccctgttgtacagaagttagaatttttgactccaggcagcagtttgctcagtgatcttgaacaagttatccaattgcctctacatttgcatcagtttctctagctgcaaaatggggataatactatatacctacctcacagtgggagggcaggagattttgaggccctgaggttttaggtgggctgtgagggccaacgcttgacacaaagtccatgggttattattcaagaatgcacaggcccatcggccttttagaaagacaagacagggagtgcttgtttgatatttcaaggaataaagccggagctcctgaattgtagtccaccttaaaagagagacctgtattggagaatattttatttttttggcaaatttgatcttaccctttaccagttctataatttggttaaaagctgattacgtcctacaatgtcaaagtcagctaactgtcgtctacttaagacttctggtcatttccaacttatagaggaagggagtctctaaaatctcttcttcagaaggcacctcacttctcagacttaaaattccacatcaagtgttccattaaaagaagataaggcattctgagtgcaaacaaatgggggcttcttaaactacacaccagcagtcagtgaggaaaactttgaacaattattgagttgctttcttgggtctctataatcaataacctgtctgcagatatctatctatataaagatattatatataaatataaatttacatatatatgcacatgtatatatagttgtacatatatgtgtgtatatatatacttaaatgtaatatttacaaaataaaactgtgatctcgtctagagaaaatgtattcatattacaaactgctcttccatatttatgtaccatattatacctttttattattgttataattattatgggtatttctaattaatatgatgttgaaacctgtttggcaccttctggaagctaccaaaaaaatgacactccattgaagtgcttaaaagctgttctcataagaattctactggcctattgtaaaaaagaaaaaaaaaagaaaaagaagaaagacacaaagaaaataatctaaacaccaaaaactaaacacaattccaatcctttttctgtacctcacgcgcataaatttggctgctcctatttttttttctgtttatgtgtttttatggatctaagttaaatcttttggcaatatataaaaatgtaaatagtaaactttatttattaagaatgtcatcttttttaatttatatttacacaattgttcatctaatttattttttctatacagttttaaatactcagacatattttgctgttcatgatatttttatcctgttctcatggatttgttttcccatactgttttctctgatctcaattacaggttggatctcacaaataataatgtcagagacagaaatattttgccactgttgattactatactttaaagttctatattatgaaaatatataatagcttgtacgct

SEQ ID NO: 455086 - DNA, 9739 bp, Homo sapiens
  misc_feature (9313)..(9313): n is a, c, g, or t
ctgtccaggttgagtgagggtgtccaggatgaggaatgagggtgtccagggtgaggagtgagggagtccagggtgaggagtgagggagtccagggtgaggattgagggtgtcagggtgagtgagagtgtccagggtgaggagtgagggtatccagggtgagtgagggtgtccagggtgaggagtgagggtatccagggtgagtgagggtgtccagggtgagtgagggtgtcagggtgagtgaacgtgtccagggtgtgtgagggtgtccagggtgcagagtgaggtgtccagggtgaggagtgacggtgtctggggtgagtgagggtgtccagggtgaggagtgagggtgtcagggtgagtgagggtgtccagggttgagtgcacatgtgtggtgaggaggtgtttgcagtgcttcaggcgcagcaactctttcatctagtttaaaattgtgctctgaggttagattttagtagaacaaaggccttacaaagaatgtgaaaacattgtgcttccctgcttacaggcaattaaaaaggagaatcaagctgagggtgcctggtgtggggtggggtggagaagaccacagagactattgtgtgttttattcaacagtgtcctgggctgctttctccagaaatgtccctgacacatggatgtaagtgtggctagtttactgggagatgatcccagtgatgcaggacacgcgagccctaagattgaagcatagcccgggagggttcttagctttgcccaggaaggaactcaaggcaagccagtggtgttagcaacttttattgaagcggccggctgtgcacagcagcagcagaggcgctgctccttgcaaagcagggctgccctacaggctgtgcgcccacagtagcagctcagaggcagttctgcagtggtatttgtatccacttttaattatatgcaaatgaaggggcagtttatgcagacatttccagggtgagggtggtaacttctgggtgctgccagagccatcgtgaactgacttgacacaggtcggtgtgtcctatggaaactagcatctgccctggacctattttagctagtgctcagtttggtctgagtgcctgagccccacttccagagttgagtcccacctcctacctcattcccccttcagagattagatactcctccttaatcttaagggggcctcgagaagggcggagtcctgcttttccgtaactacttcctgctgagtttatggcacgtaggccctgcctggcactggaggacgtaaaaatttctggatacctgatctaaggagcccagaggcaggacgatttcattctccgtgtcagtggacaggatgggctggaagccttgtgccagcattgtctctggaactgtggtaatctagaatacacaaactttactaagaggttaaagaagcaaggaccaaacatttgtaacaagacagttgtcaaaggtcctagaagaggtgaaaaacaggtgagacttgggaaggcacttttgatggttgaccagatatagttggggcagtgccctggttatatctatgtaactaggtagcttgctcatagatcttttgaatgttaacctcaacctgtccagagttaatatatgtgcagcaggttttattaataactgcacaagaccccaccttgttcagctagtaaataatccaatgctagtctgttatcaacaactacattttccagagtctggggaactcttgaattctctttaatgcctgatctccgttggtggctaaggattctaggatttgagccaagttctttagcgttaactcatggtaggcaaagcaccccagggtgctgctagtcctattgccaccctgattcctgccagaaataagtaagcaagcaacaggacaatgaactccatgttgcccagatcccactgagagtgaacgtgcagtcatgcccataaccgacacacatcccagtccatgtgggtcagtccttcatcaccctccctgccttctgacaacagcagactccagccattccattatcattcacagcccaacccaagcagtcagtggctgaagaaagagaatcaggtatactctatgtccacatataccttcctgccacagggcttcaccaactggcaggattccccccagcccccaactcctcctcatcccttgttcccaggcgggtcaattggagagtgagcagagatagatggcttgcagaagggtatgcaagatggggagactccaccagaccttagggagagaatggcatctttctccaccttttaagagagacagagcctccctgaggtctcaaagatttttcagggcaacacaagaaacgtttccaagcctcagctgcaggtgttcacctttccactctggggtgtgaggagatggtaagctgaggacaagtgtgttccagatgcaggccaactctgttctccaacagtttgaaccaacttggccttggggttccaagggtaggatgaagggtgtcacggcaggacggggcctggcgtgaggcaacagcaagcagagcgaggacacaacagtggcagcagtgtacagacacaggacgtcagcttcaaacgatgcaacagcagggatatcttgggcacggctctgattcgagccactcccaactctcttgcctccaggatggaggcactgtacatgcaacagtccagagaaagattctagccagtccaagcccaggcacatccagagaaggtgggagctcttcgggttgactccaccgaggaaaacaggcatttgggtatttcagattcccgctccacaataaggcaacttttaaaaaaatattatttccaaaaacaaaacaaaaattccagggggagggaattcagcggatcagtcttaagaggagcttttttttggagcgagaaatcatataaaataaaatgaaataaaacaaggaggaaggcaaccagctgttaggggaaaaataaggcagataaaggagcggggagagaaattaattgccaaccaggaggagttgggctgtatttttcaaaggtggggagagtggagcacacaccttgaggaggaaagcgagaaagaaaagaaaaaagcaagtgaaggggggctcgcccaagaagggtgaagaagcgaagaaagtcgaggcgccgaggctcccaaagctggcagctccgggtggcggtgcaggggcgaaggggggggcggggggaacgtcggacatgcggctctggagttgggtgctgcacctggggctgctgagcgccgcgctgggctgcgggctggccgagcgtccccgccgggcccggagagacccgcgggccggccgacccccgcgccccgccgccggcccggccacctgcgccacccgcggcccgcggccgccgcgcctcgccgccgccgccgccgccgccgggcggtgcctgggaagccgtgcgcgtcccccggcggcggcagcagcgggaggcgaggggcgccaccgaggagccgagcccgccgagccgggcgctctatttcagcgggcgaggcgagcagctgcgcctccgggccgacctcgagctgccccgggacgcgttcacgctgcaagtgtggctgcgagcggaggggggccagaggtctccggcagtgatcacagggctgtatgacaaatgttcttatatctcacgtgaccgaggatgggtcgtgggcattcacaccatcagtgaccaagacaacaaagacccacgctactttttctccttgaagacagaccgagcccggcaagtgaccaccatcaatgcccaccgcagctacctcccaggccagtgggtatacctagctgccacctatgatgggcagttcatgaagctctatgtgaatggtgcccaggtggccacctctggggaacaagtgggtggcatattcagcccactgacccagaagtgcaaagtgctcatgttagggggcagtgccctgaatcacaactaccggggctacatcgagcacttcagtctgtggaaggtggccaggactcagcgggagatactgtctgacatggaaacccatggcgcccacactgctctacctcagctcctcctccaggagaactgggacaatgtgaagcatgcctggtcccccatgaaggatggcagcagccccaaagtggaattcagcaatgcccacggctttctgctggacacgagtctggagcctcctctgtgcggacagacattgtgtgacaacacagaggtcattgccagctacaatcagctctcaagtttccgccagcccaaggtggtgcgctaccgcgtggtcaacctctatgaagatgatcataagaacccgacggtgacgcgcgagcaggtggacttccagcaccatcagctggctgaggccttcaagcaatacaacatctcctgggagctggacgtgctggaggtgagcaactcctcccttcgccgccgcctcatcctggccaactgtgacatcagcaagattggggatgagaactgtgaccccgagtgcaaccacacgctgacgggccacgacggcggggattgccgccacctgcgccaccctgccttcgtgaagaagcagcacaacggggtgtgtgacatggactgcaactatgaacggttcaactttgatggtggagagtgctgtgaccctgaaatcaccaatgtcactcagacttgctttgaccccgactctccacacagagcctacttggatgttaatgagctgaagaacattcttaaattggatggatcaacacatctcaatattttctttgcaaaatcctcagaggaggagttggcaggagtagcaacttggccatgggacaaggaggccctgatgcacttaggtggcattgtcttgaacccatctttctatggcatgcctgggcacacccacaccatgatccatgagattggtcacagcctgggcctctatcacgtcttccgaggcatctcagaaatccagtcctgcagtgacccctgcatggagacagagccctccttcgagactggagacctctgcaatgataccaacccagcccctaaacacaagtcctgtggtgacccagggccaggaaatgacacctgtggctttcatagcttcttcaacactccttacaacaacttcatgagctatgcagatgacgactgtacggactccttcacgcccaatcaagtcgccagaatgcactgttacctggacctggtctaccagggctggcagccctccaggaaaccagcgcctgttgccctcgccccccaagttctgggccacacaacggactctgtgacactggagtggttcccacctatagatggccatttctttgaaagagaattgggatcagcatgtcatctttgcctggaagggagaatcctggtgcagtatgcttccaacgcttcctccccaatgccctgcagcccatcaggacactggagccctcgtgaagcagaaggtcatcctgatgttgaacagccctgtaagtccagtgtccgcacctggagcccaaattcagctgtcaacccacacacggttcctccagcctgccctgagcctcaaggctgctacctcgagctggagttcctctaccccttggtccctgagtctctgaccatttgggtgacctttgtctccactgactgggactctagtggagctgtcaatgacatcaaactgttggctgtcagtgggaagaacatctccctgggtcctcagaatgtcttctgtgatgtcccactgaccatcagactctgggacgtgggcgaggaggtgtatggcatccaaatctacacgctggatgagcacctggagatcgatgctgccatgttgacctccactgcagacaccccactctgtctacagtgtaagcccctgaagtataaggtggtccgggaccctcctctccagatggatgtggcctccatcctacatctcaataggaaattcgtagacatggatctaaatcttggcagtgtgtaccagtattgggtcataactatttcaggaactgaagagagtgagccatcacctgctgtcacatacatccatggaagtgggtactgtggcgatggcattatacaaaaagaccaaggtgaacaatgcgacgacatgaataagatcaatggtgatggctgctcccttttctgccgacaagaagtctccttcaattgtattgatgaacccagccggtgctatttccatgatggtgatggggtatgtgaggagtttgaacaaaaaaccagcattaaggactgtggtgtctacacgccccagggattcctggatcagtgggcatccaatgcttcagtatctcatcaagaccagcaatgcccaggctgggtcatcatcggacagccagcagcatcccaggtgtgtcgaaccaaggtgatagatctcagtgaaggcatttcccagcatgcctggtacccttgcaccatcagctacccatattcccagctggctcagaccactttttggctccgggcgtatttttctcaaccaatggttgccgcagctgtcattgtccacctggtgacggatgggacatattatggggaccaaaagcaggagaccatcagcgtgcagctgcttgataccaaagatcagagccacgatctaggcctccatgtcctgagctgcaggaacaatcccctgattatccctgtggtccatgacctcagccagcccttctaccacagccaggcggtacgtgtgagcttcagttcgcccctggtcgccatctcgggggtggccctccgttccttcgacaactttgaccccgtcaccctgagcagctgccagagaggggagacctacagccctgccgagcagagctgcgtgcacttcgcatgtgagaaaactgactgtccagagctggctgtggagaatgcttatctcaattgctccagcagcgaccgctaccacggtgcccagtgtactgtgagctgccggacaggctacgtgctccagatacggcgggatgatgagctgatcaagagccagacgggacccagcgtcacagtgacctgtacagagggcaagtggaataagcaggtggcctgtgagccagtcgactgcagcatcccagatcaccatcaagtctatgctgcctccttctcctgccctgagggcaccacctttggcagtcaatgttccttccagtgccgtcaccctgcacaattgaaaggcaacaacagcctcctgacctgcatggaggatgggctgtggtccttcccagaggccctgtgtgagctcatgtgcctcgctccaccccctgtgcccaatgcagacctccagaccgcccggtgccgagagaataagcacaaggtgggctccttctgcaaatacaaatgcaagcctggataccatgtgcctggatcctctcggaagtcaaagaaacgggccttcaagactcagtgtacccaggatggcagctggcaggagggagcttgtgttcctgtgacctgtgacccacctccaccaaaattccatgggctctaccagtgtactaatggcttccagttcaacagtgagtgtaggatcaagtgtgaagacagtgatgcctcccagggacttgggagcaatgtcattcattgccggaaagatggcacctggaacggctccttccatgtctgccaggagatgcaaggccagtgctcggttccaaacgagctcaacagcaacctcaaactgcagtgccctgatggctatgccatagggtcggagtgtgccacctcgtgcctggaccacaacagcgagtccatcatcctgccaatgaacgtgaccgtgcgtgacatcccccactggctgaaccccacacgggtagagagagttgtctgcactgctggtctcaagtggtatcctcaccctgctctgattcactgtgtcaaaggctgtgagcccttcatgggagacaattattgtgatgccatcaacaaccgagccttttgcaactatgacggtggggattgctgcacctccacagtgaagaccaaaaaggtcaccccattccctatgtcctgtgacctacaaggtgactgtgcttgtcgggacccccaggcccaagaacacagccggaaagacctccggggatacagccatggctaaggaaggacaagaagttgtcaaagaattcccaacgccaggacccacatccctttggtattgatttcacagtcagctgctcaacggaatggcctctccacaccagggatccttagcacccaaccggtctgcctttaattttacccaggaaggactcacattggggcgaatgaaccaagtttcgccatgctggatgatgaaatggattcccatcccaaagtctgagatggattgcatatacagtgtgcagtcccagagcctcctaaaattctagccatttgtcacacaaccacagcaagaaacgtgttctatatctagagtgtgcccatctgtgtttagtacacatgcatgcatacacacccatacaaacatctgtgtgagggcagttctggagatgagcagagagagaccggaataaactcaatcttttctttcccaagctcctagccaacactatccttgggagaaagaaatttgcagaaactgctaagaccaagtgtggagatgtcaagctagttcacactctgaggctcagaatatgtaggacatgcacaattgtgcagtcctttgggattggaagtgaaacagtctgtgatcccctaccttctagggaactaggacctaggaagaggtaaagattatcaggtatgcaaagcgccccaattcttctgctgccatgggggattttaccccaactccagggttcgaggccaatctgagaatggcttaggattgcaatgtcaaggtattatatcagccccttgcttgaggcttgaggtcataatatccctctaggacttacctgttcccccagatcttgccttgggaccacatttgctgctacttttcctgctgctctatcctatacattgaataatccaagatggtagaactaggttaggaaaaattccacacaaccaaacagtctgccttaaaagtgacccacatttttccatagctcctcactttttagcccttctgcaagagaaaaaccctcatgggtccacatggtgagaagttaagtttcctgtaagtgggcctctcaccctggaaaggagttgagggacatcagatgctggaaccctcactgaaagtccagaatgtctaagccagtgttagattttgtaaacaagtggaaaacaaggttgtttaacacaagttttttcctttacttgaaatttggttcatcgggggaaaaggggcccccaattcccaaggangaaccttacctggggaaatttgtccgagacttttgcgatttattattcccttaatccttaatcctaaatccttttcgcctttaaaggccccccttttccaggggctttaaaggaaggttaaaggcggcgtttcccggaattccccctttggaaggaaacccgttttggacctggggtttcattgggcgccgcctttcccccttttggggacacagcgcgggaacgcgaaaactttactttaccaatttttcccttggggcgggacggaaacacgcaattctttcttatacaggaagcaggatacacgacttggtttcttccaaaggaagtgtgtcccaatccaaggaaaacggggaaaggcggccaaaaaaggaaagatttcccaaccaaggtcccctttccaagggcaaacccacaaaacaaaac

SEQ ID NO: 455087 - DNA, 7962 bp, Homo sapiens
gatcctttccataatgtgtgcccaggatggccgctgttaagagggagcttgtgttcctgtgacctgtgacccacctccatcctacatctcaataggaaattcgtagacatggatctaaatcttggcagtgtgtaccagtattgggtcataactatttcaggaactgaagagagtgagccatcacctgctgtcacatacatccatggaagtgggtactgtggcgatggcattatacaaaaagaccaaggtgaacaatgcgacgacatgaataagatcaatggtgatggctgctcccttttctgccgacaagaagtctccttcaattgtattgatgaacccagccggtgctatttccatgatggtgatggggtatgtgaggagtttgaacaaaaaaccagcattaaggactgtggtgtctacacgccccagggattcctggatcagtgggcatccaatgcttcagtatctcatcaagaccagcaatgcccaggctgggtcatcatcggacagccagcagcatcccaggtgtgtcgaaccaaggtgatagatctcagtgaaggcatttcccagcatgcctggtacccttgcaccatcagctacccatattcccagctggctcagaccactttttggctccgggcgtatttttctcaaccaatggttgccgcagctgtcattgtccacctggtgacggatgggacatattatggggaccaaaagcaggagaccatcagcgtgcagctgcttgataccaaagatcagagccacgatctaggcctccatgtcctgagctgcaggaacaatcccctgattatccctgtggtccatgacctcagccagcccttctaccacagccaggcggtacgtgtgagcttcagttcgcccctggtcgccatctcgggggtggccctccgttccttcgacaactttgaccccgtcaccctgagcagctgccagagaggggagacctacagccctgccgagcagagctgcgtgcacttcgcatgtgagaaaactgactgtccagagctggctgtggagaatgcttatctcaattgctccagcagcgaccgctaccacggtgcccagtgtactgtgagctgccggacaggctacgtgctccagatacggcgggatgatgagctgatcaagagccagacgggacccagcgtcacagtgacctgtacagagggcaagtggaataagcaggtggcctgtgagccagtcgactgcagcatcccagatcaccatcaagtctatgctgcctccttctcctgccctgagggcaccacctttggcagtcaatgttccttccagtgccgtcaccctgcacaattgaaaggcaacaacagcctcctgacctgcatggaggatgggctgtggtccttcccagaggccctgtgtgagctcatgtgcctcgctccaccccctgtgcccaatgcagacctccagaccgcccggtgccgagagaataagcacaaggtgggctccttctgcaaatacaaatgcaagcctggataccatgtgcctggatcctctcggaagtcaaagaaacgggccttcaagactcagtgtacccaggatggcagctggcaggagggagcttgtgttcctgtgacctgtgacccacctccaccaaaattccatgggctctaccagtgtactaatggcttccagttcaacagtgagtgtaggatcaagtgtgaagacagtgatgcctcccagggacttgggagcaatgtcattcattgccggaaagatggcacctggaacggctccttccatgtctgccaggagatgcaaggccagtgctcggttccaaacgagctcaacagcaacctcaaactgcagtgccctgatggctatgccatagggtcggagtgtgccacctcgtgcctggaccacaacagcgagtccatcatcctgccaatgaacgtgaccgtgcgtgacatcccccactggctgaaccccacacgggtagagagagttgtctgcactgctggtctcaagtggtatcctcaccctgctctgattcactgtgtcaaaggctgtgagcccttcatgggagacaattattgtgatgccatcaacaaccgagccttttgcaactatgacggtggggattgctgcacctccacagtgaagaccaaaaaggtcaccccattccctatgtcctgtgacctacaaggtgactgtgcttgtcgggacccccaggcccaagaacacagccggaaagacctccggggatacagccatggctaaggaaggacaagaagttgtcaaagaattcccaacgccaggacccacatccctttggtattgatttcacagtcagctgctcaacggaatggcctctccacaccagggatccttagcacccaaccggtctgcctttaattttacccaggaaggactcacattggggcgaatgaaccaagtttcgccatgctggatgatgaaatggattcccatcccaaagtctgagatggattgcatatacagtgtgcagtcccagagcctcctaaaattctagccatttgtcacacaaccacagcaagaaacgtgttctatatctagagtgtgcccatctgtgtttagtacacatgcatgcatacacacccatacaaacatctgtgtgagggcagttctggagatgagcagagagagaccggaataaactcaatcttttctttcccaagctcctagccaacactatccttgggagaaagaaatttgcagaaactgctaagaccaagtgtggagatgtcaagctagttcacactctgaggctcagaatatgtaggacatgcacaattgtgcagtcctttgggattggaagtgaaacagtctgtgatcccctaccttctagggaactaggacctaggaagaggtaaagattatcaggtatgcaaagcgccccaattcttctgctgccatgggggattttaccccaactccagggttcgaggccaatctgagaatggcttaggattgcaatgtcaaggtattatatcagccccttgcttgaggcttgaggtcataatatccctctaggacttacctgttcccccagatcttgccttgggaccacatttgctgctacttttcctgctgctctatcctatacattgaataatccaagatggtagaactaggttaggaaaaattccacacaaccaaacagtctgccttaaaagtgacccacatttttccatagctcctcactttttagcccttctgcaagagaaaaaccctcatgggtccacatggtgagaagttaagtttcctgtaagtgggcctctcaccctggaaaggagttgagggacatcagatgctggaaccctcactgaaagtccagaatgtctaagccagtgttagattttgtaaacaagtggaacagtgttaaatttctatgatgttggagccatccagagactactggaattgtcgagacttttggattattatccttatccttatcctaatcttcctagcccttcaggctagagtaggcttcgatcctgagaaccttgctgttgctctgaggagatataattctgggagaaagaatcttttataagaacagtacagattgttctcaagagggccatcagaaggaagccaaagagttcacagcctcagcaccaacaactcaacatggtcatcatgttttctatatggtttttccagctagcagtactcccttccatacctgtgactgggcagtgcttttctctctcccatgtctagcctccaaaagttaagtgaaaattagtcaactgcacgtggaagcccccaccactttggggatctctttatttcttttcagccagggacctgtccactccctttgaattaatatgggaagaaattaatacaggatgaactggagagaagggttgagtgtggcatactttctgaaacctggagctgggaattgcggagaagggaaggtctagactagttacatcacatagggattactgtaaatcaagtcatctcaagtctagtgaagacagccaacagaaacaaaacctagcatagggatagaaaataccatgcacgtgtgcagccccacctaattcctgcatccaaggcaggtgttgttaatctatcatagcacttaaaaaaaaaaaaaaagagaccaaaaataactttaggaaccaccatattatatcactcccaatagcactgacctggtgatcaaaaacacttgagaagacatctattggccatctctggccaattacactaagaaacatatcaaggtgcttttggcacaggtgcccacaaatacggatgcagtgctgagatagtttatgagacttgtaccatttcacaaactctgaaattgggttccatattggcaaggctgccacagttgttaagaataatcctctatgtttcttcctcacaaaaccatatctcatttatatccagaccattacttcactataattacaaggacaaattattagcaagaaataagaatagtattagaagaattgatcctattttgaacccctctccagtatcttcacactcttgtcaactctccaggcctctctcttgccctgagttatcagcctgtgtggtgttaactaccttagaaggtacaagctaagaaatgtaacagtatcaaccctcccagttgcttaattatacccataggtaatacaaaaagctctgaagacccaaagatgacattactaatgatgtgatttcaggagccacagaagaaccttaccagcttccctcaaatcagtccttatcctctttctatcttcactcccatcatcatctattttcacactatccagctaagcaaagattcctggaggctgacttgtatcttcagactcacagagtgaattcagctcttctgaatcaagacccacccagtctctttcattcagacctgttgctaacaaatttatatttgccaaggatattaggcaaaagaggctacttgattggtggccaacctcgtgcccacatggaaggtatctttaatagggtcttttcaaaccttagtggaggagggtcagctcaatttgggcaatgcatttgttcccagtttcattttcttcctgggaattaactcgtcatttcattccttcagtcatcttctgtgtaggtgaccggagcactgagaggcagctctgatgcactattgtgtgtcagcagctcaaaggccctaaaacactgaaggttctgcatctgaagtattagattgttagcagcaaaatatgaaagatgaggtggacagtcctctaagccctatttagggaagcttttccaagccacaatcttaactacctacccaaaggatttgcattacccccagattctgtgccaacaaccttttaaggaaatacagtccttgggaaatgagttttgatggtgaattggggtgttaaggaagggaaagattgtcatagatggtagggctttgaaaatgcagggtatcagctgccactcctggcttcaacacattgagtcactgcctagacggttctcttggtcttattcccatcctggccaatgcttaaatactatttgttgaaaataattctttgagacagatttcagctacctcccttccaggttcgatttaacttggttgtaattgtcaatttgttgttataggtcttacctgtgtgaaagaaagaaaaagaaagaaagaaagaaagagaaaggaaattataaggtcaagttaacagttttgaggttttgtgtttttttctggaactacttcaagtgagaaaataaaaaaaaatggtgacaaagctgtacagatagagataatagaagacaaagagattaaaaggaaataaaaatgcatgattaaaaactaagaataaaaaacctatttttatgtttcctaaaggaaattgtttattctacagactcagtaggtagacacaaacataaagatttccctagaagacatagagtgggatttgataacactgtctgttattttctgtacattgtggtaggtccaggaaatatgacattttcccccttgatgtgttattgttgttgttgggtggggtgggcattttgtttatttgtttggtggcaatcagtggtagtagggagtgggagggcttatattggtttttccagctattaaggggacatattgtgtcgttgtgcttttcacgttataaaatgtttatatttaccagtacagcactgggctttataaagactgcactcagaaccacactgcacagtccagttttttaaaaagctgctacatgacagacaggtaatcccactgagtgagttttgagaaacaaatcaaacgaagtaaacaagaaacataaaaaccaaatagcaaatgaataaaagcctgttcttgtaacttattcaacttttgccaaattcctaccaatcacttgctttttaaaagaaatgtataatagccaaaagagaaattatgtccctgttgtacagaagttagaatttttgactccaggcagcagtttgctcagtgatcttgaacaagttatccaattgcctctacatttgcatcagtttctctagctgcaaaatggggataatactatatacctacctcacagtgggagggcaggagattttgaggccctgaggttttaggtgggctgtgagggccaacgcttgacacaaagtccatgggttattattcaagaatgcacaggcccatcggccttttagaaagacaagacagggagtgcttgtttgatatttcaaggaataaagccggagctcctgaattgtagtccaccttaaaagagagacctgtattggagaatattttatttttttggcaaatttgatcttaccctttaccagttctataatttggttaaaagctgattacgtcctacaatgtcaaagtcagctaactgtcgtctacttaagacttctggtcatttccaacttatagaggaagggagtctctaaaatctcttcttcagaaggcacctcacttctcagacttaaaattccacatcaagtgttccattaaaagaagataaggcattctgagtgcaaacaaatgggggcttcttaaactacacaccagcagtcagtgaggaaaactttgaacaattattgagttgctttcttgggtctctataatcaataacctgtctgcagatatctatctatataaagatattatatataaatataaatttacatatatatgcacatgtatatatagttgtacatatatgtgtgtatatatatacttaaatgtaatatttacaaaataaaactgtgatctcgtctagagaaaatgtattcatattacaaactgctcttccatatttatgtaccatattatacctttttattattgttataattattatgggtatttctaattaatatgatgttgaaacctgtttggcaccttctggaagctaccaaaaaaatgacactccattgaagtgcttaaaagctgttctcataagaattctactggcctattgtaaaaaagaaaaaaaaaagaaaaagaagaaagacacaaagaaaataatctaaacaccaaaaactaaacacaattccaatcctttttctgtacctcacgcgcataaatttggctgctcctatttttttttctgtttatgtgtttttatggatctaagttaaatcttttggcaatatataaaaatgtaaatagtaaactttatttattaagaatgtcatcttttttaatttatatttacacaattgttcatctaatttattttttctatacagttttaaatactcagacatattttgctgttcatgatatttttatcctgttctcatggatttgttttcccatactgttttctctgatctcaattacaggttggatctcacaaataataatgtcagagacagaaatattttgccactgttgattactatactttaaagttctatattatgaaaatatataatagcttgtacgct

SEQ ID NO: 455088 - DNA, 7248 bp, Homo sapiens
agctgactctatgaggatccccaattagctggcacacaggcaaagatcagagccacgatctgcctccatgtcctgagctgcaggaacaatcccctgattatccctgtggtccatgacctcagccagcccttctaccacagccaggcggtacgtgtgagcttcagttcgcccctggtcgccatctcgggggtggccctccgttccttcgacaactttgaccccgtcaccctgagcagctgccagagaggggagacctacagccctgccgagcagagctgcgtgcacttcgcatgtgagaaaactgactgtccagagctggctgtggagaatgcttatctcaattgctccagcagcgaccgctaccacggtgcccagtgtactgtgagctgccggacaggctacgtgctccagatacggcgggatgatgagctgatcaagagccagacgggacccagcgtcacagtgacctgtacagagggcaagtggaataagcaggtggcctgtgagccagtcgactgcagcatcccagatcaccatcaagtctatgctgcctccttctcctgccctgagggcaccacctttggcagtcaatgttccttccagtgccgtcaccctgcacaattgaaaggcaacaacagcctcctgacctgcatggaggatgggctgtggtccttcccagaggccctgtgtgagctcatgtgcctcgctccaccccctgtgcccaatgcagacctccagaccgcccggtgccgagagaataagcacaaggtgggctccttctgcaaatacaaatgcaagcctggataccatgtgcctggatcctctcggaagtcaaagaaacgggccttcaagactcagtgtacccaggatggcagctggcaggagggagcttgtgttcctgtgacctgtgacccacctccaccaaaattccatgggctctaccagtgtactaatggcttccagttcaacagtgagtgtaggatcaagtgtgaagacagtgatgcctcccagggacttgggagcaatgtcattcattgccggaaagatggcacctggaacggctccttccatgtctgccaggagatgcaaggccagtgctcggttccaaacgagctcaacagcaacctcaaactgcagtgccctgatggctatgccatagggtcggagtgtgccacctcgtgcctggaccacaacagcgagtccatcatcctgccaatgaacgtgaccgtgcgtgacatcccccactggctgaaccccacacgggtagagagagttgtctgcactgctggtctcaagtggtatcctcaccctgctctgattcactgtgtcaaaggctgtgagcccttcatgggagacaattattgtgatgccatcaacaaccgagccttttgcaactatgacggtggggattgctgcacctccacagtgaagaccaaaaaggtcaccccattccctatgtcctgtgacctacaaggtgactgtgcttgtcgggacccccaggcccaagaacacagccggaaagacctccggggatacagccatggctaaggaaggacaagaagttgtcaaagaattcccaacgccaggacccacatccctttggtattgatttcacagtcagctgctcaacggaatggcctctccacaccagggatccttagcacccaaccggtctgcctttaattttacccaggaaggactcacattggggcgaatgaaccaagtttcgccatgctggatgatgaaatggattcccatcccaaagtctgagatggattgcatatacagtgtgcagtcccagagcctcctaaaattctagccatttgtcacacaaccacagcaagaaacgtgttctatatctagagtgtgcccatctgtgtttagtacacatgcatgcatacacacccatacaaacatctgtgtgagggcagttctggagatgagcagagagagaccggaataaactcaatcttttctttcccaagctcctagccaacactatccttgggagaaagaaatttgcagaaactgctaagaccaagtgtggagatgtcaagctagttcacactctgaggctcagaatatgtaggacatgcacaattgtgcagtcctttgggattggaagtgaaacagtctgtgatcccctaccttctagggaactaggacctaggaagaggtaaagattatcaggtatgcaaagcgccccaattcttctgctgccatgggggattttaccccaactccagggttcgaggccaatctgagaatggcttaggattgcaatgtcaaggtattatatcagccccttgcttgaggcttgaggtcataatatccctctaggacttacctgttcccccagatcttgccttgggaccacatttgctgctacttttcctgctgctctatcctatacattgaataatccaagatggtagaactaggttaggaaaaattccacacaaccaaacagtctgccttaaaagtgacccacatttttccatagctcctcactttttagcccttctgcaagagaaaaaccctcatgggtccacatggtgagaagttaagtttcctgtaagtgggcctctcaccctggaaaggagttgagggacatcagatgctggaaccctcactgaaagtccagaatgtctaagccagtgttagattttgtaaacaagtggaacagtgttaaatttctatgatgttggagccatccagagactactggaattgtcgagacttttggattattatccttatccttatcctaatcttcctagcccttcaggctagagtaggcttcgatcctgagaaccttgctgttgctctgaggagatataattctgggagaaagaatcttttataagaacagtacagattgttctcaagagggccatcagaaggaagccaaagagttcacagcctcagcaccaacaactcaacatggtcatcatgttttctatatggtttttccagctagcagtactcccttccatacctgtgactgggcagtgcttttctctctcccatgtctagcctccaaaagttaagtgaaaattagtcaactgcacgtggaagcccccaccactttggggatctctttatttcttttcagccagggacctgtccactccctttgaattaatatgggaagaaattaatacaggatgaactggagagaagggttgagtgtggcatactttctgaaacctggagctgggaattgcggagaagggaaggtctagactagttacatcacatagggattactgtaaatcaagtcatctcaagtctagtgaagacagccaacagaaacaaaacctagcatagggatagaaaataccatgcacgtgtgcagccccacctaattcctgcatccaaggcaggtgttgttaatctatcatagcacttaaaaaaaaaaaaaaagagaccaaaaataactttaggaaccaccatattatatcactcccaatagcactgacctggtgatcaaaaacacttgagaagacatctattggccatctctggccaattacactaagaaacatatcaaggtgcttttggcacaggtgcccacaaatacggatgcagtgctgagatagtttatgagacttgtaccatttcacaaactctgaaattgggttccatattggcaaggctgccacagttgttaagaataatcctctatgtttcttcctcacaaaaccatatctcatttatatccagaccattacttcactataattacaaggacaaattattagcaagaaataagaatagtattagaagaattgatcctattttgaacccctctccagtatcttcacactcttgtcaactctccaggcctctctcttgccctgagttatcagcctgtgtggtgttaactaccttagaaggtacaagctaagaaatgtaacagtatcaaccctcccagttgcttaattatacccataggtaatacaaaaagctctgaagacccaaagatgacattactaatgatgtgatttcaggagccacagaagaaccttaccagcttccctcaaatcagtccttatcctctttctatcttcactcccatcatcatctattttcacactatccagctaagcaaagattcctggaggctgacttgtatcttcagactcacagagtgaattcagctcttctgaatcaagacccacccagtctctttcattcagacctgttgctaacaaatttatatttgccaaggatattaggcaaaagaggctacttgattggtggccaacctcgtgcccacatggaaggtatctttaatagggtcttttcaaaccttagtggaggagggtcagctcaatttgggcaatgcatttgttcccagtttcattttcttcctgggaattaactcgtcatttcattccttcagtcatcttctgtgtaggtgaccggagcactgagaggcagctctgatgcactattgtgtgtcagcagctcaaaggccctaaaacactgaaggttctgcatctgaagtattagattgttagcagcaaaatatgaaagatgaggtggacagtcctctaagccctatttagggaagcttttccaagccacaatcttaactacctacccaaaggatttgcattacccccagattctgtgccaacaaccttttaaggaaatacagtccttgggaaatgagttttgatggtgaattggggtgttaaggaagggaaagattgtcatagatggtagggctttgaaaatgcagggtatcagctgccactcctggcttcaacacattgagtcactgcctagacggttctcttggtcttattcccatcctggccaatgcttaaatactatttgttgaaaataattctttgagacagatttcagctacctcccttccaggttcgatttaacttggttgtaattgtcaatttgttgttataggtcttacctgtgtgaaagaaagaaaaagaaagaaagaaagaaagagaaaggaaattataaggtcaagttaacagttttgaggttttgtgtttttttctggaactacttcaagtgagaaaataaaaaaaaatggtgacaaagctgtacagatagagataatagaagacaaagagattaaaaggaaataaaaatgcatgattaaaaactaagaataaaaaacctatttttatgtttcctaaaggaaattgtttattctacagactcagtaggtagacacaaacataaagatttccctagaagacatagagtgggatttgataacactgtctgttattttctgtacattgtggtaggtccaggaaatatgacattttcccccttgatgtgttattgttgttgttgggtggggtgggcattttgtttatttgtttggtggcaatcagtggtagtagggagtgggagggcttatattggtttttccagctattaaggggacatattgtgtcgttgtgcttttcacgttataaaatgtttatatttaccagtacagcactgggctttataaagactgcactcagaaccacactgcacagtccagttttttaaaaagctgctacatgacagacaggtaatcccactgagtgagttttgagaaacaaatcaaacgaagtaaacaagaaacataaaaaccaaatagcaaatgaataaaagcctgttcttgtaacttattcaacttttgccaaattcctaccaatcacttgctttttaaaagaaatgtataatagccaaaagagaaattatgtccctgttgtacagaagttagaatttttgactccaggcagcagtttgctcagtgatcttgaacaagttatccaattgcctctacatttgcatcagtttctctagctgcaaaatggggataatactatatacctacctcacagtgggagggcaggagattttgaggccctgaggttttaggtgggctgtgagggccaacgcttgacacaaagtccatgggttattattcaagaatgcacaggcccatcggccttttagaaagacaagacagggagtgcttgtttgatatttcaaggaataaagccggagctcctgaattgtagtccaccttaaaagagagacctgtattggagaatattttatttttttggcaaatttgatcttaccctttaccagttctataatttggttaaaagctgattacgtcctacaatgtcaaagtcagctaactgtcgtctacttaagacttctggtcatttccaacttatagaggaagggagtctctaaaatctcttcttcagaaggcacctcacttctcagacttaaaattccacatcaagtgttccattaaaagaagataaggcattctgagtgcaaacaaatgggggcttcttaaactacacaccagcagtcagtgaggaaaactttgaacaattattgagttgctttcttgggtctctataatcaataacctgtctgcagatatctatctatataaagatattatatataaatataaatttacatatatatgcacatgtatatatagttgtacatatatgtgtgtatatatatacttaaatgtaatatttacaaaataaaactgtgatctcgtctagagaaaatgtattcatattacaaactgctcttccatatttatgtaccatattatacctttttattattgttataattattatgggtatttctaattaatatgatgttgaaacctgtttggcaccttctggaagctaccaaaaaaatgacactccattgaagtgcttaaaagctgttctcataagaattctactggcctattgtaaaaaagaaaaaaaaaagaaaaagaagaaagacacaaagaaaataatctaaacaccaaaaactaaacacaattccaatcctttttctgtacctcacgcgcataaatttggctgctcctatttttttttctgtttatgtgtttttatggatctaagttaaatcttttggcaatatataaaaatgtaaatagtaaactttatttattaagaatgtcatcttttttaatttatatttacacaattgttcatctaatttattttttctatacagttttaaatactcagacatattttgctgttcatgatatttttatcctgttctcatggatttgttttcccatactgttttctctgatctcaattacaggttggatctcacaaataataatgtcagagacagaaatattttgccactgttgattactatactttaaagttctatattatgaaaatatataatagcttgtacgct

SEQ ID NO: 455089 - DNA, 6649 bp, Homo sapiens
  misc_feature (17)..(17): n is a, c, g, or t
cacaggaattagcttgncacaattgaaaggcaacaacagcctcctgacctgcatggaggatgggctgtggtccttcccagaggccctgtgtgagctcatgtgcctcgctccaccccctgtgcccaatgcagacctccagaccgcccggtgccgagagaataagcacaaggtgggctccttctgcaaatacaaatgcaagcctggataccatgtgcctggatcctctcggaagtcaaagaaacgggccttcaagactcagtgtacccaggatggcagctggcaggagggagcttgtgttcctgtgacctgtgacccacctccaccaaaattccatgggctctaccagtgtactaatggcttccagttcaacagtgagtgtaggatcaagtgtgaagacagtgatgcctcccagggacttgggagcaatgtcattcattgccggaaagatggcacctggaacggctccttccatgtctgccaggagatgcaaggccagtgctcggttccaaacgagctcaacagcaacctcaaactgcagtgccctgatggctatgccatagggtcggagtgtgccacctcgtgcctggaccacaacagcgagtccatcatcctgccaatgaacgtgaccgtgcgtgacatcccccactggctgaaccccacacgggtagagagagttgtctgcactgctggtctcaagtggtatcctcaccctgctctgattcactgtgtcaaaggctgtgagcccttcatgggagacaattattgtgatgccatcaacaaccgagccttttgcaactatgacggtggggattgctgcacctccacagtgaagaccaaaaaggtcaccccattccctatgtcctgtgacctacaaggtgactgtgcttgtcgggacccccaggcccaagaacacagccggaaagacctccggggatacagccatggctaaggaaggacaagaagttgtcaaagaattcccaacgccaggacccacatccctttggtattgatttcacagtcagctgctcaacggaatggcctctccacaccagggatccttagcacccaaccggtctgcctttaattttacccaggaaggactcacattggggcgaatgaaccaagtttcgccatgctggatgatgaaatggattcccatcccaaagtctgagatggattgcatatacagtgtgcagtcccagagcctcctaaaattctagccatttgtcacacaaccacagcaagaaacgtgttctatatctagagtgtgcccatctgtgtttagtacacatgcatgcatacacacccatacaaacatctgtgtgagggcagttctggagatgagcagagagagaccggaataaactcaatcttttctttcccaagctcctagccaacactatccttgggagaaagaaatttgcagaaactgctaagaccaagtgtggagatgtcaagctagttcacactctgaggctcagaatatgtaggacatgcacaattgtgcagtcctttgggattggaagtgaaacagtctgtgatcccctaccttctagggaactaggacctaggaagaggtaaagattatcaggtatgcaaagcgccccaattcttctgctgccatgggggattttaccccaactccagggttcgaggccaatctgagaatggcttaggattgcaatgtcaaggtattatatcagccccttgcttgaggcttgaggtcataatatccctctaggacttacctgttcccccagatcttgccttgggaccacatttgctgctacttttcctgctgctctatcctatacattgaataatccaagatggtagaactaggttaggaaaaattccacacaaccaaacagtctgccttaaaagtgacccacatttttccatagctcctcactttttagcccttctgcaagagaaaaaccctcatgggtccacatggtgagaagttaagtttcctgtaagtgggcctctcaccctggaaaggagttgagggacatcagatgctggaaccctcactgaaagtccagaatgtctaagccagtgttagattttgtaaacaagtggaacagtgttaaatttctatgatgttggagccatccagagactactggaattgtcgagacttttggattattatccttatccttatcctaatcttcctagcccttcaggctagagtaggcttcgatcctgagaaccttgctgttgctctgaggagatataattctgggagaaagaatcttttataagaacagtacagattgttctcaagagggccatcagaaggaagccaaagagttcacagcctcagcaccaacaactcaacatggtcatcatgttttctatatggtttttccagctagcagtactcccttccatacctgtgactgggcagtgcttttctctctcccatgtctagcctccaaaagttaagtgaaaattagtcaactgcacgtggaagcccccaccactttggggatctctttatttcttttcagccagggacctgtccactccctttgaattaatatgggaagaaattaatacaggatgaactggagagaagggttgagtgtggcatactttctgaaacctggagctgggaattgcggagaagggaaggtctagactagttacatcacatagggattactgtaaatcaagtcatctcaagtctagtgaagacagccaacagaaacaaaacctagcatagggatagaaaataccatgcacgtgtgcagccccacctaattcctgcatccaaggcaggtgttgttaatctatcatagcacttaaaaaaaaaaaaaaagagaccaaaaataactttaggaaccaccatattatatcactcccaatagcactgacctggtgatcaaaaacacttgagaagacatctattggccatctctggccaattacactaagaaacatatcaaggtgcttttggcacaggtgcccacaaatacggatgcagtgctgagatagtttatgagacttgtaccatttcacaaactctgaaattgggttccatattggcaaggctgccacagttgttaagaataatcctctatgtttcttcctcacaaaaccatatctcatttatatccagaccattacttcactataattacaaggacaaattattagcaagaaataagaatagtattagaagaattgatcctattttgaacccctctccagtatcttcacactcttgtcaactctccaggcctctctcttgccctgagttatcagcctgtgtggtgttaactaccttagaaggtacaagctaagaaatgtaacagtatcaaccctcccagttgcttaattatacccataggtaatacaaaaagctctgaagacccaaagatgacattactaatgatgtgatttcaggagccacagaagaaccttaccagcttccctcaaatcagtccttatcctctttctatcttcactcccatcatcatctattttcacactatccagctaagcaaagattcctggaggctgacttgtatcttcagactcacagagtgaattcagctcttctgaatcaagacccacccagtctctttcattcagacctgttgctaacaaatttatatttgccaaggatattaggcaaaagaggctacttgattggtggccaacctcgtgcccacatggaaggtatctttaatagggtcttttcaaaccttagtggaggagggtcagctcaatttgggcaatgcatttgttcccagtttcattttcttcctgggaattaactcgtcatttcattccttcagtcatcttctgtgtaggtgaccggagcactgagaggcagctctgatgcactattgtgtgtcagcagctcaaaggccctaaaacactgaaggttctgcatctgaagtattagattgttagcagcaaaatatgaaagatgaggtggacagtcctctaagccctatttagggaagcttttccaagccacaatcttaactacctacccaaaggatttgcattacccccagattctgtgccaacaaccttttaaggaaatacagtccttgggaaatgagttttgatggtgaattggggtgttaaggaagggaaagattgtcatagatggtagggctttgaaaatgcagggtatcagctgccactcctggcttcaacacattgagtcactgcctagacggttctcttggtcttattcccatcctggccaatgcttaaatactatttgttgaaaataattctttgagacagatttcagctacctcccttccaggttcgatttaacttggttgtaattgtcaatttgttgttataggtcttacctgtgtgaaagaaagaaaaagaaagaaagaaagaaagagaaaggaaattataaggtcaagttaacagttttgaggttttgtgtttttttctggaactacttcaagtgagaaaataaaaaaaaatggtgacaaagctgtacagatagagataatagaagacaaagagattaaaaggaaataaaaatgcatgattaaaaactaagaataaaaaacctatttttatgtttcctaaaggaaattgtttattctacagactcagtaggtagacacaaacataaagatttccctagaagacatagagtgggatttgataacactgtctgttattttctgtacattgtggtaggtccaggaaatatgacattttcccccttgatgtgttattgttgttgttgggtggggtgggcattttgtttatttgtttggtggcaatcagtggtagtagggagtgggagggcttatattggtttttccagctattaaggggacatattgtgtcgttgtgcttttcacgttataaaatgtttatatttaccagtacagcactgggctttataaagactgcactcagaaccacactgcacagtccagttttttaaaaagctgctacatgacagacaggtaatcccactgagtgagttttgagaaacaaatcaaacgaagtaaacaagaaacataaaaaccaaatagcaaatgaataaaagcctgttcttgtaacttattcaacttttgccaaattcctaccaatcacttgctttttaaaagaaatgtataatagccaaaagagaaattatgtccctgttgtacagaagttagaatttttgactccaggcagcagtttgctcagtgatcttgaacaagttatccaattgcctctacatttgcatcagtttctctagctgcaaaatggggataatactatatacctacctcacagtgggagggcaggagattttgaggccctgaggttttaggtgggctgtgagggccaacgcttgacacaaagtccatgggttattattcaagaatgcacaggcccatcggccttttagaaagacaagacagggagtgcttgtttgatatttcaaggaataaagccggagctcctgaattgtagtccaccttaaaagagagacctgtattggagaatattttatttttttggcaaatttgatcttaccctttaccagttctataatttggttaaaagctgattacgtcctacaatgtcaaagtcagctaactgtcgtctacttaagacttctggtcatttccaacttatagaggaagggagtctctaaaatctcttcttcagaaggcacctcacttctcagacttaaaattccacatcaagtgttccattaaaagaagataaggcattctgagtgcaaacaaatgggggcttcttaaactacacaccagcagtcagtgaggaaaactttgaacaattattgagttgctttcttgggtctctataatcaataacctgtctgcagatatctatctatataaagatattatatataaatataaatttacatatatatgcacatgtatatatagttgtacatatatgtgtgtatatatatacttaaatgtaatatttacaaaataaaactgtgatctcgtctagagaaaatgtattcatattacaaactgctcttccatatttatgtaccatattatacctttttattattgttataattattatgggtatttctaattaatatgatgttgaaacctgtttggcaccttctggaagctaccaaaaaaatgacactccattgaagtgcttaaaagctgttctcataagaattctactggcctattgtaaaaaagaaaaaaaaaagaaaaagaagaaagacacaaagaaaataatctaaacaccaaaaactaaacacaattccaatcctttttctgtacctcacgcgcataaatttggctgctcctatttttttttctgtttatgtgtttttatggatctaagttaaatcttttggcaatatataaaaatgtaaatagtaaactttatttattaagaatgtcatcttttttaatttatatttacacaattgttcatctaatttattttttctatacagttttaaatactcagacatattttgctgttcatgatatttttatcctgttctcatggatttgttttcccatactgttttctctgatctcaattacaggttggatctcacaaataataatgtcagagacagaaatattttgccactgttgattactatactttaaagttctatattatgaaaatatataatagcttgtacgct

SEQ ID NO: 455090 - DNA, 6444 bp, Homo sapiens
tactagcctcgccagtgtcctagcctcgccagtgtcctagcctcgccacgtgtcctagcctcgcatttgatcactgtgtcctggaggtggtcgtttttgaggaggctaggacattggggagggtaggactagcctcgccagtgtactaatggcttccagttcaacagtgagtgtaggatcaagtgtgaagacagtgatgcctcccagggacttgggagcaatgtcattcattgccggaaagatggcacctggaacggctccttccatgtctgccaggagatgcaaggccagtgctcggttccaaacgagctcaacagcaacctcaaactgcagtgccctgatggctatgccatagggtcggagtgtgccacctcgtgcctggaccacaacagcgagtccatcatcctgccaatgaacgtgaccgtgcgtgacatcccccactggctgaaccccacacgggtagagagagttgtctgcactgctggtctcaagtggtatcctcaccctgctctgattcactgtgtcaaaggctgtgagcccttcatgggagacaattattgtgatgccatcaacaaccgagccttttgcaactatgacggtggggattgctgcacctccacagtgaagaccaaaaaggtcaccccattccctatgtcctgtgacctacaaggtgactgtgcttgtcgggacccccaggcccaagaacacagccggaaagacctccggggatacagccatggctaaggaaggacaagaagttgtcaaagaattcccaacgccaggacccacatccctttggtattgatttcacagtcagctgctcaacggaatggcctctccacaccagggatccttagcacccaaccggtctgcctttaattttacccaggaaggactcacattggggcgaatgaaccaagtttcgccatgctggatgatgaaatggattcccatcccaaagtctgagatggattgcatatacagtgtgcagtcccagagcctcctaaaattctagccatttgtcacacaaccacagcaagaaacgtgttctatatctagagtgtgcccatctgtgtttagtacacatgcatgcatacacacccatacaaacatctgtgtgagggcagttctggagatgagcagagagagaccggaataaactcaatcttttctttcccaagctcctagccaacactatccttgggagaaagaaatttgcagaaactgctaagaccaagtgtggagatgtcaagctagttcacactctgaggctcagaatatgtaggacatgcacaattgtgcagtcctttgggattggaagtgaaacagtctgtgatcccctaccttctagggaactaggacctaggaagaggtaaagattatcaggtatgcaaagcgccccaattcttctgctgccatgggggattttaccccaactccagggttcgaggccaatctgagaatggcttaggattgcaatgtcaaggtattatatcagccccttgcttgaggcttgaggtcataatatccctctaggacttacctgttcccccagatcttgccttgggaccacatttgctgctacttttcctgctgctctatcctatacattgaataatccaagatggtagaactaggttaggaaaaattccacacaaccaaacagtctgccttaaaagtgacccacatttttccatagctcctcactttttagcccttctgcaagagaaaaaccctcatgggtccacatggtgagaagttaagtttcctgtaagtgggcctctcaccctggaaaggagttgagggacatcagatgctggaaccctcactgaaagtccagaatgtctaagccagtgttagattttgtaaacaagtggaacagtgttaaatttctatgatgttggagccatccagagactactggaattgtcgagacttttggattattatccttatccttatcctaatcttcctagcccttcaggctagagtaggcttcgatcctgagaaccttgctgttgctctgaggagatataattctgggagaaagaatcttttataagaacagtacagattgttctcaagagggccatcagaaggaagccaaagagttcacagcctcagcaccaacaactcaacatggtcatcatgttttctatatggtttttccagctagcagtactcccttccatacctgtgactgggcagtgcttttctctctcccatgtctagcctccaaaagttaagtgaaaattagtcaactgcacgtggaagcccccaccactttggggatctctttatttcttttcagccagggacctgtccactccctttgaattaatatgggaagaaattaatacaggatgaactggagagaagggttgagtgtggcatactttctgaaacctggagctgggaattgcggagaagggaaggtctagactagttacatcacatagggattactgtaaatcaagtcatctcaagtctagtgaagacagccaacagaaacaaaacctagcatagggatagaaaataccatgcacgtgtgcagccccacctaattcctgcatccaaggcaggtgttgttaatctatcatagcacttaaaaaaaaaaaaaaagagaccaaaaataactttaggaaccaccatattatatcactcccaatagcactgacctggtgatcaaaaacacttgagaagacatctattggccatctctggccaattacactaagaaacatatcaaggtgcttttggcacaggtgcccacaaatacggatgcagtgctgagatagtttatgagacttgtaccatttcacaaactctgaaattgggttccatattggcaaggctgccacagttgttaagaataatcctctatgtttcttcctcacaaaaccatatctcatttatatccagaccattacttcactataattacaaggacaaattattagcaagaaataagaatagtattagaagaattgatcctattttgaacccctctccagtatcttcacactcttgtcaactctccaggcctctctcttgccctgagttatcagcctgtgtggtgttaactaccttagaaggtacaagctaagaaatgtaacagtatcaaccctcccagttgcttaattatacccataggtaatacaaaaagctctgaagacccaaagatgacattactaatgatgtgatttcaggagccacagaagaaccttaccagcttccctcaaatcagtccttatcctctttctatcttcactcccatcatcatctattttcacactatccagctaagcaaagattcctggaggctgacttgtatcttcagactcacagagtgaattcagctcttctgaatcaagacccacccagtctctttcattcagacctgttgctaacaaatttatatttgccaaggatattaggcaaaagaggctacttgattggtggccaacctcgtgcccacatggaaggtatctttaatagggtcttttcaaaccttagtggaggagggtcagctcaatttgggcaatgcatttgttcccagtttcattttcttcctgggaattaactcgtcatttcattccttcagtcatcttctgtgtaggtgaccggagcactgagaggcagctctgatgcactattgtgtgtcagcagctcaaaggccctaaaacactgaaggttctgcatctgaagtattagattgttagcagcaaaatatgaaagatgaggtggacagtcctctaagccctatttagggaagcttttccaagccacaatcttaactacctacccaaaggatttgcattacccccagattctgtgccaacaaccttttaaggaaatacagtccttgggaaatgagttttgatggtgaattggggtgttaaggaagggaaagattgtcatagatggtagggctttgaaaatgcagggtatcagctgccactcctggcttcaacacattgagtcactgcctagacggttctcttggtcttattcccatcctggccaatgcttaaatactatttgttgaaaataattctttgagacagatttcagctacctcccttccaggttcgatttaacttggttgtaattgtcaatttgttgttataggtcttacctgtgtgaaagaaagaaaaagaaagaaagaaagaaagagaaaggaaattataaggtcaagttaacagttttgaggttttgtgtttttttctggaactacttcaagtgagaaaataaaaaaaaatggtgacaaagctgtacagatagagataatagaagacaaagagattaaaaggaaataaaaatgcatgattaaaaactaagaataaaaaacctatttttatgtttcctaaaggaaattgtttattctacagactcagtaggtagacacaaacataaagatttccctagaagacatagagtgggatttgataacactgtctgttattttctgtacattgtggtaggtccaggaaatatgacattttcccccttgatgtgttattgttgttgttgggtggggtgggcattttgtttatttgtttggtggcaatcagtggtagtagggagtgggagggcttatattggtttttccagctattaaggggacatattgtgtcgttgtgcttttcacgttataaaatgtttatatttaccagtacagcactgggctttataaagactgcactcagaaccacactgcacagtccagttttttaaaaagctgctacatgacagacaggtaatcccactgagtgagttttgagaaacaaatcaaacgaagtaaacaagaaacataaaaaccaaatagcaaatgaataaaagcctgttcttgtaacttattcaacttttgccaaattcctaccaatcacttgctttttaaaagaaatgtataatagccaaaagagaaattatgtccctgttgtacagaagttagaatttttgactccaggcagcagtttgctcagtgatcttgaacaagttatccaattgcctctacatttgcatcagtttctctagctgcaaaatggggataatactatatacctacctcacagtgggagggcaggagattttgaggccctgaggttttaggtgggctgtgagggccaacgcttgacacaaagtccatgggttattattcaagaatgcacaggcccatcggccttttagaaagacaagacagggagtgcttgtttgatatttcaaggaataaagccggagctcctgaattgtagtccaccttaaaagagagacctgtattggagaatattttatttttttggcaaatttgatcttaccctttaccagttctataatttggttaaaagctgattacgtcctacaatgtcaaagtcagctaactgtcgtctacttaagacttctggtcatttccaacttatagaggaagggagtctctaaaatctcttcttcagaaggcacctcacttctcagacttaaaattccacatcaagtgttccattaaaagaagataaggcattctgagtgcaaacaaatgggggcttcttaaactacacaccagcagtcagtgaggaaaactttgaacaattattgagttgctttcttgggtctctataatcaataacctgtctgcagatatctatctatataaagatattatatataaatataaatttacatatatatgcacatgtatatatagttgtacatatatgtgtgtatatatatacttaaatgtaatatttacaaaataaaactgtgatctcgtctagagaaaatgtattcatattacaaactgctcttccatatttatgtaccatattatacctttttattattgttataattattatgggtatttctaattaatatgatgttgaaacctgtttggcaccttctggaagctaccaaaaaaatgacactccattgaagtgcttaaaagctgttctcataagaattctactggcctattgtaaaaaagaaaaaaaaaagaaaaagaagaaagacacaaagaaaataatctaaacaccaaaaactaaacacaattccaatcctttttctgtacctcacgcgcataaatttggctgctcctatttttttttctgtttatgtgtttttatggatctaagttaaatcttttggcaatatataaaaatgtaaatagtaaactttatttattaagaatgtcatcttttttaatttatatttacacaattgttcatctaatttattttttctatacagttttaaatactcagacatattttgctgttcatgatatttttatcctgttctcatggatttgttttcccatactgttttctctgatctcaattacaggttggatctcacaaataataatgtcagagacagaaatattttgccactgttgattactatactttaaagttctatattatgaaaatatataatagcttgtacgct

SEQ ID NO: 455091 - DNA, 6370 bp, Homo sapiens
tactagcctcgccagtgtcctagcctcgccagtgtcctagcctcgccacgtgtcctagcctcgccagtgtactaatggcttccagttcaacagtgagtgtaggatcaagtgtgaagacagtgatgcctcccagggacttgggagcaatgtcattcattgccggaaagatggcacctggaacggctccttccatgtctgccaggagatgcaaggccagtgctcggttccaaacgagctcaacagcaacctcaaactgcagtgccctgatggctatgccatagggtcggagtgtgccacctcgtgcctggaccacaacagcgagtccatcatcctgccaatgaacgtgaccgtgcgtgacatcccccactggctgaaccccacacgggtagagagagttgtctgcactgctggtctcaagtggtatcctcaccctgctctgattcactgtgtcaaaggctgtgagcccttcatgggagacaattattgtgatgccatcaacaaccgagccttttgcaactatgacggtggggattgctgcacctccacagtgaagaccaaaaaggtcaccccattccctatgtcctgtgacctacaaggtgactgtgcttgtcgggacccccaggcccaagaacacagccggaaagacctccggggatacagccatggctaaggaaggacaagaagttgtcaaagaattcccaacgccaggacccacatccctttggtattgatttcacagtcagctgctcaacggaatggcctctccacaccagggatccttagcacccaaccggtctgcctttaattttacccaggaaggactcacattggggcgaatgaaccaagtttcgccatgctggatgatgaaatggattcccatcccaaagtctgagatggattgcatatacagtgtgcagtcccagagcctcctaaaattctagccatttgtcacacaaccacagcaagaaacgtgttctatatctagagtgtgcccatctgtgtttagtacacatgcatgcatacacacccatacaaacatctgtgtgagggcagttctggagatgagcagagagagaccggaataaactcaatcttttctttcccaagctcctagccaacactatccttgggagaaagaaatttgcagaaactgctaagaccaagtgtggagatgtcaagctagttcacactctgaggctcagaatatgtaggacatgcacaattgtgcagtcctttgggattggaagtgaaacagtctgtgatcccctaccttctagggaactaggacctaggaagaggtaaagattatcaggtatgcaaagcgccccaattcttctgctgccatgggggattttaccccaactccagggttcgaggccaatctgagaatggcttaggattgcaatgtcaaggtattatatcagccccttgcttgaggcttgaggtcataatatccctctaggacttacctgttcccccagatcttgccttgggaccacatttgctgctacttttcctgctgctctatcctatacattgaataatccaagatggtagaactaggttaggaaaaattccacacaaccaaacagtctgccttaaaagtgacccacatttttccatagctcctcactttttagcccttctgcaagagaaaaaccctcatgggtccacatggtgagaagttaagtttcctgtaagtgggcctctcaccctggaaaggagttgagggacatcagatgctggaaccctcactgaaagtccagaatgtctaagccagtgttagattttgtaaacaagtggaacagtgttaaatttctatgatgttggagccatccagagactactggaattgtcgagacttttggattattatccttatccttatcctaatcttcctagcccttcaggctagagtaggcttcgatcctgagaaccttgctgttgctctgaggagatataattctgggagaaagaatcttttataagaacagtacagattgttctcaagagggccatcagaaggaagccaaagagttcacagcctcagcaccaacaactcaacatggtcatcatgttttctatatggtttttccagctagcagtactcccttccatacctgtgactgggcagtgcttttctctctcccatgtctagcctccaaaagttaagtgaaaattagtcaactgcacgtggaagcccccaccactttggggatctctttatttcttttcagccagggacctgtccactccctttgaattaatatgggaagaaattaatacaggatgaactggagagaagggttgagtgtggcatactttctgaaacctggagctgggaattgcggagaagggaaggtctagactagttacatcacatagggattactgtaaatcaagtcatctcaagtctagtgaagacagccaacagaaacaaaacctagcatagggatagaaaataccatgcacgtgtgcagccccacctaattcctgcatccaaggcaggtgttgttaatctatcatagcacttaaaaaaaaaaaaaaagagaccaaaaataactttaggaaccaccatattatatcactcccaatagcactgacctggtgatcaaaaacacttgagaagacatctattggccatctctggccaattacactaagaaacatatcaaggtgcttttggcacaggtgcccacaaatacggatgcagtgctgagatagtttatgagacttgtaccatttcacaaactctgaaattgggttccatattggcaaggctgccacagttgttaagaataatcctctatgtttcttcctcacaaaaccatatctcatttatatccagaccattacttcactataattacaaggacaaattattagcaagaaataagaatagtattagaagaattgatcctattttgaacccctctccagtatcttcacactcttgtcaactctccaggcctctctcttgccctgagttatcagcctgtgtggtgttaactaccttagaaggtacaagctaagaaatgtaacagtatcaaccctcccagttgcttaattatacccataggtaatacaaaaagctctgaagacccaaagatgacattactaatgatgtgatttcaggagccacagaagaaccttaccagcttccctcaaatcagtccttatcctctttctatcttcactcccatcatcatctattttcacactatccagctaagcaaagattcctggaggctgacttgtatcttcagactcacagagtgaattcagctcttctgaatcaagacccacccagtctctttcattcagacctgttgctaacaaatttatatttgccaaggatattaggcaaaagaggctacttgattggtggccaacctcgtgcccacatggaaggtatctttaatagggtcttttcaaaccttagtggaggagggtcagctcaatttgggcaatgcatttgttcccagtttcattttcttcctgggaattaactcgtcatttcattccttcagtcatcttctgtgtaggtgaccggagcactgagaggcagctctgatgcactattgtgtgtcagcagctcaaaggccctaaaacactgaaggttctgcatctgaagtattagattgttagcagcaaaatatgaaagatgaggtggacagtcctctaagccctatttagggaagcttttccaagccacaatcttaactacctacccaaaggatttgcattacccccagattctgtgccaacaaccttttaaggaaatacagtccttgggaaatgagttttgatggtgaattggggtgttaaggaagggaaagattgtcatagatggtagggctttgaaaatgcagggtatcagctgccactcctggcttcaacacattgagtcactgcctagacggttctcttggtcttattcccatcctggccaatgcttaaatactatttgttgaaaataattctttgagacagatttcagctacctcccttccaggttcgatttaacttggttgtaattgtcaatttgttgttataggtcttacctgtgtgaaagaaagaaaaagaaagaaagaaagaaagagaaaggaaattataaggtcaagttaacagttttgaggttttgtgtttttttctggaactacttcaagtgagaaaataaaaaaaaatggtgacaaagctgtacagatagagataatagaagacaaagagattaaaaggaaataaaaatgcatgattaaaaactaagaataaaaaacctatttttatgtttcctaaaggaaattgtttattctacagactcagtaggtagacacaaacataaagatttccctagaagacatagagtgggatttgataacactgtctgttattttctgtacattgtggtaggtccaggaaatatgacattttcccccttgatgtgttattgttgttgttgggtggggtgggcattttgtttatttgtttggtggcaatcagtggtagtagggagtgggagggcttatattggtttttccagctattaaggggacatattgtgtcgttgtgcttttcacgttataaaatgtttatatttaccagtacagcactgggctttataaagactgcactcagaaccacactgcacagtccagttttttaaaaagctgctacatgacagacaggtaatcccactgagtgagttttgagaaacaaatcaaacgaagtaaacaagaaacataaaaaccaaatagcaaatgaataaaagcctgttcttgtaacttattcaacttttgccaaattcctaccaatcacttgctttttaaaagaaatgtataatagccaaaagagaaattatgtccctgttgtacagaagttagaatttttgactccaggcagcagtttgctcagtgatcttgaacaagttatccaattgcctctacatttgcatcagtttctctagctgcaaaatggggataatactatatacctacctcacagtgggagggcaggagattttgaggccctgaggttttaggtgggctgtgagggccaacgcttgacacaaagtccatgggttattattcaagaatgcacaggcccatcggccttttagaaagacaagacagggagtgcttgtttgatatttcaaggaataaagccggagctcctgaattgtagtccaccttaaaagagagacctgtattggagaatattttatttttttggcaaatttgatcttaccctttaccagttctataatttggttaaaagctgattacgtcctacaatgtcaaagtcagctaactgtcgtctacttaagacttctggtcatttccaacttatagaggaagggagtctctaaaatctcttcttcagaaggcacctcacttctcagacttaaaattccacatcaagtgttccattaaaagaagataaggcattctgagtgcaaacaaatgggggcttcttaaactacacaccagcagtcagtgaggaaaactttgaacaattattgagttgctttcttgggtctctataatcaataacctgtctgcagatatctatctatataaagatattatatataaatataaatttacatatatatgcacatgtatatatagttgtacatatatgtgtgtatatatatacttaaatgtaatatttacaaaataaaactgtgatctcgtctagagaaaatgtattcatattacaaactgctcttccatatttatgtaccatattatacctttttattattgttataattattatgggtatttctaattaatatgatgttgaaacctgtttggcaccttctggaagctaccaaaaaaatgacactccattgaagtgcttaaaagctgttctcataagaattctactggcctattgtaaaaaagaaaaaaaaaagaaaaagaagaaagacacaaagaaaataatctaaacaccaaaaactaaacacaattccaatcctttttctgtacctcacgcgcataaatttggctgctcctatttttttttctgtttatgtgtttttatggatctaagttaaatcttttggcaatatataaaaatgtaaatagtaaactttatttattaagaatgtcatcttttttaatttatatttacacaattgttcatctaatttattttttctatacagttttaaatactcagacatattttgctgttcatgatatttttatcctgttctcatggatttgttttcccatactgttttctctgatctcaattacaggttggatctcacaaataataatgtcagagacagaaatattttgccactgttgattactatactttaaagttctatattatgaaaatatataatagcttgtacgct

SEQ ID NO: 455092 - DNA, 6284 bp, Homo sapiens
ggaccacggttaggtacagctacgggtgaggacagtgatgtctcccaggacttgggagcaatgtcattcattgccggaaagatggcacctggaacggctccttccatgtctgccaggagatgcaaggccagtgctcggttccaaacgagctcaacagcaacctcaaactgcagtgccctgatggctatgccatagggtcggagtgtgccacctcgtgcctggaccacaacagcgagtccatcatcctgccaatgaacgtgaccgtgcgtgacatcccccactggctgaaccccacacgggtagagagagttgtctgcactgctggtctcaagtggtatcctcaccctgctctgattcactgtgtcaaaggctgtgagcccttcatgggagacaattattgtgatgccatcaacaaccgagccttttgcaactatgacggtggggattgctgcacctccacagtgaagaccaaaaaggtcaccccattccctatgtcctgtgacctacaaggtgactgtgcttgtcgggacccccaggcccaagaacacagccggaaagacctccggggatacagccatggctaaggaaggacaagaagttgtcaaagaattcccaacgccaggacccacatccctttggtattgatttcacagtcagctgctcaacggaatggcctctccacaccagggatccttagcacccaaccggtctgcctttaattttacccaggaaggactcacattggggcgaatgaaccaagtttcgccatgctggatgatgaaatggattcccatcccaaagtctgagatggattgcatatacagtgtgcagtcccagagcctcctaaaattctagccatttgtcacacaaccacagcaagaaacgtgttctatatctagagtgtgcccatctgtgtttagtacacatgcatgcatacacacccatacaaacatctgtgtgagggcagttctggagatgagcagagagagaccggaataaactcaatcttttctttcccaagctcctagccaacactatccttgggagaaagaaatttgcagaaactgctaagaccaagtgtggagatgtcaagctagttcacactctgaggctcagaatatgtaggacatgcacaattgtgcagtcctttgggattggaagtgaaacagtctgtgatcccctaccttctagggaactaggacctaggaagaggtaaagattatcaggtatgcaaagcgccccaattcttctgctgccatgggggattttaccccaactccagggttcgaggccaatctgagaatggcttaggattgcaatgtcaaggtattatatcagccccttgcttgaggcttgaggtcataatatccctctaggacttacctgttcccccagatcttgccttgggaccacatttgctgctacttttcctgctgctctatcctatacattgaataatccaagatggtagaactaggttaggaaaaattccacacaaccaaacagtctgccttaaaagtgacccacatttttccatagctcctcactttttagcccttctgcaagagaaaaaccctcatgggtccacatggtgagaagttaagtttcctgtaagtgggcctctcaccctggaaaggagttgagggacatcagatgctggaaccctcactgaaagtccagaatgtctaagccagtgttagattttgtaaacaagtggaacagtgttaaatttctatgatgttggagccatccagagactactggaattgtcgagacttttggattattatccttatccttatcctaatcttcctagcccttcaggctagagtaggcttcgatcctgagaaccttgctgttgctctgaggagatataattctgggagaaagaatcttttataagaacagtacagattgttctcaagagggccatcagaaggaagccaaagagttcacagcctcagcaccaacaactcaacatggtcatcatgttttctatatggtttttccagctagcagtactcccttccatacctgtgactgggcagtgcttttctctctcccatgtctagcctccaaaagttaagtgaaaattagtcaactgcacgtggaagcccccaccactttggggatctctttatttcttttcagccagggacctgtccactccctttgaattaatatgggaagaaattaatacaggatgaactggagagaagggttgagtgtggcatactttctgaaacctggagctgggaattgcggagaagggaaggtctagactagttacatcacatagggattactgtaaatcaagtcatctcaagtctagtgaagacagccaacagaaacaaaacctagcatagggatagaaaataccatgcacgtgtgcagccccacctaattcctgcatccaaggcaggtgttgttaatctatcatagcacttaaaaaaaaaaaaaaagagaccaaaaataactttaggaaccaccatattatatcactcccaatagcactgacctggtgatcaaaaacacttgagaagacatctattggccatctctggccaattacactaagaaacatatcaaggtgcttttggcacaggtgcccacaaatacggatgcagtgctgagatagtttatgagacttgtaccatttcacaaactctgaaattgggttccatattggcaaggctgccacagttgttaagaataatcctctatgtttcttcctcacaaaaccatatctcatttatatccagaccattacttcactataattacaaggacaaattattagcaagaaataagaatagtattagaagaattgatcctattttgaacccctctccagtatcttcacactcttgtcaactctccaggcctctctcttgccctgagttatcagcctgtgtggtgttaactaccttagaaggtacaagctaagaaatgtaacagtatcaaccctcccagttgcttaattatacccataggtaatacaaaaagctctgaagacccaaagatgacattactaatgatgtgatttcaggagccacagaagaaccttaccagcttccctcaaatcagtccttatcctctttctatcttcactcccatcatcatctattttcacactatccagctaagcaaagattcctggaggctgacttgtatcttcagactcacagagtgaattcagctcttctgaatcaagacccacccagtctctttcattcagacctgttgctaacaaatttatatttgccaaggatattaggcaaaagaggctacttgattggtggccaacctcgtgcccacatggaaggtatctttaatagggtcttttcaaaccttagtggaggagggtcagctcaatttgggcaatgcatttgttcccagtttcattttcttcctgggaattaactcgtcatttcattccttcagtcatcttctgtgtaggtgaccggagcactgagaggcagctctgatgcactattgtgtgtcagcagctcaaaggccctaaaacactgaaggttctgcatctgaagtattagattgttagcagcaaaatatgaaagatgaggtggacagtcctctaagccctatttagggaagcttttccaagccacaatcttaactacctacccaaaggatttgcattacccccagattctgtgccaacaaccttttaaggaaatacagtccttgggaaatgagttttgatggtgaattggggtgttaaggaagggaaagattgtcatagatggtagggctttgaaaatgcagggtatcagctgccactcctggcttcaacacattgagtcactgcctagacggttctcttggtcttattcccatcctggccaatgcttaaatactatttgttgaaaataattctttgagacagatttcagctacctcccttccaggttcgatttaacttggttgtaattgtcaatttgttgttataggtcttacctgtgtgaaagaaagaaaaagaaagaaagaaagaaagagaaaggaaattataaggtcaagttaacagttttgaggttttgtgtttttttctggaactacttcaagtgagaaaataaaaaaaaatggtgacaaagctgtacagatagagataatagaagacaaagagattaaaaggaaataaaaatgcatgattaaaaactaagaataaaaaacctatttttatgtttcctaaaggaaattgtttattctacagactcagtaggtagacacaaacataaagatttccctagaagacatagagtgggatttgataacactgtctgttattttctgtacattgtggtaggtccaggaaatatgacattttcccccttgatgtgttattgttgttgttgggtggggtgggcattttgtttatttgtttggtggcaatcagtggtagtagggagtgggagggcttatattggtttttccagctattaaggggacatattgtgtcgttgtgcttttcacgttataaaatgtttatatttaccagtacagcactgggctttataaagactgcactcagaaccacactgcacagtccagttttttaaaaagctgctacatgacagacaggtaatcccactgagtgagttttgagaaacaaatcaaacgaagtaaacaagaaacataaaaaccaaatagcaaatgaataaaagcctgttcttgtaacttattcaacttttgccaaattcctaccaatcacttgctttttaaaagaaatgtataatagccaaaagagaaattatgtccctgttgtacagaagttagaatttttgactccaggcagcagtttgctcagtgatcttgaacaagttatccaattgcctctacatttgcatcagtttctctagctgcaaaatggggataatactatatacctacctcacagtgggagggcaggagattttgaggccctgaggttttaggtgggctgtgagggccaacgcttgacacaaagtccatgggttattattcaagaatgcacaggcccatcggccttttagaaagacaagacagggagtgcttgtttgatatttcaaggaataaagccggagctcctgaattgtagtccaccttaaaagagagacctgtattggagaatattttatttttttggcaaatttgatcttaccctttaccagttctataatttggttaaaagctgattacgtcctacaatgtcaaagtcagctaactgtcgtctacttaagacttctggtcatttccaacttatagaggaagggagtctctaaaatctcttcttcagaaggcacctcacttctcagacttaaaattccacatcaagtgttccattaaaagaagataaggcattctgagtgcaaacaaatgggggcttcttaaactacacaccagcagtcagtgaggaaaactttgaacaattattgagttgctttcttgggtctctataatcaataacctgtctgcagatatctatctatataaagatattatatataaatataaatttacatatatatgcacatgtatatatagttgtacatatatgtgtgtatatatatacttaaatgtaatatttacaaaataaaactgtgatctcgtctagagaaaatgtattcatattacaaactgctcttccatatttatgtaccatattatacctttttattattgttataattattatgggtatttctaattaatatgatgttgaaacctgtttggcaccttctggaagctaccaaaaaaatgacactccattgaagtgcttaaaagctgttctcataagaattctactggcctattgtaaaaaagaaaaaaaaaagaaaaagaagaaagacacaaagaaaataatctaaacaccaaaaactaaacacaattccaatcctttttctgtacctcacgcgcataaatttggctgctcctatttttttttctgtttatgtgtttttatggatctaagttaaatcttttggcaatatataaaaatgtaaatagtaaactttatttattaagaatgtcatcttttttaatttatatttacacaattgttcatctaatttattttttctatacagttttaaatactcagacatattttgctgttcatgatatttttatcctgttctcatggatttgttttcccatactgttttctctgatctcaattacaggttggatctcacaaataataatgtcagagacagaaatattttgccactgttgattactatactttaaagttctatattatgaaaatatataatagcttgtacgct

SEQ ID NO: 455093 - DNA, 6574 bp, Homo sapiens
agtgactgttaagtccagtctaactgacctagagatggagaactaagtgcactggaggggaagcccatagacaaagagatgcagccagaatctactgatttttttcattcatttatggacacgctcatacattcgttcatttgattgtccatttgttcatttacttattcaataaacatcgactatgcacctccaagcagatactcttcaaacactaggaatacgaagtgggaaatgcctaggcttttaaaaagcttaccctggaaagaagccagaaactcagtggctgataacaaaaagcaaataattaataataataataataataactgatatgattcactcatagcaggtcccagaaatcaaggaaaaaagctaagggaaaaagggcttatcttagaagacatccaggaggggtgtcagatctgagcctctggatgagggggctctcttagatgctttctcacatgtctttggctctgcttggggcctgtcttcttgggccttcatcttttagatgctctacccactccaacatttgtctcaaagggcctctccacctttctgaactttggtcttcccatcggtcaaaaaaagagttgtctgcactgctggtctcaagtggtatcctcaccctgctctgattcactgtgtcaaaggctgtgagcccttcatgggagacaattattgtgatgccatcaacaaccgagccttttgcaactatgacggtggggattgctgcacctccacagtgaagaccaaaaaggtcaccccattccctatgtcctgtgacctacaaggtgactgtgcttgtcgggacccccaggcccaagaacacagccggaaagacctccggggatacagccatggctaaggaaggacaagaagttgtcaaagaattcccaacgccaggacccacatccctttggtattgatttcacagtcagctgctcaacggaatggcctctccacaccagggatccttagcacccaaccggtctgcctttaattttacccaggaaggactcacattggggcgaatgaaccaagtttcgccatgctggatgatgaaatggattcccatcccaaagtctgagatggattgcatatacagtgtgcagtcccagagcctcctaaaattctagccatttgtcacacaaccacagcaagaaacgtgttctatatctagagtgtgcccatctgtgtttagtacacatgcatgcatacacacccatacaaacatctgtgtgagggcagttctggagatgagcagagagagaccggaataaactcaatcttttctttcccaagctcctagccaacactatccttgggagaaagaaatttgcagaaactgctaagaccaagtgtggagatgtcaagctagttcacactctgaggctcagaatatgtaggacatgcacaattgtgcagtcctttgggattggaagtgaaacagtctgtgatcccctaccttctagggaactaggacctaggaagaggtaaagattatcaggtatgcaaagcgccccaattcttctgctgccatgggggattttaccccaactccagggttcgaggccaatctgagaatggcttaggattgcaatgtcaaggtattatatcagccccttgcttgaggcttgaggtcataatatccctctaggacttacctgttcccccagatcttgccttgggaccacatttgctgctacttttcctgctgctctatcctatacattgaataatccaagatggtagaactaggttaggaaaaattccacacaaccaaacagtctgccttaaaagtgacccacatttttccatagctcctcactttttagcccttctgcaagagaaaaaccctcatgggtccacatggtgagaagttaagtttcctgtaagtgggcctctcaccctggaaaggagttgagggacatcagatgctggaaccctcactgaaagtccagaatgtctaagccagtgttagattttgtaaacaagtggaacagtgttaaatttctatgatgttggagccatccagagactactggaattgtcgagacttttggattattatccttatccttatcctaatcttcctagcccttcaggctagagtaggcttcgatcctgagaaccttgctgttgctctgaggagatataattctgggagaaagaatcttttataagaacagtacagattgttctcaagagggccatcagaaggaagccaaagagttcacagcctcagcaccaacaactcaacatggtcatcatgttttctatatggtttttccagctagcagtactcccttccatacctgtgactgggcagtgcttttctctctcccatgtctagcctccaaaagttaagtgaaaattagtcaactgcacgtggaagcccccaccactttggggatctctttatttcttttcagccagggacctgtccactccctttgaattaatatgggaagaaattaatacaggatgaactggagagaagggttgagtgtggcatactttctgaaacctggagctgggaattgcggagaagggaaggtctagactagttacatcacatagggattactgtaaatcaagtcatctcaagtctagtgaagacagccaacagaaacaaaacctagcatagggatagaaaataccatgcacgtgtgcagccccacctaattcctgcatccaaggcaggtgttgttaatctatcatagcacttaaaaaaaaaaaaaaagagaccaaaaataactttaggaaccaccatattatatcactcccaatagcactgacctggtgatcaaaaacacttgagaagacatctattggccatctctggccaattacactaagaaacatatcaaggtgcttttggcacaggtgcccacaaatacggatgcagtgctgagatagtttatgagacttgtaccatttcacaaactctgaaattgggttccatattggcaaggctgccacagttgttaagaataatcctctatgtttcttcctcacaaaaccatatctcatttatatccagaccattacttcactataattacaaggacaaattattagcaagaaataagaatagtattagaagaattgatcctattttgaacccctctccagtatcttcacactcttgtcaactctccaggcctctctcttgccctgagttatcagcctgtgtggtgttaactaccttagaaggtacaagctaagaaatgtaacagtatcaaccctcccagttgcttaattatacccataggtaatacaaaaagctctgaagacccaaagatgacattactaatgatgtgatttcaggagccacagaagaaccttaccagcttccctcaaatcagtccttatcctctttctatcttcactcccatcatcatctattttcacactatccagctaagcaaagattcctggaggctgacttgtatcttcagactcacagagtgaattcagctcttctgaatcaagacccacccagtctctttcattcagacctgttgctaacaaatttatatttgccaaggatattaggcaaaagaggctacttgattggtggccaacctcgtgcccacatggaaggtatctttaatagggtcttttcaaaccttagtggaggagggtcagctcaatttgggcaatgcatttgttcccagtttcattttcttcctgggaattaactcgtcatttcattccttcagtcatcttctgtgtaggtgaccggagcactgagaggcagctctgatgcactattgtgtgtcagcagctcaaaggccctaaaacactgaaggttctgcatctgaagtattagattgttagcagcaaaatatgaaagatgaggtggacagtcctctaagccctatttagggaagcttttccaagccacaatcttaactacctacccaaaggatttgcattacccccagattctgtgccaacaaccttttaaggaaatacagtccttgggaaatgagttttgatggtgaattggggtgttaaggaagggaaagattgtcatagatggtagggctttgaaaatgcagggtatcagctgccactcctggcttcaacacattgagtcactgcctagacggttctcttggtcttattcccatcctggccaatgcttaaatactatttgttgaaaataattctttgagacagatttcagctacctcccttccaggttcgatttaacttggttgtaattgtcaatttgttgttataggtcttacctgtgtgaaagaaagaaaaagaaagaaagaaagaaagagaaaggaaattataaggtcaagttaacagttttgaggttttgtgtttttttctggaactacttcaagtgagaaaataaaaaaaaatggtgacaaagctgtacagatagagataatagaagacaaagagattaaaaggaaataaaaatgcatgattaaaaactaagaataaaaaacctatttttatgtttcctaaaggaaattgtttattctacagactcagtaggtagacacaaacataaagatttccctagaagacatagagtgggatttgataacactgtctgttattttctgtacattgtggtaggtccaggaaatatgacattttcccccttgatgtgttattgttgttgttgggtggggtgggcattttgtttatttgtttggtggcaatcagtggtagtagggagtgggagggcttatattggtttttccagctattaaggggacatattgtgtcgttgtgcttttcacgttataaaatgtttatatttaccagtacagcactgggctttataaagactgcactcagaaccacactgcacagtccagttttttaaaaagctgctacatgacagacaggtaatcccactgagtgagttttgagaaacaaatcaaacgaagtaaacaagaaacataaaaaccaaatagcaaatgaataaaagcctgttcttgtaacttattcaacttttgccaaattcctaccaatcacttgctttttaaaagaaatgtataatagccaaaagagaaattatgtccctgttgtacagaagttagaatttttgactccaggcagcagtttgctcagtgatcttgaacaagttatccaattgcctctacatttgcatcagtttctctagctgcaaaatggggataatactatatacctacctcacagtgggagggcaggagattttgaggccctgaggttttaggtgggctgtgagggccaacgcttgacacaaagtccatgggttattattcaagaatgcacaggcccatcggccttttagaaagacaagacagggagtgcttgtttgatatttcaaggaataaagccggagctcctgaattgtagtccaccttaaaagagagacctgtattggagaatattttatttttttggcaaatttgatcttaccctttaccagttctataatttggttaaaagctgattacgtcctacaatgtcaaagtcagctaactgtcgtctacttaagacttctggtcatttccaacttatagaggaagggagtctctaaaatctcttcttcagaaggcacctcacttctcagacttaaaattccacatcaagtgttccattaaaagaagataaggcattctgagtgcaaacaaatgggggcttcttaaactacacaccagcagtcagtgaggaaaactttgaacaattattgagttgctttcttgggtctctataatcaataacctgtctgcagatatctatctatataaagatattatatataaatataaatttacatatatatgcacatgtatatatagttgtacatatatgtgtgtatatatatacttaaatgtaatatttacaaaataaaactgtgatctcgtctagagaaaatgtattcatattacaaactgctcttccatatttatgtaccatattatacctttttattattgttataattattatgggtatttctaattaatatgatgttgaaacctgtttggcaccttctggaagctaccaaaaaaatgacactccattgaagtgcttaaaagctgttctcataagaattctactggcctattgtaaaaaagaaaaaaaaaagaaaaagaagaaagacacaaagaaaataatctaaacaccaaaaactaaacacaattccaatcctttttctgtacctcacgcgcataaatttggctgctcctatttttttttctgtttatgtgtttttatggatctaagttaaatcttttggcaatatataaaaatgtaaatagtaaactttatttattaagaatgtcatcttttttaatttatatttacacaattgttcatctaatttattttttctatacagttttaaatactcagacatattttgctgttcatgatatttttatcctgttctcatggatttgttttcccatactgttttctctgatctcaattacaggttggatctcacaaataataatgtcagagacagaaatattttgccactgttgattactatactttaaagttctatattatgaaaatatataatagcttgtacgct

SEQ ID NO: 455094 - DNA, 5932 bp, Homo sapiens
ttcctccttctgtctccctttccagcccttcatgggagacaattattgtgatgccatcaacaaccgagccttttgcaactatgacggtggggattgctgcacctccacagtgaagaccaaaaaggtcaccccattccctatgtcctgtgacctacaaggtgactgtgcttgtcgggacccccaggcccaagaacacagccggaaagacctccggggatacagccatggctaaggaaggacaagaagttgtcaaagaattcccaacgccaggacccacatccctttggtattgatttcacagtcagctgctcaacggaatggcctctccacaccagggatccttagcacccaaccggtctgcctttaattttacccaggaaggactcacattggggcgaatgaaccaagtttcgccatgctggatgatgaaatggattcccatcccaaagtctgagatggattgcatatacagtgtgcagtcccagagcctcctaaaattctagccatttgtcacacaaccacagcaagaaacgtgttctatatctagagtgtgcccatctgtgtttagtacacatgcatgcatacacacccatacaaacatctgtgtgagggcagttctggagatgagcagagagagaccggaataaactcaatcttttctttcccaagctcctagccaacactatccttgggagaaagaaatttgcagaaactgctaagaccaagtgtggagatgtcaagctagttcacactctgaggctcagaatatgtaggacatgcacaattgtgcagtcctttgggattggaagtgaaacagtctgtgatcccctaccttctagggaactaggacctaggaagaggtaaagattatcaggtatgcaaagcgccccaattcttctgctgccatgggggattttaccccaactccagggttcgaggccaatctgagaatggcttaggattgcaatgtcaaggtattatatcagccccttgcttgaggcttgaggtcataatatccctctaggacttacctgttcccccagatcttgccttgggaccacatttgctgctacttttcctgctgctctatcctatacattgaataatccaagatggtagaactaggttaggaaaaattccacacaaccaaacagtctgccttaaaagtgacccacatttttccatagctcctcactttttagcccttctgcaagagaaaaaccctcatgggtccacatggtgagaagttaagtttcctgtaagtgggcctctcaccctggaaaggagttgagggacatcagatgctggaaccctcactgaaagtccagaatgtctaagccagtgttagattttgtaaacaagtggaacagtgttaaatttctatgatgttggagccatccagagactactggaattgtcgagacttttggattattatccttatccttatcctaatcttcctagcccttcaggctagagtaggcttcgatcctgagaaccttgctgttgctctgaggagatataattctgggagaaagaatcttttataagaacagtacagattgttctcaagagggccatcagaaggaagccaaagagttcacagcctcagcaccaacaactcaacatggtcatcatgttttctatatggtttttccagctagcagtactcccttccatacctgtgactgggcagtgcttttctctctcccatgtctagcctccaaaagttaagtgaaaattagtcaactgcacgtggaagcccccaccactttggggatctctttatttcttttcagccagggacctgtccactccctttgaattaatatgggaagaaattaatacaggatgaactggagagaagggttgagtgtggcatactttctgaaacctggagctgggaattgcggagaagggaaggtctagactagttacatcacatagggattactgtaaatcaagtcatctcaagtctagtgaagacagccaacagaaacaaaacctagcatagggatagaaaataccatgcacgtgtgcagccccacctaattcctgcatccaaggcaggtgttgttaatctatcatagcacttaaaaaaaaaaaaaaagagaccaaaaataactttaggaaccaccatattatatcactcccaatagcactgacctggtgatcaaaaacacttgagaagacatctattggccatctctggccaattacactaagaaacatatcaaggtgcttttggcacaggtgcccacaaatacggatgcagtgctgagatagtttatgagacttgtaccatttcacaaactctgaaattgggttccatattggcaaggctgccacagttgttaagaataatcctctatgtttcttcctcacaaaaccatatctcatttatatccagaccattacttcactataattacaaggacaaattattagcaagaaataagaatagtattagaagaattgatcctattttgaacccctctccagtatcttcacactcttgtcaactctccaggcctctctcttgccctgagttatcagcctgtgtggtgttaactaccttagaaggtacaagctaagaaatgtaacagtatcaaccctcccagttgcttaattatacccataggtaatacaaaaagctctgaagacccaaagatgacattactaatgatgtgatttcaggagccacagaagaaccttaccagcttccctcaaatcagtccttatcctctttctatcttcactcccatcatcatctattttcacactatccagctaagcaaagattcctggaggctgacttgtatcttcagactcacagagtgaattcagctcttctgaatcaagacccacccagtctctttcattcagacctgttgctaacaaatttatatttgccaaggatattaggcaaaagaggctacttgattggtggccaacctcgtgcccacatggaaggtatctttaatagggtcttttcaaaccttagtggaggagggtcagctcaatttgggcaatgcatttgttcccagtttcattttcttcctgggaattaactcgtcatttcattccttcagtcatcttctgtgtaggtgaccggagcactgagaggcagctctgatgcactattgtgtgtcagcagctcaaaggccctaaaacactgaaggttctgcatctgaagtattagattgttagcagcaaaatatgaaagatgaggtggacagtcctctaagccctatttagggaagcttttccaagccacaatcttaactacctacccaaaggatttgcattacccccagattctgtgccaacaaccttttaaggaaatacagtccttgggaaatgagttttgatggtgaattggggtgttaaggaagggaaagattgtcatagatggtagggctttgaaaatgcagggtatcagctgccactcctggcttcaacacattgagtcactgcctagacggttctcttggtcttattcccatcctggccaatgcttaaatactatttgttgaaaataattctttgagacagatttcagctacctcccttccaggttcgatttaacttggttgtaattgtcaatttgttgttataggtcttacctgtgtgaaagaaagaaaaagaaagaaagaaagaaagagaaaggaaattataaggtcaagttaacagttttgaggttttgtgtttttttctggaactacttcaagtgagaaaataaaaaaaaatggtgacaaagctgtacagatagagataatagaagacaaagagattaaaaggaaataaaaatgcatgattaaaaactaagaataaaaaacctatttttatgtttcctaaaggaaattgtttattctacagactcagtaggtagacacaaacataaagatttccctagaagacatagagtgggatttgataacactgtctgttattttctgtacattgtggtaggtccaggaaatatgacattttcccccttgatgtgttattgttgttgttgggtggggtgggcattttgtttatttgtttggtggcaatcagtggtagtagggagtgggagggcttatattggtttttccagctattaaggggacatattgtgtcgttgtgcttttcacgttataaaatgtttatatttaccagtacagcactgggctttataaagactgcactcagaaccacactgcacagtccagttttttaaaaagctgctacatgacagacaggtaatcccactgagtgagttttgagaaacaaatcaaacgaagtaaacaagaaacataaaaaccaaatagcaaatgaataaaagcctgttcttgtaacttattcaacttttgccaaattcctaccaatcacttgctttttaaaagaaatgtataatagccaaaagagaaattatgtccctgttgtacagaagttagaatttttgactccaggcagcagtttgctcagtgatcttgaacaagttatccaattgcctctacatttgcatcagtttctctagctgcaaaatggggataatactatatacctacctcacagtgggagggcaggagattttgaggccctgaggttttaggtgggctgtgagggccaacgcttgacacaaagtccatgggttattattcaagaatgcacaggcccatcggccttttagaaagacaagacagggagtgcttgtttgatatttcaaggaataaagccggagctcctgaattgtagtccaccttaaaagagagacctgtattggagaatattttatttttttggcaaatttgatcttaccctttaccagttctataatttggttaaaagctgattacgtcctacaatgtcaaagtcagctaactgtcgtctacttaagacttctggtcatttccaacttatagaggaagggagtctctaaaatctcttcttcagaaggcacctcacttctcagacttaaaattccacatcaagtgttccattaaaagaagataaggcattctgagtgcaaacaaatgggggcttcttaaactacacaccagcagtcagtgaggaaaactttgaacaattattgagttgctttcttgggtctctataatcaataacctgtctgcagatatctatctatataaagatattatatataaatataaatttacatatatatgcacatgtatatatagttgtacatatatgtgtgtatatatatacttaaatgtaatatttacaaaataaaactgtgatctcgtctagagaaaatgtattcatattacaaactgctcttccatatttatgtaccatattatacctttttattattgttataattattatgggtatttctaattaatatgatgttgaaacctgtttggcaccttctggaagctaccaaaaaaatgacactccattgaagtgcttaaaagctgttctcataagaattctactggcctattgtaaaaaagaaaaaaaaaagaaaaagaagaaagacacaaagaaaataatctaaacaccaaaaactaaacacaattccaatcctttttctgtacctcacgcgcataaatttggctgctcctatttttttttctgtttatgtgtttttatggatctaagttaaatcttttggcaatatataaaaatgtaaatagtaaactttatttattaagaatgtcatcttttttaatttatatttacacaattgttcatctaatttattttttctatacagttttaaatactcagacatattttgctgttcatgatatttttatcctgttctcatggatttgttttcccatactgttttctctgatctcaattacaggttggatctcacaaataataatgtcagagacagaaatattttgccactgttgattactatactttaaagttctatattatgaaaatatataatagcttgtacgct

SEQ ID NO: 455095 - DNA, 5537 bp, Homo sapiens
tgcatacagttgaccgtgctggtgtgtgatcgaagtgactgcccgtcgctaaaatcagatatggattgcatatacagtgtgcagtcccagagcctcctaaaattctagccatttgtcacacaaccacagcaagaaacgtgttctatatctagagtgtgcccatctgtgtttagtacacatgcatgcatacacacccatacaaacatctgtgtgagggcagttctggagatgagcagagagagaccggaataaactcaatcttttctttcccaagctcctagccaacactatccttgggagaaagaaatttgcagaaactgctaagaccaagtgtggagatgtcaagctagttcacactctgaggctcagaatatgtaggacatgcacaattgtgcagtcctttgggattggaagtgaaacagtctgtgatcccctaccttctagggaactaggacctaggaagaggtaaagattatcaggtatgcaaagcgccccaattcttctgctgccatgggggattttaccccaactccagggttcgaggccaatctgagaatggcttaggattgcaatgtcaaggtattatatcagccccttgcttgaggcttgaggtcataatatccctctaggacttacctgttcccccagatcttgccttgggaccacatttgctgctacttttcctgctgctctatcctatacattgaataatccaagatggtagaactaggttaggaaaaattccacacaaccaaacagtctgccttaaaagtgacccacatttttccatagctcctcactttttagcccttctgcaagagaaaaaccctcatgggtccacatggtgagaagttaagtttcctgtaagtgggcctctcaccctggaaaggagttgagggacatcagatgctggaaccctcactgaaagtccagaatgtctaagccagtgttagattttgtaaacaagtggaacagtgttaaatttctatgatgttggagccatccagagactactggaattgtcgagacttttggattattatccttatccttatcctaatcttcctagcccttcaggctagagtaggcttcgatcctgagaaccttgctgttgctctgaggagatataattctgggagaaagaatcttttataagaacagtacagattgttctcaagagggccatcagaaggaagccaaagagttcacagcctcagcaccaacaactcaacatggtcatcatgttttctatatggtttttccagctagcagtactcccttccatacctgtgactgggcagtgcttttctctctcccatgtctagcctccaaaagttaagtgaaaattagtcaactgcacgtggaagcccccaccactttggggatctctttatttcttttcagccagggacctgtccactccctttgaattaatatgggaagaaattaatacaggatgaactggagagaagggttgagtgtggcatactttctgaaacctggagctgggaattgcggagaagggaaggtctagactagttacatcacatagggattactgtaaatcaagtcatctcaagtctagtgaagacagccaacagaaacaaaacctagcatagggatagaaaataccatgcacgtgtgcagccccacctaattcctgcatccaaggcaggtgttgttaatctatcatagcacttaaaaaaaaaaaaaaagagaccaaaaataactttaggaaccaccatattatatcactcccaatagcactgacctggtgatcaaaaacacttgagaagacatctattggccatctctggccaattacactaagaaacatatcaaggtgcttttggcacaggtgcccacaaatacggatgcagtgctgagatagtttatgagacttgtaccatttcacaaactctgaaattgggttccatattggcaaggctgccacagttgttaagaataatcctctatgtttcttcctcacaaaaccatatctcatttatatccagaccattacttcactataattacaaggacaaattattagcaagaaataagaatagtattagaagaattgatcctattttgaacccctctccagtatcttcacactcttgtcaactctccaggcctctctcttgccctgagttatcagcctgtgtggtgttaactaccttagaaggtacaagctaagaaatgtaacagtatcaaccctcccagttgcttaattatacccataggtaatacaaaaagctctgaagacccaaagatgacattactaatgatgtgatttcaggagccacagaagaaccttaccagcttccctcaaatcagtccttatcctctttctatcttcactcccatcatcatctattttcacactatccagctaagcaaagattcctggaggctgacttgtatcttcagactcacagagtgaattcagctcttctgaatcaagacccacccagtctctttcattcagacctgttgctaacaaatttatatttgccaaggatattaggcaaaagaggctacttgattggtggccaacctcgtgcccacatggaaggtatctttaatagggtcttttcaaaccttagtggaggagggtcagctcaatttgggcaatgcatttgttcccagtttcattttcttcctgggaattaactcgtcatttcattccttcagtcatcttctgtgtaggtgaccggagcactgagaggcagctctgatgcactattgtgtgtcagcagctcaaaggccctaaaacactgaaggttctgcatctgaagtattagattgttagcagcaaaatatgaaagatgaggtggacagtcctctaagccctatttagggaagcttttccaagccacaatcttaactacctacccaaaggatttgcattacccccagattctgtgccaacaaccttttaaggaaatacagtccttgggaaatgagttttgatggtgaattggggtgttaaggaagggaaagattgtcatagatggtagggctttgaaaatgcagggtatcagctgccactcctggcttcaacacattgagtcactgcctagacggttctcttggtcttattcccatcctggccaatgcttaaatactatttgttgaaaataattctttgagacagatttcagctacctcccttccaggttcgatttaacttggttgtaattgtcaatttgttgttataggtcttacctgtgtgaaagaaagaaaaagaaagaaagaaagaaagagaaaggaaattataaggtcaagttaacagttttgaggttttgtgtttttttctggaactacttcaagtgagaaaataaaaaaaaatggtgacaaagctgtacagatagagataatagaagacaaagagattaaaaggaaataaaaatgcatgattaaaaactaagaataaaaaacctatttttatgtttcctaaaggaaattgtttattctacagactcagtaggtagacacaaacataaagatttccctagaagacatagagtgggatttgataacactgtctgttattttctgtacattgtggtaggtccaggaaatatgacattttcccccttgatgtgttattgttgttgttgggtggggtgggcattttgtttatttgtttggtggcaatcagtggtagtagggagtgggagggcttatattggtttttccagctattaaggggacatattgtgtcgttgtgcttttcacgttataaaatgtttatatttaccagtacagcactgggctttataaagactgcactcagaaccacactgcacagtccagttttttaaaaagctgctacatgacagacaggtaatcccactgagtgagttttgagaaacaaatcaaacgaagtaaacaagaaacataaaaaccaaatagcaaatgaataaaagcctgttcttgtaacttattcaacttttgccaaattcctaccaatcacttgctttttaaaagaaatgtataatagccaaaagagaaattatgtccctgttgtacagaagttagaatttttgactccaggcagcagtttgctcagtgatcttgaacaagttatccaattgcctctacatttgcatcagtttctctagctgcaaaatggggataatactatatacctacctcacagtgggagggcaggagattttgaggccctgaggttttaggtgggctgtgagggccaacgcttgacacaaagtccatgggttattattcaagaatgcacaggcccatcggccttttagaaagacaagacagggagtgcttgtttgatatttcaaggaataaagccggagctcctgaattgtagtccaccttaaaagagagacctgtattggagaatattttatttttttggcaaatttgatcttaccctttaccagttctataatttggttaaaagctgattacgtcctacaatgtcaaagtcagctaactgtcgtctacttaagacttctggtcatttccaacttatagaggaagggagtctctaaaatctcttcttcagaaggcacctcacttctcagacttaaaattccacatcaagtgttccattaaaagaagataaggcattctgagtgcaaacaaatgggggcttcttaaactacacaccagcagtcagtgaggaaaactttgaacaattattgagttgctttcttgggtctctataatcaataacctgtctgcagatatctatctatataaagatattatatataaatataaatttacatatatatgcacatgtatatatagttgtacatatatgtgtgtatatatatacttaaatgtaatatttacaaaataaaactgtgatctcgtctagagaaaatgtattcatattacaaactgctcttccatatttatgtaccatattatacctttttattattgttataattattatgggtatttctaattaatatgatgttgaaacctgtttggcaccttctggaagctaccaaaaaaatgacactccattgaagtgcttaaaagctgttctcataagaattctactggcctattgtaaaaaagaaaaaaaaaagaaaaagaagaaagacacaaagaaaataatctaaacaccaaaaactaaacacaattccaatcctttttctgtacctcacgcgcataaatttggctgctcctatttttttttctgtttatgtgtttttatggatctaagttaaatcttttggcaatatataaaaatgtaaatagtaaactttatttattaagaatgtcatcttttttaatttatatttacacaattgttcatctaatttattttttctatacagttttaaatactcagacatattttgctgttcatgatatttttatcctgttctcatggatttgttttcccatactgttttctctgatctcaattacaggttggatctcacaaataataatgtcagagacagaaatattttgccactgttgattactatactttaaagttctatattatgaaaatatataatagcttgtacgct

SEQ ID NO: 455096 - DNA, 4231 bp, Homo sapiens
tctttgctcttttggggtctttgctcttttggggtctttgctctttcggggtctttgctcttttggggtctttgcgggatctctttatttcttttcagccagggacctgtccactccctttgaattaatatgggaagaaattaatacaggatgaactggagagaagggttgagtgtggcatactttctgaaacctggagctgggaattgcggagaagggaaggtctagactagttacatcacatagggattactgtaaatcaagtcatctcaagtctagtgaagacagccaacagaaacaaaacctagcatagggatagaaaataccatgcacgtgtgcagccccacctaattcctgcatccaaggcaggtgttgttaatctatcatagcacttaaaaaaaaaaaaaaagagaccaaaaataactttaggaaccaccatattatatcactcccaatagcactgacctggtgatcaaaaacacttgagaagacatctattggccatctctggccaattacactaagaaacatatcaaggtgcttttggcacaggtgcccacaaatacggatgcagtgctgagatagtttatgagacttgtaccatttcacaaactctgaaattgggttccatattggcaaggctgccacagttgttaagaataatcctctatgtttcttcctcacaaaaccatatctcatttatatccagaccattacttcactataattacaaggacaaattattagcaagaaataagaatagtattagaagaattgatcctattttgaacccctctccagtatcttcacactcttgtcaactctccaggcctctctcttgccctgagttatcagcctgtgtggtgttaactaccttagaaggtacaagctaagaaatgtaacagtatcaaccctcccagttgcttaattatacccataggtaatacaaaaagctctgaagacccaaagatgacattactaatgatgtgatttcaggagccacagaagaaccttaccagcttccctcaaatcagtccttatcctctttctatcttcactcccatcatcatctattttcacactatccagctaagcaaagattcctggaggctgacttgtatcttcagactcacagagtgaattcagctcttctgaatcaagacccacccagtctctttcattcagacctgttgctaacaaatttatatttgccaaggatattaggcaaaagaggctacttgattggtggccaacctcgtgcccacatggaaggtatctttaatagggtcttttcaaaccttagtggaggagggtcagctcaatttgggcaatgcatttgttcccagtttcattttcttcctgggaattaactcgtcatttcattccttcagtcatcttctgtgtaggtgaccggagcactgagaggcagctctgatgcactattgtgtgtcagcagctcaaaggccctaaaacactgaaggttctgcatctgaagtattagattgttagcagcaaaatatgaaagatgaggtggacagtcctctaagccctatttagggaagcttttccaagccacaatcttaactacctacccaaaggatttgcattacccccagattctgtgccaacaaccttttaaggaaatacagtccttgggaaatgagttttgatggtgaattggggtgttaaggaagggaaagattgtcatagatggtagggctttgaaaatgcagggtatcagctgccactcctggcttcaacacattgagtcactgcctagacggttctcttggtcttattcccatcctggccaatgcttaaatactatttgttgaaaataattctttgagacagatttcagctacctcccttccaggttcgatttaacttggttgtaattgtcaatttgttgttataggtcttacctgtgtgaaagaaagaaaaagaaagaaagaaagaaagagaaaggaaattataaggtcaagttaacagttttgaggttttgtgtttttttctggaactacttcaagtgagaaaataaaaaaaaatggtgacaaagctgtacagatagagataatagaagacaaagagattaaaaggaaataaaaatgcatgattaaaaactaagaataaaaaacctatttttatgtttcctaaaggaaattgtttattctacagactcagtaggtagacacaaacataaagatttccctagaagacatagagtgggatttgataacactgtctgttattttctgtacattgtggtaggtccaggaaatatgacattttcccccttgatgtgttattgttgttgttgggtggggtgggcattttgtttatttgtttggtggcaatcagtggtagtagggagtgggagggcttatattggtttttccagctattaaggggacatattgtgtcgttgtgcttttcacgttataaaatgtttatatttaccagtacagcactgggctttataaagactgcactcagaaccacactgcacagtccagttttttaaaaagctgctacatgacagacaggtaatcccactgagtgagttttgagaaacaaatcaaacgaagtaaacaagaaacataaaaaccaaatagcaaatgaataaaagcctgttcttgtaacttattcaacttttgccaaattcctaccaatcacttgctttttaaaagaaatgtataatagccaaaagagaaattatgtccctgttgtacagaagttagaatttttgactccaggcagcagtttgctcagtgatcttgaacaagttatccaattgcctctacatttgcatcagtttctctagctgcaaaatggggataatactatatacctacctcacagtgggagggcaggagattttgaggccctgaggttttaggtgggctgtgagggccaacgcttgacacaaagtccatgggttattattcaagaatgcacaggcccatcggccttttagaaagacaagacagggagtgcttgtttgatatttcaaggaataaagccggagctcctgaattgtagtccaccttaaaagagagacctgtattggagaatattttatttttttggcaaatttgatcttaccctttaccagttctataatttggttaaaagctgattacgtcctacaatgtcaaagtcagctaactgtcgtctacttaagacttctggtcatttccaacttatagaggaagggagtctctaaaatctcttcttcagaaggcacctcacttctcagacttaaaattccacatcaagtgttccattaaaagaagataaggcattctgagtgcaaacaaatgggggcttcttaaactacacaccagcagtcagtgaggaaaactttgaacaattattgagttgctttcttgggtctctataatcaataacctgtctgcagatatctatctatataaagatattatatataaatataaatttacatatatatgcacatgtatatatagttgtacatatatgtgtgtatatatatacttaaatgtaatatttacaaaataaaactgtgatctcgtctagagaaaatgtattcatattacaaactgctcttccatatttatgtaccatattatacctttttattattgttataattattatgggtatttctaattaatatgatgttgaaacctgtttggcaccttctggaagctaccaaaaaaatgacactccattgaagtgcttaaaagctgttctcataagaattctactggcctattgtaaaaaagaaaaaaaaaagaaaaagaagaaagacacaaagaaaataatctaaacaccaaaaactaaacacaattccaatcctttttctgtacctcacgcgcataaatttggctgctcctatttttttttctgtttatgtgtttttatggatctaagttaaatcttttggcaatatataaaaatgtaaatagtaaactttatttattaagaatgtcatcttttttaatttatatttacacaattgttcatctaatttattttttctatacagttttaaatactcagacatattttgctgttcatgatatttttatcctgttctcatggatttgttttcccatactgttttctctgatctcaattacaggttggatctcacaaataataatgtcagagacagaaatattttgccactgttgattactatactttaaagttctatattatgaaaatatataatagcttgtacgct

SEQ ID NO: 455097 - DNA, 8201 bp, Homo sapiens
ctgtccaggttgagtgagggtgtccaggatgaggaatgagggtgtccagggtgaggagtgagggagtccagggtgaggagtgagggagtccagggtgaggattgagggtgtcagggtgagtgagagtgtccagggtgaggagtgagggtatccagggtgagtgagggtgtccagggtgaggagtgagggtatccagggtgagtgagggtgtccagggtgagtgagggtgtcagggtgagtgaacgtgtccagggtgtgtgagggtgtccagggtgcagagtgaggtgtccagggtgaggagtgacggtgtctggggtgagtgagggtgtccagggtgaggagtgagggtgtcagggtgagtgagggtgtccagggttgagtgcacatgtgtggtgaggaggtgtttgcagtgcttcaggcgcagcaactctttcatctagtttaaaattgtgctctgaggttagattttagtagaacaaaggccttacaaagaatgtgaaaacattgtgcttccctgcttacaggcaattaaaaaggagaatcaagctgagggtgcctggtgtggggtggggtggagaagaccacagagactattgtgtgttttattcaacagtgtcctgggctgctttctccagaaatgtccctgacacatggatgtaagtgtggctagtttactgggagatgatcccagtgatgcaggacacgcgagccctaagattgaagcatagcccgggagggttcttagctttgcccaggaaggaactcaaggcaagccagtggtgttagcaacttttattgaagcggccggctgtgcacagcagcagcagaggcgctgctccttgcaaagcagggctgccctacaggctgtgcgcccacagtagcagctcagaggcagttctgcagtggtatttgtatccacttttaattatatgcaaatgaaggggcagtttatgcagacatttccagggtgagggtggtaacttctgggtgctgccagagccatcgtgaactgacttgacacaggtcggtgtgtcctatggaaactagcatctgccctggacctattttagctagtgctcagtttggtctgagtgcctgagccccacttccagagttgagtcccacctcctacctcattcccccttcagagattagatactcctccttaatcttaagggggcctcgagaagggcggagtcctgcttttccgtaactacttcctgctgagtttatggcacgtaggccctgcctggcactggaggacgtaaaaatttctggatacctgatctaaggagcccagaggcaggacgatttcattctccgtgtcagtggacaggatgggctggaagccttgtgccagcattgtctctggaactgtggtaatctagaatacacaaactttactaagaggttaaagaagcaaggaccaaacatttgtaacaagacagttgtcaaaggtcctagaagaggtgaaaaacaggtgagacttgggaaggcacttttgatggttgaccagatatagttggggcagtgccctggttatatctatgtaactaggtagcttgctcatagatcttttgaatgttaacctcaacctgtccagagttaatatatgtgcagcaggttttattaataactgcacaagaccccaccttgttcagctagtaaataatccaatgctagtctgttatcaacaactacattttccagagtctggggaactcttgaattctctttaatgcctgatctccgttggtggctaaggattctaggatttgagccaagttctttagcgttaactcatggtaggcaaagcaccccagggtgctgctagtcctattgccaccctgattcctgccagaaataagtaagcaagcaacaggacaatgaactccatgttgcccagatcccactgagagtgaacgtgcagtcatgcccataaccgacacacatcccagtccatgtgggtcagtccttcatcaccctccctgccttctgacaacagcagactccagccattccattatcattcacagcccaacccaagcagtcagtggctgaagaaagagaatcaggtatactctatgtccacatataccttcctgccacagggcttcaccaactggcaggattccccccagcccccaactcctcctcatcccttgttcccaggcgggtcaattggagagtgagcagagatagatggcttgcagaagggtatgcaagatggggagactccaccagaccttagggagagaatggcatctttctccaccttttaagagagacagagcctccctgaggtctcaaagatttttcagggcaacacaagaaacgtttccaagcctcagctgcaggtgttcacctttccactctggggtgtgaggagatggtaagctgaggacaagtgtgttccagatgcaggccaactctgttctccaacagtttgaaccaacttggccttggggttccaagggtaggatgaagggtgtcacggcaggacggggcctggcgtgaggcaacagcaagcagagcgaggacacaacagtggcagcagtgtacagacacaggacgtcagcttcaaacgatgcaacagcagggatatcttgggcacggctctgattcgagccactcccaactctcttgcctccaggatggaggcactgtacatgcaacagtccagagaaagattctagccagtccaagcccaggcacatccagagaaggtgggagctcttcgggttgactccaccgaggaaaacaggcatttgggtatttcagattcccgctccacaataaggcaacttttaaaaaaatattatttccaaaaacaaaacaaaaattccagggggagggaattcagcggatcagtcttaagaggagcttttttttggagcgagaaatcatataaaataaaatgaaataaaacaaggaggaaggcaaccagctgttaggggaaaaataaggcagataaaggagcggggagagaaattaattgccaaccaggaggagttgggctgtatttttcaaaggtggggagagtggagcacacaccttgaggaggaaagcgagaaagaaaagaaaaaagcaagtgaaggggggctcgcccaagaagggtgaagaagcgaagaaagtcgaggcgccgaggctcccaaagctggcagctccgggtggcggtgcaggggcgaaggggggggcggggggaacgtcggacatgcggctctggagttgggtgctgcacctggggctgctgagcgccgcgctgggctgcgggctggccgagcgtccccgccgggcccggagagacccgcgggccggccgacccccgcgccccgccgccggcccggccacctgcgccacccgcggcccgcggccgccgcgcctcgccgccgccgccgccgccgccgggcggtgcctgggaagccgtgcgcgtcccccggcggcggcagcagcgggaggcgaggggcgccaccgaggagccgagcccgccgagccgggcgctctatttcagcgggcgaggcgagcagctgcgcctccgggccgacctcgagctgccccgggacgcgttcacgctgcaagtgtggctgcgagcggaggggggccagaggtctccggcagtgatcacagggctgtatgacaaatgttcttatatctcacgtgaccgaggatgggtcgtgggcattcacaccatcagtgaccaagacaacaaagacccacgctactttttctccttgaagacagaccgagcccggcaagtgaccaccatcaatgcccaccgcagctacctcccaggccagtgggtatacctagctgccacctatgatgggcagttcatgaagctctatgtgaatggtgcccaggtggccacctctggggaacaagtgggtggcatattcagcccactgacccagaagtgcaaagtgctcatgttagggggcagtgccctgaatcacaactaccggggctacatcgagcacttcagtctgtggaaggtggccaggactcagcgggagatactgtctgacatggaaacccatggcgcccacactgctctacctcagctcctcctccaggagaactgggacaatgtgaagcatgcctggtcccccatgaaggatggcagcagccccaaagtggaattcagcaatgcccacggctttctgctggacacgagtctggagcctcctctgtgcggacagacattgtgtgacaacacagaggtcattgccagctacaatcagctctcaagtttccgccagcccaaggtggtgcgctaccgcgtggtcaacctctatgaagatgatcataagaacccgacggtgacgcgcgagcaggtggacttccagcaccatcagctggctgaggccttcaagcaatacaacatctcctgggagctggacgtgctggaggtgagcaactcctcccttcgccgccgcctcatcctggccaactgtgacatcagcaagattggggatgagaactgtgaccccgagtgcaaccacacgctgacgggccacgacggcggggattgccgccacctgcgccaccctgccttcgtgaagaagcagcacaacggggtgtgtgacatggactgcaactatgaacggttcaactttgatggtggagagtgctgtgaccctgaaatcaccaatgtcactcagacttgctttgaccccgactctccacacagagcctacttggatgttaatgagctgaagaacattcttaaattggatggatcaacacatctcaatattttctttgcaaaatcctcagaggaggagttggcaggagtagcaacttggccatgggacaaggaggccctgatgcacttaggtggcattgtcttgaacccatctttctatggcatgcctgggcacacccacaccatgatccatgagattggtcacagcctgggcctctatcacgtcttccgaggcatctcagaaatccagtcctgcagtgacccctgcatggagacagagccctccttcgagactggagacctctgcaatgataccaacccagcccctaaacacaagtcctgtggtgacccagggccaggaaatgacacctgtggctttcatagcttcttcaacactccttacaacaacttcatgagctatgcagatgacgactgtacggactccttcacgcccaatcaagtcgccagaatgcactgttacctggacctggtctaccagggctggcagccctccaggaaaccagcgcctgttgccctcgccccccaagttctgggccacacaacggactctgtgacactggagtggttcccacctatagatggccatttctttgaaagagaattgggatcagcatgtcatctttgcctggaagggagaatcctggtgcagtatgcttccaacgcttcctccccaatgccctgcagcccatcaggacactggagccctcgtgaagcagaaggtcatcctgatgttgaacagccctgtaagtccagtgtccgcacctggagcccaaattcagctgtcaacccacacacggttcctccagcctgccctgagcctcaaggctgctacctcgagctggagttcctctaccccttggtccctgagtctctgaccatttgggtgacctttgtctccactgactgggactctagtggagctgtcaatgacatcaaactgttggctgtcagtgggaagaacatctccctgggtcctcagaatgtcttctgtgatgtcccactgaccatcagactctgggacgtgggcgaggaggtgtatggcatccaaatctacacgctggatgagcacctggagatcgatgctgccatgttgacctccactgcagacaccccactctgtctacagtgtaagcccctgaagtataaggtggtccgggaccctcctctccagatggatgtggcctccatcctacatctcaataggaaattcgtagacatggatctaaatcttggcagtgtgtaccagtattgggtcataactatttcaggaactgaagagagtgagccatcacctgctgtcacatacatccatggaagtgggtactgtggcgatggcattatacaaaaagaccaaggtgaacaatgcgacgacatgaataagatcaatggtgatggctgctcccttttctgccgacaagaagtctccttcaattgtattgatgaacccagccggtgctatttccatgatggtgatggggtatgtgaggagtttgaacaaaaaaccagcattaaggactgtggtgtctacacgccccagggattcctggatcagtgggcatccaatgcttcagtatctcatcaagaccagcaatgcccaggctgggtcatcatcggacagccagcagcatcccaggtgtgtcgaaccaaggtgatagatctcagtgaaggcatttcccagcatgcctggtacccttgcaccatcagctacccatattcccagctggctcagaccactttttggctccgggcgtatttttctcaaccaatggttgccgcagctgtcattgtccacctggtgacggatgggacatattatggggaccaaaagcaggagaccatcagcgtgcagctgcttgataccaaagatcagagccacgatctaggcctccatgtcctgagctgcaggaacaatcccctgattatccctgtggtccatgacctcagccagcccttctaccacagccaggcggtacgtgtgagcttcagttcgcccctggtcgccatctcgggggtggccctccgttccttcgacaactttgaccccgtcaccctgagcagctgccagagaggggagacctacagccctgccgagcagagctgcgtgcacttcgcatgtgagaaaactgactgtccagagctggctgtggagaatgcttatctcaattgctccagcagcgaccgctaccacggtgcccagtgtactgtgagctgccggacaggctacgtgctccagatacggcgggatgatgagctgatcaagagccagacgggacccagcgtcacagtgacctgtacagagggcaagtggaataagcaggtggcctgtgagccagtcgactgcagcatcccagatcaccatcaagtctatgctgcctccttctcctgccctgagggcaccacctttggcagtcaatgttccttccagtgccgtcaccctgcacaattgaaaggcaacaacagcctcctgacctgcatggaggatgggctgtggtccttcccagaggccctgtgtgagctcatgtgcctcgctccaccccctgtgcccaatgcagacctccagaccgcccggtgccgagagaataagcacaaggtgggctccttctgcaaatacaaatgcaagcctggataccatgtgcctggatcctctcggaagtcaaagaaacgggccttcaagactcagtgtacccaggatggcagctggcaggagggagcttgtgttcctgtgacctgtgacccacctccaccaaaattccatgggctctaccagtgtactaatggcttccagttcaacagtgagtgtaggatcaagtgtgaagacagtgatgcctcccagggacttgggagcaatgtcattcattgccggaaagatggcacctggaacggctccttccatgtctgccaggagatgcaaggccagtgctcggttccaaacgagctcaacagcaacctcaaactgcagtgccctgatggctatgccatagggtcggagtgtgccacctcgtgcctggaccacaacagcgagtccatcatcctgccaatgaacgtgaccgtgcgtgacatcccccactggctgaaccccacacgggtagagagagttgtctgcactgctggtctcaagtggtatcctcaccctgctctgattcactgtgtcaaaggctgtgagcccttcatgggagacaattattgtgatgccatcaacaaccgagccttttgcaactatgacggtggggattgctgcacctccacagtgaagaccaaaaaggtcaccccattccctatgtcctgtgacctacaaggtgactgtgcttgtcgggacccccaggcccaagaacacagccggaaagacctccggggatacagccatggctaaggaaggacaagtcccaggggcaggacctccaagaacagctggctgaggggtgtagactggcacagcaccttgtccaaaagctcagcccagaaaatgacaacgatg

SEQ ID NO: 455098 - DNA, 7911 bp, Homo sapiens
ctgtccaggttgagtgagggtgtccaggatgaggaatgagggtgtccagggtgaggagtgagggagtccagggtgaggagtgagggagtccagggtgaggattgagggtgtcagggtgagtgagagtgtccagggtgaggagtgagggtatccagggtgagtgagggtgtccagggtgaggagtgagggtatccagggtgagtgagggtgtccagggtgagtgagggtgtcagggtgagtgaacgtgtccagggtgtgtgagggtgtccagggtgcagagtgaggtgtccagggtgaggagtgacggtgtctggggtgagtgagggtgtccagggtgaggagtgagggtgtcagggtgagtgagggtgtccagggttgagtgcacatgtgtggtgaggaggtgtttgcagtgcttcaggcgcagcaactctttcatctagtttaaaattgtgctctgaggttagattttagtagaacaaaggccttacaaagaatgtgaaaacattgtgcttccctgcttacaggcaattaaaaaggagaatcaagctgagggtgcctggtgtggggtggggtggagaagaccacagagactattgtgtgttttattcaacagtgtcctgggctgctttctccagaaatgtccctgacacatggatgtaagtgtggctagtttactgggagatgatcccagtgatgcaggacacgcgagccctaagattgaagcatagcccgggagggttcttagctttgcccaggaaggaactcaaggcaagccagtggtgttagcaacttttattgaagcggccggctgtgcacagcagcagcagaggcgctgctccttgcaaagcagggctgccctacaggctgtgcgcccacagtagcagctcagaggcagttctgcagtggtatttgtatccacttttaattatatgcaaatgaaggggcagtttatgcagacatttccagggtgagggtggtaacttctgggtgctgccagagccatcgtgaactgacttgacacaggtcggtgtgtcctatggaaactagcatctgccctggacctattttagctagtgctcagtttggtctgagtgcctgagccccacttccagagttgagtcccacctcctacctcattcccccttcagagattagatactcctccttaatcttaagggggcctcgagaagggcggagtcctgcttttccgtaactacttcctgctgagtttatggcacgtaggccctgcctggcactggaggacgtaaaaatttctggatacctgatctaaggagcccagaggcaggacgatttcattctccgtgtcagtggacaggatgggctggaagccttgtgccagcattgtctctggaactgtggtaatctagaatacacaaactttactaagaggttaaagaagcaaggaccaaacatttgtaacaagacagttgtcaaaggtcctagaagaggtgaaaaacaggtgagacttgggaaggcacttttgatggttgaccagatatagttggggcagtgccctggttatatctatgtaactaggtagcttgctcatagatcttttgaatgttaacctcaacctgtccagagttaatatatgtgcagcaggttttattaataactgcacaagaccccaccttgttcagctagtaaataatccaatgctagtctgttatcaacaactacattttccagagtctggggaactcttgaattctctttaatgcctgatctccgttggtggctaaggattctaggatttgagccaagttctttagcgttaactcatggtaggcaaagcaccccagggtgctgctagtcctattgccaccctgattcctgccagaaataagtaagcaagcaacaggacaatgaactccatgttgcccagatcccactgagagtgaacgtgcagtcatgcccataaccgacacacatcccagtccatgtgggtcagtccttcatcaccctccctgccttctgacaacagcagactccagccattccattatcattcacagcccaacccaagcagtcagtggctgaagaaagagaatcaggtatactctatgtccacatataccttcctgccacagggcttcaccaactggcaggattccccccagcccccaactcctcctcatcccttgttcccaggcgggtcaattggagagtgagcagagatagatggcttgcagaagggtatgcaagatggggagactccaccagaccttagggagagaatggcatctttctccaccttttaagagagacagagcctccctgaggtctcaaagatttttcagggcaacacaagaaacgtttccaagcctcagctgcaggtgttcacctttccactctggggtgtgaggagatggtaagctgaggacaagtgtgttccagatgcaggccaactctgttctccaacagtttgaaccaacttggccttggggttccaagggtaggatgaagggtgtcacggcaggacggggcctggcgtgaggcaacagcaagcagagcgaggacacaacagtggcagcagtgtacagacacaggacgtcagcttcaaacgatgcaacagcagggatatcttgggcacggctctgattcgagccactcccaactctcttgcctccaggatggaggcactgtacatgcaacagtccagagaaagattctagccagtccaagcccaggcacatccagagaaggtgggagctcttcgggttgactccaccgaggaaaacaggcatttgggtatttcagattcccgctccacaataaggcaacttttaaaaaaatattatttccaaaaacaaaacaaaaattccagggggagggaattcagcggatcagtcttaagaggagcttttttttggagcgagaaatcatataaaataaaatgaaataaaacaaggaggaaggcaaccagctgttaggggaaaaataaggcagataaaggagcggggagagaaattaattgccaaccaggaggagttgggctgtatttttcaaaggtggggagagtggagcacacaccttgaggaggaaagcgagaaagaaaagaaaaaagcaagtgaaggggggctcgcccaagaagggtgaagaagcgaagaaagtcgaggcgccgaggctcccaaagctggcagctccgggtggcggtgcaggggcgaaggggggggcggggggaacgtcggacatgcggctctggagttgggtgctgcacctggggctgctgagcgccgcgctgggctgcgggctggccgagcgtccccgccgggcccggagagacccgcgggccggccgacccccgcgccccgccgccggcccggccacctgcgccacccgcggcccgcggccgccgcgcctcgccgccgccgccgccgccgccgggcggtgcctgggaagccgtgcgcgtcccccggcggcggcagcagcgggaggcgaggggcgccaccgaggagccgagcccgccgagccgggcgctctatttcagcgggcgaggcgagcagctgcgcctccgggccgacctcgagctgccccgggacgcgttcacgctgcaagtgtggctgcgagcggaggggggccagaggtctccggcagtgatcacagggctgtatgacaaatgttcttatatctcacgtgaccgaggatgggtcgtgggcattcacaccatcagtgaccaagacaacaaagacccacgctactttttctccttgaagacagaccgagcccggcaagtgaccaccatcaatgcccaccgcagctacctcccaggccagtgggtatacctagctgccacctatgatgggcagttcatgaagctctatgtgaatggtgcccaggtggccacctctggggaacaagtgggtggcatattcagcccactgacccagaagtgcaaagtgctcatgttagggggcagtgccctgaatcacaactaccggggctacatcgagcacttcagtctgtggaaggtggccaggactcagcgggagatactgtctgacatggaaacccatggcgcccacactgctctacctcagctcctcctccaggagaactgggacaatgtgaagcatgcctggtcccccatgaaggatggcagcagccccaaagtggaattcagcaatgcccacggctttctgctggacacgagtctggagcctcctctgtgcggacagacattgtgtgacaacacagaggtcattgccagctacaatcagctctcaagtttccgccagcccaaggtggtgcgctaccgcgtggtcaacctctatgaagatgatcataagaacccgacggtgacgcgcgagcaggtggacttccagcaccatcagctggctgaggccttcaagcaatacaacatctcctgggagctggacgtgctggaggtgagcaactcctcccttcgccgccgcctcatcctggccaactgtgacatcagcaagattggggatgagaactgtgaccccgagtgcaaccacacgctgacgggccacgacggcggggattgccgccacctgcgccaccctgccttcgtgaagaagcagcacaacggggtgtgtgacatggactgcaactatgaacggttcaactttgatggtggagagtgctgtgaccctgaaatcaccaatgtcactcagacttgctttgaccccgactctccacacagagcctacttggatgttaatgagctgaagaacattcttaaattggatggatcaacacatctcaatattttctttgcaaaatcctcagaggaggagttggcaggagtagcaacttggccatgggacaaggaggccctgatgcacttaggtggcattgtcttgaacccatctttctatggcatgcctgggcacacccacaccatgatccatgagattggtcacagcgctacttgattggtggccaacctcgtgcccacatggaaggtatctttaatagggtcttttcaaaccttagtggaggagggtcagctcaatttgggcaatgcatttgttcccagtttcattttcttcctgggaattaactcgtcatttcattccttcagtcatcttctgtgtaggtgaccggagcactgagaggcagctctgatgcactattgtgtgtcagcagctcaaaggccctaaaacactgaaggttctgcatctgaagtattagattgttagcagcaaaatatgaaagatgaggtggacagtcctctaagccctatttagggaagcttttccaagccacaatcttaactacctacccaaaggatttgcattacccccagattctgtgccaacaaccttttaaggaaatacagtccttgggaaatgagttttgatggtgaattggggtgttaaggaagggaaagattgtcatagatggtagggctttgaaaatgcagggtatcagctgccactcctggcttcaacacattgagtcactgcctagacggttctcttggtcttattcccatcctggccaatgcttaaatactatttgttgaaaataattctttgagacagatttcagctacctcccttccaggttcgatttaacttggttgtaattgtcaatttgttgttataggtcttacctgtgtgaaagaaagaaaaagaaagaaagaaagaaagagaaaggaaattataaggtcaagttaacagttttgaggttttgtgtttttttctggaactacttcaagtgagaaaataaaaaaaaatggtgacaaagctgtacagatagagataatagaagacaaagagattaaaaggaaataaaaatgcatgattaaaaactaagaataaaaaacctatttttatgtttcctaaaggaaattgtttattctacagactcagtaggtagacacaaacataaagatttccctagaagacatagagtgggatttgataacactgtctgttattttctgtacattgtggtaggtccaggaaatatgacattttcccccttgatgtgttattgttgttgttgggtggggtgggcattttgtttatttgtttggtggcaatcagtggtagtagggagtgggagggcttatattggtttttccagctattaaggggacatattgtgtcgttgtgcttttcacgttataaaatgtttatatttaccagtacagcactgggctttataaagactgcactcagaaccacactgcacagtccagttttttaaaaagctgctacatgacagacaggtaatcccactgagtgagttttgagaaacaaatcaaacgaagtaaacaagaaacataaaaaccaaatagcaaatgaataaaagcctgttcttgtaacttattcaacttttgccaaattcctaccaatcacttgctttttaaaagaaatgtataatagccaaaagagaaattatgtccctgttgtacagaagttagaatttttgactccaggcagcagtttgctcagtgatcttgaacaagttatccaattgcctctacatttgcatcagtttctctagctgcaaaatggggataatactatatacctacctcacagtgggagggcaggagattttgaggccctgaggttttaggtgggctgtgagggccaacgcttgacacaaagtccatgggttattattcaagaatgcacaggcccatcggccttttagaaagacaagacagggagtgcttgtttgatatttcaaggaataaagccggagctcctgaattgtagtccaccttaaaagagagacctgtattggagaatattttatttttttggcaaatttgatcttaccctttaccagttctataatttggttaaaagctgattacgtcctacaatgtcaaagtcagctaactgtcgtctacttaagacttctggtcatttccaacttatagaggaagggagtctctaaaatctcttcttcagaaggcacctcacttctcagacttaaaattccacatcaagtgttccattaaaagaagataaggcattctgagtgcaaacaaatgggggcttcttaaactacacaccagcagtcagtgaggaaaactttgaacaattattgagttgctttcttgggtctctataatcaataacctgtctgcagatatctatctatataaagatattatatataaatataaatttacatatatatgcacatgtatatatagttgtacatatatgtgtgtatatatatacttaaatgtaatatttacaaaataaaactgtgatctcgtctagagaaaatgtattcatattacaaactgctcttccatatttatgtaccatattatacctttttattattgttataattattatgggtatttctaattaatatgatgttgaaacctgtttggcaccttctggaagctaccaaaaaaatgacactccattgaagtgcttaaaagctgttctcataagaattctactggcctattgtaaaaaagaaaaaaaaaagaaaaagaagaaagacacaaagaaaataatctaaacaccaaaaactaaacacaattccaatcctttttctgtacctcacgcgcataaatttggctgctcctatttttttttctgtttatgtgtttttatggatctaagttaaatcttttggcaatatataaaaatgtaaatagtaaactttatttattaagaatgtcatcttttttaatttatatttacacaattgttcatctaatttattttttctatacagttttaaatactcagacatattttgctgttcatgatatttttatcctgttctcatggatttgttttcccatactgttttctctgatctcaattacaggttggatctcacaaataataatgtcagagacagaaatattttgccactgttgattactatactttaaagttctatattatgaaaatatataatagcttgtacgct

SEQ ID NO: 455099 - DNA, 7850 bp, Homo sapiens
ctgtccaggttgagtgagggtgtccaggatgaggaatgagggtgtccagggtgaggagtgagggagtccagggtgaggagtgagggagtccagggtgaggattgagggtgtcagggtgagtgagagtgtccagggtgaggagtgagggtatccagggtgagtgagggtgtccagggtgaggagtgagggtatccagggtgagtgagggtgtccagggtgagtgagggtgtcagggtgagtgaacgtgtccagggtgtgtgagggtgtccagggtgcagagtgaggtgtccagggtgaggagtgacggtgtctggggtgagtgagggtgtccagggtgaggagtgagggtgtcagggtgagtgagggtgtccagggttgagtgcacatgtgtggtgaggaggtgtttgcagtgcttcaggcgcagcaactctttcatctagtttaaaattgtgctctgaggttagattttagtagaacaaaggccttacaaagaatgtgaaaacattgtgcttccctgcttacaggcaattaaaaaggagaatcaagctgagggtgcctggtgtggggtggggtggagaagaccacagagactattgtgtgttttattcaacagtgtcctgggctgctttctccagaaatgtccctgacacatggatgtaagtgtggctagtttactgggagatgatcccagtgatgcaggacacgcgagccctaagattgaagcatagcccgggagggttcttagctttgcccaggaaggaactcaaggcaagccagtggtgttagcaacttttattgaagcggccggctgtgcacagcagcagcagaggcgctgctccttgcaaagcagggctgccctacaggctgtgcgcccacagtagcagctcagaggcagttctgcagtggtatttgtatccacttttaattatatgcaaatgaaggggcagtttatgcagacatttccagggtgagggtggtaacttctgggtgctgccagagccatcgtgaactgacttgacacaggtcggtgtgtcctatggaaactagcatctgccctggacctattttagctagtgctcagtttggtctgagtgcctgagccccacttccagagttgagtcccacctcctacctcattcccccttcagagattagatactcctccttaatcttaagggggcctcgagaagggcggagtcctgcttttccgtaactacttcctgctgagtttatggcacgtaggccctgcctggcactggaggacgtaaaaatttctggatacctgatctaaggagcccagaggcaggacgatttcattctccgtgtcagtggacaggatgggctggaagccttgtgccagcattgtctctggaactgtggtaatctagaatacacaaactttactaagaggttaaagaagcaaggaccaaacatttgtaacaagacagttgtcaaaggtcctagaagaggtgaaaaacaggtgagacttgggaaggcacttttgatggttgaccagatatagttggggcagtgccctggttatatctatgtaactaggtagcttgctcatagatcttttgaatgttaacctcaacctgtccagagttaatatatgtgcagcaggttttattaataactgcacaagaccccaccttgttcagctagtaaataatccaatgctagtctgttatcaacaactacattttccagagtctggggaactcttgaattctctttaatgcctgatctccgttggtggctaaggattctaggatttgagccaagttctttagcgttaactcatggtaggcaaagcaccccagggtgctgctagtcctattgccaccctgattcctgccagaaataagtaagcaagcaacaggacaatgaactccatgttgcccagatcccactgagagtgaacgtgcagtcatgcccataaccgacacacatcccagtccatgtgggtcagtccttcatcaccctccctgccttctgacaacagcagactccagccattccattatcattcacagcccaacccaagcagtcagtggctgaagaaagagaatcaggtatactctatgtccacatataccttcctgccacagggcttcaccaactggcaggattccccccagcccccaactcctcctcatcccttgttcccaggcgggtcaattggagagtgagcagagatagatggcttgcagaagggtatgcaagatggggagactccaccagaccttagggagagaatggcatctttctccaccttttaagagagacagagcctccctgaggtctcaaagatttttcagggcaacacaagaaacgtttccaagcctcagctgcaggtgttcacctttccactctggggtgtgaggagatggtaagctgaggacaagtgtgttccagatgcaggccaactctgttctccaacagtttgaaccaacttggccttggggttccaagggtaggatgaagggtgtcacggcaggacggggcctggcgtgaggcaacagcaagcagagcgaggacacaacagtggcagcagtgtacagacacaggacgtcagcttcaaacgatgcaacagcagggatatcttgggcacggctctgattcgagccactcccaactctcttgcctccaggatggaggcactgtacatgcaacagtccagagaaagattctagccagtccaagcccaggcacatccagagaaggtgggagctcttcgggttgactccaccgaggaaaacaggcatttgggtatttcagattcccgctccacaataaggcaacttttaaaaaaatattatttccaaaaacaaaacaaaaattccagggggagggaattcagcggatcagtcttaagaggagcttttttttggagcgagaaatcatataaaataaaatgaaataaaacaaggaggaaggcaaccagctgttaggggaaaaataaggcagataaaggagcggggagagaaattaattgccaaccaggaggagttgggctgtatttttcaaaggtggggagagtggagcacacaccttgaggaggaaagcgagaaagaaaagaaaaaagcaagtgaaggggggctcgcccaagaagggtgaagaagcgaagaaagtcgaggcgccgaggctcccaaagctggcagctccgggtggcggtgcaggggcgaaggggggggcggggggaacgtcggacatgcggctctggagttgggtgctgcacctggggctgctgagcgccgcgctgggctgcgggctggccgagcgtccccgccgggcccggagagacccgcgggccggccgacccccgcgccccgccgccggcccggccacctgcgccacccgcggcccgcggccgccgcgcctcgccgccgccgccgccgccgccgggcggtgcctgggaagccgtgcgcgtcccccggcggcggcagcagcgggaggcgaggggcgccaccgaggagccgagcccgccgagccgggcgctctatttcagcgggcgaggcgagcagctgcgcctccgggccgacctcgagctgccccgggacgcgttcacgctgcaagtgtggctgcgagcggaggggggccagaggtctccggcagtgatcacagggctgtatgacaaatgttcttatatctcacgtgaccgaggatgggtcgtgggcattcacaccatcagtgaccaagacaacaaagacccacgctactttttctccttgaagacagaccgagcccggcaagtgaccaccatcaatgcccaccgcagctacctcccaggccagtgggtatacctagctgccacctatgatgggcagttcatgaagctctatgtgaatggtgcccaggtggccacctctggggaacaagtgggtggcatattcagcccactgacccagaagtgcaaagtgctcatgttagggggcagtgccctgaatcacaactaccggggctacatcgagcacttcagtctgtggaaggtggccaggactcagcgggagatactgtctgacatggaaacccatggcgcccacactgctctacctcagctcctcctccaggagaactgggacaatgtgaagcatgcctggtcccccatgaaggatggcagcagccccaaagtggaattcagcaatgcccacggctttctgctggacacgagtctggagcctcctctgtgcggacagacattgtgtgacaacacagaggtcattgccagctacaatcagctctcaagtttccgccagcccaaggtggtgcgctaccgcgtggtcaacctctatgaagatgatcataagaacccgacggtgacgcgcgagcaggtggacttccagcaccatcagctggctgaggccttcaagcaatacaacatctcctgggagctggacgtgctggaggtgagcaactcctcccttcgccgccgcctcatcctggccaactgtgacatcagcaagattggggatgagaactgtgaccccgagtgcaaccacacgctgacgggccacgacggcggggattgccgccacctgcgccaccctgccttcgtgaagaagcagcacaacggggtgtgtgacatggactgcaactatgaacggttcaactttgatggtggagagtgctgtgaccctgaaatcaccaatgtcactcagacttgctttgaccccgactctccacacagagcctacttggatgttaatgagctgaagaacattcttaaattggatggatcaacacatctcaatattttctttgcaaaatcctcagaggaggagttggcaggagtagcaacttggccatgggacaaggaggccctgatgcacttaggtggcattgtcttgaacccatctttctatggcatgcctgggcacacccacaccatgatccatgagattggtcacagcctgggcctctatcacgtcttccgaggcatctcagaaatccagtcctgcagtgacccctgcatggagacagagccctccttcgagactggagacctctgcaatgataccaacccagcccctaaacacaagtcctgtggtgacccagggccaggaaatgacacctgtggctttcatagcttcttcaacactccttacaacaacttcatgagctatgcagatgacgactgtacggactccttcacgcccaatcaagtcgccagaatgcactgttacctggacctggtctaccagggctggcagccctccaggaaaccagcgcctgttgccctcgccccccaagttctgggccacacaacggactctgtgacactggagtggttcccacctatagatggccatttctttgaaagagaattgggatcagcatgtcatctttgcctggaagggagaatcctggtgcagtatgcttccaacgcttcctccccaatgccctgcagcccatcaggacactggagccctcgtgaagcagaaggtcatcctgatgttgaacagccctgtaagtccagtgtccgcacctggagcccaaattcagctgtcaacccacacacggttcctccagcctgccctgagcctcaaggctgctacctcgagctggagttcctctaccccttggtccctgagtctctgaccatttgggtgacctttgtctccactgactgggactctagtggagctgtcaatgacatcaaactgttggctgtcagtgggaagaacatctccctgggtcctcagaatgtcttctgtgatgtcccactgaccatcagactctgggacgtgggcgaggaggtgtatggcatccaaatctacacgctggatgagcacctggagatcgatgctgccatgttgacctccactgcagacaccccactctgtctacagtgtaagcccctgaagtataaggtggtccgggaccctcctctccagatggatgtggcctccatcctacatctcaataggaaattcgtagacatggatctaaatcttggcagtgtgtaccagtattgggtcataactatttcaggaactgaagagagtgagccatcacctgctgtcacatacatccatggaagtgggtactgtggcgatggcattatacaaaaagaccaaggtgaacaatgcgacgacatgaataagatcaatggtgatggctgctcccttttctgccgacaagaagtctccttcaattgtattgatgaacccagccggtgctatttccatgatggtgatggggtatgtgaggagtttgaacaaaaaaccagcattaaggactgtggtgtctacacgccccagggattcctggatcagtgggcatccaatgcttcagtatctcatcaagaccagcaatgcccaggctgggtcatcatcggacagccagcagcatcccaggtgtgtcgaaccaaggtgatagatctcagtgaaggcatttcccagcatgcctggtacccttgcaccatcagctacccatattcccagctggctcagaccactttttggctccgggcgtatttttctcaaccaatggttgccgcagctgtcattgtccacctggtgacggatgggacatattatggggaccaaaagcaggagaccatcagcgtgcagctgcttgataccaaagatcagagccacgatctaggcctccatgtcctgagctgcaggaacaatcccctgattatccctgtggtccatgacctcagccagcccttctaccacagccaggcggtacgtgtgagcttcagttcgcccctggtcgccatctcgggggtggccctccgttccttcgacaactttgaccccgtcaccctgagcagctgccagagaggggagacctacagccctgccgagcagagctgcgtgcacttcgcatgtgagaaaactgactgtccagagctggctgtggagaatgcttatctcaattgctccagcagcgaccgctaccacggtgcccagtgtactgtgagctgccggacaggctacgtgctccagatacggcgggatgatgagctgatcaagagccagacgggacccagcgtcacagtgacctgtacagagggcaagtggaataagcaggtggcctgtgagccagtcgactgcagcatcccagatcaccatcaagtctatgctgcctccttctcctgccctgagggcaccacctttggcagtcaatgttccttccagtgccgtcaccctgcacaattgaaaggcaacaacagcctcctgacctgcatggaggatgggctgtggtccttcccagaggccctgtgtgagctcatgtgcctcgctccaccccctgtgcccaatgcagacctccagaccgcccggtgccgagagaataagcacaaggtgggctccttctgcaaatacaaatgcaagcctggataccatgtgcctggatcctctcggaagtcaaagaaacgggccttcaagactcagtgtacccaggatggcagctggcaggagggagcttgtgttcctgtgacctgtgacccacctccaccaaaattccatgggctctaccagtgtactaatggcttccagttcaacagtgagtgtaggatcaagtgtgaagacagtgatgcctcccagggacttgggagcaatgtcattcattgccggaaagatggcacctggaacggctccttccatgtctgccaggagatgcaaggccagtgctcggttccaaacgagctcaacagcaacctcaaactgcagtgccctgatggctatgccatagggtcggagtgtgccacctcgtgcctggaccacaacagcgagtccatcatcctgccaatgaacgtgaccgtgcgtgacatcccccactggcgaggctaggacagcagtggcgaggctaggacagcagtggcgaggctaggacag

SEQ ID NO: 455100 - DNA, 3563 bp, Homo sapiens
ccctgttgcatctatgacaatctttcccttccttaacacccaattcaccatcaaaactcatttcccaaggactgtatttccttaaaaggttgttggcacagaatctgggggtaatgcaaatcctttgggtaggtagttaagattgtggcttggaaaggcttccctaaatagggcttagaggactgtccacctcatctttcatattttgctgaattcactctgtgagtctgaagatactatcaaccctcccagttgcttaattatacccataggtaatacaaaaagctctgaagacccaaagatgacattactaatgatgtgatttcaggagccacagaagaaccttaccagcttccctcaaatcagtccttatcctctttctatcttcactcccatcatcatctattttcacactatccagctaagcaaagattcctggaggctgacttgtatcttcagactcacagagtgaattcagctcttctgaatcaagacccacccagtctctttcattcagacctgttgctaacaaatttatatttgccaaggatattaggcaaaagaggctacttgattggtggccaacctcgtgcccacatggaaggtatctttaatagggtcttttcaaaccttagtggaggagggtcagctcaatttgggcaatgcatttgttcccagtttcattttcttcctgggaattaactcgtcatttcattccttcagtcatcttctgtgtaggtgaccggagcactgagaggcagctctgatgcactattgtgtgtcagcagctcaaaggccctaaaacactgaaggttctgcatctgaagtattagattgttagcagcaaaatatgaaagatgaggtggacagtcctctaagccctatttagggaagcttttccaagccacaatcttaactacctacccaaaggatttgcattacccccagattctgtgccaacaaccttttaaggaaatacagtccttgggaaatgagttttgatggtgaattggggtgttaaggaagggaaagattgtcatagatggtagggctttgaaaatgcagggtatcagctgccactcctggcttcaacacattgagtcactgcctagacggttctcttggtcttattcccatcctggccaatgcttaaatactatttgttgaaaataattctttgagacagatttcagctacctcccttccaggttcgatttaacttggttgtaattgtcaatttgttgttataggtcttacctgtgtgaaagaaagaaaaagaaagaaagaaagaaagagaaaggaaattataaggtcaagttaacagttttgaggttttgtgtttttttctggaactacttcaagtgagaaaataaaaaaaaatggtgacaaagctgtacagatagagataatagaagacaaagagattaaaaggaaataaaaatgcatgattaaaaactaagaataaaaaacctatttttatgtttcctaaaggaaattgtttattctacagactcagtaggtagacacaaacataaagatttccctagaagacatagagtgggatttgataacactgtctgttattttctgtacattgtggtaggtccaggaaatatgacattttcccccttgatgtgttattgttgttgttgggtggggtgggcattttgtttatttgtttggtggcaatcagtggtagtagggagtgggagggcttatattggtttttccagctattaaggggacatattgtgtcgttgtgcttttcacgttataaaatgtttatatttaccagtacagcactgggctttataaagactgcactcagaaccacactgcacagtccagttttttaaaaagctgctacatgacagacaggtaatcccactgagtgagttttgagaaacaaatcaaacgaagtaaacaagaaacataaaaaccaaatagcaaatgaataaaagcctgttcttgtaacttattcaacttttgccaaattcctaccaatcacttgctttttaaaagaaatgtataatagccaaaagagaaattatgtccctgttgtacagaagttagaatttttgactccaggcagcagtttgctcagtgatcttgaacaagttatccaattgcctctacatttgcatcagtttctctagctgcaaaatggggataatactatatacctacctcacagtgggagggcaggagattttgaggccctgaggttttaggtgggctgtgagggccaacgcttgacacaaagtccatgggttattattcaagaatgcacaggcccatcggccttttagaaagacaagacagggagtgcttgtttgatatttcaaggaataaagccggagctcctgaattgtagtccaccttaaaagagagacctgtattggagaatattttatttttttggcaaatttgatcttaccctttaccagttctataatttggttaaaagctgattacgtcctacaatgtcaaagtcagctaactgtcgtctacttaagacttctggtcatttccaacttatagaggaagggagtctctaaaatctcttcttcagaaggcacctcacttctcagacttaaaattccacatcaagtgttccattaaaagaagataaggcattctgagtgcaaacaaatgggggcttcttaaactacacaccagcagtcagtgaggaaaactttgaacaattattgagttgctttcttgggtctctataatcaataacctgtctgcagatatctatctatataaagatattatatataaatataaatttacatatatatgcacatgtatatatagttgtacatatatgtgtgtatatatatacttaaatgtaatatttacaaaataaaactgtgatctcgtctagagaaaatgtattcatattacaaactgctcttccatatttatgtaccatattatacctttttattattgttataattattatgggtatttctaattaatatgatgttgaaacctgtttggcaccttctggaagctaccaaaaaaatgacactccattgaagtgcttaaaagctgttctcataagaattctactggcctattgtaaaaaagaaaaaaaaaagaaaaagaagaaagacacaaagaaaataatctaaacaccaaaaactaaacacaattccaatcctttttctgtacctcacgcgcataaatttggctgctcctatttttttttctgtttatgtgtttttatggatctaagttaaatcttttggcaatatataaaaatgtaaatagtaaactttatttattaagaatgtcatcttttttaatttatatttacacaattgttcatctaatttattttttctatacagttttaaatactcagacatattttgctgttcatgatatttttatcctgttctcatggatttgttttcccatactgttttctctgatctcaattacaggttggatctcacaaataataatgtcagagacagaaatattttgccactgttgattactatactttaaagttctatattatgaaaatatataatagcttgtacgct

SEQ ID NO: 455101 - DNA, 7323 bp, Homo sapiens
ctgtccaggttgagtgagggtgtccaggatgaggaatgagggtgtccagggtgaggagtgagggagtccagggtgaggagtgagggagtccagggtgaggattgagggtgtcagggtgagtgagagtgtccagggtgaggagtgagggtatccagggtgagtgagggtgtccagggtgaggagtgagggtatccagggtgagtgagggtgtccagggtgagtgagggtgtcagggtgagtgaacgtgtccagggtgtgtgagggtgtccagggtgcagagtgaggtgtccagggtgaggagtgacggtgtctggggtgagtgagggtgtccagggtgaggagtgagggtgtcagggtgagtgagggtgtccagggttgagtgcacatgtgtggtgaggaggtgtttgcagtgcttcaggcgcagcaactctttcatctagtttaaaattgtgctctgaggttagattttagtagaacaaaggccttacaaagaatgtgaaaacattgtgcttccctgcttacaggcaattaaaaaggagaatcaagctgagggtgcctggtgtggggtggggtggagaagaccacagagactattgtgtgttttattcaacagtgtcctgggctgctttctccagaaatgtccctgacacatggatgtaagtgtggctagtttactgggagatgatcccagtgatgcaggacacgcgagccctaagattgaagcatagcccgggagggttcttagctttgcccaggaaggaactcaaggcaagccagtggtgttagcaacttttattgaagcggccggctgtgcacagcagcagcagaggcgctgctccttgcaaagcagggctgccctacaggctgtgcgcccacagtagcagctcagaggcagttctgcagtggtatttgtatccacttttaattatatgcaaatgaaggggcagtttatgcagacatttccagggtgagggtggtaacttctgggtgctgccagagccatcgtgaactgacttgacacaggtcggtgtgtcctatggaaactagcatctgccctggacctattttagctagtgctcagtttggtctgagtgcctgagccccacttccagagttgagtcccacctcctacctcattcccccttcagagattagatactcctccttaatcttaagggggcctcgagaagggcggagtcctgcttttccgtaactacttcctgctgagtttatggcacgtaggccctgcctggcactggaggacgtaaaaatttctggatacctgatctaaggagcccagaggcaggacgatttcattctccgtgtcagtggacaggatgggctggaagccttgtgccagcattgtctctggaactgtggtaatctagaatacacaaactttactaagaggttaaagaagcaaggaccaaacatttgtaacaagacagttgtcaaaggtcctagaagaggtgaaaaacaggtgagacttgggaaggcacttttgatggttgaccagatatagttggggcagtgccctggttatatctatgtaactaggtagcttgctcatagatcttttgaatgttaacctcaacctgtccagagttaatatatgtgcagcaggttttattaataactgcacaagaccccaccttgttcagctagtaaataatccaatgctagtctgttatcaacaactacattttccagagtctggggaactcttgaattctctttaatgcctgatctccgttggtggctaaggattctaggatttgagccaagttctttagcgttaactcatggtaggcaaagcaccccagggtgctgctagtcctattgccaccctgattcctgccagaaataagtaagcaagcaacaggacaatgaactccatgttgcccagatcccactgagagtgaacgtgcagtcatgcccataaccgacacacatcccagtccatgtgggtcagtccttcatcaccctccctgccttctgacaacagcagactccagccattccattatcattcacagcccaacccaagcagtcagtggctgaagaaagagaatcaggtatactctatgtccacatataccttcctgccacagggcttcaccaactggcaggattccccccagcccccaactcctcctcatcccttgttcccaggcgggtcaattggagagtgagcagagatagatggcttgcagaagggtatgcaagatggggagactccaccagaccttagggagagaatggcatctttctccaccttttaagagagacagagcctccctgaggtctcaaagatttttcagggcaacacaagaaacgtttccaagcctcagctgcaggtgttcacctttccactctggggtgtgaggagatggtaagctgaggacaagtgtgttccagatgcaggccaactctgttctccaacagtttgaaccaacttggccttggggttccaagggtaggatgaagggtgtcacggcaggacggggcctggcgtgaggcaacagcaagcagagcgaggacacaacagtggcagcagtgtacagacacaggacgtcagcttcaaacgatgcaacagcagggatatcttgggcacggctctgattcgagccactcccaactctcttgcctccaggatggaggcactgtacatgcaacagtccagagaaagattctagccagtccaagcccaggcacatccagagaaggtgggagctcttcgggttgactccaccgaggaaaacaggcatttgggtatttcagattcccgctccacaataaggcaacttttaaaaaaatattatttccaaaaacaaaacaaaaattccagggggagggaattcagcggatcagtcttaagaggagcttttttttggagcgagaaatcatataaaataaaatgaaataaaacaaggaggaaggcaaccagctgttaggggaaaaataaggcagataaaggagcggggagagaaattaattgccaaccaggaggagttgggctgtatttttcaaaggtggggagagtggagcacacaccttgaggaggaaagcgagaaagaaaagaaaaaagcaagtgaaggggggctcgcccaagaagggtgaagaagcgaagaaagtcgaggcgccgaggctcccaaagctggcagctccgggtggcggtgcaggggcgaaggggggggcggggggaacgtcggacatgcggctctggagttgggtgctgcacctggggctgctgagcgccgcgctgggctgcgggctggccgagcgtccccgccgggcccggagagacccgcgggccggccgacccccgcgccccgccgccggcccggccacctgcgccacccgcggcccgcggccgccgcgcctcgccgccgccgccgccgccgccgggcggtgcctgggaagccgtgcgcgtcccccggcggcggcagcagcgggaggcgaggggcgccaccgaggagccgagcccgccgagccgggcgctctatttcagcgggcgaggcgagcagctgcgcctccgggccgacctcgagctgccccgggacgcgttcacgctgcaagtgtggctgcgagcggaggggggccagaggtctccggcagtgatcacagggctgtatgacaaatgttcttatatctcacgtgaccgaggatgggtcgtgggcattcacaccatcagtgaccaagacaacaaagacccacgctactttttctccttgaagacagaccgagcccggcaagtgaccaccatcaatgcccaccgcagctacctcccaggccagtgggtatacctagctgccacctatgatgggcagttcatgaagctctatgtgaatggtgcccaggtggccacctctggggaacaagtgggtggcatattcagcccactgacccagaagtgcaaagtgctcatgttagggggcagtgccctgaatcacaactaccggggctacatcgagcacttcagtctgtggaaggtggccaggactcagcgggagatactgtctgacatggaaacccatggcgcccacactgctctacctcagctcctcctccaggagaactgggacaatgtgaagcatgcctggtcccccatgaaggatggcagcagccccaaagtggaattcagcaatgcccacggctttctgctggacacgagtctggagcctcctctgtgcggacagacattgtgtgacaacacagaggtcattgccagctacaatcagctctcaagtttccgccagcccaaggtggtgcgctaccgcgtggtcaacctctatgaagatgatcataagaacccgacggtgacgcgcgagcaggtggacttccagcaccatcagctggctgaggccttcaagcaatacaacatctcctgggagctggacgtgctggaggtgagcaactcctcccttcgccgccgcctcatcctggccaactgtgacatcagcaagattggggatgagaactgtgaccccgagtgcaaccacacgctgacgggccacgacggcggggattgccgccacctgcgccaccctgccttcgtgaagaagcagcacaacggggtgtgtgacatggactgcaactatgaacggttcaactttgatggtggagagtgctgtgaccctgaaatcaccaatgtcactcagacttgctttgaccccgactctccacacagagcctacttggatgttaatgagctgaagaacattcttaaattggatggatcaacacatctcaatattttctttgcaaaatcctcagaggaggagttggcaggagtagcaacttggccatgggacaaggaggccctgatgcacttaggtggcattgtcttgaacccatctttctatggcatgcctgggcacacccacaccatgatccatgagattggtcacagcctgggcctctatcacgtcttccgaggcatctcagaaatccagtcctgcagtgacccctgcatggagacagagccctccttcgagactggagacctctgcaatgataccaacccagcccctaaacacaagtcctgtggtgacccagggccaggaaatgacacctgtggctttcatagcttcttcaacactccttacaacaacttcatgagctatgcagatgacgactgtacggactccttcacgcccaatcaagtcgccagaatgcactgttacctggacctggtctaccagggctggcagccctccaggaaaccagcgcctgttgccctcgccccccaagttctgggccacacaacggactctgtgacactggagtggttcccacctatagatggccatttctttgaaagagaattgggatcagcatgtcatctttgcctggaagggagaatcctggtgcagtatgcttccaacgcttcctccccaatgccctgcagcccatcaggacactggagccctcgtgaagcagaaggtcatcctgatgttgaacagccctgtaagtccagtgtccgcacctggagcccaaattcagctgtcaacccacacacggttcctccagcctgccctgagcctcaaggctgctacctcgagctggagttcctctaccccttggtccctgagtctctgaccatttgggtgacctttgtctccactgactgggactctagtggagctgtcaatgacatcaaactgttggctgtcagtgggaagaacatctccctgggtcctcagaatgtcttctgtgatgtcccactgaccatcagactctgggacgtgggcgaggaggtgtatggcatccaaatctacacgctggatgagcacctggagatcgatgctgccatgttgacctccactgcagacaccccactctgtctacagtgtaagcccctgaagtataaggtggtccgggaccctcctctccagatggatgtggcctccatcctacatctcaataggaaattcgtagacatggatctaaatcttggcagtgtgtaccagtattgggtcataactatttcaggaactgaagagagtgagccatcacctgctgtcacatacatccatggaagtgggtactgtggcgatggcattatacaaaaagaccaaggtgaacaatgcgacgacatgaataagatcaatggtgatggctgctcccttttctgccgacaagaagtctccttcaattgtattgatgaacccagccggtgctatttccatgatggtgatggggtatgtgaggagtttgaacaaaaaaccagcattaaggactgtggtgtctacacgccccagggattcctggatcagtgggcatccaatgcttcagtatctcatcaagaccagcaatgcccaggctgggtcatcatcggacagccagcagcatcccaggtgtgtcgaaccaaggtgatagatctcagtgaaggcatttcccagcatgcctggtacccttgcaccatcagctacccatattcccagctggctcagaccactttttggctccgggcgtatttttctcaaccaatggttgccgcagctgtcattgtccacctggtgacggatgggacatattatggggaccaaaagcaggagaccatcagcgtgcagctgcttgataccaaagatcagagccacgatctaggcctccatgtcctgagctgcaggaacaatcccctgattatccctgtggtccatgacctcagccagcccttctaccacagccaggcggtacgtgtgagcttcagttcgcccctggtcgccatctcgggggtggccctccgttccttcgacaactttgaccccgtcaccctgagcagctgccagagaggggagacctacagccctgccgagcagagctgcgtgcacttcgcatgtgagaaaactgactgtccagagctggctgtggagaatgcttatctcaattgctccagcagcgaccgctaccacggtgcccagtgtactgtgagctgccggacaggctacgtgctccagatacggcgggatgatgagctgatcaagagccagacgggacccagcgtcacagtgacctgtacagagggcaagtggaataagcaggtggcctgtgagccagtcgactgcagcatcccagatcaccatcaagtctatgctgcctccttctcctgccctgagggcaccacctttggcagtcaatgttccttccagtgccgtcaccctgcacaattgaaaggcaacaacagcctcccgtcgctctgccaatttggcagagcgacgggacggtgacgaggctggtacacctacacagacctagtgtgtgctgctggagcaaaccgacctagagcagtaggccctgggctccctctgccagcgcgctggt

SEQ ID NO: 455102 - DNA, 8115 bp, Homo sapiens
ctgtccaggttgagtgagggtgtccaggatgaggaatgagggtgtccagggtgaggagtgagggagtccagggtgaggagtgagggagtccagggtgaggattgagggtgtcagggtgagtgagagtgtccagggtgaggagtgagggtatccagggtgagtgagggtgtccagggtgaggagtgagggtatccagggtgagtgagggtgtccagggtgagtgagggtgtcagggtgagtgaacgtgtccagggtgtgtgagggtgtccagggtgcagagtgaggtgtccagggtgaggagtgacggtgtctggggtgagtgagggtgtccagggtgaggagtgagggtgtcagggtgagtgagggtgtccagggttgagtgcacatgtgtggtgaggaggtgtttgcagtgcttcaggcgcagcaactctttcatctagtttaaaattgtgctctgaggttagattttagtagaacaaaggccttacaaagaatgtgaaaacattgtgcttccctgcttacaggcaattaaaaaggagaatcaagctgagggtgcctggtgtggggtggggtggagaagaccacagagactattgtgtgttttattcaacagtgtcctgggctgctttctccagaaatgtccctgacacatggatgtaagtgtggctagtttactgggagatgatcccagtgatgcaggacacgcgagccctaagattgaagcatagcccgggagggttcttagctttgcccaggaaggaactcaaggcaagccagtggtgttagcaacttttattgaagcggccggctgtgcacagcagcagcagaggcgctgctccttgcaaagcagggctgccctacaggctgtgcgcccacagtagcagctcagaggcagttctgcagtggtatttgtatccacttttaattatatgcaaatgaaggggcagtttatgcagacatttccagggtgagggtggtaacttctgggtgctgccagagccatcgtgaactgacttgacacaggtcggtgtgtcctatggaaactagcatctgccctggacctattttagctagtgctcagtttggtctgagtgcctgagccccacttccagagttgagtcccacctcctacctcattcccccttcagagattagatactcctccttaatcttaagggggcctcgagaagggcggagtcctgcttttccgtaactacttcctgctgagtttatggcacgtaggccctgcctggcactggaggacgtaaaaatttctggatacctgatctaaggagcccagaggcaggacgatttcattctccgtgtcagtggacaggatgggctggaagccttgtgccagcattgtctctggaactgtggtaatctagaatacacaaactttactaagaggttaaagaagcaaggaccaaacatttgtaacaagacagttgtcaaaggtcctagaagaggtgaaaaacaggtgagacttgggaaggcacttttgatggttgaccagatatagttggggcagtgccctggttatatctatgtaactaggtagcttgctcatagatcttttgaatgttaacctcaacctgtccagagttaatatatgtgcagcaggttttattaataactgcacaagaccccaccttgttcagctagtaaataatccaatgctagtctgttatcaacaactacattttccagagtctggggaactcttgaattctctttaatgcctgatctccgttggtggctaaggattctaggatttgagccaagttctttagcgttaactcatggtaggcaaagcaccccagggtgctgctagtcctattgccaccctgattcctgccagaaataagtaagcaagcaacaggacaatgaactccatgttgcccagatcccactgagagtgaacgtgcagtcatgcccataaccgacacacatcccagtccatgtgggtcagtccttcatcaccctccctgccttctgacaacagcagactccagccattccattatcattcacagcccaacccaagcagtcagtggctgaagaaagagaatcaggtatactctatgtccacatataccttcctgccacagggcttcaccaactggcaggattccccccagcccccaactcctcctcatcccttgttcccaggcgggtcaattggagagtgagcagagatagatggcttgcagaagggtatgcaagatggggagactccaccagaccttagggagagaatggcatctttctccaccttttaagagagacagagcctccctgaggtctcaaagatttttcagggcaacacaagaaacgtttccaagcctcagctgcaggtgttcacctttccactctggggtgtgaggagatggtaagctgaggacaagtgtgttccagatgcaggccaactctgttctccaacagtttgaaccaacttggccttggggttccaagggtaggatgaagggtgtcacggcaggacggggcctggcgtgaggcaacagcaagcagagcgaggacacaacagtggcagcagtgtacagacacaggacgtcagcttcaaacgatgcaacagcagggatatcttgggcacggctctgattcgagccactcccaactctcttgcctccaggatggaggcactgtacatgcaacagtccagagaaagattctagccagtccaagcccaggcacatccagagaaggtgggagctcttcgggttgactccaccgaggaaaacaggcatttgggtatttcagattcccgctccacaataaggcaacttttaaaaaaatattatttccaaaaacaaaacaaaaattccagggggagggaattcagcggatcagtcttaagaggagcttttttttggagcgagaaatcatataaaataaaatgaaataaaacaaggaggaaggcaaccagctgttaggggaaaaataaggcagataaaggagcggggagagaaattaattgccaaccaggaggagttgggctgtatttttcaaaggtggggagagtggagcacacaccttgaggaggaaagcgagaaagaaaagaaaaaagcaagtgaaggggggctcgcccaagaagggtgaagaagcgaagaaagtcgaggcgccgaggctcccaaagctggcagctccgggtggcggtgcaggggcgaaggggggggcggggggaacgtcggacatgcggctctggagttgggtgctgcacctggggctgctgagcgccgcgctgggctgcgggctggccgagcgtccccgccgggcccggagagacccgcgggccggccgacccccgcgccccgccgccggcccggccacctgcgccacccgcggcccgcggccgccgcgcctcgccgccgccgccgccgccgccgggcggtgcctgggaagccgtgcgcgtcccccggcggcggcagcagcgggaggcgaggggcgccaccgaggagccgagcccgccgagccgggcgctctatttcagcgggcgaggcgagcagctgcgcctccgggccgacctcgagctgccccgggacgcgttcacgctgcaagtgtggctgcgagcggaggggggccagaggtctccggcagtgatcacagggctgtatgacaaatgttcttatatctcacgtgaccgaggatgggtcgtgggcattcacaccatcagtgaccaagacaacaaagacccacgctactttttctccttgaagacagaccgagcccggcaagtgaccaccatcaatgcccaccgcagctacctcccaggccagtgggtatacctagctgccacctatgatgggcagttcatgaagctctatgtgaatggtgcccaggtggccacctctggggaacaagtgggtggcatattcagcccactgacccagaagtgcaaagtgctcatgttagggggcagtgccctgaatcacaactaccggggctacatcgagcacttcagtctgtggaaggtggccaggactcagcgggagatactgtctgacatggaaacccatggcgcccacactgctctacctcagctcctcctccaggagaactgggacaatgtgaagcatgcctggtcccccatgaaggatggcagcagccccaaagtggaattcagcaatgcccacggctttctgctggacacgagtctggagcctcctctgtgcggacagacattgtgtgacaacacagaggtcattgccagctacaatcagctctcaagtttccgccagcccaaggtggtgcgctaccgcgtggtcaacctctatgaagatgatcataagaacccgacggtgacgcgcgagcaggtggacttccagcaccatcagctggctgaggccttcaagcaatacaacatctcctgggagctggacgtgctggaggtgagcaactcctcccttcgccgccgcctcatcctggccaactgtgacatcagcaagattggggatgagaactgtgaccccgagtgcaaccacacgctgacgggccacgacggcggggattgccgccacctgcgccaccctgccttcgtgaagaagcagcacaacggggtgtgtgacatggactgcaactatgaacggttcaactttgatggtggagagtgctgtgaccctgaaatcaccaatgtcactcagacttgctttgaccccgactctccacacagagcctacttggatgttaatgagctgaagaacattcttaaattggatggatcaacacatctcaatattttctttgcaaaatcctcagaggaggagttggcaggagtagcaacttggccatgggacaaggaggccctgatgcacttaggtggcattgtcttgaacccatctttctatggcatgcctgggcacacccacaccatgatccatgagattggtcacagcctgggcctctatcacgtcttccgaggcatctcagaaatccagtcctgcagtgacccctgcatggagacagagccctccttcgagactggagacctctgcaatgataccaacccagcccctaaacacaagtcctgtggtgacccagggccaggaaatgacacctgtggctttcatagcttcttcaacactccttacaacaacttcatgagctatgcagatgacgactgtacggactccttcacgcccaatcaagtcgccagaatgcactgttacctggacctggtctaccagggctggcagccctccaggaaaccagcgcctgttgccctcgccccccaagttctgggccacacaacggactctgtgacactggagtggttcccacctatagatggccatttctttgaaagagaattgggatcagcatgtcatctttgcctggaagggagaatcctggtgcagtatgcttccaacgcttcctccccaatgccctgcagcccatcaggacactggagccctcgtgaagcagaaggtcatcctgatgttgaacagccctgtaagtccagtgtccgcacctggagcccaaattcagctgtcaacccacacacggttcctccagcctgccctgagcctcaaggctgctacctcgagctggagttcctctaccccttggtccctgagtctctgaccatttgggtgacctttgtctccactgactgggactctagtggagctgtcaatgacatcaaactgttggctgtcagtgggaagaacatctccctgggtcctcagaatgtcttctgtgatgtcccactgaccatcagactctgggacgtgggcgaggaggtgtatggcatccaaatctacacgctggatgagcacctggagatcgatgctgccatgttgacctccactgcagacaccccactctgtctacagtgtaagcccctgaagtataaggtggtccgggaccctcctctccagatggatgtggcctccatcctacatctcaataggaaattcgtagacatggatctaaatcttggcagtgtgtaccagtattgggtcataactatttcaggaactgaagagagtgagccatcacctgctgtcacatacatccatggaagtgggtactgtggcgatggcattatacaaaaagaccaaggtgaacaatgcgacgacatgaataagatcaatggtgatggctgctcccttttctgccgacaagaagtctccttcaattgtattgatgaacccagccggtgctatttccatgatggtgatggggtatgtgaggagtttgaacaaaaaaccagcattaaggactgtggtgtctacacgccccagggattcctggatcagtgggcatccaatgcttcagtatctcatcaagaccagcaatgcccaggctgggtcatcatcggacagccagcagcatcccaggtgtgtcgaaccaaggtgatagatctcagtgaaggcatttcccagcatgcctggtacccttgcaccatcagctacccatattcccagctggctcagaccactttttggctccgggcgtatttttctcaaccaatggttgccgcagctgtcattgtccacctggtgacggatgggacatattatggggaccaaaagcaggagaccatcagcgtgcagctgcttgataccaaagatcagagccacgatctagaccccaagaaggagagagactgagtaagagccatttccccgttgtacatgtcaccatctgagacccaaagagaggcactgagagaccccaagtcacatggcaggtcaggaattactagttagattttcagcgtcatagcctattgctttttaccctataaccgggagtgttcatgaccctccaccccaagtggggactgtatcaccagtacaacctctggagaagtttccaatgagaataggaataggaatattgtaggagtagggaggcagttgaggagtcaggttctaccatgggaggacctccctgagtgcagggccaagggggaggacaagggctggacttggccacttgtaccacccctttgaatacccacatgcaccgtggtccagaggagagagcctgaatccagagctgacagctgaggtttggatcctgtccccaccactcactcaccttgagaaggtgagcaatcttcctgtcctcacagcacatcacttagaggctcacttgcttcacatacacagcaaggacaatgatatccaccttagagtcagagtgcactattatttgacactgttgtaaccatgcctagcacaagatcgggccctaagaattcctattgtcgctaagaatttcctatgacaccttcacacttccagtctaccctggagagctctgggcagcctggatactccaagtatttggaatttttggccactactgaagcctggacttcaaagttgtgcccacaccattctgcagagaacgcctttcaaagacctgtatgaagcaagccaggcaaggggtcatttcagggtcagataaaagccaagggagcagggaagattttcttgttttgtttttatgcttgtttatttagttccttttaaaggcaaggggaacctatgaataaggaagagaaagaaaacccctctggacttagcaggattcctgggaaatttccctaagtgagaaacaaatattttcatagttgtcgttgcacagcccagggctctgaggagaggttttttcagcagagtggggaaaagtctggttccacaggagctctttggatcctggtactgatgcctgaggcttttctgtttttcccctccacccccaccatcaccatcttcctcagtctatgacatcccagcattctccgaggcagcttcacctctggaactgagaagggcacctgcttcaggcttccacatgggagatttctccttacatagcaagcccgccaggacatggttaggattataccattttttggatgtgaaaactgagttttaggggctttctggagtcccattattaggaaggggctacaccagcatttaaactcaggtccacccaacaccaaagccaacttctgttttgctaattccatcttgccacagccttcctttccttctgtcccttgtgtatcttttctccctggccctctcccttccttcttggagaatgggaacctgctggctgcattaaaaaaaaaaa

SEQ ID NO: 455103 - DNA, 6476 bp, Homo sapiens
  misc_feature (6468)..(6468): n is a, c, g, or t
ctgtccaggttgagtgagggtgtccaggatgaggaatgagggtgtccagggtgaggagtgagggagtccagggtgaggagtgagggagtccagggtgaggattgagggtgtcagggtgagtgagagtgtccagggtgaggagtgagggtatccagggtgagtgagggtgtccagggtgaggagtgagggtatccagggtgagtgagggtgtccagggtgagtgagggtgtcagggtgagtgaacgtgtccagggtgtgtgagggtgtccagggtgcagagtgaggtgtccagggtgaggagtgacggtgtctggggtgagtgagggtgtccagggtgaggagtgagggtgtcagggtgagtgagggtgtccagggttgagtgcacatgtgtggtgaggaggtgtttgcagtgcttcaggcgcagcaactctttcatctagtttaaaattgtgctctgaggttagattttagtagaacaaaggccttacaaagaatgtgaaaacattgtgcttccctgcttacaggcaattaaaaaggagaatcaagctgagggtgcctggtgtggggtggggtggagaagaccacagagactattgtgtgttttattcaacagtgtcctgggctgctttctccagaaatgtccctgacacatggatgtaagtgtggctagtttactgggagatgatcccagtgatgcaggacacgcgagccctaagattgaagcatagcccgggagggttcttagctttgcccaggaaggaactcaaggcaagccagtggtgttagcaacttttattgaagcggccggctgtgcacagcagcagcagaggcgctgctccttgcaaagcagggctgccctacaggctgtgcgcccacagtagcagctcagaggcagttctgcagtggtatttgtatccacttttaattatatgcaaatgaaggggcagtttatgcagacatttccagggtgagggtggtaacttctgggtgctgccagagccatcgtgaactgacttgacacaggtcggtgtgtcctatggaaactagcatctgccctggacctattttagctagtgctcagtttggtctgagtgcctgagccccacttccagagttgagtcccacctcctacctcattcccccttcagagattagatactcctccttaatcttaagggggcctcgagaagggcggagtcctgcttttccgtaactacttcctgctgagtttatggcacgtaggccctgcctggcactggaggacgtaaaaatttctggatacctgatctaaggagcccagaggcaggacgatttcattctccgtgtcagtggacaggatgggctggaagccttgtgccagcattgtctctggaactgtggtaatctagaatacacaaactttactaagaggttaaagaagcaaggaccaaacatttgtaacaagacagttgtcaaaggtcctagaagaggtgaaaaacaggtgagacttgggaaggcacttttgatggttgaccagatatagttggggcagtgccctggttatatctatgtaactaggtagcttgctcatagatcttttgaatgttaacctcaacctgtccagagttaatatatgtgcagcaggttttattaataactgcacaagaccccaccttgttcagctagtaaataatccaatgctagtctgttatcaacaactacattttccagagtctggggaactcttgaattctctttaatgcctgatctccgttggtggctaaggattctaggatttgagccaagttctttagcgttaactcatggtaggcaaagcaccccagggtgctgctagtcctattgccaccctgattcctgccagaaataagtaagcaagcaacaggacaatgaactccatgttgcccagatcccactgagagtgaacgtgcagtcatgcccataaccgacacacatcccagtccatgtgggtcagtccttcatcaccctccctgccttctgacaacagcagactccagccattccattatcattcacagcccaacccaagcagtcagtggctgaagaaagagaatcaggtatactctatgtccacatataccttcctgccacagggcttcaccaactggcaggattccccccagcccccaactcctcctcatcccttgttcccaggcgggtcaattggagagtgagcagagatagatggcttgcagaagggtatgcaagatggggagactccaccagaccttagggagagaatggcatctttctccaccttttaagagagacagagcctccctgaggtctcaaagatttttcagggcaacacaagaaacgtttccaagcctcagctgcaggtgttcacctttccactctggggtgtgaggagatggtaagctgaggacaagtgtgttccagatgcaggccaactctgttctccaacagtttgaaccaacttggccttggggttccaagggtaggatgaagggtgtcacggcaggacggggcctggcgtgaggcaacagcaagcagagcgaggacacaacagtggcagcagtgtacagacacaggacgtcagcttcaaacgatgcaacagcagggatatcttgggcacggctctgattcgagccactcccaactctcttgcctccaggatggaggcactgtacatgcaacagtccagagaaagattctagccagtccaagcccaggcacatccagagaaggtgggagctcttcgggttgactccaccgaggaaaacaggcatttgggtatttcagattcccgctccacaataaggcaacttttaaaaaaatattatttccaaaaacaaaacaaaaattccagggggagggaattcagcggatcagtcttaagaggagcttttttttggagcgagaaatcatataaaataaaatgaaataaaacaaggaggaaggcaaccagctgttaggggaaaaataaggcagataaaggagcggggagagaaattaattgccaaccaggaggagttgggctgtatttttcaaaggtggggagagtggagcacacaccttgaggaggaaagcgagaaagaaaagaaaaaagcaagtgaaggggggctcgcccaagaagggtgaagaagcgaagaaagtcgaggcgccgaggctcccaaagctggcagctccgggtggcggtgcaggggcgaaggggggggcggggggaacgtcggacatgcggctctggagttgggtgctgcacctggggctgctgagcgccgcgctgggctgcgggctggccgagcgtccccgccgggcccggagagacccgcgggccggccgacccccgcgccccgccgccggcccggccacctgcgccacccgcggcccgcggccgccgcgcctcgccgccgccgccgccgccgccgggcggtgcctgggaagccgtgcgcgtcccccggcggcggcagcagcgggaggcgaggggcgccaccgaggagccgagcccgccgagccgggcgctctatttcagcgggcgaggcgagcagctgcgcctccgggccgacctcgagctgccccgggacgcgttcacgctgcaagtgtggctgcgagcggaggggggccagaggtctccggcagtgatcacagggctgtatgacaaatgttcttatatctcacgtgaccgaggatgggtcgtgggcattcacaccatcagtgaccaagacaacaaagacccacgctactttttctccttgaagacagaccgagcccggcaagtgaccaccatcaatgcccaccgcagctacctcccaggccagtgggtatacctagctgccacctatgatgggcagttcatgaagctctatgtgaatggtgcccaggtggccacctctggggaacaagtgggtggcatattcagcccactgacccagaagtgcaaagtgctcatgttagggggcagtgccctgaatcacaactaccggggctacatcgagcacttcagtctgtggaaggtggccaggactcagcgggagatactgtctgacatggaaacccatggcgcccacactgctctacctcagctcctcctccaggagaactgggacaatgtgaagcatgcctggtcccccatgaaggatggcagcagccccaaagtggaattcagcaatgcccacggctttctgctggacacgagtctggagcctcctctgtgcggacagacattgtgtgacaacacagaggtcattgccagctacaatcagctctcaagtttccgccagcccaaggtggtgcgctaccgcgtggtcaacctctatgaagatgatcataagaacccgacggtgacgcgcgagcaggtggacttccagcaccatcagctggctgaggccttcaagcaatacaacatctcctgggagctggacgtgctggaggtgagcaactcctcccttcgccgccgcctcatcctggccaactgtgacatcagcaagattggggatgagaactgtgaccccgagtgcaaccacacgctgacgggccacgacggcggggattgccgccacctgcgccaccctgccttcgtgaagaagcagcacaacggggtgtgtgacatggactgcaactatgaacggttcaactttgatggtggagagtgctgtgaccctgaaatcaccaatgtcactcagacttgctttgaccccgactctccacacagagcctacttggatgttaatgagctgaagaacattcttaaattggatggatcaacacatctcaatattttctttgcaaaatcctcagaggaggagttggcaggagtagcaacttggccatgggacaaggaggccctgatgcacttaggtggcattgtcttgaacccatctttctatggcatgcctgggcacacccacaccatgatccatgagattggtcacagcctgggcctctatcacgtcttccgaggcatctcagaaatccagtcctgcagtgacccctgcatggagacagagccctccttcgagactggagacctctgcaatgataccaacccagcccctaaacacaagtcctgtggtgacccagggccaggaaatgacacctgtggctttcatagcttcttcaacactccttacaacaacttcatgagctatgcagatgacgactgtacggactccttcacgcccaatcaagtcgccagaatgcactgttacctggacctggtctaccagggctggcagccctccaggaaaccagcgcctgttgccctcgccccccaagttctgggccacacaacggactctgtgacactggagtggttcccacctatagatggccatttctttgaaagagaattgggatcagcatgtcatctttgcctggaagggagaatcctggtgcagtatgcttccaacgcttcctccccaatgccctgcagcccatcaggacactggagccctcgtgaagcagaaggtcatcctgatgttgaacagccctgtaagtccagtgtccgcacctggagcccaaattcagctgtcaacccacacacggttcctccagcctgccctgagcctcaaggctgctacctcgagctggagttcctctaccccttggtccctgagtctctgaccatttgggtgacctttgtctccactgactgggactctagtggagctgtcaatgacatcaaactgttggctgtcagtgggaagaacatctccctgggtcctcagaatgtcttctgtgatgtcccactgaccatcagactctgggacgtgggcgaggaggtgtatggcatccaaatctacacgctggatgagcacctggagatcgatgctgccatgttgacctccactgcagacaccccactctgtctacagtgtaagcccctgaagtataaggtggtccgggaccctcctctccagatggatgtggcctccatcctacatctcaataggaaattcgtagacatggatctaaatcttggcagtgtgtaccagtattgggtcataactatttcaggaactgaagagagtgagccatcacctgctgtcacatacatccatggaagtgggtactgtggcgatggcattatacaaaaagaccaaggtgaacaatgcgacgacatgaataagatcaatggtgatggctgctcccttttctgccgacaagaagtctccttcaattgtattgatgaacccagccggtgctatttccatgatggtgatggggtatgtgaggagtttgaacaaaaaaccagcattaaggactgtggtgtctacacgccccagggattcctggatcagtgggcatccaatgcttcagtatctcatcaagaccagcaatgcccaggctgggtcatcatcggacagccagcagcatcccaggtgtgtcgaaccaaggtgatagatctcagtgaaggcatttcccagcatgcctggtacccttgcaccatcaaggaattcccacaccagcacgatcccggatcctctagancacttcac

SEQ ID NO: 455104 - DNA, 6413 bp, Homo sapiens
ctgtccaggttgagtgagggtgtccaggatgaggaatgagggtgtccagggtgaggagtgagggagtccagggtgaggagtgagggagtccagggtgaggattgagggtgtcagggtgagtgagagtgtccagggtgaggagtgagggtatccagggtgagtgagggtgtccagggtgaggagtgagggtatccagggtgagtgagggtgtccagggtgagtgagggtgtcagggtgagtgaacgtgtccagggtgtgtgagggtgtccagggtgcagagtgaggtgtccagggtgaggagtgacggtgtctggggtgagtgagggtgtccagggtgaggagtgagggtgtcagggtgagtgagggtgtccagggttgagtgcacatgtgtggtgaggaggtgtttgcagtgcttcaggcgcagcaactctttcatctagtttaaaattgtgctctgaggttagattttagtagaacaaaggccttacaaagaatgtgaaaacattgtgcttccctgcttacaggcaattaaaaaggagaatcaagctgagggtgcctggtgtggggtggggtggagaagaccacagagactattgtgtgttttattcaacagtgtcctgggctgctttctccagaaatgtccctgacacatggatgtaagtgtggctagtttactgggagatgatcccagtgatgcaggacacgcgagccctaagattgaagcatagcccgggagggttcttagctttgcccaggaaggaactcaaggcaagccagtggtgttagcaacttttattgaagcggccggctgtgcacagcagcagcagaggcgctgctccttgcaaagcagggctgccctacaggctgtgcgcccacagtagcagctcagaggcagttctgcagtggtatttgtatccacttttaattatatgcaaatgaaggggcagtttatgcagacatttccagggtgagggtggtaacttctgggtgctgccagagccatcgtgaactgacttgacacaggtcggtgtgtcctatggaaactagcatctgccctggacctattttagctagtgctcagtttggtctgagtgcctgagccccacttccagagttgagtcccacctcctacctcattcccccttcagagattagatactcctccttaatcttaagggggcctcgagaagggcggagtcctgcttttccgtaactacttcctgctgagtttatggcacgtaggccctgcctggcactggaggacgtaaaaatttctggatacctgatctaaggagcccagaggcaggacgatttcattctccgtgtcagtggacaggatgggctggaagccttgtgccagcattgtctctggaactgtggtaatctagaatacacaaactttactaagaggttaaagaagcaaggaccaaacatttgtaacaagacagttgtcaaaggtcctagaagaggtgaaaaacaggtgagacttgggaaggcacttttgatggttgaccagatatagttggggcagtgccctggttatatctatgtaactaggtagcttgctcatagatcttttgaatgttaacctcaacctgtccagagttaatatatgtgcagcaggttttattaataactgcacaagaccccaccttgttcagctagtaaataatccaatgctagtctgttatcaacaactacattttccagagtctggggaactcttgaattctctttaatgcctgatctccgttggtggctaaggattctaggatttgagccaagttctttagcgttaactcatggtaggcaaagcaccccagggtgctgctagtcctattgccaccctgattcctgccagaaataagtaagcaagcaacaggacaatgaactccatgttgcccagatcccactgagagtgaacgtgcagtcatgcccataaccgacacacatcccagtccatgtgggtcagtccttcatcaccctccctgccttctgacaacagcagactccagccattccattatcattcacagcccaacccaagcagtcagtggctgaagaaagagaatcaggtatactctatgtccacatataccttcctgccacagggcttcaccaactggcaggattccccccagcccccaactcctcctcatcccttgttcccaggcgggtcaattggagagtgagcagagatagatggcttgcagaagggtatgcaagatggggagactccaccagaccttagggagagaatggcatctttctccaccttttaagagagacagagcctccctgaggtctcaaagatttttcagggcaacacaagaaacgtttccaagcctcagctgcaggtgttcacctttccactctggggtgtgaggagatggtaagctgaggacaagtgtgttccagatgcaggccaactctgttctccaacagtttgaaccaacttggccttggggttccaagggtaggatgaagggtgtcacggcaggacggggcctggcgtgaggcaacagcaagcagagcgaggacacaacagtggcagcagtgtacagacacaggacgtcagcttcaaacgatgcaacagcagggatatcttgggcacggctctgattcgagccactcccaactctcttgcctccaggatggaggcactgtacatgcaacagtccagagaaagattctagccagtccaagcccaggcacatccagagaaggtgggagctcttcgggttgactccaccgaggaaaacaggcatttgggtatttcagattcccgctccacaataaggcaacttttaaaaaaatattatttccaaaaacaaaacaaaaattccagggggagggaattcagcggatcagtcttaagaggagcttttttttggagcgagaaatcatataaaataaaatgaaataaaacaaggaggaaggcaaccagctgttaggggaaaaataaggcagataaaggagcggggagagaaattaattgccaaccaggaggagttgggctgtatttttcaaaggtggggagagtggagcacacaccttgaggaggaaagcgagaaagaaaagaaaaaagcaagtgaaggggggctcgcccaagaagggtgaagaagcgaagaaagtcgaggcgccgaggctcccaaagctggcagctccgggtggcggtgcaggggcgaaggggggggcggggggaacgtcggacatgcggctctggagttgggtgctgcacctggggctgctgagcgccgcgctgggctgcgggctggccgagcgtccccgccgggcccggagagacccgcgggccggccgacccccgcgccccgccgccggcccggccacctgcgccacccgcggcccgcggccgccgcgcctcgccgccgccgccgccgccgccgggcggtgcctgggaagccgtgcgcgtcccccggcggcggcagcagcgggaggcgaggggcgccaccgaggagccgagcccgccgagccgggcgctctatttcagcgggcgaggcgagcagctgcgcctccgggccgacctcgagctgccccgggacgcgttcacgctgcaagtgtggctgcgagcggaggggggccagaggtctccggcagtgatcacagggctgtatgacaaatgttcttatatctcacgtgaccgaggatgggtcgtgggcattcacaccatcagtgaccaagacaacaaagacccacgctactttttctccttgaagacagaccgagcccggcaagtgaccaccatcaatgcccaccgcagctacctcccaggccagtgggtatacctagctgccacctatgatgggcagttcatgaagctctatgtgaatggtgcccaggtggccacctctggggaacaagtgggtggcatattcagcccactgacccagaagtgcaaagtgctcatgttagggggcagtgccctgaatcacaactaccggggctacatcgagcacttcagtctgtggaaggtggccaggactcagcgggagatactgtctgacatggaaacccatggcgcccacactgctctacctcagctcctcctccaggagaactgggacaatgtgaagcatgcctggtcccccatgaaggatggcagcagccccaaagtggaattcagcaatgcccacggctttctgctggacacgagtctggagcctcctctgtgcggacagacattgtgtgacaacacagaggtcattgccagctacaatcagctctcaagtttccgccagcccaaggtggtgcgctaccgcgtggtcaacctctatgaagatgatcataagaacccgacggtgacgcgcgagcaggtggacttccagcaccatcagctggctgaggccttcaagcaatacaacatctcctgggagctggacgtgctggaggtgagcaactcctcccttcgccgccgcctcatcctggccaactgtgacatcagcaagattggggatgagaactgtgaccccgagtgcaaccacacgctgacgggccacgacggcggggattgccgccacctgcgccaccctgccttcgtgaagaagcagcacaacggggtgtgtgacatggactgcaactatgaacggttcaactttgatggtggagagtgctgtgaccctgaaatcaccaatgtcactcagacttgctttgaccccgactctccacacagagcctacttggatgttaatgagctgaagaacattcttaaattggatggatcaacacatctcaatattttctttgcaaaatcctcagaggaggagttggcaggagtagcaacttggccatgggacaaggaggccctgatgcacttaggtggcattgtcttgaacccatctttctatggcatgcctgggcacacccacaccatgatccatgagattggtcacagcctgggcctctatcacgtcttccgaggcatctcagaaatccagtcctgcagtgacccctgcatggagacagagccctccttcgagactggagacctctgcaatgataccaacccagcccctaaacacaagtcctgtggtgacccagggccaggaaatgacacctgtggctttcatagcttcttcaacactccttacaacaacttcatgagctatgcagatgacgactgtacggactccttcacgcccaatcaagtcgccagaatgcactgttacctggacctggtctaccagggctggcagccctccaggaaaccagcgcctgttgccctcgccccccaagttctgggccacacaacggactctgtgacactggagtggttcccacctatagatggccatttctttgaaagagaattgggatcagcatgtcatctttgcctggaagggagaatcctggtgcagtatgcttccaacgcttcctccccaatgccctgcagcccatcaggacactggagccctcgtgaagcagaaggtcatcctgatgttgaacagccctgtaagtccagtgtccgcacctggagcccaaattcagctgtcaacccacacacggttcctccagcctgccctgagcctcaaggctgctacctcgagctggagttcctctaccccttggtccctgagtctctgaccatttgggtgacctttgtctccactgactgggactctagtggagctgtcaatgacatcaaactgttggctgtcagtgggaagaacatctccctgggtcctcagaatgtcttctgtgatgtcccactgaccatcagactctgggacgtgggcgaggaggtgtatggcatccaaatctacacgctggatgagcacctggagatcgatgctgccatgttgacctccactgcagacaccccactctgtctacagtgtaagcccctgaagtataaggtggtccgggaccctcctctccagatggatgtggcctccatcctacatctcaataggaaattcgtagacatggatctaaatcttggcagtgtgtaccagtattgggtcataactatttcaggaactgaagagagtgagccatcacctgctgtcacatacatccatggaagtgggtactgtggcgatggcattatacaaaaagaccaaggtgaacaatgcgacgacatgaataagatcaatggtgatggctgctcccttttctgccgacaagaagtctccttcaattgtattgatgaacccagccggtgctatttccatgatggtgatggggtagttcaacttctacaccatccttaaagaaaatcatatatggggtcacaccatcctcacggtagtccaatagagcaaccatgccatctggattcatgttttcaccaataaagaactggtagtttttgaaattagcaaggatgtgcttgatttgttctgcagcccctgtcataaaaggttttactctttctggtctctgttcttctacta

SEQ ID NO: 455105 - DNA, 3360 bp, Homo sapiens
tactgatgtgattgcagtgagcccaccattgaataactcttactcgagcttttcccgtctaaatctagtccgttatcctgctttctagtcttcactctccatcagtcatctatatgcatactactccgagctaaggacagattctcatggaggtcatgactttgttagtcattccgtactcacagaagttgaattctaggcatcttcgtgaattcataggacgctcacgctcgagatacatactttcagtgtacaagggacccattgggttgcgtaagcatagattatatgagtatgtgcgctaagggtatatcaggcaaaagagaggctacgtatgattggtgagccagtcctcgggcccacttggaacggtatctaataatagggtctgagcaagcctatagtggagaggacgggctcagtcctcacaatgtctggtgcgagagctaatttggtatccctagattgacatttgacttccatggagaattaatcgtacgtcgtcatttcattccttcagtcatcttctgtgtaggtgaccggagcactgagaggcagctctgatgcactattgtgtgtcagcagctcaaaggccctaaaacactgaaggttctgcatctgaagtattagattgttagcagcaaaatatgaaagatgaggtggacagtcctctaagccctatttagggaagcttttccaagccacaatcttaactacctacccaaaggatttgcattacccccagattctgtgccaacaaccttttaaggaaatacagtccttgggaaatgagttttgatggtgaattggggtgttaaggaagggaaagattgtcatagatggtagggctttgaaaatgcagggtatcagctgccactcctggcttcaacacattgagtcactgcctagacggttctcttggtcttattcccatcctggccaatgcttaaatactatttgttgaaaataattctttgagacagatttcagctacctcccttccaggttcgatttaacttggttgtaattgtcaatttgttgttataggtcttacctgtgtgaaagaaagaaaaagaaagaaagaaagaaagagaaaggaaattataaggtcaagttaacagttttgaggttttgtgtttttttctggaactacttcaagtgagaaaataaaaaaaaatggtgacaaagctgtacagatagagataatagaagacaaagagattaaaaggaaataaaaatgcatgattaaaaactaagaataaaaaacctatttttatgtttcctaaaggaaattgtttattctacagactcagtaggtagacacaaacataaagatttccctagaagacatagagtgggatttgataacactgtctgttattttctgtacattgtggtaggtccaggaaatatgacattttcccccttgatgtgttattgttgttgttgggtggggtgggcattttgtttatttgtttggtggcaatcagtggtagtagggagtgggagggcttatattggtttttccagctattaaggggacatattgtgtcgttgtgcttttcacgttataaaatgtttatatttaccagtacagcactgggctttataaagactgcactcagaaccacactgcacagtccagttttttaaaaagctgctacatgacagacaggtaatcccactgagtgagttttgagaaacaaatcaaacgaagtaaacaagaaacataaaaaccaaatagcaaatgaataaaagcctgttcttgtaacttattcaacttttgccaaattcctaccaatcacttgctttttaaaagaaatgtataatagccaaaagagaaattatgtccctgttgtacagaagttagaatttttgactccaggcagcagtttgctcagtgatcttgaacaagttatccaattgcctctacatttgcatcagtttctctagctgcaaaatggggataatactatatacctacctcacagtgggagggcaggagattttgaggccctgaggttttaggtgggctgtgagggccaacgcttgacacaaagtccatgggttattattcaagaatgcacaggcccatcggccttttagaaagacaagacagggagtgcttgtttgatatttcaaggaataaagccggagctcctgaattgtagtccaccttaaaagagagacctgtattggagaatattttatttttttggcaaatttgatcttaccctttaccagttctataatttggttaaaagctgattacgtcctacaatgtcaaagtcagctaactgtcgtctacttaagacttctggtcatttccaacttatagaggaagggagtctctaaaatctcttcttcagaaggcacctcacttctcagacttaaaattccacatcaagtgttccattaaaagaagataaggcattctgagtgcaaacaaatgggggcttcttaaactacacaccagcagtcagtgaggaaaactttgaacaattattgagttgctttcttgggtctctataatcaataacctgtctgcagatatctatctatataaagatattatatataaatataaatttacatatatatgcacatgtatatatagttgtacatatatgtgtgtatatatatacttaaatgtaatatttacaaaataaaactgtgatctcgtctagagaaaatgtattcatattacaaactgctcttccatatttatgtaccatattatacctttttattattgttataattattatgggtatttctaattaatatgatgttgaaacctgtttggcaccttctggaagctaccaaaaaaatgacactccattgaagtgcttaaaagctgttctcataagaattctactggcctattgtaaaaaagaaaaaaaaaagaaaaagaagaaagacacaaagaaaataatctaaacaccaaaaactaaacacaattccaatcctttttctgtacctcacgcgcataaatttggctgctcctatttttttttctgtttatgtgtttttatggatctaagttaaatcttttggcaatatataaaaatgtaaatagtaaactttatttattaagaatgtcatcttttttaatttatatttacacaattgttcatctaatttattttttctatacagttttaaatactcagacatattttgctgttcatgatatttttatcctgttctcatggatttgttttcccatactgttttctctgatctcaattacaggttggatctcacaaataataatgtcagagacagaaatattttgccactgttgattactatactttaaagttctatattatgaaaatatataatagcttgtacgct

SEQ ID NO: 455106 - DNA, 6335 bp, Homo sapiens
ctgtccaggttgagtgagggtgtccaggatgaggaatgagggtgtccagggtgaggagtgagggagtccagggtgaggagtgagggagtccagggtgaggattgagggtgtcagggtgagtgagagtgtccagggtgaggagtgagggtatccagggtgagtgagggtgtccagggtgaggagtgagggtatccagggtgagtgagggtgtccagggtgagtgagggtgtcagggtgagtgaacgtgtccagggtgtgtgagggtgtccagggtgcagagtgaggtgtccagggtgaggagtgacggtgtctggggtgagtgagggtgtccagggtgaggagtgagggtgtcagggtgagtgagggtgtccagggttgagtgcacatgtgtggtgaggaggtgtttgcagtgcttcaggcgcagcaactctttcatctagtttaaaattgtgctctgaggttagattttagtagaacaaaggccttacaaagaatgtgaaaacattgtgcttccctgcttacaggcaattaaaaaggagaatcaagctgagggtgcctggtgtggggtggggtggagaagaccacagagactattgtgtgttttattcaacagtgtcctgggctgctttctccagaaatgtccctgacacatggatgtaagtgtggctagtttactgggagatgatcccagtgatgcaggacacgcgagccctaagattgaagcatagcccgggagggttcttagctttgcccaggaaggaactcaaggcaagccagtggtgttagcaacttttattgaagcggccggctgtgcacagcagcagcagaggcgctgctccttgcaaagcagggctgccctacaggctgtgcgcccacagtagcagctcagaggcagttctgcagtggtatttgtatccacttttaattatatgcaaatgaaggggcagtttatgcagacatttccagggtgagggtggtaacttctgggtgctgccagagccatcgtgaactgacttgacacaggtcggtgtgtcctatggaaactagcatctgccctggacctattttagctagtgctcagtttggtctgagtgcctgagccccacttccagagttgagtcccacctcctacctcattcccccttcagagattagatactcctccttaatcttaagggggcctcgagaagggcggagtcctgcttttccgtaactacttcctgctgagtttatggcacgtaggccctgcctggcactggaggacgtaaaaatttctggatacctgatctaaggagcccagaggcaggacgatttcattctccgtgtcagtggacaggatgggctggaagccttgtgccagcattgtctctggaactgtggtaatctagaatacacaaactttactaagaggttaaagaagcaaggaccaaacatttgtaacaagacagttgtcaaaggtcctagaagaggtgaaaaacaggtgagacttgggaaggcacttttgatggttgaccagatatagttggggcagtgccctggttatatctatgtaactaggtagcttgctcatagatcttttgaatgttaacctcaacctgtccagagttaatatatgtgcagcaggttttattaataactgcacaagaccccaccttgttcagctagtaaataatccaatgctagtctgttatcaacaactacattttccagagtctggggaactcttgaattctctttaatgcctgatctccgttggtggctaaggattctaggatttgagccaagttctttagcgttaactcatggtaggcaaagcaccccagggtgctgctagtcctattgccaccctgattcctgccagaaataagtaagcaagcaacaggacaatgaactccatgttgcccagatcccactgagagtgaacgtgcagtcatgcccataaccgacacacatcccagtccatgtgggtcagtccttcatcaccctccctgccttctgacaacagcagactccagccattccattatcattcacagcccaacccaagcagtcagtggctgaagaaagagaatcaggtatactctatgtccacatataccttcctgccacagggcttcaccaactggcaggattccccccagcccccaactcctcctcatcccttgttcccaggcgggtcaattggagagtgagcagagatagatggcttgcagaagggtatgcaagatggggagactccaccagaccttagggagagaatggcatctttctccaccttttaagagagacagagcctccctgaggtctcaaagatttttcagggcaacacaagaaacgtttccaagcctcagctgcaggtgttcacctttccactctggggtgtgaggagatggtaagctgaggacaagtgtgttccagatgcaggccaactctgttctccaacagtttgaaccaacttggccttggggttccaagggtaggatgaagggtgtcacggcaggacggggcctggcgtgaggcaacagcaagcagagcgaggacacaacagtggcagcagtgtacagacacaggacgtcagcttcaaacgatgcaacagcagggatatcttgggcacggctctgattcgagccactcccaactctcttgcctccaggatggaggcactgtacatgcaacagtccagagaaagattctagccagtccaagcccaggcacatccagagaaggtgggagctcttcgggttgactccaccgaggaaaacaggcatttgggtatttcagattcccgctccacaataaggcaacttttaaaaaaatattatttccaaaaacaaaacaaaaattccagggggagggaattcagcggatcagtcttaagaggagcttttttttggagcgagaaatcatataaaataaaatgaaataaaacaaggaggaaggcaaccagctgttaggggaaaaataaggcagataaaggagcggggagagaaattaattgccaaccaggaggagttgggctgtatttttcaaaggtggggagagtggagcacacaccttgaggaggaaagcgagaaagaaaagaaaaaagcaagtgaaggggggctcgcccaagaagggtgaagaagcgaagaaagtcgaggcgccgaggctcccaaagctggcagctccgggtggcggtgcaggggcgaaggggggggcggggggaacgtcggacatgcggctctggagttgggtgctgcacctggggctgctgagcgccgcgctgggctgcgggctggccgagcgtccccgccgggcccggagagacccgcgggccggccgacccccgcgccccgccgccggcccggccacctgcgccacccgcggcccgcggccgccgcgcctcgccgccgccgccgccgccgccgggcggtgcctgggaagccgtgcgcgtcccccggcggcggcagcagcgggaggcgaggggcgccaccgaggagccgagcccgccgagccgggcgctctatttcagcgggcgaggcgagcagctgcgcctccgggccgacctcgagctgccccgggacgcgttcacgctgcaagtgtggctgcgagcggaggggggccagaggtctccggcagtgatcacagggctgtatgacaaatgttcttatatctcacgtgaccgaggatgggtcgtgggcattcacaccatcagtgaccaagacaacaaagacccacgctactttttctccttgaagacagaccgagcccggcaagtgaccaccatcaatgcccaccgcagctacctcccaggccagtgggtatacctagctgccacctatgatgggcagttcatgaagctctatgtgaatggtgcccaggtggccacctctggggaacaagtgggtggcatattcagcccactgacccagaagtgcaaagtgctcatgttagggggcagtgccctgaatcacaactaccggggctacatcgagcacttcagtctgtggaaggtggccaggactcagcgggagatactgtctgacatggaaacccatggcgcccacactgctctacctcagctcctcctccaggagaactgggacaatgtgaagcatgcctggtcccccatgaaggatggcagcagccccaaagtggaattcagcaatgcccacggctttctgctggacacgagtctggagcctcctctgtgcggacagacattgtgtgacaacacagaggtcattgccagctacaatcagctctcaagtttccgccagcccaaggtggtgcgctaccgcgtggtcaacctctatgaagatgatcataagaacccgacggtgacgcgcgagcaggtggacttccagcaccatcagctggctgaggccttcaagcaatacaacatctcctgggagctggacgtgctggaggtgagcaactcctcccttcgccgccgcctcatcctggccaactgtgacatcagcaagattggggatgagaactgtgaccccgagtgcaaccacacgctgacgggccacgacggcggggattgccgccacctgcgccaccctgccttcgtgaagaagcagcacaacggggtgtgtgacatggactgcaactatgaacggttcaactttgatggtggagagtgctgtgaccctgaaatcaccaatgtcactcagacttgctttgaccccgactctccacacagagcctacttggatgttaatgagctgaagaacattcttaaattggatggatcaacacatctcaatattttctttgcaaaatcctcagaggaggagttggcaggagtagcaacttggccatgggacaaggaggccctgatgcacttaggtggcattgtcttgaacccatctttctatggcatgcctgggcacacccacaccatgatccatgagattggtcacagcctgggcctctatcacgtcttccgaggcatctcagaaatccagtcctgcagtgacccctgcatggagacagagccctccttcgagactggagacctctgcaatgataccaacccagcccctaaacacaagtcctgtggtgacccagggccaggaaatgacacctgtggctttcatagcttcttcaacactccttacaacaacttcatgagctatgcagatgacgactgtacggactccttcacgcccaatcaagtcgccagaatgcactgttacctggacctggtctaccagggctggcagccctccaggaaaccagcgcctgttgccctcgccccccaagttctgggccacacaacggactctgtgacactggagtggttcccacctatagatggccatttctttgaaagagaattgggatcagcatgtcatctttgcctggaagggagaatcctggtgcagtatgcttccaacgcttcctccccaatgccctgcagcccatcaggacactggagccctcgtgaagcagaaggtcatcctgatgttgaacagccctgtaagtccagtgtccgcacctggagcccaaattcagctgtcaacccacacacggttcctccagcctgccctgagcctcaaggctgctacctcgagctggagttcctctaccccttggtccctgagtctctgaccatttgggtgacctttgtctccactgactgggactctagtggagctgtcaatgacatcaaactgttggctgtcagtgggaagaacatctccctgggtcctcagaatgtcttctgtgatgtcccactgaccatcagactctgggacgtgggcgaggaggtgtatggcatccaaatctacacgctggatgagcacctggagatcgatgctgccatgttgacctccactgcagacaccccactctgtctacagtgtaagcccctgaagtataaggtggtccgggaccctcctctccagatggatgtggcctccatcctacatctcaataggaaattcgtagacatgtaagtgcattctctgaatagggagtttattaagtgggtgggttgtggaggaacgtgaggtgggtcagagaggcctggacagggggaaggttcatcacagtcaagactcactctatggattgtaacccatcattgggtgtagatttgtcttaacatggcagagttgatatcatgggaagagcaatagggaaggaaccattagacctggatttagtgacaaatctgatgtgtgaccttaagcctcataagcctttcttaatcttagtcattccaatagtaaatgaaggaggttggatgagagtagcagtgagaaaatcatttattactaatgaaagtagaagaactgaagtttgctaatgattttctttttatattaaattgaagacaattt

SEQ ID NO: 455107 - DNA, 5087 bp, Homo sapiens
ctgtccaggttgagtgagggtgtccaggatgaggaatgagggtgtccagggtgaggagtgagggagtccagggtgaggagtgagggagtccagggtgaggattgagggtgtcagggtgagtgagagtgtccagggtgaggagtgagggtatccagggtgagtgagggtgtccagggtgaggagtgagggtatccagggtgagtgagggtgtccagggtgagtgagggtgtcagggtgagtgaacgtgtccagggtgtgtgagggtgtccagggtgcagagtgaggtgtccagggtgaggagtgacggtgtctggggtgagtgagggtgtccagggtgaggagtgagggtgtcagggtgagtgagggtgtccagggttgagtgcacatgtgtggtgaggaggtgtttgcagtgcttcaggcgcagcaactctttcatctagtttaaaattgtgctctgaggttagattttagtagaacaaaggccttacaaagaatgtgaaaacattgtgcttccctgcttacaggcaattaaaaaggagaatcaagctgagggtgcctggtgtggggtggggtggagaagaccacagagactattgtgtgttttattcaacagtgtcctgggctgctttctccagaaatgtccctgacacatggatgtaagtgtggctagtttactgggagatgatcccagtgatgcaggacacgcgagccctaagattgaagcatagcccgggagggttcttagctttgcccaggaaggaactcaaggcaagccagtggtgttagcaacttttattgaagcggccggctgtgcacagcagcagcagaggcgctgctccttgcaaagcagggctgccctacaggctgtgcgcccacagtagcagctcagaggcagttctgcagtggtatttgtatccacttttaattatatgcaaatgaaggggcagtttatgcagacatttccagggtgagggtggtaacttctgggtgctgccagagccatcgtgaactgacttgacacaggtcggtgtgtcctatggaaactagcatctgccctggacctattttagctagtgctcagtttggtctgagtgcctgagccccacttccagagttgagtcccacctcctacctcattcccccttcagagattagatactcctccttaatcttaagggggcctcgagaagggcggagtcctgcttttccgtaactacttcctgctgagtttatggcacgtaggccctgcctggcactggaggacgtaaaaatttctggatacctgatctaaggagcccagaggcaggacgatttcattctccgtgtcagtggacaggatgggctggaagccttgtgccagcattgtctctggaactgtggtaatctagaatacacaaactttactaagaggttaaagaagcaaggaccaaacatttgtaacaagacagttgtcaaaggtcctagaagaggtgaaaaacaggtgagacttgggaaggcacttttgatggttgaccagatatagttggggcagtgccctggttatatctatgtaactaggtagcttgctcatagatcttttgaatgttaacctcaacctgtccagagttaatatatgtgcagcaggttttattaataactgcacaagaccccaccttgttcagctagtaaataatccaatgctagtctgttatcaacaactacattttccagagtctggggaactcttgaattctctttaatgcctgatctccgttggtggctaaggattctaggatttgagccaagttctttagcgttaactcatggtaggcaaagcaccccagggtgctgctagtcctattgccaccctgattcctgccagaaataagtaagcaagcaacaggacaatgaactccatgttgcccagatcccactgagagtgaacgtgcagtcatgcccataaccgacacacatcccagtccatgtgggtcagtccttcatcaccctccctgccttctgacaacagcagactccagccattccattatcattcacagcccaacccaagcagtcagtggctgaagaaagagaatcaggtatactctatgtccacatataccttcctgccacagggcttcaccaactggcaggattccccccagcccccaactcctcctcatcccttgttcccaggcgggtcaattggagagtgagcagagatagatggcttgcagaagggtatgcaagatggggagactccaccagaccttagggagagaatggcatctttctccaccttttaagagagacagagcctccctgaggtctcaaagatttttcagggcaacacaagaaacgtttccaagcctcagctgcaggtgttcacctttccactctggggtgtgaggagatggtaagctgaggacaagtgtgttccagatgcaggccaactctgttctccaacagtttgaaccaacttggccttggggttccaagggtaggatgaagggtgtcacggcaggacggggcctggcgtgaggcaacagcaagcagagcgaggacacaacagtggcagcagtgtacagacacaggacgtcagcttcaaacgatgcaacagcagggatatcttgggcacggctctgattcgagccactcccaactctcttgcctccaggatggaggcactgtacatgcaacagtccagagaaagattctagccagtccaagcccaggcacatccagagaaggtgggagctcttcgggttgactccaccgaggaaaacaggcatttgggtatttcagattcccgctccacaataaggcaacttttaaaaaaatattatttccaaaaacaaaacaaaaattccagggggagggaattcagcggatcagtcttaagaggagcttttttttggagcgagaaatcatataaaataaaatgaaataaaacaaggaggaaggcaaccagctgttaggggaaaaataaggcagataaaggagcggggagagaaattaattgccaaccaggaggagttgggctgtatttttcaaaggtggggagagtggagcacacaccttgaggaggaaagcgagaaagaaaagaaaaaagcaagtgaaggggggctcgcccaagaagggtgaagaagcgaagaaagtcgaggcgccgaggctcccaaagctggcagctccgggtggcggtgcaggggcgaaggggggggcggggggaacgtcggacatgcggctctggagttgggtgctgcacctggggctgctgagcgccgcgctgggctgcgggctggccgagcgtccccgccgggcccggagagacccgcgggccggccgacccccgcgccccgccgccggcccggccacctgcgccacccgcggcccgcggccgccgcgcctcgccgccgccgccgccgccgccgggcggtgcctgggaagccgtgcgcgtcccccggcggcggcagcagcgggaggcgaggggcgccaccgaggagccgagcccgccgagccgggcgctctatttcagcgggcgaggcgagcagctgcgcctccgggccgacctcgagctgccccgggacgcgttcacgctgcaagtgtggctgcgagcggaggggggccagaggtctccggcagtgatcacagggctgtatgacaaatgttcttatatctcacgtgaccgaggatgggtcgtgggcattcacaccatcagtgaccaagacaacaaagacccacgctactttttctccttgaagacagaccgagcccggcaagtgaccaccatcaatgcccaccgcagctacctcccaggccagtgggtatacctagctgccacctatgatgggcagttcatgaagctctatgtgaatggtgcccaggtggccacctctggggaacaagtgggtggcatattcagcccactgacccagaagtgcaaagtgctcatgttagggggcagtgccctgaatcacaactaccggggctacatcgagcacttcagtctgtggaaggtggccaggactcagcgggagatactgtctgacatggaaacccatggcgcccacactgctctacctcagctcctcctccaggagaactgggacaatgtgaagcatgcctggtcccccatgaaggatggcagcagccccaaagtggaattcagcaatgcccacggctttctgctggacacgagtctggagcctcctctgtgcggacagacattgtgtgacaacacagaggtcattgccagctacaatcagctctcaagtttccgccagcccaaggtggtgcgctaccgcgtggtcaacctctatgaagatgatcataagaacccgacggtgacgcgcgagcaggtggacttccagcaccatcagctggctgaggccttcaagcaatacaacatctcctgggagctggacgtgctggaggtgagcaactcctcccttcgccgccgcctcatcctggccaactgtgacatcagcaagattggggatgagaactgtgaccccgagtgcaaccacacgctgacgggccacgacggcggggattgccgccacctgcgccaccctgccttcgtgaagaagcagcacaacggggtgtgtgacatggactgcaactatgaacggttcaactttgatggtggagagtgctgtgaccctgaaatcaccaatgtcactcagacttgctttgaccccgactctccacacagagcctacttggatgttaatgagctgaagaacattcttaaattggatggatcaacacatctcaatattttctttgcaaaatcctcagaggaggagttggcaggagtagcaacttggccatgggacaaggaggccctgatgcacttaggtggcattgtcttgaacccatctttctatggcatgcctgggcacacccacaccatgatccatgagattggtcacagcctgggcctctatcacgtcttccgaggcatctcagaaatccagtcctgcagtgacccctgcatggagacagagccctccttcgagactggagacctctgcaatgataccaaccctcggaagacgtgatagaggcccaggctgtgaccaatctcatggggccattcaacgcctccg

SEQ ID NO: 455108 - DNA, 4630 bp, Homo sapiens
  misc_feature (4616)..(4616): n is a, c, g, or t
ctgtccaggttgagtgagggtgtccaggatgaggaatgagggtgtccagggtgaggagtgagggagtccagggtgaggagtgagggagtccagggtgaggattgagggtgtcagggtgagtgagagtgtccagggtgaggagtgagggtatccagggtgagtgagggtgtccagggtgaggagtgagggtatccagggtgagtgagggtgtccagggtgagtgagggtgtcagggtgagtgaacgtgtccagggtgtgtgagggtgtccagggtgcagagtgaggtgtccagggtgaggagtgacggtgtctggggtgagtgagggtgtccagggtgaggagtgagggtgtcagggtgagtgagggtgtccagggttgagtgcacatgtgtggtgaggaggtgtttgcagtgcttcaggcgcagcaactctttcatctagtttaaaattgtgctctgaggttagattttagtagaacaaaggccttacaaagaatgtgaaaacattgtgcttccctgcttacaggcaattaaaaaggagaatcaagctgagggtgcctggtgtggggtggggtggagaagaccacagagactattgtgtgttttattcaacagtgtcctgggctgctttctccagaaatgtccctgacacatggatgtaagtgtggctagtttactgggagatgatcccagtgatgcaggacacgcgagccctaagattgaagcatagcccgggagggttcttagctttgcccaggaaggaactcaaggcaagccagtggtgttagcaacttttattgaagcggccggctgtgcacagcagcagcagaggcgctgctccttgcaaagcagggctgccctacaggctgtgcgcccacagtagcagctcagaggcagttctgcagtggtatttgtatccacttttaattatatgcaaatgaaggggcagtttatgcagacatttccagggtgagggtggtaacttctgggtgctgccagagccatcgtgaactgacttgacacaggtcggtgtgtcctatggaaactagcatctgccctggacctattttagctagtgctcagtttggtctgagtgcctgagccccacttccagagttgagtcccacctcctacctcattcccccttcagagattagatactcctccttaatcttaagggggcctcgagaagggcggagtcctgcttttccgtaactacttcctgctgagtttatggcacgtaggccctgcctggcactggaggacgtaaaaatttctggatacctgatctaaggagcccagaggcaggacgatttcattctccgtgtcagtggacaggatgggctggaagccttgtgccagcattgtctctggaactgtggtaatctagaatacacaaactttactaagaggttaaagaagcaaggaccaaacatttgtaacaagacagttgtcaaaggtcctagaagaggtgaaaaacaggtgagacttgggaaggcacttttgatggttgaccagatatagttggggcagtgccctggttatatctatgtaactaggtagcttgctcatagatcttttgaatgttaacctcaacctgtccagagttaatatatgtgcagcaggttttattaataactgcacaagaccccaccttgttcagctagtaaataatccaatgctagtctgttatcaacaactacattttccagagtctggggaactcttgaattctctttaatgcctgatctccgttggtggctaaggattctaggatttgagccaagttctttagcgttaactcatggtaggcaaagcaccccagggtgctgctagtcctattgccaccctgattcctgccagaaataagtaagcaagcaacaggacaatgaactccatgttgcccagatcccactgagagtgaacgtgcagtcatgcccataaccgacacacatcccagtccatgtgggtcagtccttcatcaccctccctgccttctgacaacagcagactccagccattccattatcattcacagcccaacccaagcagtcagtggctgaagaaagagaatcaggtatactctatgtccacatataccttcctgccacagggcttcaccaactggcaggattccccccagcccccaactcctcctcatcccttgttcccaggcgggtcaattggagagtgagcagagatagatggcttgcagaagggtatgcaagatggggagactccaccagaccttagggagagaatggcatctttctccaccttttaagagagacagagcctccctgaggtctcaaagatttttcagggcaacacaagaaacgtttccaagcctcagctgcaggtgttcacctttccactctggggtgtgaggagatggtaagctgaggacaagtgtgttccagatgcaggccaactctgttctccaacagtttgaaccaacttggccttggggttccaagggtaggatgaagggtgtcacggcaggacggggcctggcgtgaggcaacagcaagcagagcgaggacacaacagtggcagcagtgtacagacacaggacgtcagcttcaaacgatgcaacagcagggatatcttgggcacggctctgattcgagccactcccaactctcttgcctccaggatggaggcactgtacatgcaacagtccagagaaagattctagccagtccaagcccaggcacatccagagaaggtgggagctcttcgggttgactccaccgaggaaaacaggcatttgggtatttcagattcccgctccacaataaggcaacttttaaaaaaatattatttccaaaaacaaaacaaaaattccagggggagggaattcagcggatcagtcttaagaggagcttttttttggagcgagaaatcatataaaataaaatgaaataaaacaaggaggaaggcaaccagctgttaggggaaaaataaggcagataaaggagcggggagagaaattaattgccaaccaggaggagttgggctgtatttttcaaaggtggggagagtggagcacacaccttgaggaggaaagcgagaaagaaaagaaaaaagcaagtgaaggggggctcgcccaagaagggtgaagaagcgaagaaagtcgaggcgccgaggctcccaaagctggcagctccgggtggcggtgcaggggcgaaggggggggcggggggaacgtcggacatgcggctctggagttgggtgctgcacctggggctgctgagcgccgcgctgggctgcgggctggccgagcgtccccgccgggcccggagagacccgcgggccggccgacccccgcgccccgccgccggcccggccacctgcgccacccgcggcccgcggccgccgcgcctcgccgccgccgccgccgccgccgggcggtgcctgggaagccgtgcgcgtcccccggcggcggcagcagcgggaggcgaggggcgccaccgaggagccgagcccgccgagccgggcgctctatttcagcgggcgaggcgagcagctgcgcctccgggccgacctcgagctgccccgggacgcgttcacgctgcaagtgtggctgcgagcggaggggggccagaggtctccggcagtgatcacagggctgtatgacaaatgttcttatatctcacgtgaccgaggatgggtcgtgggcattcacaccatcagtgaccaagacaacaaagacccacgctactttttctccttgaagacagaccgagcccggcaagtgaccaccatcaatgcccaccgcagctacctcccaggccagtgggtatacctagctgccacctatgatgggcagttcatgaagctctatgtgaatggtgcccaggtggccacctctggggaacaagtgggtggcatattcagcccactgacccagaagtgcaaagtgctcatgttagggggcagtgccctgaatcacaactaccggggctacatcgagcacttcagtctgtggaaggtggccaggactcagcgggagatactgtctgacatggaaacccatggcgcccacactgctctacctcagctcctcctccaggagaactgggacaatgtgaagcatgcctggtcccccatgaaggatggcagcagccccaaagtggaattcagcaatgcccacggctttctgctggacacgagtctggagcctcctctgtgcggacagacattgtgtgacaacacagaggtcattgccagctacaatcagctctcaagtttccgccagcccaaggtggtgcgctaccgcgtggtcaacctctatgaagatgatcataagaacccgacggtgacgcgcgagcaggtggacttccagcaccatcagctggctgaggccttcaagcaatacaacatctcctgggagctggacgtgctggaggtgagcaactcctcccttcgccgccgcctcatcctggccaactgtgacatcagcaagattggggatgagaactgtgaccccgagtgcaaccacacgctgacgggccacgacggcggggattgccgccacctgcgccaccctgccttcgtgaagaagcagcacaacggggtgtgtgacatggactgcaactggtacagcggggggatnctctataacgagca

SEQ ID NO: 455109 - DNA, 778 bp, Homo sapiens
aacagtgtacgagtcgagccggacccaatccattccagcgtagatatgtgtgtatatatatacttaaatgtaatatttacaaaataaaactgtgatctcgtctagagaaaatgtattcatattacaaactgctcttccatatttatgtaccatattatacctttttattattgttataattattatgggtatttctaattaatatgatgttgaaacctgtttggcaccttctggaagctaccaaaaaaatgacactccattgaagtgcttaaaagctgttctcataagaattctactggcctattgtaaaaaagaaaaaaaaaagaaaaagaagaaagacacaaagaaaataatctaaacaccaaaaactaaacacaattccaatcctttttctgtacctcacgcgcataaatttggctgctcctatttttttttctgtttatgtgtttttatggatctaagttaaatcttttggcaatatataaaaatgtaaatagtaaactttatttattaagaatgtcatcttttttaatttatatttacacaattgttcatctaatttattttttctatacagttttaaatactcagacatattttgctgttcatgatatttttatcctgttctcatggatttgttttcccatactgttttctctgatctcaattacaggttggatctcacaaataataatgtcagagacagaaatattttgccactgttgattactatactttaaagttctatattatgaaaatatataatagcttgtacgct

SEQ ID NO: 455110 - DNA, 709 bp, Homo sapiens
aacagtgtacgagtcgagccggacccaatccattccagcgtaggtattcatattacaaactgctcttccatatttatgtaccatattatacctttttattattgttataattattatgggtatttctaattaatatgatgttgaaacctgtttggcaccttctggaagctaccaaaaaaatgacactccattgaagtgcttaaaagctgttctcataagaattctactggcctattgtaaaaaagaaaaaaaaaagaaaaagaagaaagacacaaagaaaataatctaaacaccaaaaactaaacacaattccaatcctttttctgtacctcacgcgcataaatttggctgctcctatttttttttctgtttatgtgtttttatggatctaagttaaatcttttggcaatatataaaaatgtaaatagtaaactttatttattaagaatgtcatcttttttaatttatatttacacaattgttcatctaatttattttttctatacagttttaaatactcagacatattttgctgttcatgatatttttatcctgttctcatggatttgttttcccatactgttttctctgatctcaattacaggttggatctcacaaataataatgtcagagacagaaatattttgccactgttgattactatactttaaagttctatattatgaaaatatataatagcttgtacgct

SEQ ID NO: 455111 - DNA, 775 bp, Homo sapiens
aacagtgtacgagtcgagccggacccaatccattccagcgtagaccagtgaggacgagctactctcttctaaagcaaaggcagtgagaaagactcggaattttatcattgtattcatattacaaactgctcttccatatttatgtaccatattatacctttttattattgttataattattatgggtatttctaattaatatgatgttgaaacctgtttggcaccttctggaagctaccaaaaaaatgacactccattgaagtgcttaaaagctgttctcataagaattctactggcctattgtaaaaaagaaaaaaaaaagaaaaagaagaaagacacaaagaaaataatctaaacaccaaaaactaaacacaattccaatcctttttctgtacctcacgcgcataaatttggctgctcctatttttttttctgtttatgtgtttttatggatctaagttaaatcttttggcaatatataaaaatgtaaatagtaaactttatttattaagaatgtcatcttttttaatttatatttacacaattgttcatctaatttattttttctatacagttttaaatactcagacatattttgctgttcatgatatttttatcctgttctcatggatttgttttcccatactgttttctctgatctcaattacaggttggatctcacaaataataatgtcagagacagaaatattttgccactgttgattactatactttaaagttctatattatgaaaatatataatagcttgtacgct

SEQ ID NO: 455112 - DNA, 3797 bp, Homo sapiens
ctgtccaggttgagtgagggtgtccaggatgaggaatgagggtgtccagggtgaggagtgagggagtccagggtgaggagtgagggagtccagggtgaggattgagggtgtcagggtgagtgagagtgtccagggtgaggagtgagggtatccagggtgagtgagggtgtccagggtgaggagtgagggtatccagggtgagtgagggtgtccagggtgagtgagggtgtcagggtgagtgaacgtgtccagggtgtgtgagggtgtccagggtgcagagtgaggtgtccagggtgaggagtgacggtgtctggggtgagtgagggtgtccagggtgaggagtgagggtgtcagggtgagtgagggtgtccagggttgagtgcacatgtgtggtgaggaggtgtttgcagtgcttcaggcgcagcaactctttcatctagtttaaaattgtgctctgaggttagattttagtagaacaaaggccttacaaagaatgtgaaaacattgtgcttccctgcttacaggcaattaaaaaggagaatcaagctgagggtgcctggtgtggggtggggtggagaagaccacagagactattgtgtgttttattcaacagtgtcctgggctgctttctccagaaatgtccctgacacatggatgtaagtgtggctagtttactgggagatgatcccagtgatgcaggacacgcgagccctaagattgaagcatagcccgggagggttcttagctttgcccaggaaggaactcaaggcaagccagtggtgttagcaacttttattgaagcggccggctgtgcacagcagcagcagaggcgctgctccttgcaaagcagggctgccctacaggctgtgcgcccacagtagcagctcagaggcagttctgcagtggtatttgtatccacttttaattatatgcaaatgaaggggcagtttatgcagacatttccagggtgagggtggtaacttctgggtgctgccagagccatcgtgaactgacttgacacaggtcggtgtgtcctatggaaactagcatctgccctggacctattttagctagtgctcagtttggtctgagtgcctgagccccacttccagagttgagtcccacctcctacctcattcccccttcagagattagatactcctccttaatcttaagggggcctcgagaagggcggagtcctgcttttccgtaactacttcctgctgagtttatggcacgtaggccctgcctggcactggaggacgtaaaaatttctggatacctgatctaaggagcccagaggcaggacgatttcattctccgtgtcagtggacaggatgggctggaagccttgtgccagcattgtctctggaactgtggtaatctagaatacacaaactttactaagaggttaaagaagcaaggaccaaacatttgtaacaagacagttgtcaaaggtcctagaagaggtgaaaaacaggtgagacttgggaaggcacttttgatggttgaccagatatagttggggcagtgccctggttatatctatgtaactaggtagcttgctcatagatcttttgaatgttaacctcaacctgtccagagttaatatatgtgcagcaggttttattaataactgcacaagaccccaccttgttcagctagtaaataatccaatgctagtctgttatcaacaactacattttccagagtctggggaactcttgaattctctttaatgcctgatctccgttggtggctaaggattctaggatttgagccaagttctttagcgttaactcatggtaggcaaagcaccccagggtgctgctagtcctattgccaccctgattcctgccagaaataagtaagcaagcaacaggacaatgaactccatgttgcccagatcccactgagagtgaacgtgcagtcatgcccataaccgacacacatcccagtccatgtgggtcagtccttcatcaccctccctgccttctgacaacagcagactccagccattccattatcattcacagcccaacccaagcagtcagtggctgaagaaagagaatcaggtatactctatgtccacatataccttcctgccacagggcttcaccaactggcaggattccccccagcccccaactcctcctcatcccttgttcccaggcgggtcaattggagagtgagcagagatagatggcttgcagaagggtatgcaagatggggagactccaccagaccttagggagagaatggcatctttctccaccttttaagagagacagagcctccctgaggtctcaaagatttttcagggcaacacaagaaacgtttccaagcctcagctgcaggtgttcacctttccactctggggtgtgaggagatggtaagctgaggacaagtgtgttccagatgcaggccaactctgttctccaacagtttgaaccaacttggccttggggttccaagggtaggatgaagggtgtcacggcaggacggggcctggcgtgaggcaacagcaagcagagcgaggacacaacagtggcagcagtgtacagacacaggacgtcagcttcaaacgatgcaacagcagggatatcttgggcacggctctgattcgagccactcccaactctcttgcctccaggatggaggcactgtacatgcaacagtccagagaaagattctagccagtccaagcccaggcacatccagagaaggtgggagctcttcgggttgactccaccgaggaaaacaggcatttgggtatttcagattcccgctccacaataaggcaacttttaaaaaaatattatttccaaaaacaaaacaaaaattccagggggagggaattcagcggatcagtcttaagaggagcttttttttggagcgagaaatcatataaaataaaatgaaataaaacaaggaggaaggcaaccagctgttaggggaaaaataaggcagataaaggagcggggagagaaattaattgccaaccaggaggagttgggctgtatttttcaaaggtggggagagtggagcacacaccttgaggaggaaagcgagaaagaaaagaaaaaaaaaaaaaaaaatttttggggggttgggctaaaaagtttttttaaaacaatttcgtttgtgggagccggggggccccatgtagtggttactgtgaacagtgtgtccaatagcgcgtggttttcccaagaggaaaaatcggtgcgtcagaggaaagcatagtcgccgtgggaattctctcccccgaataaaaaaaaggcccgggggaataacaccacgcgtttttctgtacaacaaattcccaagaatggggatgtttggaagggctacaatcacggggaattattaattcacaggggggggagttcccccaaggggagaacgccggaatatttacaaaaatttaggccccgccagtcggcgggggaagggcaggactatcgacacacgaaaatggagcaaacgcacaacacgaagacacagataagtgagcaaagaagctagcggaaaaggcggaaaacgcgggataggcggcggcagaaggggatagcacggagaggaaagaagagccacacaacagtcgaggagcgcaagccaggaggacgacagcaccagccaggctgggccgcgagggactgcagacggtggcagaacaaaggcggtgggaaacggcagcgcggacgatcactggtcgacacgaccgggagggaggagacgggaggaggagagggagggagacagaagtggggagagcgtcagagcggggggagcag

SEQ ID NO: 455113 - DNA, 271 bp, Homo sapiens
cttcttcaacactccttacaacaacttcatgagctatgcaggtagggccctacactctgtagggtgaacaggtctggatgtcagatgtgggatccaatcctggctcaggggaaccttgaacaagctacttaccatttctaaggatggaaggcctagctctgccacttatccacctaatgtctttcggtcattctctttctgggtttcacttttctcaagaaaatggaattgttggactagcatctccatgatccttcctaaatgtgcagca

SEQ ID NO: 455114 - DNA, 170 bp, Homo sapiens
ccattcatcccattctgttctgtgagaagctagaaggatttgttaataatattagctttgggtcaaacagaacaaactttaagtttcagcttggctgcctaatggcaatgtgatctcagacaaatgactttacttctctgcacttcattttttttttaagccacaagagg

SEQ ID NO: 455115 - DNA, 392 bp, Homo sapiens
tcacaaatggaaaaactgaggctattcaaggtttaaatcttgataacatacaaagctttcaagtggcaagatttgaactctggtttgtctgttgccataacttgtgctcttaatgagaaactttaatcgctgcctctagagtcatcttcaccctagccagcacccctttctgtcctcagtctcaagccccctgaaatcttggagaaagaggctcttagcctttatcttccaactgagcatagctgtcctgtgaggagactccttcttcccctcgtttctttcctccccagctgcgtgcacttcgcatgtgagaaaactgactgtccagagctggctgtggagaatgcttatctcaattgctccagcagcgaccgctaccacggtgcccagtg

SEQ ID NO: 455116 - DNA, 419 bp, Homo sapiens
acgggacccagcgtcacagtgacctgtacagagggcaagtggaataagcaggtggcctgtgagccagtcgactgcagcatcccagatcaccatcaagtctatgctgcctccttctcctgccctgagggcaccacctttggcagtcaatgttccttccagtgccgtcaccctgcacaattgaaaggtatcaagaacgccttccccagctcagccttcctttgtctatgggaaacctagaagctgcatccaggccctctttctgggtctcaaacaccaagggtgggatgggttttatctatgctcctgacttcttcctactaattgtatttatgtaaactgccctgctatgcagataagaaagaaaaaagagtgtatggataattatgacagtgaagccctttccaagaccttggaaatct

SEQ ID NO: 455117 - DNA, 344 bp, Homo sapiens
tctgggccacacaacggactctgtgacactggagtggttcccacctatagatggccatttctttgaaaggtgagtgtgccctgtgtagtgttgatccctctctctctctcctgccaagaagaaggaaacttggaagggaagcagacttggagagggattttactgcatttcttgttcttgttcaaaaggtatctccaccacctagcatgttgtaaatttgggatcagggaataaataaatggtcattaatagaaacaaataaataacaataaatatttttaagtgaatgggtacttgaattcactttgttattagaaacttggaaacctcttttgctacagacc

SEQ ID NO: 455118 - DNA, 12380 bp, Homo sapiens
ctgtccaggttgagtgagggtgtccaggatgaggaatgagggtgtccagggtgaggagtgagggagtccagggtgaggagtgagggagtccagggtgaggattgagggtgtcagggtgagtgagagtgtccagggtgaggagtgagggtatccagggtgagtgagggtgtccagggtgaggagtgagggtatccagggtgagtgagggtgtccagggtgagtgagggtgtcagggtgagtgaacgtgtccagggtgtgtgagggtgtccagggtgcagagtgaggtgtccagggtgaggagtgacggtgtctggggtgagtgagggtgtccagggtgaggagtgagggtgtcagggtgagtgagggtgtccagggttgagtgcacatgtgtggtgaggaggtgtttgcagtgcttcaggcgcagcaactctttcatctagtttaaaattgtgctctgaggttagattttagtagaacaaaggccttacaaagaatgtgaaaacattgtgcttccctgcttacaggcaattaaaaaggagaatcaagctgagggtgcctggtgtggggtggggtggagaagaccacagagactattgtgtgttttattcaacagtgtcctgggctgctttctccagaaatgtccctgacacatggatgtaagtgtggctagtttactgggagatgatcccagtgatgcaggacacgcgagccctaagattgaagcatagcccgggagggttcttagctttgcccaggaaggaactcaaggcaagccagtggtgttagcaacttttattgaagcggccggctgtgcacagcagcagcagaggcgctgctccttgcaaagcagggctgccctacaggctgtgcgcccacagtagcagctcagaggcagttctgcagtggtatttgtatccacttttaattatatgcaaatgaaggggcagtttatgcagacatttccagggtgagggtggtaacttctgggtgctgccagagccatcgtgaactgacttgacacaggtcggtgtgtcctatggaaactagcatctgccctggacctattttagctagtgctcagtttggtctgagtgcctgagccccacttccagagttgagtcccacctcctacctcattcccccttcagagattagatactcctccttaatcttaagggggcctcgagaagggcggagtcctgcttttccgtaactacttcctgctgagtttatggcacgtaggccctgcctggcactggaggacgtaaaaatttctggatacctgatctaaggagcccagaggcaggacgatttcattctccgtgtcagtggacaggatgggctggaagccttgtgccagcattgtctctggaactgtggtaatctagaatacacaaactttactaagaggttaaagaagcaaggaccaaacatttgtaacaagacagttgtcaaaggtcctagaagaggtgaaaaacaggtgagacttgggaaggcacttttgatggttgaccagatatagttggggcagtgccctggttatatctatgtaactaggtagcttgctcatagatcttttgaatgttaacctcaacctgtccagagttaatatatgtgcagcaggttttattaataactgcacaagaccccaccttgttcagctagtaaataatccaatgctagtctgttatcaacaactacattttccagagtctggggaactcttgaattctctttaatgcctgatctccgttggtggctaaggattctaggatttgagccaagttctttagcgttaactcatggtaggcaaagcaccccagggtgctgctagtcctattgccaccctgattcctgccagaaataagtaagcaagcaacaggacaatgaactccatgttgcccagatcccactgagagtgaacgtgcagtcatgcccataaccgacacacatcccagtccatgtgggtcagtccttcatcaccctccctgccttctgacaacagcagactccagccattccattatcattcacagcccaacccaagcagtcagtggctgaagaaagagaatcaggtatactctatgtccacatataccttcctgccacagggcttcaccaactggcaggattccccccagcccccaactcctcctcatcccttgttcccaggcgggtcaattggagagtgagcagagatagatggcttgcagaagggtatgcaagatggggagactccaccagaccttagggagagaatggcatctttctccaccttttaagagagacagagcctccctgaggtctcaaagatttttcagggcaacacaagaaacgtttccaagcctcagctgcaggtgttcacctttccactctggggtgtgaggagatggtaagctgaggacaagtgtgttccagatgcaggccaactctgttctccaacagtttgaaccaacttggccttggggttccaagggtaggatgaagggtgtcacggcaggacggggcctggcgtgaggcaacagcaagcagagcgaggacacaacagtggcagcagtgtacagacacaggacgtcagcttcaaacgatgcaacagcagggatatcttgggcacggctctgattcgagccactcccaactctcttgcctccaggatggaggcactgtacatgcaacagtccagagaaagattctagccagtccaagcccaggcacatccagagaaggtgggagctcttcgggttgactccaccgaggaaaacaggcatttgggtatttcagattcccgctccacaataaggcaacttttaaaaaaatattatttccaaaaacaaaacaaaaattccagggggagggaattcagcggatcagtcttaagaggagcttttttttggagcgagaaatcatataaaataaaatgaaataaaacaaggaggaaggcaaccagctgttaggggaaaaataaggcagataaaggagcggggagagaaattaattgccaaccaggaggagttgggctgtatttttcaaaggtggggagagtggagcacacaccttgaggaggaaagcgagaaagaaaagaaaaaagcaagtgaaggggggctcgcccaagaagggtgaagaagcgaagaaagtcgaggcgccgaggctcccaaagctggcagctccgggtggcggtgcaggggcgaaggggggggcggggggaacgtcggacatgcggctctggagttgggtgctgcacctggggctgctgagcgccgcgctgggctgcgggctggccgagcgtccccgccgggcccggagagacccgcgggccggccgacccccgcgccccgccgccggcccggccacctgcgccacccgcggcccgcggccgccgcgcctcgccgccgccgccgccgccgccgggcggtgcctgggaagccgtgcgcgtcccccggcggcggcagcagcgggaggcgaggggcgccaccgaggagccgagcccgccgagccgggcgctctatttcagcgggcgaggcgagcagctgcgcctccgggccgacctcgagctgccccgggacgcgttcacgctgcaagtgtggctgcgagcggaggggggccagaggtctccggcagtgatcacagggctgtatgacaaatgttcttatatctcacgtgaccgaggatgggtcgtgggcattcacaccatcagtgaccaagacaacaaagacccacgctactttttctccttgaagacagaccgagcccggcaagtgaccaccatcaatgcccaccgcagctacctcccaggccagtgggtatacctagctgccacctatgatgggcagttcatgaagctctatgtgaatggtgcccaggtggccacctctggggaacaagtgggtggcatattcagcccactgacccagaagtgcaaagtgctcatgttagggggcagtgccctgaatcacaactaccggggctacatcgagcacttcagtctgtggaaggtggccaggactcagcgggagatactgtctgacatggaaacccatggcgcccacactgctctacctcagctcctcctccaggagaactgggacaatgtgaagcatgcctggtcccccatgaaggatggcagcagccccaaagtggaattcagcaatgcccacggctttctgctggacacgagtctggagcctcctctgtgcggacagacattgtgtgacaacacagaggtcattgccagctacaatcagctctcaagtttccgccagcccaaggtggtgcgctaccgcgtggtcaacctctatgaagatgatcataagaacccgacggtgacgcgcgagcaggtggacttccagcaccatcagctggctgaggccttcaagcaatacaacatctcctgggagctggacgtgctggaggtgagcaactcctcccttcgccgccgcctcatcctggccaactgtgacatcagcaagattggggatgagaactgtgaccccgagtgcaaccacacgctgacgggccacgacggcggggattgccgccacctgcgccaccctgccttcgtgaagaagcagcacaacggggtgtgtgacatggactgcaactatgaacggttcaactttgatggtggagagtgctgtgaccctgaaatcaccaatgtcactcagacttgctttgaccccgactctccacacagagcctacttggatgttaatgagctgaagaacattcttaaattggatggatcaacacatctcaatattttctttgcaaaatcctcagaggaggagttggcaggagtagcaacttggccatgggacaaggaggccctgatgcacttaggtggcattgtcttgaacccatctttctatggcatgcctgggcacacccacaccatgatccatgagattggtcacagcctgggcctctatcacgtcttccgaggcatctcagaaatccagtcctgcagtgacccctgcatggagacagagccctccttcgagactggagacctctgcaatgataccaacccagcccctaaacacaagtcctgtggtgacccagggccaggaaatgacacctgtggctttcatagcttcttcaacactccttacaacaacttcatgagctatgcagatgacgactgtacggactccttcacgcccaatcaagtcgccagaatgcactgttacctggacctggtctaccagggctggcagccctccaggaaaccagcgcctgttgccctcgccccccaagttctgggccacacaacggactctgtgacactggagtggttcccacctatagatggccatttctttgaaagagaattgggatcagcatgtcatctttgcctggaagggagaatcctggtgcagtatgcttccaacgcttcctccccaatgccctgcagcccatcaggacactggagccctcgtgaagcagaaggtcatcctgatgttgaacagccctgtaagtccagtgtccgcacctggagcccaaattcagctgtcaacccacacacggttcctccagcctgccctgagcctcaaggctgctacctcgagctggagttcctctaccccttggtccctgagtctctgaccatttgggtgacctttgtctccactgactgggactctagtggagctgtcaatgacatcaaactgttggctgtcagtgggaagaacatctccctgggtcctcagaatgtcttctgtgatgtcccactgaccatcagactctgggacgtgggcgaggaggtgtatggcatccaaatctacacgctggatgagcacctggagatcgatgctgccatgttgacctccactgcagacaccccactctgtctacagtgtaagcccctgaagtataaggtggtccgggaccctcctctccagatggatgtggcctccatcctacatctcaataggaaattcgtagacatggatctaaatcttggcagtgtgtaccagtattgggtcataactatttcaggaactgaagagagtgagccatcacctgctgtcacatacatccatggaagtgggtactgtggcgatggcattatacaaaaagaccaaggtgaacaatgcgacgacatgaataagatcaatggtgatggctgctcccttttctgccgacaagaagtctccttcaattgtattgatgaacccagccggtgctatttccatgatggtgatggggtatgtgaggagtttgaacaaaaaaccagcattaaggactgtggtgtctacacgccccagggattcctggatcagtgggcatccaatgcttcagtatctcatcaagaccagcaatgcccaggctgggtcatcatcggacagccagcagcatcccaggtgtgtcgaaccaaggtgatagatctcagtgaaggcatttcccagcatgcctggtacccttgcaccatcagctacccatattcccagctggctcagaccactttttggctccgggcgtatttttctcaaccaatggttgccgcagctgtcattgtccacctggtgacggatgggacatattatggggaccaaaagcaggagaccatcagcgtgcagctgcttgataccaaagatcagagccacgatctaggcctccatgtcctgagctgcaggaacaatcccctgattatccctgtggtccatgacctcagccagcccttctaccacagccaggcggtacgtgtgagcttcagttcgcccctggtcgccatctcgggggtggccctccgttccttcgacaactttgaccccgtcaccctgagcagctgccagagaggggagacctacagccctgccgagcagagctgcgtgcacttcgcatgtgagaaaactgactgtccagagctggctgtggagaatgcttatctcaattgctccagcagcgaccgctaccacggtgcccagtgtactgtgagctgccggacaggctacgtgctccagatacggcgggatgatgagctgatcaagagccagacgggacccagcgtcacagtgacctgtacagagggcaagtggaataagcaggtggcctgtgagccagtcgactgcagcatcccagatcaccatcaagtctatgctgcctccttctcctgccctgagggcaccacctttggcagtcaatgttccttccagtgccgtcaccctgcacaattgaaaggcaacaacagcctcctgacctgcatggaggatgggctgtggtccttcccagaggccctgtgtgagctcatgtgcctcgctccaccccctgtgcccaatgcagacctccagaccgcccggtgccgagagaataagcacaaggtgggctccttctgcaaatacaaatgcaagcctggataccatgtgcctggatcctctcggaagtcaaagaaacgggccttcaagactcagtgtacccaggatggcagctggcaggagggagcttgtgttcctgtgacctgtgacccacctccaccaaaattccatgggctctaccagtgtactaatggcttccagttcaacagtgagtgtaggatcaagtgtgaagacagtgatgcctcccagggacttgggagcaatgtcattcattgccggaaagatggcacctggaacggctccttccatgtctgccaggagatgcaaggccagtgctcggttccaaacgagctcaacagcaacctcaaactgcagtgccctgatggctatgccatagggtcggagtgtgccacctcgtgcctggaccacaacagcgagtccatcatcctgccaatgaacgtgaccgtgcgtgacatcccccactggctgaaccccacacgggtagagagagttgtctgcactgctggtctcaagtggtatcctcaccctgctctgattcactgtgtcaaaggctgtgagcccttcatgggagacaattattgtgatgccatcaacaaccgagccttttgcaactatgacggtggggattgctgcacctccacagtgaagaccaaaaaggtcaccccattccctatgtcctgtgacctacaaggtgactgtgcttgtcgggacccccaggcccaagaacacagccggaaagacctccggggatacagccatggctaaggaaggacaagaagttgtcaaagaattcccaacgccaggacccacatccctttggtattgatttcacagtcagctgctcaacggaatggcctctccacaccagggatccttagcacccaaccggtctgcctttaattttacccaggaaggactcacattggggcgaatgaaccaagtttcgccatgctggatgatgaaatggattcccatcccaaagtctgagatggattgcatatacagtgtgcagtcccagagcctcctaaaattctagccatttgtcacacaaccacagcaagaaacgtgttctatatctagagtgtgcccatctgtgtttagtacacatgcatgcatacacacccatacaaacatctgtgtgagggcagttctggagatgagcagagagagaccggaataaactcaatcttttctttcccaagctcctagccaacactatccttgggagaaagaaatttgcagaaactgctaagaccaagtgtggagatgtcaagctagttcacactctgaggctcagaatatgtaggacatgcacaattgtgcagtcctttgggattggaagtgaaacagtctgtgatcccctaccttctagggaactaggacctaggaagaggtaaagattatcaggtatgcaaagcgccccaattcttctgctgccatgggggattttaccccaactccagggttcgaggccaatctgagaatggcttaggattgcaatgtcaaggtattatatcagccccttgcttgaggcttgaggtcataatatccctctaggacttacctgttcccccagatcttgccttgggaccacatttgctgctacttttcctgctgctctatcctatacattgaataatccaagatggtagaactaggttaggaaaaattccacacaaccaaacagtctgccttaaaagtgacccacatttttccatagctcctcactttttagcccttctgcaagagaaaaaccctcatgggtccacatggtgagaagttaagtttcctgtaagtgggcctctcaccctggaaaggagttgagggacatcagatgctggaaccctcactgaaagtccagaatgtctaagccagtgttagattttgtaaacaagtggaacagtgttaaatttctatgatgttggagccatccagagactactggaattgtcgagacttttggattattatccttatccttatcctaatcttcctagcccttcaggctagagtaggcttcgatcctgagaaccttgctgttgctctgaggagatataattctgggagaaagaatcttttataagaacagtacagattgttctcaagagggccatcagaaggaagccaaagagttcacagcctcagcaccaacaactcaacatggtcatcatgttttctatatggtttttccagctagcagtactcccttccatacctgtgactgggcagtgcttttctctctcccatgtctagcctccaaaagttaagtgaaaattagtcaactgcacgtggaagcccccaccactttggggatctctttatttcttttcagccagggacctgtccactccctttgaattaatatgggaagaaattaatacaggatgaactggagagaagggttgagtgtggcatactttctgaaacctggagctgggaattgcggagaagggaaggtctagactagttacatcacatagggattactgtaaatcaagtcatctcaagtctagtgaagacagccaacagaaacaaaacctagcatagggatagaaaataccatgcacgtgtgcagccccacctaattcctgcatccaaggcaggtgttgttaatctatcatagcacttaaaaaaaaaaaaaaagagaccaaaaataactttaggaaccaccatattatatcactcccaatagcactgacctggtgatcaaaaacacttgagaagacatctattggccatctctggccaattacactaagaaacatatcaaggtgcttttggcacaggtgcccacaaatacggatgcagtgctgagatagtttatgagacttgtaccatttcacaaactctgaaattgggttccatattggcaaggctgccacagttgttaagaataatcctctatgtttcttcctcacaaaaccatatctcatttatatccagaccattacttcactataattacaaggacaaattattagcaagaaataagaatagtattagaagaattgatcctattttgaacccctctccagtatcttcacactcttgtcaactctccaggcctctctcttgccctgagttatcagcctgtgtggtgttaactaccttagaaggtacaagctaagaaatgtaacagtatcaaccctcccagttgcttaattatacccataggtaatacaaaaagctctgaagacccaaagatgacattactaatgatgtgatttcaggagccacagaagaaccttaccagcttccctcaaatcagtccttatcctctttctatcttcactcccatcatcatctattttcacactatccagctaagcaaagattcctggaggctgacttgtatcttcagactcacagagtgaattcagctcttctgaatcaagacccacccagtctctttcattcagacctgttgctaacaaatttatatttgccaaggatattaggcaaaagaggctacttgattggtggccaacctcgtgcccacatggaaggtatctttaatagggtcttttcaaaccttagtggaggagggtcagctcaatttgggcaatgcatttgttcccagtttcattttcttcctgggaattaactcgtcatttcattccttcagtcatcttctgtgtaggtgaccggagcactgagaggcagctctgatgcactattgtgtgtcagcagctcaaaggccctaaaacactgaaggttctgcatctgaagtattagattgttagcagcaaaatatgaaagatgaggtggacagtcctctaagccctatttagggaagcttttccaagccacaatcttaactacctacccaaaggatttgcattacccccagattctgtgccaacaaccttttaaggaaatacagtccttgggaaatgagttttgatggtgaattggggtgttaaggaagggaaagattgtcatagatggtagggctttgaaaatgcagggtatcagctgccactcctggcttcaacacattgagtcactgcctagacggttctcttggtcttattcccatcctggccaatgcttaaatactatttgttgaaaataattctttgagacagatttcagctacctcccttccaggttcgatttaacttggttgtaattgtcaatttgttgttataggtcttacctgtgtgaaagaaagaaaaagaaagaaagaaagaaagagaaaggaaattataaggtcaagttaacagttttgaggttttgtgtttttttctggaactacttcaagtgagaaaataaaaaaaaatggtgacaaagctgtacagatagagataatagaagacaaagagattaaaaggaaataaaaatgcatgattaaaaactaagaataaaaaacctatttttatgtttcctaaaggaaattgtttattctacagactcagtaggtagacacaaacataaagatttccctagaagacatagagtgggatttgataacactgtctgttattttctgtacattgtggtaggtccaggaaatatgacattttcccccttgatgtgttattgttgttgttgggtggggtgggcattttgtttatttgtttggtggcaatcagtggtagtagggagtgggagggcttatattggtttttccagctattaaggggacatattgtgtcgttgtgcttttcacgttataaaatgtttatatttaccagtacagcactgggctttataaagactgcactcagaaccacactgcacagtccagttttttaaaaagctgctacatgacagacaggtaatcccactgagtgagttttgagaaacaaatcaaacgaagtaaacaagaaacataaaaaccaaatagcaaatgaataaaagcctgttcttgtaacttattcaacttttgccaaattcctaccaatcacttgctttttaaaagaaatgtataatagccaaaagagaaattatgtccctgttgtacagaagttagaatttttgactgtgcgggcctctcaggctgtggcaggtgcgcggtgctcccagctcatcgtggaattccagcct

SEQ ID NO: 455119 - DNA, 11773 bp, Homo sapiens
ctgtccaggttgagtgagggtgtccaggatgaggaatgagggtgtccagggtgaggagtgagggagtccagggtgaggagtgagggagtccagggtgaggattgagggtgtcagggtgagtgagagtgtccagggtgaggagtgagggtatccagggtgagtgagggtgtccagggtgaggagtgagggtatccagggtgagtgagggtgtccagggtgagtgagggtgtcagggtgagtgaacgtgtccagggtgtgtgagggtgtccagggtgcagagtgaggtgtccagggtgaggagtgacggtgtctggggtgagtgagggtgtccagggtgaggagtgagggtgtcagggtgagtgagggtgtccagggttgagtgcacatgtgtggtgaggaggtgtttgcagtgcttcaggcgcagcaactctttcatctagtttaaaattgtgctctgaggttagattttagtagaacaaaggccttacaaagaatgtgaaaacattgtgcttccctgcttacaggcaattaaaaaggagaatcaagctgagggtgcctggtgtggggtggggtggagaagaccacagagactattgtgtgttttattcaacagtgtcctgggctgctttctccagaaatgtccctgacacatggatgtaagtgtggctagtttactgggagatgatcccagtgatgcaggacacgcgagccctaagattgaagcatagcccgggagggttcttagctttgcccaggaaggaactcaaggcaagccagtggtgttagcaacttttattgaagcggccggctgtgcacagcagcagcagaggcgctgctccttgcaaagcagggctgccctacaggctgtgcgcccacagtagcagctcagaggcagttctgcagtggtatttgtatccacttttaattatatgcaaatgaaggggcagtttatgcagacatttccagggtgagggtggtaacttctgggtgctgccagagccatcgtgaactgacttgacacaggtcggtgtgtcctatggaaactagcatctgccctggacctattttagctagtgctcagtttggtctgagtgcctgagccccacttccagagttgagtcccacctcctacctcattcccccttcagagattagatactcctccttaatcttaagggggcctcgagaagggcggagtcctgcttttccgtaactacttcctgctgagtttatggcacgtaggccctgcctggcactggaggacgtaaaaatttctggatacctgatctaaggagcccagaggcaggacgatttcattctccgtgtcagtggacaggatgggctggaagccttgtgccagcattgtctctggaactgtggtaatctagaatacacaaactttactaagaggttaaagaagcaaggaccaaacatttgtaacaagacagttgtcaaaggtcctagaagaggtgaaaaacaggtgagacttgggaaggcacttttgatggttgaccagatatagttggggcagtgccctggttatatctatgtaactaggtagcttgctcatagatcttttgaatgttaacctcaacctgtccagagttaatatatgtgcagcaggttttattaataactgcacaagaccccaccttgttcagctagtaaataatccaatgctagtctgttatcaacaactacattttccagagtctggggaactcttgaattctctttaatgcctgatctccgttggtggctaaggattctaggatttgagccaagttctttagcgttaactcatggtaggcaaagcaccccagggtgctgctagtcctattgccaccctgattcctgccagaaataagtaagcaagcaacaggacaatgaactccatgttgcccagatcccactgagagtgaacgtgcagtcatgcccataaccgacacacatcccagtccatgtgggtcagtccttcatcaccctccctgccttctgacaacagcagactccagccattccattatcattcacagcccaacccaagcagtcagtggctgaagaaagagaatcaggtatactctatgtccacatataccttcctgccacagggcttcaccaactggcaggattccccccagcccccaactcctcctcatcccttgttcccaggcgggtcaattggagagtgagcagagatagatggcttgcagaagggtatgcaagatggggagactccaccagaccttagggagagaatggcatctttctccaccttttaagagagacagagcctccctgaggtctcaaagatttttcagggcaacacaagaaacgtttccaagcctcagctgcaggtgttcacctttccactctggggtgtgaggagatggtaagctgaggacaagtgtgttccagatgcaggccaactctgttctccaacagtttgaaccaacttggccttggggttccaagggtaggatgaagggtgtcacggcaggacggggcctggcgtgaggcaacagcaagcagagcgaggacacaacagtggcagcagtgtacagacacaggacgtcagcttcaaacgatgcaacagcagggatatcttgggcacggctctgattcgagccactcccaactctcttgcctccaggatggaggcactgtacatgcaacagtccagagaaagattctagccagtccaagcccaggcacatccagagaaggtgggagctcttcgggttgactccaccgaggaaaacaggcatttgggtatttcagattcccgctccacaataaggcaacttttaaaaaaatattatttccaaaaacaaaacaaaaattccagggggagggaattcagcggatcagtcttaagaggagcttttttttggagcgagaaatcatataaaataaaatgaaataaaacaaggaggaaggcaaccagctgttaggggaaaaataaggcagataaaggagcggggagagaaattaattgccaaccaggaggagttgggctgtatttttcaaaggtggggagagtggagcacacaccttgaggaggaaagcgagaaagaaaagaaaaaagcaagtgaaggggggctcgcccaagaagggtgaagaagcgaagaaagtcgaggcgccgaggctcccaaagctggcagctccgggtggcggtgcaggggcgaaggggggggcggggggaacgtcggacatgcggctctggagttgggtgctgcacctggggctgctgagcgccgcgctgggctgcgggctggccgagcgtccccgccgggcccggagagacccgcgggccggccgacccccgcgccccgccgccggcccggccacctgcgccacccgcggcccgcggccgccgcgcctcgccgccgccgccgccgccgccgggcggtgcctgggaagccgtgcgcgtcccccggcggcggcagcagcgggaggcgaggggcgccaccgaggagccgagcccgccgagccgggcgctctatttcagcgggcgaggcgagcagctgcgcctccgggccgacctcgagctgccccgggacgcgttcacgctgcaagtgtggctgcgagcggaggggggccagaggtctccggcagtgatcacagggctgtatgacaaatgttcttatatctcacgtgaccgaggatgggtcgtgggcattcacaccatcagtgaccaagacaacaaagacccacgctactttttctccttgaagacagaccgagcccggcaagtgaccaccatcaatgcccaccgcagctacctcccaggccagtgggtatacctagctgccacctatgatgggcagttcatgaagctctatgtgaatggtgcccaggtggccacctctggggaacaagtgggtggcatattcagcccactgacccagaagtgcaaagtgctcatgttagggggcagtgccctgaatcacaactaccggggctacatcgagcacttcagtctgtggaaggtggccaggactcagcgggagatactgtctgacatggaaacccatggcgcccacactgctctacctcagctcctcctccaggagaactgggacaatgtgaagcatgcctggtcccccatgaaggatggcagcagccccaaagtggaattcagcaatgcccacggctttctgctggacacgagtctggagcctcctctgtgcggacagacattgtgtgacaacacagaggtcattgccagctacaatcagctctcaagtttccgccagcccaaggtggtgcgctaccgcgtggtcaacctctatgaagatgatcataagaacccgacggtgacgcgcgagcaggtggacttccagcaccatcagctggctgaggccttcaagcaatacaacatctcctgggagctggacgtgctggaggtgagcaactcctcccttcgccgccgcctcatcctggccaactgtgacatcagcaagattggggatgagaactgtgaccccgagtgcaaccacacgctgacgggccacgacggcggggattgccgccacctgcgccaccctgccttcgtgaagaagcagcacaacggggtgtgtgacatggactgcaactatgaacggttcaactttgatggtggagagtgctgtgaccctgaaatcaccaatgtcactcagacttgctttgaccccgactctccacacagagcctacttggatgttaatgagctgaagaacattcttaaattggatggatcaacacatctcaatattttctttgcaaaatcctcagaggaggagttggcaggagtagcaacttggccatgggacaaggaggccctgatgcacttaggtggcattgtcttgaacccatctttctatggcatgcctgggcacacccacaccatgatccatgagattggtcacagcctgggcctctatcacgtcttccgaggcatctcagaaatccagtcctgcagtgacccctgcatggagacagagccctccttcgagactggagacctctgcaatgataccaacccagcccctaaacacaagtcctgtggtgacccagggccaggaaatgacacctgtggctttcatagcttcttcaacactccttacaacaacttcatgagctatgcagatgacgactgtacggactccttcacgcccaatcaagtcgccagaatgcactgttacctggacctggtctaccagggctggcagccctccaggaaaccagcgcctgttgccctcgccccccaagttctgggccacacaacggactctgtgacactggagtggttcccacctatagatggccatttctttgaaagagaattgggatcagcatgtcatctttgcctggaagggagaatcctggtgcagtatgcttccaacgcttcctccccaatgccctgcagcccatcaggacactggagccctcgtgaagcagaaggtcatcctgatgttgaacagccctgtaagtccagtgtccgcacctggagcccaaattcagctgtcaacccacacacggttcctccagcctgccctgagcctcaaggctgctacctcgagctggagttcctctaccccttggtccctgagtctctgaccatttgggtgacctttgtctccactgactgggactctagtggagctgtcaatgacatcaaactgttggctgtcagtgggaagaacatctccctgggtcctcagaatgtcttctgtgatgtcccactgaccatcagactctgggacgtgggcgaggaggtgtatggcatccaaatctacacgctggatgagcacctggagatcgatgctgccatgttgacctccactgcagacaccccactctgtctacagtgtaagcccctgaagtataaggtggtccgggaccctcctctccagatggatgtggcctccatcctacatctcaataggaaattcgtagacatggatctaaatcttggcagtgtgtaccagtattgggtcataactatttcaggaactgaagagagtgagccatcacctgctgtcacatacatccatggaagtgggtactgtggcgatggcattatacaaaaagaccaaggtgaacaatgcgacgacatgaataagatcaatggtgatggctgctcccttttctgccgacaagaagtctccttcaattgtattgatgaacccagccggtgctatttccatgatggtgatggggtatgtgaggagtttgaacaaaaaaccagcattaaggactgtggtgtctacacgccccagggattcctggatcagtgggcatccaatgcttcagtatctcatcaagaccagcaatgcccaggctgggtcatcatcggacagccagcagcatcccaggtgtgtcgaaccaaggtgatagatctcagtgaaggcatttcccagcatgcctggtacccttgcaccatcagctacccatattcccagctggctcagaccactttttggctccgggcgtatttttctcaaccaatggttgccgcagctgtcattgtccacctggtgacggatgggacatattatggggaccaaaagcaggagaccatcagcgtgcagctgcttgataccaaagatcagagccacgatctaggcctccatgtcctgagctgcaggaacaatcccctgattatccctgtggtccatgacctcagccagcccttctaccacagccaggcggtacgtgtgagcttcagttcgcccctggtcgccatctcgggggtggccctccgttccttcgacaactttgaccccgtcaccctgagcagctgccagagaggggagacctacagccctgccgagcagagctgcgtgcacttcgcatgtgagaaaactgactgtccagagctggctgtggagaatgcttatctcaattgctccagcagcgaccgctaccacggtgcccagtgtactgtgagctgccggacaggctacgtgctccagatacggcgggatgatgagctgatcaagagccagacgggacccagcgtcacagtgacctgtacagagggcaagtggaataagcaggtggcctgtgagccagtcgactgcagcatcccagatcaccatcaagtctatgctgcctccttctcctgccctgagggcaccacctttggcagtcaatgttccttccagtgccgtcaccctgcacaattgaaaggcaacaacagcctcctgacctgcatggaggatgggctgtggtccttcccagaggccctgtgtgagctcatgtgcctcgctccaccccctgtgcccaatgcagacctccagaccgcccggtgccgagagaataagcacaaggtgggctccttctgcaaatacaaatgcaagcctggataccatgtgcctggatcctctcggaagtcaaagaaacgggccttcaagactcagtgtacccaggatggcagctggcaggagggagcttgtgttcctgtgacctgtgacccacctccaccaaaattccatgggctctaccagtgtactaatggcttccagttcaacagtgagtgtaggatcaagtgtgaagacagtgatgcctcccagggacttgggagcaatgtcattcattgccggaaagatggcacctggaacggctccttccatgtctgccaggagatgcaaggccagtgctcggttccaaacgagctcaacagcaacctcaaactgcagtgccctgatggctatgccatagggtcggagtgtgccacctcgtgcctggaccacaacagcgagtccatcatcctgccaatgaacgtgaccgtgcgtgacatcccccactggctgaaccccacacgggtagagagagttgtctgcactgctggtctcaagtggtatcctcaccctgctctgattcactgtgtcaaaggctgtgagcccttcatgggagacaattattgtgatgccatcaacaaccgagccttttgcaactatgacggtggggattgctgcacctccacagtgaagaccaaaaaggtcaccccattccctatgtcctgtgacctacaaggtgactgtgcttgtcgggacccccaggcccaagaacacagccggaaagacctccggggatacagccatggctaaggaaggacaagaagttgtcaaagaattcccaacgccaggacccacatccctttggtattgatttcacagtcagctgctcaacggaatggcctctccacaccagggatccttagcacccaaccggtctgcctttaattttacccaggaaggactcacattggggcgaatgaaccaagtttcgccatgctggatgatgaaatggattcccatcccaaagtctgagatggattgcatatacagtgtgcagtcccagagcctcctaaaattctagccatttgtcacacaaccacagcaagaaacgtgttctatatctagagtgtgcccatctgtgtttagtacacatgcatgcatacacacccatacaaacatctgtgtgagggcagttctggagatgagcagagagagaccggaataaactcaatcttttctttcccaagctcctagccaacactatccttgggagaaagaaatttgcagaaactgctaagaccaagtgtggagatgtcaagctagttcacactctgaggctcagaatatgtaggacatgcacaattgtgcagtcctttgggattggaagtgaaacagtctgtgatcccctaccttctagggaactaggacctaggaagaggtaaagattatcaggtatgcaaagcgccccaattcttctgctgccatgggggattttaccccaactccagggttcgaggccaatctgagaatggcttaggattgcaatgtcaaggtattatatcagccccttgcttgaggcttgaggtcataatatccctctaggacttacctgttcccccagatcttgccttgggaccacatttgctgctacttttcctgctgctctatcctatacattgaataatccaagatggtagaactaggttaggaaaaattccacacaaccaaacagtctgccttaaaagtgacccacatttttccatagctcctcactttttagcccttctgcaagagaaaaaccctcatgggtccacatggtgagaagttaagtttcctgtaagtgggcctctcaccctggaaaggagttgagggacatcagatgctggaaccctcactgaaagtccagaatgtctaagccagtgttagattttgtaaacaagtggaacagtgttaaatttctatgatgttggagccatccagagactactggaattgtcgagacttttggattattatccttatccttatcctaatcttcctagcccttcaggctagagtaggcttcgatcctgagaaccttgctgttgctctgaggagatataattctgggagaaagaatcttttataagaacagtacagattgttctcaagagggccatcagaaggaagccaaagagttcacagcctcagcaccaacaactcaacatggtcatcatgttttctatatggtttttccagctagcagtactcccttccatacctgtgactgggcagtgcttttctctctcccatgtctagcctccaaaagttaagtgaaaattagtcaactgcacgtggaagcccccaccactttggggatctctttatttcttttcagccagggacctgtccactccctttgaattaatatgggaagaaattaatacaggatgaactggagagaagggttgagtgtggcatactttctgaaacctggagctgggaattgcggagaagggaaggtctagactagttacatcacatagggattactgtaaatcaagtcatctcaagtctagtgaagacagccaacagaaacaaaacctagcatagggatagaaaataccatgcacgtgtgcagccccacctaattcctgcatccaaggcaggtgttgttaatctatcatagcacttaaaaaaaaaaaaaaagagaccaaaaataactttaggaaccaccatattatatcactcccaatagcactgacctggtgatcaaaaacacttgagaagacatctattggccatctctggccaattacactaagaaacatatcaaggtgcttttggcacaggtgcccacaaatacggatgcagtgctgagatagtttatgagacttgtaccatttcacaaactctgaaattgggttccatattggcaaggctgccacagttgttaagaataatcctctatgtttcttcctcacaaaaccatatctcatttatatccagaccattacttcactataattacaaggacaaattattagcaagaaataagaatagtattagaagaattgatcctattttgaacccctctccagtatcttcacactcttgtcaactctccaggcctctctcttgccctgagttatcagcctgtgtggtgttaactaccttagaaggtacaagctaagaaatgtaacagtatcaaccctcccagttgcttaattatacccataggtaatacaaaaagctctgaagacccaaagatgacattactaatgatgtgatttcaggagccacagaagaaccttaccagcttccctcaaatcagtccttatcctctttctatcttcactcccatcatcatctattttcacactatccagctaagcaaagattcctggaggctgacttgtatcttcagactcacagagtgaattcagctcttctgaatcaagacccacccagtctctttcattcagacctgttgctaacaaatttatatttgccaaggatattaggcaaaagaggctacttgattggtggccaacctcgtgcccacatggaaggtatctttaatagggtcttttcaaaccttagtggaggagggtcagctcaatttgggcaatgcatttgttcccagtttcattttcttcctgggaattaactcgtcatttcattccttcagtcatcttctgtgtaggtgaccggagcactgagaggcagctctgatgcactattgtgtgtcagcagctcaaaggccctaaaacactgaaggttctgcatctgaagtattagattgttagcagcaaaatatgaaagatgaggtggacagtcctctaagccctatttagggaagcttttccaagccacaatcttaactacctacccaaaggatttgcattacccccagattctgtgccaacaaccttttaaggaaatacagtccttgggaaatgagttttgatggtgaattggggtgttaaggaagggaaagattgtcatagatggtagggctttgaaaatgcagggtatcagctgccactcctggcttcaacacattgagtcactgcctagacggttctcttggtcttattcccatcctggccaatgcttaaatactatttgttgaaaataattctttgagacagatttcagctacctcccttccaggttcgatttaacttggttgtaattgtcaatttgttgttataggtcttacctgtgtgaaacgaccaacacaaaaaaaaacaaacaaaacaccttgtgggccccctcaaaaaggtttttaaaaccctttccgtggggccccgggggcccataggtgtacggacaccgcgggccacacggggccccgaagaaagccccggggacacagaccagggcgttgagattccccccaaataaaaacgcccggggggaacccagaggtttggacaaccccagaagggaaccaagagagcaaaaggggcccatcaaggggactcaagaagcgatataaactg

SEQ ID NO: 455120 - DNA, 9753 bp, Homo sapiens
ctgtccaggttgagtgagggtgtccaggatgaggaatgagggtgtccagggtgaggagtgagggagtccagggtgaggagtgagggagtccagggtgaggattgagggtgtcagggtgagtgagagtgtccagggtgaggagtgagggtatccagggtgagtgagggtgtccagggtgaggagtgagggtatccagggtgagtgagggtgtccagggtgagtgagggtgtcagggtgagtgaacgtgtccagggtgtgtgagggtgtccagggtgcagagtgaggtgtccagggtgaggagtgacggtgtctggggtgagtgagggtgtccagggtgaggagtgagggtgtcagggtgagtgagggtgtccagggttgagtgcacatgtgtggtgaggaggtgtttgcagtgcttcaggcgcagcaactctttcatctagtttaaaattgtgctctgaggttagattttagtagaacaaaggccttacaaagaatgtgaaaacattgtgcttccctgcttacaggcaattaaaaaggagaatcaagctgagggtgcctggtgtggggtggggtggagaagaccacagagactattgtgtgttttattcaacagtgtcctgggctgctttctccagaaatgtccctgacacatggatgtaagtgtggctagtttactgggagatgatcccagtgatgcaggacacgcgagccctaagattgaagcatagcccgggagggttcttagctttgcccaggaaggaactcaaggcaagccagtggtgttagcaacttttattgaagcggccggctgtgcacagcagcagcagaggcgctgctccttgcaaagcagggctgccctacaggctgtgcgcccacagtagcagctcagaggcagttctgcagtggtatttgtatccacttttaattatatgcaaatgaaggggcagtttatgcagacatttccagggtgagggtggtaacttctgggtgctgccagagccatcgtgaactgacttgacacaggtcggtgtgtcctatggaaactagcatctgccctggacctattttagctagtgctcagtttggtctgagtgcctgagccccacttccagagttgagtcccacctcctacctcattcccccttcagagattagatactcctccttaatcttaagggggcctcgagaagggcggagtcctgcttttccgtaactacttcctgctgagtttatggcacgtaggccctgcctggcactggaggacgtaaaaatttctggatacctgatctaaggagcccagaggcaggacgatttcattctccgtgtcagtggacaggatgggctggaagccttgtgccagcattgtctctggaactgtggtaatctagaatacacaaactttactaagaggttaaagaagcaaggaccaaacatttgtaacaagacagttgtcaaaggtcctagaagaggtgaaaaacaggtgagacttgggaaggcacttttgatggttgaccagatatagttggggcagtgccctggttatatctatgtaactaggtagcttgctcatagatcttttgaatgttaacctcaacctgtccagagttaatatatgtgcagcaggttttattaataactgcacaagaccccaccttgttcagctagtaaataatccaatgctagtctgttatcaacaactacattttccagagtctggggaactcttgaattctctttaatgcctgatctccgttggtggctaaggattctaggatttgagccaagttctttagcgttaactcatggtaggcaaagcaccccagggtgctgctagtcctattgccaccctgattcctgccagaaataagtaagcaagcaacaggacaatgaactccatgttgcccagatcccactgagagtgaacgtgcagtcatgcccataaccgacacacatcccagtccatgtgggtcagtccttcatcaccctccctgccttctgacaacagcagactccagccattccattatcattcacagcccaacccaagcagtcagtggctgaagaaagagaatcaggtatactctatgtccacatataccttcctgccacagggcttcaccaactggcaggattccccccagcccccaactcctcctcatcccttgttcccaggcgggtcaattggagagtgagcagagatagatggcttgcagaagggtatgcaagatggggagactccaccagaccttagggagagaatggcatctttctccaccttttaagagagacagagcctccctgaggtctcaaagatttttcagggcaacacaagaaacgtttccaagcctcagctgcaggtgttcacctttccactctggggtgtgaggagatggtaagctgaggacaagtgtgttccagatgcaggccaactctgttctccaacagtttgaaccaacttggccttggggttccaagggtaggatgaagggtgtcacggcaggacggggcctggcgtgaggcaacagcaagcagagcgaggacacaacagtggcagcagtgtacagacacaggacgtcagcttcaaacgatgcaacagcagggatatcttgggcacggctctgattcgagccactcccaactctcttgcctccaggatggaggcactgtacatgcaacagtccagagaaagattctagccagtccaagcccaggcacatccagagaaggtgggagctcttcgggttgactccaccgaggaaaacaggcatttgggtatttcagattcccgctccacaataaggcaacttttaaaaaaatattatttccaaaaacaaaacaaaaattccagggggagggaattcagcggatcagtcttaagaggagcttttttttggagcgagaaatcatataaaataaaatgaaataaaacaaggaggaaggcaaccagctgttaggggaaaaataaggcagataaaggagcggggagagaaattaattgccaaccaggaggagttgggctgtatttttcaaaggtggggagagtggagcacacaccttgaggaggaaagcgagaaagaaaagaaaaaagcaagtgaaggggggctcgcccaagaagggtgaagaagcgaagaaagtcgaggcgccgaggctcccaaagctggcagctccgggtggcggtgcaggggcgaaggggggggcggggggaacgtcggacatgcggctctggagttgggtgctgcacctggggctgctgagcgccgcgctgggctgcgggctggccgagcgtccccgccgggcccggagagacccgcgggccggccgacccccgcgccccgccgccggcccggccacctgcgccacccgcggcccgcggccgccgcgcctcgccgccgccgccgccgccgccgggcggtgcctgggaagccgtgcgcgtcccccggcggcggcagcagcgggaggcgaggggcgccaccgaggagccgagcccgccgagccgggcgctctatttcagcgggcgaggcgagcagctgcgcctccgggccgacctcgagctgccccgggacgcgttcacgctgcaagtgtggctgcgagcggaggggggccagaggtctccggcagtgatcacagggctgtatgacaaatgttcttatatctcacgtgaccgaggatgggtcgtgggcattcacaccatcagtgaccaagacaacaaagacccacgctactttttctccttgaagacagaccgagcccggcaagtgaccaccatcaatgcccaccgcagctacctcccaggccagtgggtatacctagctgccacctatgatgggcagttcatgaagctctatgtgaatggtgcccaggtggccacctctggggaacaagtgggtggcatattcagcccactgacccagaagtgcaaagtgctcatgttagggggcagtgccctgaatcacaactaccggggctacatcgagcacttcagtctgtggaaggtggccaggactcagcgggagatactgtctgacatggaaacccatggcgcccacactgctctacctcagctcctcctccaggagaactgggacaatgtgaagcatgcctggtcccccatgaaggatggcagcagccccaaagtggaattcagcaatgcccacggctttctgctggacacgagtctggagcctcctctgtgcggacagacattgtgtgacaacacagaggtcattgccagctacaatcagctctcaagtttccgccagcccaaggtggtgcgctaccgcgtggtcaacctctatgaagatgatcataagaacccgacggtgacgcgcgagcaggtggacttccagcaccatcagctggctgaggccttcaagcaatacaacatctcctgggagctggacgtgctggaggtgagcaactcctcccttcgccgccgcctcatcctggccaactgtgacatcagcaagattggggatgagaactgtgaccccgagtgcaaccacacgctgacgggccacgacggcggggattgccgccacctgcgccaccctgccttcgtgaagaagcagcacaacggggtgtgtgacatggactgcaactatgaacggttcaactttgatggtggagagtgctgtgaccctgaaatcaccaatgtcactcagacttgctttgaccccgactctccacacagagcctacttggatgttaatgagctgaagaacattcttaaattggatggatcaacacatctcaatattttctttgcaaaatcctcagaggaggagttggcaggagtagcaacttggccatgggacaaggaggccctgatgcacttaggtggcattgtcttgaacccatctttctatggcatgcctgggcacacccacaccatgatccatgagattggtcacagcctgggcctctatcacgtcttccgaggcatctcagaaatccagtcctgcagtgacccctgcatggagacagagccctccttcgagactggagacctctgcaatgataccaacccagcccctaaacacaagtcctgtggtgacccagggccaggaaatgacacctgtggctttcatagcttcttcaacactccttacaacaacttcatgagctatgcagatgacgactgtacggactccttcacgcccaatcaagtcgccagaatgcactgttacctggacctggtctaccagggctggcagccctccaggaaaccagcgcctgttgccctcgccccccaagttctgggccacacaacggactctgtgacactggagtggttcccacctatagatggccatttctttgaaagagaattgggatcagcatgtcatctttgcctggaagggagaatcctggtgcagtatgcttccaacgcttcctccccaatgccctgcagcccatcaggacactggagccctcgtgaagcagaaggtcatcctgatgttgaacagccctgtaagtccagtgtccgcacctggagcccaaattcagctgtcaacccacacacggttcctccagcctgccctgagcctcaaggctgctacctcgagctggagttcctctaccccttggtccctgagtctctgaccatttgggtgacctttgtctccactgactgggactctagtggagctgtcaatgacatcaaactgttggctgtcagtgggaagaacatctccctgggtcctcagaatgtcttctgtgatgtcccactgaccatcagactctgggacgtgggcgaggaggtgtatggcatccaaatctacacgctggatgagcacctggagatcgatgctgccatgttgacctccactgcagacaccccactctgtctacagtgtaagcccctgaagtataaggtggtccgggaccctcctctccagatggatgtggcctccatcctacatctcaataggaaattcgtagacatggatctaaatcttggcagtgtgtaccagtattgggtcataactatttcaggaactgaagagagtgagccatcacctgctgtcacatacatccatggaagtgggtactgtggcgatggcattatacaaaaagaccaaggtgaacaatgcgacgacatgaataagatcaatggtgatggctgctcccttttctgccgacaagaagtctccttcaattgtattgatgaacccagccggtgctatttccatgatggtgatggggtatgtgaggagtttgaacaaaaaaccagcattaaggactgtggtgtctacacgccccagggattcctggatcagtgggcatccaatgcttcagtatctcatcaagaccagcaatgcccaggctgggtcatcatcggacagccagcagcatcccaggtgtgtcgaaccaaggtgatagatctcagtgaaggcatttcccagcatgcctggtacccttgcaccatcagctacccatattcccagctggctcagaccactttttggctccgggcgtatttttctcaaccaatggttgccgcagctgtcattgtccacctggtgacggatgggacatattatggggaccaaaagcaggagaccatcagcgtgcagctgcttgataccaaagatcagagccacgatctaggcctccatgtcctgagctgcaggaacaatcccctgattatccctgtggtccatgacctcagccagcccttctaccacagccaggcggtacgtgtgagcttcagttcgcccctggtcgccatctcgggggtggccctccgttccttcgacaactttgaccccgtcaccctgagcagctgccagagaggggagacctacagccctgccgagcagagctgcgtgcacttcgcatgtgagaaaactgactgtccagagctggctgtggagaatgcttatctcaattgctccagcagcgaccgctaccacggtgcccagtgtactgtgagctgccggacaggctacgtgctccagatacggcgggatgatgagctgatcaagagccagacgggacccagcgtcacagtgacctgtacagagggcaagtggaataagcaggtggcctgtgagccagtcgactgcagcatcccagatcaccatcaagtctatgctgcctccttctcctgccctgagggcaccacctttggcagtcaatgttccttccagtgccgtcaccctgcacaattgaaaggcaacaacagcctcctgacctgcatggaggatgggctgtggtccttcccagaggccctgtgtgagctcatgtgcctcgctccaccccctgtgcccaatgcagacctccagaccgcccggtgccgagagaataagcacaaggtgggctccttctgcaaatacaaatgcaagcctggataccatgtgcctggatcctctcggaagtcaaagaaacgggccttcaagactcagtgtacccaggatggcagctggcaggagggagcttgtgttcctgtgacctgtgacccacctccaccaaaattccatgggctctaccagtgtactaatggcttccagttcaacagtgagtgtaggatcaagtgtgaagacagtgatgcctcccagggacttgggagcaatgtcattcattgccggaaagatggcacctggaacggctccttccatgtctgccaggagatgcaaggccagtgctcggttccaaacgagctcaacagcaacctcaaactgcagtgccctgatggctatgccatagggtcggagtgtgccacctcgtgcctggaccacaacagcgagtccatcatcctgccaatgaacgtgaccgtgcgtgacatcccccactggctgaaccccacacgggtagagagagttgtctgcactgctggtctcaagtggtatcctcaccctgctctgattcactgtgtcaaaggctgtgagcccttcatgggagacaattattgtgatgccatcaacaaccgagccttttgcaactatgacggtggggattgctgcacctccacagtgaagaccaaaaaggtcaccccattccctatgtcctgtgacctacaaggtgactgtgcttgtcgggacccccaggcccaagaacacagccggaaagacctccggggatacagccatggctaaggaaggacaagaagttgtcaaagaattcccaacgccaggacccacatccctttggtattgatttcacagtcagctgctcaacggaatggcctctccacaccagggatccttagcacccaaccggtctgcctttaattttacccaggaaggactcacattggggcgaatgaaccaagtttcgccatgctggatgatgaaatggattcccatcccaaagtctgagatggattgcatatacagtgtgcagtcccagagcctcctaaaattctagccatttgtcacacaaccacagcaagaaacgtgttctatatctagagtgtgcccatctgtgtttagtacacatgcatgcatacacacccatacaaacatctgtgtgagggcagttctggagatgagcagagagagaccggaataaactcaatcttttctttcccaagctcctagccaacactatccttgggagaaagaaatttgcagaaactgctaagaccaagtgtggagatgtcaagctagttcacactctgaggctcagaatatgtaggacatgcacaattgtgcagtcctttgggattggaagtgaaacagtctgtgatcccctaccttctagggaactaggacctaggaagaggtaaagattatcaggtatgcaaagcgccccaattcttctgctgccatgggggattttaccccaactccagggttcgaggccaatctgagaatggcttaggattgcaatgtcaaggtattatatcagccccttgcttgaggcttgaggtcataatatccctctaggacttacctgttcccccagatcttgccttgggaccacatttgctgctacttttcctgctgctctatcctatacattgaataatccaagatggtagaactaggttaggaaaaattccacacaaccaaacagtctgccttaaaagtgacccacatttttccatagctcctcactttttagcccttctgcaagagaaaaaccctcatgggtccacatggtgagaagttaagtttcctgtaagtgggcctctcaccctggaaaggagttgagggacatcagatgctggaaccctcactgaaagtccagaatgtctaagccagtgttagattttgtaaacaagtggaacagtgttaaatttctatgatgttggagccatccagagactactggaattgtcgagacttttggattattatccttatccttatcctaatcttcctagcccttcaggctagagtaggcttcgatcctgagaaccttgctgttgctctgaggagatataattctgggagaaagaatcttttataagaacagtacagattgttctcaagagggccatcagaaggaagccaaagagttcacagcctcagcaccaacaactcaacatggtcatcatgttttctatatggtttttccagctagcagtactcccttccatacctgtgactgggcagtgcttttctctctcccatgtctagcctccaaaagttaagtgaaaattagtcaactgcacgtggaagcccccaccactttggggatctctttatttcttttcagccagggacagatgctaggagaacacttggagctggcctcctgacacagtcgacacttgcttctgaggtcacagtgcctactccggaactt

SEQ ID NO: 455121 - DNA, 8718 bp, Homo sapiens
ctgtccaggttgagtgagggtgtccaggatgaggaatgagggtgtccagggtgaggagtgagggagtccagggtgaggagtgagggagtccagggtgaggattgagggtgtcagggtgagtgagagtgtccagggtgaggagtgagggtatccagggtgagtgagggtgtccagggtgaggagtgagggtatccagggtgagtgagggtgtccagggtgagtgagggtgtcagggtgagtgaacgtgtccagggtgtgtgagggtgtccagggtgcagagtgaggtgtccagggtgaggagtgacggtgtctggggtgagtgagggtgtccagggtgaggagtgagggtgtcagggtgagtgagggtgtccagggttgagtgcacatgtgtggtgaggaggtgtttgcagtgcttcaggcgcagcaactctttcatctagtttaaaattgtgctctgaggttagattttagtagaacaaaggccttacaaagaatgtgaaaacattgtgcttccctgcttacaggcaattaaaaaggagaatcaagctgagggtgcctggtgtggggtggggtggagaagaccacagagactattgtgtgttttattcaacagtgtcctgggctgctttctccagaaatgtccctgacacatggatgtaagtgtggctagtttactgggagatgatcccagtgatgcaggacacgcgagccctaagattgaagcatagcccgggagggttcttagctttgcccaggaaggaactcaaggcaagccagtggtgttagcaacttttattgaagcggccggctgtgcacagcagcagcagaggcgctgctccttgcaaagcagggctgccctacaggctgtgcgcccacagtagcagctcagaggcagttctgcagtggtatttgtatccacttttaattatatgcaaatgaaggggcagtttatgcagacatttccagggtgagggtggtaacttctgggtgctgccagagccatcgtgaactgacttgacacaggtcggtgtgtcctatggaaactagcatctgccctggacctattttagctagtgctcagtttggtctgagtgcctgagccccacttccagagttgagtcccacctcctacctcattcccccttcagagattagatactcctccttaatcttaagggggcctcgagaagggcggagtcctgcttttccgtaactacttcctgctgagtttatggcacgtaggccctgcctggcactggaggacgtaaaaatttctggatacctgatctaaggagcccagaggcaggacgatttcattctccgtgtcagtggacaggatgggctggaagccttgtgccagcattgtctctggaactgtggtaatctagaatacacaaactttactaagaggttaaagaagcaaggaccaaacatttgtaacaagacagttgtcaaaggtcctagaagaggtgaaaaacaggtgagacttgggaaggcacttttgatggttgaccagatatagttggggcagtgccctggttatatctatgtaactaggtagcttgctcatagatcttttgaatgttaacctcaacctgtccagagttaatatatgtgcagcaggttttattaataactgcacaagaccccaccttgttcagctagtaaataatccaatgctagtctgttatcaacaactacattttccagagtctggggaactcttgaattctctttaatgcctgatctccgttggtggctaaggattctaggatttgagccaagttctttagcgttaactcatggtaggcaaagcaccccagggtgctgctagtcctattgccaccctgattcctgccagaaataagtaagcaagcaacaggacaatgaactccatgttgcccagatcccactgagagtgaacgtgcagtcatgcccataaccgacacacatcccagtccatgtgggtcagtccttcatcaccctccctgccttctgacaacagcagactccagccattccattatcattcacagcccaacccaagcagtcagtggctgaagaaagagaatcaggtatactctatgtccacatataccttcctgccacagggcttcaccaactggcaggattccccccagcccccaactcctcctcatcccttgttcccaggcgggtcaattggagagtgagcagagatagatggcttgcagaagggtatgcaagatggggagactccaccagaccttagggagagaatggcatctttctccaccttttaagagagacagagcctccctgaggtctcaaagatttttcagggcaacacaagaaacgtttccaagcctcagctgcaggtgttcacctttccactctggggtgtgaggagatggtaagctgaggacaagtgtgttccagatgcaggccaactctgttctccaacagtttgaaccaacttggccttggggttccaagggtaggatgaagggtgtcacggcaggacggggcctggcgtgaggcaacagcaagcagagcgaggacacaacagtggcagcagtgtacagacacaggacgtcagcttcaaacgatgcaacagcagggatatcttgggcacggctctgattcgagccactcccaactctcttgcctccaggatggaggcactgtacatgcaacagtccagagaaagattctagccagtccaagcccaggcacatccagagaaggtgggagctcttcgggttgactccaccgaggaaaacaggcatttgggtatttcagattcccgctccacaataaggcaacttttaaaaaaatattatttccaaaaacaaaacaaaaattccagggggagggaattcagcggatcagtcttaagaggagcttttttttggagcgagaaatcatataaaataaaatgaaataaaacaaggaggaaggcaaccagctgttaggggaaaaataaggcagataaaggagcggggagagaaattaattgccaaccaggaggagttgggctgtatttttcaaaggtggggagagtggagcacacaccttgaggaggaaagcgagaaagaaaagaaaaaagcaagtgaaggggggctcgcccaagaagggtgaagaagcgaagaaagtcgaggcgccgaggctcccaaagctggcagctccgggtggcggtgcaggggcgaaggggggggcggggggaacgtcggacatgcggctctggagttgggtgctgcacctggggctgctgagcgccgcgctgggctgcgggctggccgagcgtccccgccgggcccggagagacccgcgggccggccgacccccgcgccccgccgccggcccggccacctgcgccacccgcggcccgcggccgccgcgcctcgccgccgccgccgccgccgccgggcggtgcctgggaagccgtgcgcgtcccccggcggcggcagcagcgggaggcgaggggcgccaccgaggagccgagcccgccgagccgggcgctctatttcagcgggcgaggcgagcagctgcgcctccgggccgacctcgagctgccccgggacgcgttcacgctgcaagtgtggctgcgagcggaggggggccagaggtctccggcagtgatcacagggctgtatgacaaatgttcttatatctcacgtgaccgaggatgggtcgtgggcattcacaccatcagtgaccaagacaacaaagacccacgctactttttctccttgaagacagaccgagcccggcaagtgaccaccatcaatgcccaccgcagctacctcccaggccagtgggtatacctagctgccacctatgatgggcagttcatgaagctctatgtgaatggtgcccaggtggccacctctggggaacaagtgggtggcatattcagcccactgacccagaagtgcaaagtgctcatgttagggggcagtgccctgaatcacaactaccggggctacatcgagcacttcagtctgtggaaggtggccaggactcagcgggagatactgtctgacatggaaacccatggcgcccacactgctctacctcagctcctcctccaggagaactgggacaatgtgaagcatgcctggtcccccatgaaggatggcagcagccccaaagtggaattcagcaatgcccacggctttctgctggacacgagtctggagcctcctctgtgcggacagacattgtgtgacaacacagaggtcattgccagctacaatcagctctcaagtttccgccagcccaaggtggtgcgctaccgcgtggtcaacctctatgaagatgatcataagaacccgacggtgacgcgcgagcaggtggacttccagcaccatcagctggctgaggccttcaagcaatacaacatctcctgggagctggacgtgctggaggtgagcaactcctcccttcgccgccgcctcatcctggccaactgtgacatcagcaagattggggatgagaactgtgaccccgagtgcaaccacacgctgacgggccacgacggcggggattgccgccacctgcgccaccctgccttcgtgaagaagcagcacaacggggtgtgtgacatggactgcaactatgaacggttcaactttgatggtggagagtgctgtgaccctgaaatcaccaatgtcactcagacttgctttgaccccgactctccacacagagcctacttggatgttaatgagctgaagaacattcttaaattggatggatcaacacatctcaatattttctttgcaaaatcctcagaggaggagttggcaggagtagcaacttggccatgggacaaggaggccctgatgcacttaggtggcattgtcttgaacccatctttctatggcatgcctgggcacacccacaccatgatccatgagattggtcacagcctgggcctctatcacgtcttccgaggcatctcagaaatccagtcctgcagtgacccctgcatggagacagagccctccttcgagactggagacctctgcaatgataccaacccagcccctaaacacaagtcctgtggtgacccagggccaggaaatgacacctgtggctttcatagcttcttcaacactccttacaacaacttcatgagctatgcagatgacgactgtacggactccttcacgcccaatcaagtcgccagaatgcactgttacctggacctggtctaccagggctggcagccctccaggaaaccagcgcctgttgccctcgccccccaagttctgggccacacaacggactctgtgacactggagtggttcccacctatagatggccatttctttgaaagagaattgggatcagcatgtcatctttgcctggaagggagaatcctggtgcagtatgcttccaacgcttcctccccaatgccctgcagcccatcaggacactggagccctcgtgaagcagaaggtcatcctgatgttgaacagccctgtaagtccagtgtccgcacctggagcccaaattcagctgtcaacccacacacggttcctccagcctgccctgagcctcaaggctgctacctcgagctggagttcctctaccccttggtccctgagtctctgaccatttgggtgacctttgtctccactgactgggactctagtggagctgtcaatgacatcaaactgttggctgtcagtgggaagaacatctccctgggtcctcagaatgtcttctgtgatgtcccactgaccatcagactctgggacgtgggcgaggaggtgtatggcatccaaatctacacgctggatgagcacctggagatcgatgctgccatgttgacctccactgcagacaccccactctgtctacagtgtaagcccctgaagtataaggtggtccgggaccctcctctccagatggatgtggcctccatcctacatctcaataggaaattcgtagacatggatctaaatcttggcagtgtgtaccagtattgggtcataactatttcaggaactgaagagagtgagccatcacctgctgtcacatacatccatggaagtgggtactgtggcgatggcattatacaaaaagaccaaggtgaacaatgcgacgacatgaataagatcaatggtgatggctgctcccttttctgccgacaagaagtctccttcaattgtattgatgaacccagccggtgctatttccatgatggtgatggggtatgtgaggagtttgaacaaaaaaccagcattaaggactgtggtgtctacacgccccagggattcctggatcagtgggcatccaatgcttcagtatctcatcaagaccagcaatgcccaggctgggtcatcatcggacagccagcagcatcccaggtgtgtcgaaccaaggtgatagatctcagtgaaggcatttcccagcatgcctggtacccttgcaccatcagctacccatattcccagctggctcagaccactttttggctccgggcgtatttttctcaaccaatggttgccgcagctgtcattgtccacctggtgacggatgggacatattatggggaccaaaagcaggagaccatcagcgtgcagctgcttgataccaaagatcagagccacgatctaggcctccatgtcctgagctgcaggaacaatcccctgattatccctgtggtccatgacctcagccagcccttctaccacagccaggcggtacgtgtgagcttcagttcgcccctggtcgccatctcgggggtggccctccgttccttcgacaactttgaccccgtcaccctgagcagctgccagagaggggagacctacagccctgccgagcagagctgcgtgcacttcgcatgtgagaaaactgactgtccagagctggctgtggagaatgcttatctcaattgctccagcagcgaccgctaccacggtgcccagtgtactgtgagctgccggacaggctacgtgctccagatacggcgggatgatgagctgatcaagagccagacgggacccagcgtcacagtgacctgtacagagggcaagtggaataagcaggtggcctgtgagccagtcgactgcagcatcccagatcaccatcaagtctatgctgcctccttctcctgccctgagggcaccacctttggcagtcaatgttccttccagtgccgtcaccctgcacaattgaaaggcaacaacagcctcctgacctgcatggaggatgggctgtggtccttcccagaggccctgtgtgagctcatgtgcctcgctccaccccctgtgcccaatgcagacctccagaccgcccggtgccgagagaataagcacaaggtgggctccttctgcaaatacaaatgcaagcctggataccatgtgcctggatcctctcggaagtcaaagaaacgggccttcaagactcagtgtacccaggatggcagctggcaggagggagcttgtgttcctgtgacctgtgacccacctccaccaaaattccatgggctctaccagtgtactaatggcttccagttcaacagtgagtgtaggatcaagtgtgaagacagtgatgcctcccagggacttgggagcaatgtcattcattgccggaaagatggcacctggaacggctccttccatgtctgccaggagatgcaaggccagtgctcggttccaaacgagctcaacagcaacctcaaactgcagtgccctgatggctatgccatagggtcggagtgtgccacctcgtgcctggaccacaacagcgagtccatcatcctgccaatgaacgtgaccgtgcgtgacatcccccactggctgaaccccacacgggtagagagagttgtctgcactgctggtctcaagtggtatcctcaccctgctctgattcactgtgtcaaaggctgtgagcccttcatgggagacaattattgtgatgccatcaacaaccgagccttttgcaactatgacggtggggattgctgcacctccacagtgaagaccaaaaaggtcaccccattccctatgtcctgtgacctacaaggtgactgtgcttgtcgggacccccaggcccaagaacacagccggaaagacctccggggatacagccatggctaaggaaggacaagaagttgtcaaagaattcccaacgccaggacccacatccctttggtattgatttcacagtcagctgctcaacggaatggcctctccacaccagggatccttagcacccaaccggtctgcctttaattttacccaggaaggactcacattggggcgaatgaaccaagtttcgccatgctggatgatgaaatggattcccatcccaaagtctgagatggattgcatatacagtgtgcagtcccagagcctcctaaaattctagccatttgtcacacaaccacagcaagaaacgtgttctatatctagagtgtgcccatctgtgtttagtacacatgcatgcatacacacccatacaaacatctgtgtgagggcagttctggagatgagcagagagagaccggaagtatgtagtcctacatacttccggggggaggtaagtatattcttcatatacaggtaagagtgaaatgatagaagaatgttcctcctctccttttcttcctggaccacagatcaaatatttctcagatcttttacgctgaattggagtcacctggacaggtatgatcttacatataaaactattttaaatcacatgcccaaattttactaa

SEQ ID NO: 455122 - DNA, 8049 bp, Homo sapiens
ctgtccaggttgagtgagggtgtccaggatgaggaatgagggtgtccagggtgaggagtgagggagtccagggtgaggagtgagggagtccagggtgaggattgagggtgtcagggtgagtgagagtgtccagggtgaggagtgagggtatccagggtgagtgagggtgtccagggtgaggagtgagggtatccagggtgagtgagggtgtccagggtgagtgagggtgtcagggtgagtgaacgtgtccagggtgtgtgagggtgtccagggtgcagagtgaggtgtccagggtgaggagtgacggtgtctggggtgagtgagggtgtccagggtgaggagtgagggtgtcagggtgagtgagggtgtccagggttgagtgcacatgtgtggtgaggaggtgtttgcagtgcttcaggcgcagcaactctttcatctagtttaaaattgtgctctgaggttagattttagtagaacaaaggccttacaaagaatgtgaaaacattgtgcttccctgcttacaggcaattaaaaaggagaatcaagctgagggtgcctggtgtggggtggggtggagaagaccacagagactattgtgtgttttattcaacagtgtcctgggctgctttctccagaaatgtccctgacacatggatgtaagtgtggctagtttactgggagatgatcccagtgatgcaggacacgcgagccctaagattgaagcatagcccgggagggttcttagctttgcccaggaaggaactcaaggcaagccagtggtgttagcaacttttattgaagcggccggctgtgcacagcagcagcagaggcgctgctccttgcaaagcagggctgccctacaggctgtgcgcccacagtagcagctcagaggcagttctgcagtggtatttgtatccacttttaattatatgcaaatgaaggggcagtttatgcagacatttccagggtgagggtggtaacttctgggtgctgccagagccatcgtgaactgacttgacacaggtcggtgtgtcctatggaaactagcatctgccctggacctattttagctagtgctcagtttggtctgagtgcctgagccccacttccagagttgagtcccacctcctacctcattcccccttcagagattagatactcctccttaatcttaagggggcctcgagaagggcggagtcctgcttttccgtaactacttcctgctgagtttatggcacgtaggccctgcctggcactggaggacgtaaaaatttctggatacctgatctaaggagcccagaggcaggacgatttcattctccgtgtcagtggacaggatgggctggaagccttgtgccagcattgtctctggaactgtggtaatctagaatacacaaactttactaagaggttaaagaagcaaggaccaaacatttgtaacaagacagttgtcaaaggtcctagaagaggtgaaaaacaggtgagacttgggaaggcacttttgatggttgaccagatatagttggggcagtgccctggttatatctatgtaactaggtagcttgctcatagatcttttgaatgttaacctcaacctgtccagagttaatatatgtgcagcaggttttattaataactgcacaagaccccaccttgttcagctagtaaataatccaatgctagtctgttatcaacaactacattttccagagtctggggaactcttgaattctctttaatgcctgatctccgttggtggctaaggattctaggatttgagccaagttctttagcgttaactcatggtaggcaaagcaccccagggtgctgctagtcctattgccaccctgattcctgccagaaataagtaagcaagcaacaggacaatgaactccatgttgcccagatcccactgagagtgaacgtgcagtcatgcccataaccgacacacatcccagtccatgtgggtcagtccttcatcaccctccctgccttctgacaacagcagactccagccattccattatcattcacagcccaacccaagcagtcagtggctgaagaaagagaatcaggtatactctatgtccacatataccttcctgccacagggcttcaccaactggcaggattccccccagcccccaactcctcctcatcccttgttcccaggcgggtcaattggagagtgagcagagatagatggcttgcagaagggtatgcaagatggggagactccaccagaccttagggagagaatggcatctttctccaccttttaagagagacagagcctccctgaggtctcaaagatttttcagggcaacacaagaaacgtttccaagcctcagctgcaggtgttcacctttccactctggggtgtgaggagatggtaagctgaggacaagtgtgttccagatgcaggccaactctgttctccaacagtttgaaccaacttggccttggggttccaagggtaggatgaagggtgtcacggcaggacggggcctggcgtgaggcaacagcaagcagagcgaggacacaacagtggcagcagtgtacagacacaggacgtcagcttcaaacgatgcaacagcagggatatcttgggcacggctctgattcgagccactcccaactctcttgcctccaggatggaggcactgtacatgcaacagtccagagaaagattctagccagtccaagcccaggcacatccagagaaggtgggagctcttcgggttgactccaccgaggaaaacaggcatttgggtatttcagattcccgctccacaataaggcaacttttaaaaaaatattatttccaaaaacaaaacaaaaattccagggggagggaattcagcggatcagtcttaagaggagcttttttttggagcgagaaatcatataaaataaaatgaaataaaacaaggaggaaggcaaccagctgttaggggaaaaataaggcagataaaggagcggggagagaaattaattgccaaccaggaggagttgggctgtatttttcaaaggtggggagagtggagcacacaccttgaggaggaaagcgagaaagaaaagaaaaaagcaagtgaaggggggctcgcccaagaagggtgaagaagcgaagaaagtcgaggcgccgaggctcccaaagctggcagctccgggtggcggtgcaggggcgaaggggggggcggggggaacgtcggacatgcggctctggagttgggtgctgcacctggggctgctgagcgccgcgctgggctgcgggctggccgagcgtccccgccgggcccggagagacccgcgggccggccgacccccgcgccccgccgccggcccggccacctgcgccacccgcggcccgcggccgccgcgcctcgccgccgccgccgccgccgccgggcggtgcctgggaagccgtgcgcgtcccccggcggcggcagcagcgggaggcgaggggcgccaccgaggagccgagcccgccgagccgggcgctctatttcagcgggcgaggcgagcagctgcgcctccgggccgacctcgagctgccccgggacgcgttcacgctgcaagtgtggctgcgagcggaggggggccagaggtctccggcagtgatcacagggctgtatgacaaatgttcttatatctcacgtgaccgaggatgggtcgtgggcattcacaccatcagtgaccaagacaacaaagacccacgctactttttctccttgaagacagaccgagcccggcaagtgaccaccatcaatgcccaccgcagctacctcccaggccagtgggtatacctagctgccacctatgatgggcagttcatgaagctctatgtgaatggtgcccaggtggccacctctggggaacaagtgggtggcatattcagcccactgacccagaagtgcaaagtgctcatgttagggggcagtgccctgaatcacaactaccggggctacatcgagcacttcagtctgtggaaggtggccaggactcagcgggagatactgtctgacatggaaacccatggcgcccacactgctctacctcagctcctcctccaggagaactgggacaatgtgaagcatgcctggtcccccatgaaggatggcagcagccccaaagtggaattcagcaatgcccacggctttctgctggacacgagtctggagcctcctctgtgcggacagacattgtgtgacaacacagaggtcattgccagctacaatcagctctcaagtttccgccagcccaaggtggtgcgctaccgcgtggtcaacctctatgaagatgatcataagaacccgacggtgacgcgcgagcaggtggacttccagcaccatcagctggctgaggccttcaagcaatacaacatctcctgggagctggacgtgctggaggtgagcaactcctcccttcgccgccgcctcatcctggccaactgtgacatcagcaagattggggatgagaactgtgaccccgagtgcaaccacacgctgacgggccacgacggcggggattgccgccacctgcgccaccctgccttcgtgaagaagcagcacaacggggtgtgtgacatggactgcaactatgaacggttcaactttgatggtggagagtgctgtgaccctgaaatcaccaatgtcactcagacttgctttgaccccgactctccacacagagcctacttggatgttaatgagctgaagaacattcttaaattggatggatcaacacatctcaatattttctttgcaaaatcctcagaggaggagttggcaggagtagcaacttggccatgggacaaggaggccctgatgcacttaggtggcattgtcttgaacccatctttctatggcatgcctgggcacacccacaccatgatccatgagattggtcacagcctgggcctctatcacgtcttccgaggcatctcagaaatccagtcctgcagtgacccctgcatggagacagagccctccttcgagactggagacctctgcaatgataccaacccagcccctaaacacaagtcctgtggtgacccagggccaggaaatgacacctgtggctttcatagcttcttcaacactccttacaacaacttcatgagctatgcagatgacgactgtacggactccttcacgcccaatcaagtcgccagaatgcactgttacctggacctggtctaccagggctggcagccctccaggaaaccagcgcctgttgccctcgccccccaagttctgggccacacaacggactctgtgacactggagtggttcccacctatagatggccatttctttgaaagagaattgggatcagcatgtcatctttgcctggaagggagaatcctggtgcagtatgcttccaacgcttcctccccaatgccctgcagcccatcaggacactggagccctcgtgaagcagaaggtcatcctgatgttgaacagccctgtaagtccagtgtccgcacctggagcccaaattcagctgtcaacccacacacggttcctccagcctgccctgagcctcaaggctgctacctcgagctggagttcctctaccccttggtccctgagtctctgaccatttgggtgacctttgtctccactgactgggactctagtggagctgtcaatgacatcaaactgttggctgtcagtgggaagaacatctccctgggtcctcagaatgtcttctgtgatgtcccactgaccatcagactctgggacgtgggcgaggaggtgtatggcatccaaatctacacgctggatgagcacctggagatcgatgctgccatgttgacctccactgcagacaccccactctgtctacagtgtaagcccctgaagtataaggtggtccgggaccctcctctccagatggatgtggcctccatcctacatctcaataggaaattcgtagacatggatctaaatcttggcagtgtgtaccagtattgggtcataactatttcaggaactgaagagagtgagccatcacctgctgtcacatacatccatggaagtgggtactgtggcgatggcattatacaaaaagaccaaggtgaacaatgcgacgacatgaataagatcaatggtgatggctgctcccttttctgccgacaagaagtctccttcaattgtattgatgaacccagccggtgctatttccatgatggtgatggggtatgtgaggagtttgaacaaaaaaccagcattaaggactgtggtgtctacacgccccagggattcctggatcagtgggcatccaatgcttcagtatctcatcaagaccagcaatgcccaggctgggtcatcatcggacagccagcagcatcccaggtgtgtcgaaccaaggtgatagatctcagtgaaggcatttcccagcatgcctggtacccttgcaccatcagctacccatattcccagctggctcagaccactttttggctccgggcgtatttttctcaaccaatggttgccgcagctgtcattgtccacctggtgacggatgggacatattatggggaccaaaagcaggagaccatcagcgtgcagctgcttgataccaaagatcagagccacgatctaggcctccatgtcctgagctgcaggaacaatcccctgattatccctgtggtccatgacctcagccagcccttctaccacagccaggcggtacgtgtgagcttcagttcgcccctggtcgccatctcgggggtggccctccgttccttcgacaactttgaccccgtcaccctgagcagctgccagagaggggagacctacagccctgccgagcagagctgcgtgcacttcgcatgtgagaaaactgactgtccagagctggctgtggagaatgcttatctcaattgctccagcagcgaccgctaccacggtgcccagtgtactgtgagctgccggacaggctacgtgctccagatacggcgggatgatgagctgatcaagagccagacgggacccagcgtcacagtgacctgtacagagggcaagtggaataagcaggtggcctgtgagccagtcgactgcagcatcccagatcaccatcaagtctatgctgcctccttctcctgccctgagggcaccacctttggcagtcaatgttccttccagtgccgtcaccctgcacaattgaaaggcaacaacagcctcctgacctgcatggaggatgggctgtggtccttcccagaggccctgtgtgagctcatgtgcctcgctccaccccctgtgcccaatgcagacctccagaccgcccggtgccgagagaataagcacaaggtgggctccttctgcaaatacaaatgcaagcctggataccatgtgcctggatcctctcggaagtcaaagaaacgggccttcaagactcagtgtacccaggatggcagctggcaggagggagcttgtgttcctgtgacctgtgacccacctccaccaaaattccatgggctctaccagtgtactaatggcttccagttcaacagtgagtgtaggatcaagtgtgaagacagtgatgcctcccagggacttgggagcaatgtcattcattgccggaaagatggcacctggaacggctccttccatgtctgccaggagatgcaaggccagtgctcggttccaaacgagctcaacagcaacctcaaactgcagtgccctgatggctatgccatagggtcggagtgtgccacctcgtgcctggaccacaacagcgagtccatcatcctgccaatgaacgtgaccgtgcgtgacatcccccactggctgaaccccacacgggtagaggtgagtgaccagggacatctacccacctgcagctaagggggagggaaatgatattgttgagcacttgctatgtcccggttctgagttcattctttcacacatattacctcatttaatcatcacacctgccctgtgggtgtgtgttgcagggaggtggggtagagtcgggaggagacttattcacaatcatttctctagtccttaattatttaatactttctctctgtcaggt

SEQ ID NO: 455123 - DNA, 7719 bp, Homo sapiens
ctgtccaggttgagtgagggtgtccaggatgaggaatgagggtgtccagggtgaggagtgagggagtccagggtgaggagtgagggagtccagggtgaggattgagggtgtcagggtgagtgagagtgtccagggtgaggagtgagggtatccagggtgagtgagggtgtccagggtgaggagtgagggtatccagggtgagtgagggtgtccagggtgagtgagggtgtcagggtgagtgaacgtgtccagggtgtgtgagggtgtccagggtgcagagtgaggtgtccagggtgaggagtgacggtgtctggggtgagtgagggtgtccagggtgaggagtgagggtgtcagggtgagtgagggtgtccagggttgagtgcacatgtgtggtgaggaggtgtttgcagtgcttcaggcgcagcaactctttcatctagtttaaaattgtgctctgaggttagattttagtagaacaaaggccttacaaagaatgtgaaaacattgtgcttccctgcttacaggcaattaaaaaggagaatcaagctgagggtgcctggtgtggggtggggtggagaagaccacagagactattgtgtgttttattcaacagtgtcctgggctgctttctccagaaatgtccctgacacatggatgtaagtgtggctagtttactgggagatgatcccagtgatgcaggacacgcgagccctaagattgaagcatagcccgggagggttcttagctttgcccaggaaggaactcaaggcaagccagtggtgttagcaacttttattgaagcggccggctgtgcacagcagcagcagaggcgctgctccttgcaaagcagggctgccctacaggctgtgcgcccacagtagcagctcagaggcagttctgcagtggtatttgtatccacttttaattatatgcaaatgaaggggcagtttatgcagacatttccagggtgagggtggtaacttctgggtgctgccagagccatcgtgaactgacttgacacaggtcggtgtgtcctatggaaactagcatctgccctggacctattttagctagtgctcagtttggtctgagtgcctgagccccacttccagagttgagtcccacctcctacctcattcccccttcagagattagatactcctccttaatcttaagggggcctcgagaagggcggagtcctgcttttccgtaactacttcctgctgagtttatggcacgtaggccctgcctggcactggaggacgtaaaaatttctggatacctgatctaaggagcccagaggcaggacgatttcattctccgtgtcagtggacaggatgggctggaagccttgtgccagcattgtctctggaactgtggtaatctagaatacacaaactttactaagaggttaaagaagcaaggaccaaacatttgtaacaagacagttgtcaaaggtcctagaagaggtgaaaaacaggtgagacttgggaaggcacttttgatggttgaccagatatagttggggcagtgccctggttatatctatgtaactaggtagcttgctcatagatcttttgaatgttaacctcaacctgtccagagttaatatatgtgcagcaggttttattaataactgcacaagaccccaccttgttcagctagtaaataatccaatgctagtctgttatcaacaactacattttccagagtctggggaactcttgaattctctttaatgcctgatctccgttggtggctaaggattctaggatttgagccaagttctttagcgttaactcatggtaggcaaagcaccccagggtgctgctagtcctattgccaccctgattcctgccagaaataagtaagcaagcaacaggacaatgaactccatgttgcccagatcccactgagagtgaacgtgcagtcatgcccataaccgacacacatcccagtccatgtgggtcagtccttcatcaccctccctgccttctgacaacagcagactccagccattccattatcattcacagcccaacccaagcagtcagtggctgaagaaagagaatcaggtatactctatgtccacatataccttcctgccacagggcttcaccaactggcaggattccccccagcccccaactcctcctcatcccttgttcccaggcgggtcaattggagagtgagcagagatagatggcttgcagaagggtatgcaagatggggagactccaccagaccttagggagagaatggcatctttctccaccttttaagagagacagagcctccctgaggtctcaaagatttttcagggcaacacaagaaacgtttccaagcctcagctgcaggtgttcacctttccactctggggtgtgaggagatggtaagctgaggacaagtgtgttccagatgcaggccaactctgttctccaacagtttgaaccaacttggccttggggttccaagggtaggatgaagggtgtcacggcaggacggggcctggcgtgaggcaacagcaagcagagcgaggacacaacagtggcagcagtgtacagacacaggacgtcagcttcaaacgatgcaacagcagggatatcttgggcacggctctgattcgagccactcccaactctcttgcctccaggatggaggcactgtacatgcaacagtccagagaaagattctagccagtccaagcccaggcacatccagagaaggtgggagctcttcgggttgactccaccgaggaaaacaggcatttgggtatttcagattcccgctccacaataaggcaacttttaaaaaaatattatttccaaaaacaaaacaaaaattccagggggagggaattcagcggatcagtcttaagaggagcttttttttggagcgagaaatcatataaaataaaatgaaataaaacaaggaggaaggcaaccagctgttaggggaaaaataaggcagataaaggagcggggagagaaattaattgccaaccaggaggagttgggctgtatttttcaaaggtggggagagtggagcacacaccttgaggaggaaagcgagaaagaaaagaaaaaagcaagtgaaggggggctcgcccaagaagggtgaagaagcgaagaaagtcgaggcgccgaggctcccaaagctggcagctccgggtggcggtgcaggggcgaaggggggggcggggggaacgtcggacatgcggctctggagttgggtgctgcacctggggctgctgagcgccgcgctgggctgcgggctggccgagcgtccccgccgggcccggagagacccgcgggccggccgacccccgcgccccgccgccggcccggccacctgcgccacccgcggcccgcggccgccgcgcctcgccgccgccgccgccgccgccgggcggtgcctgggaagccgtgcgcgtcccccggcggcggcagcagcgggaggcgaggggcgccaccgaggagccgagcccgccgagccgggcgctctatttcagcgggcgaggcgagcagctgcgcctccgggccgacctcgagctgccccgggacgcgttcacgctgcaagtgtggctgcgagcggaggggggccagaggtctccggcagtgatcacagggctgtatgacaaatgttcttatatctcacgtgaccgaggatgggtcgtgggcattcacaccatcagtgaccaagacaacaaagacccacgctactttttctccttgaagacagaccgagcccggcaagtgaccaccatcaatgcccaccgcagctacctcccaggccagtgggtatacctagctgccacctatgatgggcagttcatgaagctctatgtgaatggtgcccaggtggccacctctggggaacaagtgggtggcatattcagcccactgacccagaagtgcaaagtgctcatgttagggggcagtgccctgaatcacaactaccggggctacatcgagcacttcagtctgtggaaggtggccaggactcagcgggagatactgtctgacatggaaacccatggcgcccacactgctctacctcagctcctcctccaggagaactgggacaatgtgaagcatgcctggtcccccatgaaggatggcagcagccccaaagtggaattcagcaatgcccacggctttctgctggacacgagtctggagcctcctctgtgcggacagacattgtgtgacaacacagaggtcattgccagctacaatcagctctcaagtttccgccagcccaaggtggtgcgctaccgcgtggtcaacctctatgaagatgatcataagaacccgacggtgacgcgcgagcaggtggacttccagcaccatcagctggctgaggccttcaagcaatacaacatctcctgggagctggacgtgctggaggtgagcaactcctcccttcgccgccgcctcatcctggccaactgtgacatcagcaagattggggatgagaactgtgaccccgagtgcaaccacacgctgacgggccacgacggcggggattgccgccacctgcgccaccctgccttcgtgaagaagcagcacaacggggtgtgtgacatggactgcaactatgaacggttcaactttgatggtggagagtgctgtgaccctgaaatcaccaatgtcactcagacttgctttgaccccgactctccacacagagcctacttggatgttaatgagctgaagaacattcttaaattggatggatcaacacatctcaatattttctttgcaaaatcctcagaggaggagttggcaggagtagcaacttggccatgggacaaggaggccctgatgcacttaggtggcattgtcttgaacccatctttctatggcatgcctgggcacacccacaccatgatccatgagattggtcacagcctgggcctctatcacgtcttccgaggcatctcagaaatccagtcctgcagtgacccctgcatggagacagagccctccttcgagactggagacctctgcaatgataccaacccagcccctaaacacaagtcctgtggtgacccagggccaggaaatgacacctgtggctttcatagcttcttcaacactccttacaacaacttcatgagctatgcagatgacgactgtacggactccttcacgcccaatcaagtcgccagaatgcactgttacctggacctggtctaccagggctggcagccctccaggaaaccagcgcctgttgccctcgccccccaagttctgggccacacaacggactctgtgacactggagtggttcccacctatagatggccatttctttgaaagagaattgggatcagcatgtcatctttgcctggaagggagaatcctggtgcagtatgcttccaacgcttcctccccaatgccctgcagcccatcaggacactggagccctcgtgaagcagaaggtcatcctgatgttgaacagccctgtaagtccagtgtccgcacctggagcccaaattcagctgtcaacccacacacggttcctccagcctgccctgagcctcaaggctgctacctcgagctggagttcctctaccccttggtccctgagtctctgaccatttgggtgacctttgtctccactgactgggactctagtggagctgtcaatgacatcaaactgttggctgtcagtgggaagaacatctccctgggtcctcagaatgtcttctgtgatgtcccactgaccatcagactctgggacgtgggcgaggaggtgtatggcatccaaatctacacgctggatgagcacctggagatcgatgctgccatgttgacctccactgcagacaccccactctgtctacagtgtaagcccctgaagtataaggtggtccgggaccctcctctccagatggatgtggcctccatcctacatctcaataggaaattcgtagacatggatctaaatcttggcagtgtgtaccagtattgggtcataactatttcaggaactgaagagagtgagccatcacctgctgtcacatacatccatggaagtgggtactgtggcgatggcattatacaaaaagaccaaggtgaacaatgcgacgacatgaataagatcaatggtgatggctgctcccttttctgccgacaagaagtctccttcaattgtattgatgaacccagccggtgctatttccatgatggtgatggggtatgtgaggagtttgaacaaaaaaccagcattaaggactgtggtgtctacacgccccagggattcctggatcagtgggcatccaatgcttcagtatctcatcaagaccagcaatgcccaggctgggtcatcatcggacagccagcagcatcccaggtgtgtcgaaccaaggtgatagatctcagtgaaggcatttcccagcatgcctggtacccttgcaccatcagctacccatattcccagctggctcagaccactttttggctccgggcgtatttttctcaaccaatggttgccgcagctgtcattgtccacctggtgacggatgggacatattatggggaccaaaagcaggagaccatcagcgtgcagctgcttgataccaaagatcagagccacgatctaggcctccatgtcctgagctgcaggaacaatcccctgattatccctgtggtccatgacctcagccagcccttctaccacagccaggcggtacgtgtgagcttcagttcgcccctggtcgccatctcgggggtggccctccgttccttcgacaactttgaccccgtcaccctgagcagctgccagagaggggagacctacagccctgccgagcagagctgcgtgcacttcgcatgtgagaaaactgactgtccagagctggctgtggagaatgcttatctcaattgctccagcagcgaccgctaccacggtgcccagtgtactgtgagctgccggacaggctacgtgctccagatacggcgggatgatgagctgatcaagagccagacgggacccagcgtcacagtgacctgtacagagggcaagtggaataagcaggtggcctgtgagccagtcgactgcagcatcccagatcaccatcaagtctatgctgcctccttctcctgccctgagggcaccacctttggcagtcaatgttccttccagtgccgtcaccctgcacaattgaaaggcaacaacagcctcctgacctgcatggaggatgggctgtggtccttcccagaggccctgtgtgagctcatgtgcctcgctccaccccctgtgcccaatgcagacctccagaccgcccggtgccgagagaataagcacaaggtgggctccttctgcaaatacaaatgcaagcctggataccatgtgcctggatcctctcggaagtcaaagaagtaagtggggttggaaatgcaaacttatggtctctgggaggacaagagttaggttcaaatgcctgactggacggaagcactcatttcttcactggaggtaatgactgccattcatcccattctgttctgtgagaagctagaaggatttgttaataatattagctttgggtcaaacagggacttaccagtcacgacgctttgtctacacaatgccgaggtcatttcgcacaaatcattttacttgtctgcacttaattattatcgcaacacacaagatacacatgataataacagtagtatataaggttgaattatgtgagccgaacagtgta

SEQ ID NO: 455124 - DNA, 3254 bp, Homo sapiens
atcggccggccagattttctatgcacagaagaaccttaccagcttccctcaaatcagtccttatcctctttctatcttcactcccatcatcatctattttcacactatccagctaagcaaagattcctggaggctgacttgtatcttcagactcacagagtgaattcagctcttctgaatcaagacccacccagtctctttcattcagacctgttgctaacaaatttatatttgccaaggatattaggcaaaagaggctacttgattggtggccaacctcgtgcccacatggaaggtatctttaatagggtcttttcaaaccttagtggaggagggtcagctcaatttgggcaatgcatttgttcccagtttcattttcttcctgggaattaactcgtcatttcattccttcagtcatcttctgtgtaggtgaccggagcactgagaggcagctctgatgcactattgtgtgtcagcagctcaaaggccctaaaacactgaaggttctgcatctgaagtattagattgttagcagcaaaatatgaaagatgaggtggacagtcctctaagccctatttagggaagcttttccaagccacaatcttaactacctacccaaaggatttgcattacccccagattctgtgccaacaaccttttaaggaaatacagtccttgggaaatgagttttgatggtgaattggggtgttaaggaagggaaagattgtcatagatggtagggctttgaaaatgcagggtatcagctgccactcctggcttcaacacattgagtcactgcctagacggttctcttggtcttattcccatcctggccaatgcttaaatactatttgttgaaaataattctttgagacagatttcagctacctcccttccaggttcgatttaacttggttgtaattgtcaatttgttgttataggtcttacctgtgtgaaagaaagaaaaagaaagaaagaaagaaagagaaaggaaattataaggtcaagttaacagttttgaggttttgtgtttttttctggaactacttcaagtgagaaaataaaaaaaaatggtgacaaagctgtacagatagagataatagaagacaaagagattaaaaggaaataaaaatgcatgattaaaaactaagaataaaaaacctatttttatgtttcctaaaggaaattgtttattctacagactcagtaggtagacacaaacataaagatttccctagaagacatagagtgggatttgataacactgtctgttattttctgtacattgtggtaggtccaggaaatatgacattttcccccttgatgtgttattgttgttgttgggtggggtgggcattttgtttatttgtttggtggcaatcagtggtagtagggagtgggagggcttatattggtttttccagctattaaggggacatattgtgtcgttgtgcttttcacgttataaaatgtttatatttaccagtacagcactgggctttataaagactgcactcagaaccacactgcacagtccagttttttaaaaagctgctacatgacagacaggtaatcccactgagtgagttttgagaaacaaatcaaacgaagtaaacaagaaacataaaaaccaaatagcaaatgaataaaagcctgttcttgtaacttattcaacttttgccaaattcctaccaatcacttgctttttaaaagaaatgtataatagccaaaagagaaattatgtccctgttgtacagaagttagaatttttgactccaggcagcagtttgctcagtgatcttgaacaagttatccaattgcctctacatttgcatcagtttctctagctgcaaaatggggataatactatatacctacctcacagtgggagggcaggagattttgaggccctgaggttttaggtgggctgtgagggccaacgcttgacacaaagtccatgggttattattcaagaatgcacaggcccatcggccttttagaaagacaagacagggagtgcttgtttgatatttcaaggaataaagccggagctcctgaattgtagtccaccttaaaagagagacctgtattggagaatattttatttttttggcaaatttgatcttaccctttaccagttctataatttggttaaaagctgattacgtcctacaatgtcaaagtcagctaactgtcgtctacttaagacttctggtcatttccaacttatagaggaagggagtctctaaaatctcttcttcagaaggcacctcacttctcagacttaaaattccacatcaagtgttccattaaaagaagataaggcattctgagtgcaaacaaatgggggcttcttaaactacacaccagcagtcagtgaggaaaactttgaacaattattgagttgctttcttgggtctctataatcaataacctgtctgcagatatctatctatataaagatattatatataaatataaatttacatatatatgcacatgtatatatagttgtacatatatgtgtgtatatatatacttaaatgtaatatttacaaaataaaactgtgatctcgtctagagaaaatgtattcatattacaaactgctcttccatatttatgtaccatattatacctttttattattgttataattattatgggtatttctaattaatatgatgttgaaacctgtttggcaccttctggaagctaccaaaaaaatgacactccattgaagtgcttaaaagctgttctcataagaattctactggcctattgtaaaaaagaaaaaaaaaagaaaaagaagaaagacacaaagaaaataatctaaacaccaaaaactaaacacaattccaatcctttttctgtacctcacgcgcataaatttggctgctcctatttttttttctgtttatgtgtttttatggatctaagttaaatcttttggcaatatataaaaatgtaaatagtaaactttatttattaagaatgtcatcttttttaatttatatttacacaattgttcatctaatttattttttctatacagttttaaatactcagacatattttgctgttcatgatatttttatcctgttctcatggatttgttttcccatactgttttctctgatctcaattacaggttggatctcacaaataataatgtcagagacagaaatattttgccactgttgattactatactttaaagttctatattatgaaaatatataatagcttgtacgct

SEQ ID NO: 455125 - DNA, 6455 bp, Homo sapiens
ctgtccaggttgagtgagggtgtccaggatgaggaatgagggtgtccagggtgaggagtgagggagtccagggtgaggagtgagggagtccagggtgaggattgagggtgtcagggtgagtgagagtgtccagggtgaggagtgagggtatccagggtgagtgagggtgtccagggtgaggagtgagggtatccagggtgagtgagggtgtccagggtgagtgagggtgtcagggtgagtgaacgtgtccagggtgtgtgagggtgtccagggtgcagagtgaggtgtccagggtgaggagtgacggtgtctggggtgagtgagggtgtccagggtgaggagtgagggtgtcagggtgagtgagggtgtccagggttgagtgcacatgtgtggtgaggaggtgtttgcagtgcttcaggcgcagcaactctttcatctagtttaaaattgtgctctgaggttagattttagtagaacaaaggccttacaaagaatgtgaaaacattgtgcttccctgcttacaggcaattaaaaaggagaatcaagctgagggtgcctggtgtggggtggggtggagaagaccacagagactattgtgtgttttattcaacagtgtcctgggctgctttctccagaaatgtccctgacacatggatgtaagtgtggctagtttactgggagatgatcccagtgatgcaggacacgcgagccctaagattgaagcatagcccgggagggttcttagctttgcccaggaaggaactcaaggcaagccagtggtgttagcaacttttattgaagcggccggctgtgcacagcagcagcagaggcgctgctccttgcaaagcagggctgccctacaggctgtgcgcccacagtagcagctcagaggcagttctgcagtggtatttgtatccacttttaattatatgcaaatgaaggggcagtttatgcagacatttccagggtgagggtggtaacttctgggtgctgccagagccatcgtgaactgacttgacacaggtcggtgtgtcctatggaaactagcatctgccctggacctattttagctagtgctcagtttggtctgagtgcctgagccccacttccagagttgagtcccacctcctacctcattcccccttcagagattagatactcctccttaatcttaagggggcctcgagaagggcggagtcctgcttttccgtaactacttcctgctgagtttatggcacgtaggccctgcctggcactggaggacgtaaaaatttctggatacctgatctaaggagcccagaggcaggacgatttcattctccgtgtcagtggacaggatgggctggaagccttgtgccagcattgtctctggaactgtggtaatctagaatacacaaactttactaagaggttaaagaagcaaggaccaaacatttgtaacaagacagttgtcaaaggtcctagaagaggtgaaaaacaggtgagacttgggaaggcacttttgatggttgaccagatatagttggggcagtgccctggttatatctatgtaactaggtagcttgctcatagatcttttgaatgttaacctcaacctgtccagagttaatatatgtgcagcaggttttattaataactgcacaagaccccaccttgttcagctagtaaataatccaatgctagtctgttatcaacaactacattttccagagtctggggaactcttgaattctctttaatgcctgatctccgttggtggctaaggattctaggatttgagccaagttctttagcgttaactcatggtaggcaaagcaccccagggtgctgctagtcctattgccaccctgattcctgccagaaataagtaagcaagcaacaggacaatgaactccatgttgcccagatcccactgagagtgaacgtgcagtcatgcccataaccgacacacatcccagtccatgtgggtcagtccttcatcaccctccctgccttctgacaacagcagactccagccattccattatcattcacagcccaacccaagcagtcagtggctgaagaaagagaatcaggtatactctatgtccacatataccttcctgccacagggcttcaccaactggcaggattccccccagcccccaactcctcctcatcccttgttcccaggcgggtcaattggagagtgagcagagatagatggcttgcagaagggtatgcaagatggggagactccaccagaccttagggagagaatggcatctttctccaccttttaagagagacagagcctccctgaggtctcaaagatttttcagggcaacacaagaaacgtttccaagcctcagctgcaggtgttcacctttccactctggggtgtgaggagatggtaagctgaggacaagtgtgttccagatgcaggccaactctgttctccaacagtttgaaccaacttggccttggggttccaagggtaggatgaagggtgtcacggcaggacggggcctggcgtgaggcaacagcaagcagagcgaggacacaacagtggcagcagtgtacagacacaggacgtcagcttcaaacgatgcaacagcagggatatcttgggcacggctctgattcgagccactcccaactctcttgcctccaggatggaggcactgtacatgcaacagtccagagaaagattctagccagtccaagcccaggcacatccagagaaggtgggagctcttcgggttgactccaccgaggaaaacaggcatttgggtatttcagattcccgctccacaataaggcaacttttaaaaaaatattatttccaaaaacaaaacaaaaattccagggggagggaattcagcggatcagtcttaagaggagcttttttttggagcgagaaatcatataaaataaaatgaaataaaacaaggaggaaggcaaccagctgttaggggaaaaataaggcagataaaggagcggggagagaaattaattgccaaccaggaggagttgggctgtatttttcaaaggtggggagagtggagcacacaccttgaggaggaaagcgagaaagaaaagaaaaaagcaagtgaaggggggctcgcccaagaagggtgaagaagcgaagaaagtcgaggcgccgaggctcccaaagctggcagctccgggtggcggtgcaggggcgaaggggggggcggggggaacgtcggacatgcggctctggagttgggtgctgcacctggggctgctgagcgccgcgctgggctgcgggctggccgagcgtccccgccgggcccggagagacccgcgggccggccgacccccgcgccccgccgccggcccggccacctgcgccacccgcggcccgcggccgccgcgcctcgccgccgccgccgccgccgccgggcggtgcctgggaagccgtgcgcgtcccccggcggcggcagcagcgggaggcgaggggcgccaccgaggagccgagcccgccgagccgggcgctctatttcagcgggcgaggcgagcagctgcgcctccgggccgacctcgagctgccccgggacgcgttcacgctgcaagtgtggctgcgagcggaggggggccagaggtctccggcagtgatcacagggctgtatgacaaatgttcttatatctcacgtgaccgaggatgggtcgtgggcattcacaccatcagtgaccaagacaacaaagacccacgctactttttctccttgaagacagaccgagcccggcaagtgaccaccatcaatgcccaccgcagctacctcccaggccagtgggtatacctagctgccacctatgatgggcagttcatgaagctctatgtgaatggtgcccaggtggccacctctggggaacaagtgggtggcatattcagcccactgacccagaagtgcaaagtgctcatgttagggggcagtgccctgaatcacaactaccggggctacatcgagcacttcagtctgtggaaggtggccaggactcagcgggagatactgtctgacatggaaacccatggcgcccacactgctctacctcagctcctcctccaggagaactgggacaatgtgaagcatgcctggtcccccatgaaggatggcagcagccccaaagtggaattcagcaatgcccacggctttctgctggacacgagtctggagcctcctctgtgcggacagacattgtgtgacaacacagaggtcattgccagctacaatcagctctcaagtttccgccagcccaaggtggtgcgctaccgcgtggtcaacctctatgaagatgatcataagaacccgacggtgacgcgcgagcaggtggacttccagcaccatcagctggctgaggccttcaagcaatacaacatctcctgggagctggacgtgctggaggtgagcaactcctcccttcgccgccgcctcatcctggccaactgtgacatcagcaagattggggatgagaactgtgaccccgagtgcaaccacacgctgacgggccacgacggcggggattgccgccacctgcgccaccctgccttcgtgaagaagcagcacaacggggtgtgtgacatggactgcaactatgaacggttcaactttgatggtggagagtgctgtgaccctgaaatcaccaatgtcactcagacttgctttgaccccgactctccacacagagcctacttggatgttaatgagctgaagaacattcttaaattggatggatcaacacatctcaatattttctttgcaaaatcctcagaggaggagttggcaggagtagcaacttggccatgggacaaggaggccctgatgcacttaggtggcattgtcttgaacccatctttctatggcatgcctgggcacacccacaccatgatccatgagattggtcacagcctgggcctctatcacgtcttccgaggcatctcagaaatccagtcctgcagtgacccctgcatggagacagagccctccttcgagactggagacctctgcaatgataccaacccagcccctaaacacaagtcctgtggtgacccagggccaggaaatgacacctgtggctttcatagcttcttcaacactccttacaacaacttcatgagctatgcagatgacgactgtacggactccttcacgcccaatcaagtcgccagaatgcactgttacctggacctggtctaccagggctggcagccctccaggaaaccagcgcctgttgccctcgccccccaagttctgggccacacaacggactctgtgacactggagtggttcccacctatagatggccatttctttgaaagagaattgggatcagcatgtcatctttgcctggaagggagaatcctggtgcagtatgcttccaacgcttcctccccaatgccctgcagcccatcaggacactggagccctcgtgaagcagaaggtcatcctgatgttgaacagccctgtaagtccagtgtccgcacctggagcccaaattcagctgtcaacccacacacggttcctccagcctgccctgagcctcaaggctgctacctcgagctggagttcctctaccccttggtccctgagtctctgaccatttgggtgacctttgtctccactgactgggactctagtggagctgtcaatgacatcaaactgttggctgtcagtgggaagaacatctccctgggtcctcagaatgtcttctgtgatgtcccactgaccatcagactctgggacgtgggcgaggaggtgtatggcatccaaatctacacgctggatgagcacctggagatcgatgctgccatgttgacctccactgcagacaccccactctgtctacagtgtaagcccctgaagtataaggtggtccgggaccctcctctccagatggatgtggcctccatcctacatctcaataggaaattcgtagacatggatctaaatcttggcagtgtgtaccagtattgggtcataactatttcaggaactgaagagagtgagccatcacctgctgtcacatacatccatggaagtgggtactgtggcgatggcattatacaaaaagaccaaggtgaacaatgcgacgacatgaataagatcaatggtgatggctgctcccttttctgccgacaagaagtctccttcaattgtattgatgaacccagccggtgctatttccatgatggtgatggggtatgtgaggagtttgaacaaaaaaccagcattaaggactgtggtgtctacacgccccagggattcctggatcagtgggcatccaatgcttcagtatctcatcaagaccagcaatgcccaggctgggtcatcatcggacagccagcagcatcccaggtgtgtcgaaccaaggtgatagatctcagtgaaggcatttcccagcatgcctggtacccttgcaccatcaagcaccagcacgagtgggatcctcta

SEQ ID NO: 455126 - DNA, 6710 bp, Homo sapiens
ctgtccaggttgagtgagggtgtccaggatgaggaatgagggtgtccagggtgaggagtgagggagtccagggtgaggagtgagggagtccagggtgaggattgagggtgtcagggtgagtgagagtgtccagggtgaggagtgagggtatccagggtgagtgagggtgtccagggtgaggagtgagggtatccagggtgagtgagggtgtccagggtgagtgagggtgtcagggtgagtgaacgtgtccagggtgtgtgagggtgtccagggtgcagagtgaggtgtccagggtgaggagtgacggtgtctggggtgagtgagggtgtccagggtgaggagtgagggtgtcagggtgagtgagggtgtccagggttgagtgcacatgtgtggtgaggaggtgtttgcagtgcttcaggcgcagcaactctttcatctagtttaaaattgtgctctgaggttagattttagtagaacaaaggccttacaaagaatgtgaaaacattgtgcttccctgcttacaggcaattaaaaaggagaatcaagctgagggtgcctggtgtggggtggggtggagaagaccacagagactattgtgtgttttattcaacagtgtcctgggctgctttctccagaaatgtccctgacacatggatgtaagtgtggctagtttactgggagatgatcccagtgatgcaggacacgcgagccctaagattgaagcatagcccgggagggttcttagctttgcccaggaaggaactcaaggcaagccagtggtgttagcaacttttattgaagcggccggctgtgcacagcagcagcagaggcgctgctccttgcaaagcagggctgccctacaggctgtgcgcccacagtagcagctcagaggcagttctgcagtggtatttgtatccacttttaattatatgcaaatgaaggggcagtttatgcagacatttccagggtgagggtggtaacttctgggtgctgccagagccatcgtgaactgacttgacacaggtcggtgtgtcctatggaaactagcatctgccctggacctattttagctagtgctcagtttggtctgagtgcctgagccccacttccagagttgagtcccacctcctacctcattcccccttcagagattagatactcctccttaatcttaagggggcctcgagaagggcggagtcctgcttttccgtaactacttcctgctgagtttatggcacgtaggccctgcctggcactggaggacgtaaaaatttctggatacctgatctaaggagcccagaggcaggacgatttcattctccgtgtcagtggacaggatgggctggaagccttgtgccagcattgtctctggaactgtggtaatctagaatacacaaactttactaagaggttaaagaagcaaggaccaaacatttgtaacaagacagttgtcaaaggtcctagaagaggtgaaaaacaggtgagacttgggaaggcacttttgatggttgaccagatatagttggggcagtgccctggttatatctatgtaactaggtagcttgctcatagatcttttgaatgttaacctcaacctgtccagagttaatatatgtgcagcaggttttattaataactgcacaagaccccaccttgttcagctagtaaataatccaatgctagtctgttatcaacaactacattttccagagtctggggaactcttgaattctctttaatgcctgatctccgttggtggctaaggattctaggatttgagccaagttctttagcgttaactcatggtaggcaaagcaccccagggtgctgctagtcctattgccaccctgattcctgccagaaataagtaagcaagcaacaggacaatgaactccatgttgcccagatcccactgagagtgaacgtgcagtcatgcccataaccgacacacatcccagtccatgtgggtcagtccttcatcaccctccctgccttctgacaacagcagactccagccattccattatcattcacagcccaacccaagcagtcagtggctgaagaaagagaatcaggtatactctatgtccacatataccttcctgccacagggcttcaccaactggcaggattccccccagcccccaactcctcctcatcccttgttcccaggcgggtcaattggagagtgagcagagatagatggcttgcagaagggtatgcaagatggggagactccaccagaccttagggagagaatggcatctttctccaccttttaagagagacagagcctccctgaggtctcaaagatttttcagggcaacacaagaaacgtttccaagcctcagctgcaggtgttcacctttccactctggggtgtgaggagatggtaagctgaggacaagtgtgttccagatgcaggccaactctgttctccaacagtttgaaccaacttggccttggggttccaagggtaggatgaagggtgtcacggcaggacggggcctggcgtgaggcaacagcaagcagagcgaggacacaacagtggcagcagtgtacagacacaggacgtcagcttcaaacgatgcaacagcagggatatcttgggcacggctctgattcgagccactcccaactctcttgcctccaggatggaggcactgtacatgcaacagtccagagaaagattctagccagtccaagcccaggcacatccagagaaggtgggagctcttcgggttgactccaccgaggaaaacaggcatttgggtatttcagattcccgctccacaataaggcaacttttaaaaaaatattatttccaaaaacaaaacaaaaattccagggggagggaattcagcggatcagtcttaagaggagcttttttttggagcgagaaatcatataaaataaaatgaaataaaacaaggaggaaggcaaccagctgttaggggaaaaataaggcagataaaggagcggggagagaaattaattgccaaccaggaggagttgggctgtatttttcaaaggtggggagagtggagcacacaccttgaggaggaaagcgagaaagaaaagaaaaaagcaagtgaaggggggctcgcccaagaagggtgaagaagcgaagaaagtcgaggcgccgaggctcccaaagctggcagctccgggtggcggtgcaggggcgaaggggggggcggggggaacgtcggacatgcggctctggagttgggtgctgcacctggggctgctgagcgccgcgctgggctgcgggctggccgagcgtccccgccgggcccggagagacccgcgggccggccgacccccgcgccccgccgccggcccggccacctgcgccacccgcggcccgcggccgccgcgcctcgccgccgccgccgccgccgccgggcggtgcctgggaagccgtgcgcgtcccccggcggcggcagcagcgggaggcgaggggcgccaccgaggagccgagcccgccgagccgggcgctctatttcagcgggcgaggcgagcagctgcgcctccgggccgacctcgagctgccccgggacgcgttcacgctgcaagtgtggctgcgagcggaggggggccagaggtctccggcagtgatcacagggctgtatgacaaatgttcttatatctcacgtgaccgaggatgggtcgtgggcattcacaccatcagtgaccaagacaacaaagacccacgctactttttctccttgaagacagaccgagcccggcaagtgaccaccatcaatgcccaccgcagctacctcccaggccagtgggtatacctagctgccacctatgatgggcagttcatgaagctctatgtgaatggtgcccaggtggccacctctggggaacaagtgggtggcatattcagcccactgacccagaagtgcaaagtgctcatgttagggggcagtgccctgaatcacaactaccggggctacatcgagcacttcagtctgtggaaggtggccaggactcagcgggagatactgtctgacatggaaacccatggcgcccacactgctctacctcagctcctcctccaggagaactgggacaatgtgaagcatgcctggtcccccatgaaggatggcagcagccccaaagtggaattcagcaatgcccacggctttctgctggacacgagtctggagcctcctctgtgcggacagacattgtgtgacaacacagaggtcattgccagctacaatcagctctcaagtttccgccagcccaaggtggtgcgctaccgcgtggtcaacctctatgaagatgatcataagaacccgacggtgacgcgcgagcaggtggacttccagcaccatcagctggctgaggccttcaagcaatacaacatctcctgggagctggacgtgctggaggtgagcaactcctcccttcgccgccgcctcatcctggccaactgtgacatcagcaagattggggatgagaactgtgaccccgagtgcaaccacacgctgacgggccacgacggcggggattgccgccacctgcgccaccctgccttcgtgaagaagcagcacaacggggtgtgtgacatggactgcaactatgaacggttcaactttgatggtggagagtgctgtgaccctgaaatcaccaatgtcactcagacttgctttgaccccgactctccacacagagcctacttggatgttaatgagctgaagaacattcttaaattggatggatcaacacatctcaatattttctttgcaaaatcctcagaggaggagttggcaggagtagcaacttggccatgggacaaggaggccctgatgcacttaggtggcattgtcttgaacccatctttctatggcatgcctgggcacacccacaccatgatccatgagattggtcacagcctgggcctctatcacgtcttccgaggcatctcagaaatccagtcctgcagtgacccctgcatggagacagagccctccttcgagactggagacctctgcaatgataccaacccagcccctaaacacaagtcctgtggtgacccagggccaggaaatgacacctgtggctttcatagcttcttcaacactccttacaacaacttcatgagctatgcagatgacgactgtacggactccttcacgcccaatcaagtcgccagaatgcactgttacctggacctggtctaccagggctggcagccctccaggaaaccagcgcctgttgccctcgccccccaagttctgggccacacaacggactctgtgacactggagtggttcccacctatagatggccatttctttgaaagagaattgggatcagcatgtcatctttgcctggaagggagaatcctggtgcagtatgcttccaacgcttcctccccaatgccctgcagcccatcaggacactggagccctcgtgaagcagaaggtcatcctgatgttgaacagccctgtaagtccagtgtccgcacctggagcccaaattcagctgtcaacccacacacggttcctccagcctgccctgagcctcaaggctgctacctcgagctggagttcctctaccccttggtccctgagtctctgaccatttgggtgacctttgtctccactgactgggactctagtggagctgtcaatgacatcaaactgttggctgtcagtgggaagaacatctccctgggtcctcagaatgtcttctgtgatgtcccactgaccatcagactctgggacgtgggcgaggaggtgtatggcatccaaatctacacgctggatgagcacctggagatcgatgctgccatgttgacctccactgcagacaccccactctgtctacagtgtaagcccctgaagtataaggtggtccgggaccctcctctccagatggatgtggcctccatcctacatctcaataggaaattcgtagacatggatctaaatcttggcagtgtgtaccagtattgggtcataactatttcaggaactgaagagagtgagccatcacctgctgtcacatacatccatggaagtgggtactgtggcgatggcattatacaaaaagaccaaggtgaacaatgcgacgacatgaataagatcaatggtgatggctgctcccttttctgccgacaagaagtctccttcaattgtattggtacgtctttttcatttcttgtggccttcatgaagaaatgaacggtgcagaatggttggtcaatgataatgccaacaatagttatgactaaatgatgattcactcctttgtattacacctgtttattgagtgcctcctacatgccaggcactgttttcaatatcgggaaatacagcagtgaaaaaacaaacaaacaaagcaatccctcaagagcttaagctctcatagatgatgccaatgacgggtaacttcttttgatcaagctttaccttacaaacatccctgcttttcttcacactaactgtccaggatgggtattactggagatgttttaaggcttttattcctacttcagagataagaaaaaatcaaacgccagaaaaatttcaaaagttgtccagagttatacaggtcaaaagtgattaaagacagaatcaggacttgaacctgattttgtctgattctcaagcacgtgctcaactcattttgctttgcaacctccagccgtgatgcaggaaccaccaaggtcccctctgcagactcag

SEQ ID NO: 455127 - DNA, 5698 bp, Homo sapiens
  misc_feature (5639)..(5639): n is a, c, g, or t
  misc_feature (5661)..(5661): n is a, c, g, or t
ctgtccaggttgagtgagggtgtccaggatgaggaatgagggtgtccagggtgaggagtgagggagtccagggtgaggagtgagggagtccagggtgaggattgagggtgtcagggtgagtgagagtgtccagggtgaggagtgagggtatccagggtgagtgagggtgtccagggtgaggagtgagggtatccagggtgagtgagggtgtccagggtgagtgagggtgtcagggtgagtgaacgtgtccagggtgtgtgagggtgtccagggtgcagagtgaggtgtccagggtgaggagtgacggtgtctggggtgagtgagggtgtccagggtgaggagtgagggtgtcagggtgagtgagggtgtccagggttgagtgcacatgtgtggtgaggaggtgtttgcagtgcttcaggcgcagcaactctttcatctagtttaaaattgtgctctgaggttagattttagtagaacaaaggccttacaaagaatgtgaaaacattgtgcttccctgcttacaggcaattaaaaaggagaatcaagctgagggtgcctggtgtggggtggggtggagaagaccacagagactattgtgtgttttattcaacagtgtcctgggctgctttctccagaaatgtccctgacacatggatgtaagtgtggctagtttactgggagatgatcccagtgatgcaggacacgcgagccctaagattgaagcatagcccgggagggttcttagctttgcccaggaaggaactcaaggcaagccagtggtgttagcaacttttattgaagcggccggctgtgcacagcagcagcagaggcgctgctccttgcaaagcagggctgccctacaggctgtgcgcccacagtagcagctcagaggcagttctgcagtggtatttgtatccacttttaattatatgcaaatgaaggggcagtttatgcagacatttccagggtgagggtggtaacttctgggtgctgccagagccatcgtgaactgacttgacacaggtcggtgtgtcctatggaaactagcatctgccctggacctattttagctagtgctcagtttggtctgagtgcctgagccccacttccagagttgagtcccacctcctacctcattcccccttcagagattagatactcctccttaatcttaagggggcctcgagaagggcggagtcctgcttttccgtaactacttcctgctgagtttatggcacgtaggccctgcctggcactggaggacgtaaaaatttctggatacctgatctaaggagcccagaggcaggacgatttcattctccgtgtcagtggacaggatgggctggaagccttgtgccagcattgtctctggaactgtggtaatctagaatacacaaactttactaagaggttaaagaagcaaggaccaaacatttgtaacaagacagttgtcaaaggtcctagaagaggtgaaaaacaggtgagacttgggaaggcacttttgatggttgaccagatatagttggggcagtgccctggttatatctatgtaactaggtagcttgctcatagatcttttgaatgttaacctcaacctgtccagagttaatatatgtgcagcaggttttattaataactgcacaagaccccaccttgttcagctagtaaataatccaatgctagtctgttatcaacaactacattttccagagtctggggaactcttgaattctctttaatgcctgatctccgttggtggctaaggattctaggatttgagccaagttctttagcgttaactcatggtaggcaaagcaccccagggtgctgctagtcctattgccaccctgattcctgccagaaataagtaagcaagcaacaggacaatgaactccatgttgcccagatcccactgagagtgaacgtgcagtcatgcccataaccgacacacatcccagtccatgtgggtcagtccttcatcaccctccctgccttctgacaacagcagactccagccattccattatcattcacagcccaacccaagcagtcagtggctgaagaaagagaatcaggtatactctatgtccacatataccttcctgccacagggcttcaccaactggcaggattccccccagcccccaactcctcctcatcccttgttcccaggcgggtcaattggagagtgagcagagatagatggcttgcagaagggtatgcaagatggggagactccaccagaccttagggagagaatggcatctttctccaccttttaagagagacagagcctccctgaggtctcaaagatttttcagggcaacacaagaaacgtttccaagcctcagctgcaggtgttcacctttccactctggggtgtgaggagatggtaagctgaggacaagtgtgttccagatgcaggccaactctgttctccaacagtttgaaccaacttggccttggggttccaagggtaggatgaagggtgtcacggcaggacggggcctggcgtgaggcaacagcaagcagagcgaggacacaacagtggcagcagtgtacagacacaggacgtcagcttcaaacgatgcaacagcagggatatcttgggcacggctctgattcgagccactcccaactctcttgcctccaggatggaggcactgtacatgcaacagtccagagaaagattctagccagtccaagcccaggcacatccagagaaggtgggagctcttcgggttgactccaccgaggaaaacaggcatttgggtatttcagattcccgctccacaataaggcaacttttaaaaaaatattatttccaaaaacaaaacaaaaattccagggggagggaattcagcggatcagtcttaagaggagcttttttttggagcgagaaatcatataaaataaaatgaaataaaacaaggaggaaggcaaccagctgttaggggaaaaataaggcagataaaggagcggggagagaaattaattgccaaccaggaggagttgggctgtatttttcaaaggtggggagagtggagcacacaccttgaggaggaaagcgagaaagaaaagaaaaaagcaagtgaaggggggctcgcccaagaagggtgaagaagcgaagaaagtcgaggcgccgaggctcccaaagctggcagctccgggtggcggtgcaggggcgaaggggggggcggggggaacgtcggacatgcggctctggagttgggtgctgcacctggggctgctgagcgccgcgctgggctgcgggctggccgagcgtccccgccgggcccggagagacccgcgggccggccgacccccgcgccccgccgccggcccggccacctgcgccacccgcggcccgcggccgccgcgcctcgccgccgccgccgccgccgccgggcggtgcctgggaagccgtgcgcgtcccccggcggcggcagcagcgggaggcgaggggcgccaccgaggagccgagcccgccgagccgggcgctctatttcagcgggcgaggcgagcagctgcgcctccgggccgacctcgagctgccccgggacgcgttcacgctgcaagtgtggctgcgagcggaggggggccagaggtctccggcagtgatcacagggctgtatgacaaatgttcttatatctcacgtgaccgaggatgggtcgtgggcattcacaccatcagtgaccaagacaacaaagacccacgctactttttctccttgaagacagaccgagcccggcaagtgaccaccatcaatgcccaccgcagctacctcccaggccagtgggtatacctagctgccacctatgatgggcagttcatgaagctctatgtgaatggtgcccaggtggccacctctggggaacaagtgggtggcatattcagcccactgacccagaagtgcaaagtgctcatgttagggggcagtgccctgaatcacaactaccggggctacatcgagcacttcagtctgtggaaggtggccaggactcagcgggagatactgtctgacatggaaacccatggcgcccacactgctctacctcagctcctcctccaggagaactgggacaatgtgaagcatgcctggtcccccatgaaggatggcagcagccccaaagtggaattcagcaatgcccacggctttctgctggacacgagtctggagcctcctctgtgcggacagacattgtgtgacaacacagaggtcattgccagctacaatcagctctcaagtttccgccagcccaaggtggtgcgctaccgcgtggtcaacctctatgaagatgatcataagaacccgacggtgacgcgcgagcaggtggacttccagcaccatcagctggctgaggccttcaagcaatacaacatctcctgggagctggacgtgctggaggtgagcaactcctcccttcgccgccgcctcatcctggccaactgtgacatcagcaagattggggatgagaactgtgaccccgagtgcaaccacacgctgacgggccacgacggcggggattgccgccacctgcgccaccctgccttcgtgaagaagcagcacaacggggtgtgtgacatggactgcaactatgaacggttcaactttgatggtggagagtgctgtgaccctgaaatcaccaatgtcactcagacttgctttgaccccgactctccacacagagcctacttggatgttaatgagctgaagaacattcttaaattggatggatcaacacatctcaatattttctttgcaaaatcctcagaggaggagttggcaggagtagcaacttggccatgggacaaggaggccctgatgcacttaggtggcattgtcttgaacccatctttctatggcatgcctgggcacacccacaccatgatccatgagattggtcacagcctgggcctctatcacgtcttccgaggcatctcagaaatccagtcctgcagtgacccctgcatggagacagagccctccttcgagactggagacctctgcaatgataccaacccagcccctaaacacaagtcctgtggtgacccagggccaggaaatgacacctgtggctttcatagcttcttcaacactccttacaacaacttcatgagctatgcagatgacgactgtacggactccttcacgcccaatcaagtcgccagaatgcactgttacctggacctggtctaccagggctggcagccctccaggaaaccagcgcctgttgccctcgccccccaagttctgggccacacaacggactctgtgacactggagtggttcccacctatagatggccatttctttgaaagagaattgggatcagcatgtcatctttgcctggaagggagaatcctggtgcagtatgcttccaacgcttcctccccaatgccctgcagcccatcaggacactggagccctcgtgaagcagaaggtcatcctgatgttgaacagccctgtaagtccagtgtccgcacctggagcccaaattcagctgtcaacccacacacggttcctccagcctgccctgagcctcaaggctgctacctcgagctggagttcctctaccccttggtccctgagtctgacattgggacttgctcatgctggacctatgactgcatgctnaatgtgctgcatggaaaaattnctgggctaaagctttggagccatgcataattggcggg

SEQ ID NO: 455128 - DNA, 13662 bp, Homo sapiens
ctgtccaggttgagtgagggtgtccaggatgaggaatgagggtgtccagggtgaggagtgagggagtccagggtgaggagtgagggagtccagggtgaggattgagggtgtcagggtgagtgagagtgtccagggtgaggagtgagggtatccagggtgagtgagggtgtccagggtgaggagtgagggtatccagggtgagtgagggtgtccagggtgagtgagggtgtcagggtgagtgaacgtgtccagggtgtgtgagggtgtccagggtgcagagtgaggtgtccagggtgaggagtgacggtgtctggggtgagtgagggtgtccagggtgaggagtgagggtgtcagggtgagtgagggtgtccagggttgagtgcacatgtgtggtgaggaggtgtttgcagtgcttcaggcgcagcaactctttcatctagtttaaaattgtgctctgaggttagattttagtagaacaaaggccttacaaagaatgtgaaaacattgtgcttccctgcttacaggcaattaaaaaggagaatcaagctgagggtgcctggtgtggggtggggtggagaagaccacagagactattgtgtgttttattcaacagtgtcctgggctgctttctccagaaatgtccctgacacatggatgtaagtgtggctagtttactgggagatgatcccagtgatgcaggacacgcgagccctaagattgaagcatagcccgggagggttcttagctttgcccaggaaggaactcaaggcaagccagtggtgttagcaacttttattgaagcggccggctgtgcacagcagcagcagaggcgctgctccttgcaaagcagggctgccctacaggctgtgcgcccacagtagcagctcagaggcagttctgcagtggtatttgtatccacttttaattatatgcaaatgaaggggcagtttatgcagacatttccagggtgagggtggtaacttctgggtgctgccagagccatcgtgaactgacttgacacaggtcggtgtgtcctatggaaactagcatctgccctggacctattttagctagtgctcagtttggtctgagtgcctgagccccacttccagagttgagtcccacctcctacctcattcccccttcagagattagatactcctccttaatcttaagggggcctcgagaagggcggagtcctgcttttccgtaactacttcctgctgagtttatggcacgtaggccctgcctggcactggaggacgtaaaaatttctggatacctgatctaaggagcccagaggcaggacgatttcattctccgtgtcagtggacaggatgggctggaagccttgtgccagcattgtctctggaactgtggtaatctagaatacacaaactttactaagaggttaaagaagcaaggaccaaacatttgtaacaagacagttgtcaaaggtcctagaagaggtgaaaaacaggtgagacttgggaaggcacttttgatggttgaccagatatagttggggcagtgccctggttatatctatgtaactaggtagcttgctcatagatcttttgaatgttaacctcaacctgtccagagttaatatatgtgcagcaggttttattaataactgcacaagaccccaccttgttcagctagtaaataatccaatgctagtctgttatcaacaactacattttccagagtctggggaactcttgaattctctttaatgcctgatctccgttggtggctaaggattctaggatttgagccaagttctttagcgttaactcatggtaggcaaagcaccccagggtgctgctagtcctattgccaccctgattcctgccagaaataagtaagcaagcaacaggacaatgaactccatgttgcccagatcccactgagagtgaacgtgcagtcatgcccataaccgacacacatcccagtccatgtgggtcagtccttcatcaccctccctgccttctgacaacagcagactccagccattccattatcattcacagcccaacccaagcagtcagtggctgaagaaagagaatcaggtatactctatgtccacatataccttcctgccacagggcttcaccaactggcaggattccccccagcccccaactcctcctcatcccttgttcccaggcgggtcaattggagagtgagcagagatagatggcttgcagaagggtatgcaagatggggagactccaccagaccttagggagagaatggcatctttctccaccttttaagagagacagagcctccctgaggtctcaaagatttttcagggcaacacaagaaacgtttccaagcctcagctgcaggtgttcacctttccactctggggtgtgaggagatggtaagctgaggacaagtgtgttccagatgcaggccaactctgttctccaacagtttgaaccaacttggccttggggttccaagggtaggatgaagggtgtcacggcaggacggggcctggcgtgaggcaacagcaagcagagcgaggacacaacagtggcagcagtgtacagacacaggacgtcagcttcaaacgatgcaacagcagggatatcttgggcacggctctgattcgagccactcccaactctcttgcctccaggatggaggcactgtacatgcaacagtccagagaaagattctagccagtccaagcccaggcacatccagagaaggtgggagctcttcgggttgactccaccgaggaaaacaggcatttgggtatttcagattcccgctccacaataaggcaacttttaaaaaaatattatttccaaaaacaaaacaaaaattccagggggagggaattcagcggatcagtcttaagaggagcttttttttggagcgagaaatcatataaaataaaatgaaataaaacaaggaggaaggcaaccagctgttaggggaaaaataaggcagataaaggagcggggagagaaattaattgccaaccaggaggagttgggctgtatttttcaaaggtggggagagtggagcacacaccttgaggaggaaagcgagaaagaaaagaaaaaagcaagtgaaggggggctcgcccaagaagggtgaagaagcgaagaaagtcgaggcgccgaggctcccaaagctggcagctccgggtggcggtgcaggggcgaaggggggggcggggggaacgtcggacatgcggctctggagttgggtgctgcacctggggctgctgagcgccgcgctgggctgcgggctggccgagcgtccccgccgggcccggagagacccgcgggccggccgacccccgcgccccgccgccggcccggccacctgcgccacccgcggcccgcggccgccgcgcctcgccgccgccgccgccgccgccgggcggtgcctgggaagccgtgcgcgtcccccggcggcggcagcagcgggaggcgaggggcgccaccgaggagccgagcccgccgagccgggcgctctatttcagcgggcgaggcgagcagctgcgcctccgggccgacctcgagctgccccgggacgcgttcacgctgcaagtgtggctgcgagcggaggggggccagaggtctccggcagtgatcacagggctgtatgacaaatgttcttatatctcacgtgaccgaggatgggtcgtgggcattcacaccatcagtgaccaagacaacaaagacccacgctactttttctccttgaagacagaccgagcccggcaagtgaccaccatcaatgcccaccgcagctacctcccaggccagtgggtatacctagctgccacctatgatgggcagttcatgaagctctatgtgaatggtgcccaggtggccacctctggggaacaagtgggtggcatattcagcccactgacccagaagtgcaaagtgctcatgttagggggcagtgccctgaatcacaactaccggggctacatcgagcacttcagtctgtggaaggtggccaggactcagcgggagatactgtctgacatggaaacccatggcgcccacactgctctacctcagctcctcctccaggagaactgggacaatgtgaagcatgcctggtcccccatgaaggatggcagcagccccaaagtggaattcagcaatgcccacggctttctgctggacacgagtctggagcctcctctgtgcggacagacattgtgtgacaacacagaggtcattgccagctacaatcagctctcaagtttccgccagcccaaggtggtgcgctaccgcgtggtcaacctctatgaagatgatcataagaacccgacggtgacgcgcgagcaggtggacttccagcaccatcagctggctgaggccttcaagcaatacaacatctcctgggagctggacgtgctggaggtgagcaactcctcccttcgccgccgcctcatcctggccaactgtgacatcagcaagattggggatgagaactgtgaccccgagtgcaaccacacgctgacgggccacgacggcggggattgccgccacctgcgccaccctgccttcgtgaagaagcagcacaacggggtgtgtgacatggactgcaactatgaacggttcaactttgatggtggagagtgctgtgaccctgaaatcaccaatgtcactcagacttgctttgaccccgactctccacacagagcctacttggatgttaatgagctgaagaacattcttaaattggatggatcaacacatctcaatattttctttgcaaaatcctcagaggaggagttggcaggagtagcaacttggccatgggacaaggaggccctgatgcacttaggtggcattgtcttgaacccatctttctatggcatgcctgggcacacccacaccatgatccatgagattggtcacagcctgggcctctatcacgtcttccgaggcatctcagaaatccagtcctgcagtgacccctgcatggagacagagccctccttcgagactggagacctctgcaatgataccaacccagcccctaaacacaagtcctgtggtgacccagggccaggaaatgacacctgtggctttcatagcttcttcaacactccttacaacaacttcatgagctatgcagatgacgactgtacggactccttcacgcccaatcaagtcgccagaatgcactgttacctggacctggtctaccagggctggcagccctccaggaaaccagcgcctgttgccctcgccccccaagttctgggccacacaacggactctgtgacactggagtggttcccacctatagatggccatttctttgaaagagaattgggatcagcatgtcatctttgcctggaagggagaatcctggtgcagtatgcttccaacgcttcctccccaatgccctgcagcccatcaggacactggagccctcgtgaagcagaaggtcatcctgatgttgaacagccctgtaagtccagtgtccgcacctggagcccaaattcagctgtcaacccacacacggttcctccagcctgccctgagcctcaaggctgctacctcgagctggagttcctctaccccttggtccctgagtctctgaccatttgggtgacctttgtctccactgactgggactctagtggagctgtcaatgacatcaaactgttggctgtcagtgggaagaacatctccctgggtcctcagaatgtcttctgtgatgtcccactgaccatcagactctgggacgtgggcgaggaggtgtatggcatccaaatctacacgctggatgagcacctggagatcgatgctgccatgttgacctccactgcagacaccccactctgtctacagtgtaagcccctgaagtataaggtggtccgggaccctcctctccagatggatgtggcctccatcctacatctcaataggaaattcgtagacatggatctaaatcttggcagtgtgtaccagtattgggtcataactatttcaggaactgaagagagtgagccatcacctgctgtcacatacatccatggaagtgggtactgtggcgatggcattatacaaaaagaccaaggtgaacaatgcgacgacatgaataagatcaatggtgatggctgctcccttttctgccgacaagaagtctccttcaattgtattgatgaacccagccggtgctatttccatgatggtgatggggtatgtgaggagtttgaacaaaaaaccagcattaaggactgtggtgtctacacgccccagggattcctggatcagtgggcatccaatgcttcagtatctcatcaagaccagcaatgcccaggctgggtcatcatcggacagccagcagcatcccaggtgtgtcgaaccaaggtgatagatctcagtgaaggcatttcccagcatgcctggtacccttgcaccatcagctacccatattcccagctggctcagaccactttttggctccgggcgtatttttctcaaccaatggttgccgcagctgtcattgtccacctggtgacggatgggacatattatggggaccaaaagcaggagaccatcagcgtgcagctgcttgataccaaagatcagagccacgatctaggcctccatgtcctgagctgcaggaacaatcccctgattatccctgtggtccatgacctcagccagcccttctaccacagccaggcggtacgtgtgagcttcagttcgcccctggtcgccatctcgggggtggccctccgttccttcgacaactttgaccccgtcaccctgagcagctgccagagaggggagacctacagccctgccgagcagagctgcgtgcacttcgcatgtgagaaaactgactgtccagagctggctgtggagaatgcttatctcaattgctccagcagcgaccgctaccacggtgcccagtgtactgtgagctgccggacaggctacgtgctccagatacggcgggatgatgagctgatcaagagccagacgggacccagcgtcacagtgacctgtacagagggcaagtggaataagcaggtggcctgtgagccagtcgactgcagcatcccagatcaccatcaagtctatgctgcctccttctcctgccctgagggcaccacctttggcagtcaatgttccttccagtgccgtcaccctgcacaattgaaaggcaacaacagcctcctgacctgcatggaggatgggctgtggtccttcccagaggccctgtgtgagctcatgtgcctcgctccaccccctgtgcccaatgcagacctccagaccgcccggtgccgagagaataagcacaaggtgggctccttctgcaaatacaaatgcaagcctggataccatgtgcctggatcctctcggaagtcaaagaaacgggccttcaagactcagtgtacccaggatggcagctggcaggagggagcttgtgttcctgtgacctgtgacccacctccaccaaaattccatgggctctaccagtgtactaatggcttccagttcaacagtgagtgtaggatcaagtgtgaagacagtgatgcctcccagggacttgggagcaatgtcattcattgccggaaagatggcacctggaacggctccttccatgtctgccaggagatgcaaggccagtgctcggttccaaacgagctcaacagcaacctcaaactgcagtgccctgatggctatgccatagggtcggagtgtgccacctcgtgcctggaccacaacagcgagtccatcatcctgccaatgaacgtgaccgtgcgtgacatcccccactggctgaaccccacacgggtagagagagttgtctgcactgctggtctcaagtggtatcctcaccctgctctgattcactgtgtcaaaggctgtgagcccttcatgggagacaattattgtgatgccatcaacaaccgagccttttgcaactatgacggtggggattgctgcacctccacagtgaagaccaaaaaggtcaccccattccctatgtcctgtgacctacaaggtgactgtgcttgtcgggacccccaggcccaagaacacagccggaaagacctccggggatacagccatggctaaggaaggacaagaagttgtcaaagaattcccaacgccaggacccacatccctttggtattgatttcacagtcagctgctcaacggaatggcctctccacaccagggatccttagcacccaaccggtctgcctttaattttacccaggaaggactcacattggggcgaatgaaccaagtttcgccatgctggatgatgaaatggattcccatcccaaagtctgagatggattgcatatacagtgtgcagtcccagagcctcctaaaattctagccatttgtcacacaaccacagcaagaaacgtgttctatatctagagtgtgcccatctgtgtttagtacacatgcatgcatacacacccatacaaacatctgtgtgagggcagttctggagatgagcagagagagaccggaataaactcaatcttttctttcccaagctcctagccaacactatccttgggagaaagaaatttgcagaaactgctaagaccaagtgtggagatgtcaagctagttcacactctgaggctcagaatatgtaggacatgcacaattgtgcagtcctttgggattggaagtgaaacagtctgtgatcccctaccttctagggaactaggacctaggaagaggtaaagattatcaggtatgcaaagcgccccaattcttctgctgccatgggggattttaccccaactccagggttcgaggccaatctgagaatggcttaggattgcaatgtcaaggtattatatcagccccttgcttgaggcttgaggtcataatatccctctaggacttacctgttcccccagatcttgccttgggaccacatttgctgctacttttcctgctgctctatcctatacattgaataatccaagatggtagaactaggttaggaaaaattccacacaaccaaacagtctgccttaaaagtgacccacatttttccatagctcctcactttttagcccttctgcaagagaaaaaccctcatgggtccacatggtgagaagttaagtttcctgtaagtgggcctctcaccctggaaaggagttgagggacatcagatgctggaaccctcactgaaagtccagaatgtctaagccagtgttagattttgtaaacaagtggaacagtgttaaatttctatgatgttggagccatccagagactactggaattgtcgagacttttggattattatccttatccttatcctaatcttcctagcccttcaggctagagtaggcttcgatcctgagaaccttgctgttgctctgaggagatataattctgggagaaagaatcttttataagaacagtacagattgttctcaagagggccatcagaaggaagccaaagagttcacagcctcagcaccaacaactcaacatggtcatcatgttttctatatggtttttccagctagcagtactcccttccatacctgtgactgggcagtgcttttctctctcccatgtctagcctccaaaagttaagtgaaaattagtcaactgcacgtggaagcccccaccactttggggatctctttatttcttttcagccagggacctgtccactccctttgaattaatatgggaagaaattaatacaggatgaactggagagaagggttgagtgtggcatactttctgaaacctggagctgggaattgcggagaagggaaggtctagactagttacatcacatagggattactgtaaatcaagtcatctcaagtctagtgaagacagccaacagaaacaaaacctagcatagggatagaaaataccatgcacgtgtgcagccccacctaattcctgcatccaaggcaggtgttgttaatctatcatagcacttaaaaaaaaaaaaaaagagaccaaaaataactttaggaaccaccatattatatcactcccaatagcactgacctggtgatcaaaaacacttgagaagacatctattggccatctctggccaattacactaagaaacatatcaaggtgcttttggcacaggtgcccacaaatacggatgcagtgctgagatagtttatgagacttgtaccatttcacaaactctgaaattgggttccatattggcaaggctgccacagttgttaagaataatcctctatgtttcttcctcacaaaaccatatctcatttatatccagaccattacttcactataattacaaggacaaattattagcaagaaataagaatagtattagaagaattgatcctattttgaacccctctccagtatcttcacactcttgtcaactctccaggcctctctcttgccctgagttatcagcctgtgtggtgttaactaccttagaaggtacaagctaagaaatgtaacagtatcaaccctcccagttgcttaattatacccataggtaatacaaaaagctctgaagacccaaagatgacattactaatgatgtgatttcaggagccacagaagaaccttaccagcttccctcaaatcagtccttatcctctttctatcttcactcccatcatcatctattttcacactatccagctaagcaaagattcctggaggctgacttgtatcttcagactcacagagtgaattcagctcttctgaatcaagacccacccagtctctttcattcagacctgttgctaacaaatttatatttgccaaggatattaggcaaaagaggctacttgattggtggccaacctcgtgcccacatggaaggtatctttaatagggtcttttcaaaccttagtggaggagggtcagctcaatttgggcaatgcatttgttcccagtttcattttcttcctgggaattaactcgtcatttcattccttcagtcatcttctgtgtaggtgaccggagcactgagaggcagctctgatgcactattgtgtgtcagcagctcaaaggccctaaaacactgaaggttctgcatctgaagtattagattgttagcagcaaaatatgaaagatgaggtggacagtcctctaagccctatttagggaagcttttccaagccacaatcttaactacctacccaaaggatttgcattacccccagattctgtgccaacaaccttttaaggaaatacagtccttgggaaatgagttttgatggtgaattggggtgttaaggaagggaaagattgtcatagatggtagggctttgaaaatgcagggtatcagctgccactcctggcttcaacacattgagtcactgcctagacggttctcttggtcttattcccatcctggccaatgcttaaatactatttgttgaaaataattctttgagacagatttcagctacctcccttccaggttcgatttaacttggttgtaattgtcaatttgttgttataggtcttacctgtgtgaaagaaagaaaaagaaagaaagaaagaaagagaaaggaaattataaggtcaagttaacagttttgaggttttgtgtttttttctggaactacttcaagtgagaaaataaaaaaaaatggtgacaaagctgtacagatagagataatagaagacaaagagattaaaaggaaataaaaatgcatgattaaaaactaagaataaaaaacctatttttatgtttcctaaaggaaattgtttattctacagactcagtaggtagacacaaacataaagatttccctagaagacatagagtgggatttgataacactgtctgttattttctgtacattgtggtaggtccaggaaatatgacattttcccccttgatgtgttattgttgttgttgggtggggtgggcattttgtttatttgtttggtggcaatcagtggtagtagggagtgggagggcttatattggtttttccagctattaaggggacatattgtgtcgttgtgcttttcacgttataaaatgtttatatttaccagtacagcactgggctttataaagactgcactcagaaccacactgcacagtccagttttttaaaaagctgctacatgacagacaggtaatcccactgagtgagttttgagaaacaaatcaaacgaagtaaacaagaaacataaaaaccaaatagcaaatgaataaaagcctgttcttgtaacttattcaacttttgccaaattcctaccaatcacttgctttttaaaagaaatgtataatagccaaaagagaaattatgtccctgttgtacagaagttagaatttttgactccaggcagcagtttgctcagtgatcttgaacaagttatccaattgcctctacatttgcatcagtttctctagctgcaaaatggggataatactatatacctacctcacagtgggagggcaggagattttgaggccctgaggttttaggtgggctgtgagggccaacgcttgacacaaagtccatgggttattattcaagaatgcacaggcccatcggccttttagaaagacaagacagggagtgcttgtttgatatttcaaggaataaagccggagctcctgaattgtagtccaccttaaaagagagacctgtattggagaatattttatttttttggcaaatttgatcttaccctttaccagttctataatttggttaaaagctgattacgtcctacaatgtcaaagtcagctaactgtcgtctacttaagacttctggtcatttccaacttatagaggaagggagtctctaaaatctcttcttcagaaggcacctcacttctcagacttaaaattccacatcaagtgttccattaaaagaagataaggcattctgagtgcaaacaaatgggggcttcttaaactacacaccagcagtcagtgaggaaaactttgaacaattattgagttgctttcttgggtctctataatcaataacctgtctgcagatatctatctatataaagatattatatataaatataaatttacatatatatgcacatgtatatatagttgtacatatatgtgtgtatatatatacttaaatgtaatatttacaaaataaaactgtgatctcgtctagagaaaatgtattcatattacaaactgctcttccatatttatgtaccatattatacctttttattattgttataattattatgggtatttctaattaatatgatgttgaaacctgtttggcaccttctggaagctaccaaaaaaatgacactccattgaagtgcttaaaagctgttctcataagaattctactggcctattgtaaaaaagaaaaaaaaaagaaaaagaagaaagacacaaagaaaataatctaaacaccaaaaactaaacacaattccaatcctttttctgtacctcacgcgcataaatttggctgctcctatttttttttctgtttatgtgtttttatggatctaagttaaatcttttggcaatatataaaaatgtaaatagtaaactttatttattaagaatgtcatcttttttaatttatatttacacaattgttcatctaatttattttttctatacagtgatatggatttgttttcccatactgtctgagacagaaatatttgccagctgttgattactatagct

SEQ ID NO: 455129 - DNA, 13887 bp, Homo sapiens
  misc_feature (13858)..(13858): n is a, c, g, or t
ctgtccaggttgagtgagggtgtccaggatgaggaatgagggtgtccagggtgaggagtgagggagtccagggtgaggagtgagggagtccagggtgaggattgagggtgtcagggtgagtgagagtgtccagggtgaggagtgagggtatccagggtgagtgagggtgtccagggtgaggagtgagggtatccagggtgagtgagggtgtccagggtgagtgagggtgtcagggtgagtgaacgtgtccagggtgtgtgagggtgtccagggtgcagagtgaggtgtccagggtgaggagtgacggtgtctggggtgagtgagggtgtccagggtgaggagtgagggtgtcagggtgagtgagggtgtccagggttgagtgcacatgtgtggtgaggaggtgtttgcagtgcttcaggcgcagcaactctttcatctagtttaaaattgtgctctgaggttagattttagtagaacaaaggccttacaaagaatgtgaaaacattgtgcttccctgcttacaggcaattaaaaaggagaatcaagctgagggtgcctggtgtggggtggggtggagaagaccacagagactattgtgtgttttattcaacagtgtcctgggctgctttctccagaaatgtccctgacacatggatgtaagtgtggctagtttactgggagatgatcccagtgatgcaggacacgcgagccctaagattgaagcatagcccgggagggttcttagctttgcccaggaaggaactcaaggcaagccagtggtgttagcaacttttattgaagcggccggctgtgcacagcagcagcagaggcgctgctccttgcaaagcagggctgccctacaggctgtgcgcccacagtagcagctcagaggcagttctgcagtggtatttgtatccacttttaattatatgcaaatgaaggggcagtttatgcagacatttccagggtgagggtggtaacttctgggtgctgccagagccatcgtgaactgacttgacacaggtcggtgtgtcctatggaaactagcatctgccctggacctattttagctagtgctcagtttggtctgagtgcctgagccccacttccagagttgagtcccacctcctacctcattcccccttcagagattagatactcctccttaatcttaagggggcctcgagaagggcggagtcctgcttttccgtaactacttcctgctgagtttatggcacgtaggccctgcctggcactggaggacgtaaaaatttctggatacctgatctaaggagcccagaggcaggacgatttcattctccgtgtcagtggacaggatgggctggaagccttgtgccagcattgtctctggaactgtggtaatctagaatacacaaactttactaagaggttaaagaagcaaggaccaaacatttgtaacaagacagttgtcaaaggtcctagaagaggtgaaaaacaggtgagacttgggaaggcacttttgatggttgaccagatatagttggggcagtgccctggttatatctatgtaactaggtagcttgctcatagatcttttgaatgttaacctcaacctgtccagagttaatatatgtgcagcaggttttattaataactgcacaagaccccaccttgttcagctagtaaataatccaatgctagtctgttatcaacaactacattttccagagtctggggaactcttgaattctctttaatgcctgatctccgttggtggctaaggattctaggatttgagccaagttctttagcgttaactcatggtaggcaaagcaccccagggtgctgctagtcctattgccaccctgattcctgccagaaataagtaagcaagcaacaggacaatgaactccatgttgcccagatcccactgagagtgaacgtgcagtcatgcccataaccgacacacatcccagtccatgtgggtcagtccttcatcaccctccctgccttctgacaacagcagactccagccattccattatcattcacagcccaacccaagcagtcagtggctgaagaaagagaatcaggtatactctatgtccacatataccttcctgccacagggcttcaccaactggcaggattccccccagcccccaactcctcctcatcccttgttcccaggcgggtcaattggagagtgagcagagatagatggcttgcagaagggtatgcaagatggggagactccaccagaccttagggagagaatggcatctttctccaccttttaagagagacagagcctccctgaggtctcaaagatttttcagggcaacacaagaaacgtttccaagcctcagctgcaggtgttcacctttccactctggggtgtgaggagatggtaagctgaggacaagtgtgttccagatgcaggccaactctgttctccaacagtttgaaccaacttggccttggggttccaagggtaggatgaagggtgtcacggcaggacggggcctggcgtgaggcaacagcaagcagagcgaggacacaacagtggcagcagtgtacagacacaggacgtcagcttcaaacgatgcaacagcagggatatcttgggcacggctctgattcgagccactcccaactctcttgcctccaggatggaggcactgtacatgcaacagtccagagaaagattctagccagtccaagcccaggcacatccagagaaggtgggagctcttcgggttgactccaccgaggaaaacaggcatttgggtatttcagattcccgctccacaataaggcaacttttaaaaaaatattatttccaaaaacaaaacaaaaattccagggggagggaattcagcggatcagtcttaagaggagcttttttttggagcgagaaatcatataaaataaaatgaaataaaacaaggaggaaggcaaccagctgttaggggaaaaataaggcagataaaggagcggggagagaaattaattgccaaccaggaggagttgggctgtatttttcaaaggtggggagagtggagcacacaccttgaggaggaaagcgagaaagaaaagaaaaaagcaagtgaaggggggctcgcccaagaagggtgaagaagcgaagaaagtcgaggcgccgaggctcccaaagctggcagctccgggtggcggtgcaggggcgaaggggggggcggggggaacgtcggacatgcggctctggagttgggtgctgcacctggggctgctgagcgccgcgctgggctgcgggctggccgagcgtccccgccgggcccggagagacccgcgggccggccgacccccgcgccccgccgccggcccggccacctgcgccacccgcggcccgcggccgccgcgcctcgccgccgccgccgccgccgccgggcggtgcctgggaagccgtgcgcgtcccccggcggcggcagcagcgggaggcgaggggcgccaccgaggagccgagcccgccgagccgggcgctctatttcagcgggcgaggcgagcagctgcgcctccgggccgacctcgagctgccccgggacgcgttcacgctgcaagtgtggctgcgagcggaggggggccagaggtctccggcagtgatcacagggctgtatgacaaatgttcttatatctcacgtgaccgaggatgggtcgtgggcattcacaccatcagtgaccaagacaacaaagacccacgctactttttctccttgaagacagaccgagcccggcaagtgaccaccatcaatgcccaccgcagctacctcccaggccagtgggtatacctagctgccacctatgatgggcagttcatgaagctctatgtgaatggtgcccaggtggccacctctggggaacaagtgggtggcatattcagcccactgacccagaagtgcaaagtgctcatgttagggggcagtgccctgaatcacaactaccggggctacatcgagcacttcagtctgtggaaggtggccaggactcagcgggagatactgtctgacatggaaacccatggcgcccacactgctctacctcagctcctcctccaggagaactgggacaatgtgaagcatgcctggtcccccatgaaggatggcagcagccccaaagtggaattcagcaatgcccacggctttctgctggacacgagtctggagcctcctctgtgcggacagacattgtgtgacaacacagaggtcattgccagctacaatcagctctcaagtttccgccagcccaaggtggtgcgctaccgcgtggtcaacctctatgaagatgatcataagaacccgacggtgacgcgcgagcaggtggacttccagcaccatcagctggctgaggccttcaagcaatacaacatctcctgggagctggacgtgctggaggtgagcaactcctcccttcgccgccgcctcatcctggccaactgtgacatcagcaagattggggatgagaactgtgaccccgagtgcaaccacacgctgacgggccacgacggcggggattgccgccacctgcgccaccctgccttcgtgaagaagcagcacaacggggtgtgtgacatggactgcaactatgaacggttcaactttgatggtggagagtgctgtgaccctgaaatcaccaatgtcactcagacttgctttgaccccgactctccacacagagcctacttggatgttaatgagctgaagaacattcttaaattggatggatcaacacatctcaatattttctttgcaaaatcctcagaggaggagttggcaggagtagcaacttggccatgggacaaggaggccctgatgcacttaggtggcattgtcttgaacccatctttctatggcatgcctgggcacacccacaccatgatccatgagattggtcacagcctgggcctctatcacgtcttccgaggcatctcagaaatccagtcctgcagtgacccctgcatggagacagagccctccttcgagactggagacctctgcaatgataccaacccagcccctaaacacaagtcctgtggtgacccagggccaggaaatgacacctgtggctttcatagcttcttcaacactccttacaacaacttcatgagctatgcagatgacgactgtacggactccttcacgcccaatcaagtcgccagaatgcactgttacctggacctggtctaccagggctggcagccctccaggaaaccagcgcctgttgccctcgccccccaagttctgggccacacaacggactctgtgacactggagtggttcccacctatagatggccatttctttgaaagagaattgggatcagcatgtcatctttgcctggaagggagaatcctggtgcagtatgcttccaacgcttcctccccaatgccctgcagcccatcaggacactggagccctcgtgaagcagaaggtcatcctgatgttgaacagccctgtaagtccagtgtccgcacctggagcccaaattcagctgtcaacccacacacggttcctccagcctgccctgagcctcaaggctgctacctcgagctggagttcctctaccccttggtccctgagtctctgaccatttgggtgacctttgtctccactgactgggactctagtggagctgtcaatgacatcaaactgttggctgtcagtgggaagaacatctccctgggtcctcagaatgtcttctgtgatgtcccactgaccatcagactctgggacgtgggcgaggaggtgtatggcatccaaatctacacgctggatgagcacctggagatcgatgctgccatgttgacctccactgcagacaccccactctgtctacagtgtaagcccctgaagtataaggtggtccgggaccctcctctccagatggatgtggcctccatcctacatctcaataggaaattcgtagacatggatctaaatcttggcagtgtgtaccagtattgggtcataactatttcaggaactgaagagagtgagccatcacctgctgtcacatacatccatggaagtgggtactgtggcgatggcattatacaaaaagaccaaggtgaacaatgcgacgacatgaataagatcaatggtgatggctgctcccttttctgccgacaagaagtctccttcaattgtattgatgaacccagccggtgctatttccatgatggtgatggggtatgtgaggagtttgaacaaaaaaccagcattaaggactgtggtgtctacacgccccagggattcctggatcagtgggcatccaatgcttcagtatctcatcaagaccagcaatgcccaggctgggtcatcatcggacagccagcagcatcccaggtgtgtcgaaccaaggtgatagatctcagtgaaggcatttcccagcatgcctggtacccttgcaccatcagctacccatattcccagctggctcagaccactttttggctccgggcgtatttttctcaaccaatggttgccgcagctgtcattgtccacctggtgacggatgggacatattatggggaccaaaagcaggagaccatcagcgtgcagctgcttgataccaaagatcagagccacgatctaggcctccatgtcctgagctgcaggaacaatcccctgattatccctgtggtccatgacctcagccagcccttctaccacagccaggcggtacgtgtgagcttcagttcgcccctggtcgccatctcgggggtggccctccgttccttcgacaactttgaccccgtcaccctgagcagctgccagagaggggagacctacagccctgccgagcagagctgcgtgcacttcgcatgtgagaaaactgactgtccagagctggctgtggagaatgcttatctcaattgctccagcagcgaccgctaccacggtgcccagtgtactgtgagctgccggacaggctacgtgctccagatacggcgggatgatgagctgatcaagagccagacgggacccagcgtcacagtgacctgtacagagggcaagtggaataagcaggtggcctgtgagccagtcgactgcagcatcccagatcaccatcaagtctatgctgcctccttctcctgccctgagggcaccacctttggcagtcaatgttccttccagtgccgtcaccctgcacaattgaaaggcaacaacagcctcctgacctgcatggaggatgggctgtggtccttcccagaggccctgtgtgagctcatgtgcctcgctccaccccctgtgcccaatgcagacctccagaccgcccggtgccgagagaataagcacaaggtgggctccttctgcaaatacaaatgcaagcctggataccatgtgcctggatcctctcggaagtcaaagaaacgggccttcaagactcagtgtacccaggatggcagctggcaggagggagcttgtgttcctgtgacctgtgacccacctccaccaaaattccatgggctctaccagtgtactaatggcttccagttcaacagtgagtgtaggatcaagtgtgaagacagtgatgcctcccagggacttgggagcaatgtcattcattgccggaaagatggcacctggaacggctccttccatgtctgccaggagatgcaaggccagtgctcggttccaaacgagctcaacagcaacctcaaactgcagtgccctgatggctatgccatagggtcggagtgtgccacctcgtgcctggaccacaacagcgagtccatcatcctgccaatgaacgtgaccgtgcgtgacatcccccactggctgaaccccacacgggtagagagagttgtctgcactgctggtctcaagtggtatcctcaccctgctctgattcactgtgtcaaaggctgtgagcccttcatgggagacaattattgtgatgccatcaacaaccgagccttttgcaactatgacggtggggattgctgcacctccacagtgaagaccaaaaaggtcaccccattccctatgtcctgtgacctacaaggtgactgtgcttgtcgggacccccaggcccaagaacacagccggaaagacctccggggatacagccatggctaaggaaggacaagaagttgtcaaagaattcccaacgccaggacccacatccctttggtattgatttcacagtcagctgctcaacggaatggcctctccacaccagggatccttagcacccaaccggtctgcctttaattttacccaggaaggactcacattggggcgaatgaaccaagtttcgccatgctggatgatgaaatggattcccatcccaaagtctgagatggattgcatatacagtgtgcagtcccagagcctcctaaaattctagccatttgtcacacaaccacagcaagaaacgtgttctatatctagagtgtgcccatctgtgtttagtacacatgcatgcatacacacccatacaaacatctgtgtgagggcagttctggagatgagcagagagagaccggaataaactcaatcttttctttcccaagctcctagccaacactatccttgggagaaagaaatttgcagaaactgctaagaccaagtgtggagatgtcaagctagttcacactctgaggctcagaatatgtaggacatgcacaattgtgcagtcctttgggattggaagtgaaacagtctgtgatcccctaccttctagggaactaggacctaggaagaggtaaagattatcaggtatgcaaagcgccccaattcttctgctgccatgggggattttaccccaactccagggttcgaggccaatctgagaatggcttaggattgcaatgtcaaggtattatatcagccccttgcttgaggcttgaggtcataatatccctctaggacttacctgttcccccagatcttgccttgggaccacatttgctgctacttttcctgctgctctatcctatacattgaataatccaagatggtagaactaggttaggaaaaattccacacaaccaaacagtctgccttaaaagtgacccacatttttccatagctcctcactttttagcccttctgcaagagaaaaaccctcatgggtccacatggtgagaagttaagtttcctgtaagtgggcctctcaccctggaaaggagttgagggacatcagatgctggaaccctcactgaaagtccagaatgtctaagccagtgttagattttgtaaacaagtggaacagtgttaaatttctatgatgttggagccatccagagactactggaattgtcgagacttttggattattatccttatccttatcctaatcttcctagcccttcaggctagagtaggcttcgatcctgagaaccttgctgttgctctgaggagatataattctgggagaaagaatcttttataagaacagtacagattgttctcaagagggccatcagaaggaagccaaagagttcacagcctcagcaccaacaactcaacatggtcatcatgttttctatatggtttttccagctagcagtactcccttccatacctgtgactgggcagtgcttttctctctcccatgtctagcctccaaaagttaagtgaaaattagtcaactgcacgtggaagcccccaccactttggggatctctttatttcttttcagccagggacctgtccactccctttgaattaatatgggaagaaattaatacaggatgaactggagagaagggttgagtgtggcatactttctgaaacctggagctgggaattgcggagaagggaaggtctagactagttacatcacatagggattactgtaaatcaagtcatctcaagtctagtgaagacagccaacagaaacaaaacctagcatagggatagaaaataccatgcacgtgtgcagccccacctaattcctgcatccaaggcaggtgttgttaatctatcatagcacttaaaaaaaaaaaaaaagagaccaaaaataactttaggaaccaccatattatatcactcccaatagcactgacctggtgatcaaaaacacttgagaagacatctattggccatctctggccaattacactaagaaacatatcaaggtgcttttggcacaggtgcccacaaatacggatgcagtgctgagatagtttatgagacttgtaccatttcacaaactctgaaattgggttccatattggcaaggctgccacagttgttaagaataatcctctatgtttcttcctcacaaaaccatatctcatttatatccagaccattacttcactataattacaaggacaaattattagcaagaaataagaatagtattagaagaattgatcctattttgaacccctctccagtatcttcacactcttgtcaactctccaggcctctctcttgccctgagttatcagcctgtgtggtgttaactaccttagaaggtacaagctaagaaatgtaacagtatcaaccctcccagttgcttaattatacccataggtaatacaaaaagctctgaagacccaaagatgacattactaatgatgtgatttcaggagccacagaagaaccttaccagcttccctcaaatcagtccttatcctctttctatcttcactcccatcatcatctattttcacactatccagctaagcaaagattcctggaggctgacttgtatcttcagactcacagagtgaattcagctcttctgaatcaagacccacccagtctctttcattcagacctgttgctaacaaatttatatttgccaaggatattaggcaaaagaggctacttgattggtggccaacctcgtgcccacatggaaggtatctttaatagggtcttttcaaaccttagtggaggagggtcagctcaatttgggcaatgcatttgttcccagtttcattttcttcctgggaattaactcgtcatttcattccttcagtcatcttctgtgtaggtgaccggagcactgagaggcagctctgatgcactattgtgtgtcagcagctcaaaggccctaaaacactgaaggttctgcatctgaagtattagattgttagcagcaaaatatgaaagatgaggtggacagtcctctaagccctatttagggaagcttttccaagccacaatcttaactacctacccaaaggatttgcattacccccagattctgtgccaacaaccttttaaggaaatacagtccttgggaaatgagttttgatggtgaattggggtgttaaggaagggaaagattgtcatagatggtagggctttgaaaatgcagggtatcagctgccactcctggcttcaacacattgagtcactgcctagacggttctcttggtcttattcccatcctggccaatgcttaaatactatttgttgaaaataattctttgagacagatttcagctacctcccttccaggttcgatttaacttggttgtaattgtcaatttgttgttataggtcttacctgtgtgaaagaaagaaaaagaaagaaagaaagaaagagaaaggaaattataaggtcaagttaacagttttgaggttttgtgtttttttctggaactacttcaagtgagaaaataaaaaaaaatggtgacaaagctgtacagatagagataatagaagacaaagagattaaaaggaaataaaaatgcatgattaaaaactaagaataaaaaacctatttttatgtttcctaaaggaaattgtttattctacagactcagtaggtagacacaaacataaagatttccctagaagacatagagtgggatttgataacactgtctgttattttctgtacattgtggtaggtccaggaaatatgacattttcccccttgatgtgttattgttgttgttgggtggggtgggcattttgtttatttgtttggtggcaatcagtggtagtagggagtgggagggcttatattggtttttccagctattaaggggacatattgtgtcgttgtgcttttcacgttataaaatgtttatatttaccagtacagcactgggctttataaagactgcactcagaaccacactgcacagtccagttttttaaaaagctgctacatgacagacaggtaatcccactgagtgagttttgagaaacaaatcaaacgaagtaaacaagaaacataaaaaccaaatagcaaatgaataaaagcctgttcttgtaacttattcaacttttgccaaattcctaccaatcacttgctttttaaaagaaatgtataatagccaaaagagaaattatgtccctgttgtacagaagttagaatttttgactccaggcagcagtttgctcagtgatcttgaacaagttatccaattgcctctacatttgcatcagtttctctagctgcaaaatggggataatactatatacctacctcacagtgggagggcaggagattttgaggccctgaggttttaggtgggctgtgagggccaacgcttgacacaaagtccatgggttattattcaagaatgcacaggcccatcggccttttagaaagacaagacagggagtgcttgtttgatatttcaaggaataaagccggagctcctgaattgtagtccaccttaaaagagagacctgtattggagaatattttatttttttggcaaatttgatcttaccctttaccagttctataatttggttaaaagctgattacgtcctacaatgtcaaagtcagctaactgtcgtctacttaagacttctggtcatttccaacttatagaggaagggagtctctaaaatctcttcttcagaaggcacctcacttctcagacttaaaattccacatcaagtgttccattaaaagaagataaggcattctgagtgcaaacaaatgggggcttcttaaactacacaccagcagtcagtgaggaaaactttgaacaattattgagttgctttcttgggtctctataatcaataacctgtctgcagatatctatctatataaagatattatatataaatataaatttacatatatatgcacatgtatatatagttgtacatatatgtgtgtatatatatacttaaatgtaatatttacaaaataaaactgtgatctcgtctagagaaaatgtattcatattacaaactgctcttccatatttatgtaccatattatacctttttattattgttataattattatgggtatttctaattaatatgatgttgaaacctgtttggcaccttctggaagctaccaaaaaaatgacactccattgaagtgcttaaaagctgttctcataagaattctactggcctattgtaaaaaagaaaaaaaaaagaaaaagaagaaagacacaaagaaaataatctaaacaccaaaaactaaacacaattccaatcctttttctgtacctcacgcgcataaatttggctgctcctatttttttttctgtttatgtgtttttatggatctaagttaaatcttttggcaatatataaaaatgtaaatagtaaactttatttattaagaatgtcatcttttttaatttatatttacacaattgttcatctaatttattttttctatacagttttaaatactcagacatattttgctgttcatgatatttttatcctgttctcatggatttgttttcccatactgttttctctgatctcaattacaggttggatctcacaaataataatgtcagagacagaaatattttgccactgttgattactatactttaaagttctatattatgaaaatatataatagcttgtacgctaaaaaaaaaaaaaaaaaaaaaaacaaaaaaaaaaaaaaaaaaaaaaaaaaaaaaaaaaaaanaaaaaaaaaaaaaaaaaaaaaaaaaaaaa

SEQ ID NO: 455130 - DNA, 13796 bp, Homo sapiens
ctgtccaggttgagtgagggtgtccaggatgaggaatgagggtgtccagggtgaggagtgagggagtccagggtgaggagtgagggagtccagggtgaggattgagggtgtcagggtgagtgagagtgtccagggtgaggagtgagggtatccagggtgagtgagggtgtccagggtgaggagtgagggtatccagggtgagtgagggtgtccagggtgagtgagggtgtcagggtgagtgaacgtgtccagggtgtgtgagggtgtccagggtgcagagtgaggtgtccagggtgaggagtgacggtgtctggggtgagtgagggtgtccagggtgaggagtgagggtgtcagggtgagtgagggtgtccagggttgagtgcacatgtgtggtgaggaggtgtttgcagtgcttcaggcgcagcaactctttcatctagtttaaaattgtgctctgaggttagattttagtagaacaaaggccttacaaagaatgtgaaaacattgtgcttccctgcttacaggcaattaaaaaggagaatcaagctgagggtgcctggtgtggggtggggtggagaagaccacagagactattgtgtgttttattcaacagtgtcctgggctgctttctccagaaatgtccctgacacatggatgtaagtgtggctagtttactgggagatgatcccagtgatgcaggacacgcgagccctaagattgaagcatagcccgggagggttcttagctttgcccaggaaggaactcaaggcaagccagtggtgttagcaacttttattgaagcggccggctgtgcacagcagcagcagaggcgctgctccttgcaaagcagggctgccctacaggctgtgcgcccacagtagcagctcagaggcagttctgcagtggtatttgtatccacttttaattatatgcaaatgaaggggcagtttatgcagacatttccagggtgagggtggtaacttctgggtgctgccagagccatcgtgaactgacttgacacaggtcggtgtgtcctatggaaactagcatctgccctggacctattttagctagtgctcagtttggtctgagtgcctgagccccacttccagagttgagtcccacctcctacctcattcccccttcagagattagatactcctccttaatcttaagggggcctcgagaagggcggagtcctgcttttccgtaactacttcctgctgagtttatggcacgtaggccctgcctggcactggaggacgtaaaaatttctggatacctgatctaaggagcccagaggcaggacgatttcattctccgtgtcagtggacaggatgggctggaagccttgtgccagcattgtctctggaactgtggtaatctagaatacacaaactttactaagaggttaaagaagcaaggaccaaacatttgtaacaagacagttgtcaaaggtcctagaagaggtgaaaaacaggtgagacttgggaaggcacttttgatggttgaccagatatagttggggcagtgccctggttatatctatgtaactaggtagcttgctcatagatcttttgaatgttaacctcaacctgtccagagttaatatatgtgcagcaggttttattaataactgcacaagaccccaccttgttcagctagtaaataatccaatgctagtctgttatcaacaactacattttccagagtctggggaactcttgaattctctttaatgcctgatctccgttggtggctaaggattctaggatttgagccaagttctttagcgttaactcatggtaggcaaagcaccccagggtgctgctagtcctattgccaccctgattcctgccagaaataagtaagcaagcaacaggacaatgaactccatgttgcccagatcccactgagagtgaacgtgcagtcatgcccataaccgacacacatcccagtccatgtgggtcagtccttcatcaccctccctgccttctgacaacagcagactccagccattccattatcattcacagcccaacccaagcagtcagtggctgaagaaagagaatcaggtatactctatgtccacatataccttcctgccacagggcttcaccaactggcaggattccccccagcccccaactcctcctcatcccttgttcccaggcgggtcaattggagagtgagcagagatagatggcttgcagaagggtatgcaagatggggagactccaccagaccttagggagagaatggcatctttctccaccttttaagagagacagagcctccctgaggtctcaaagatttttcagggcaacacaagaaacgtttccaagcctcagctgcaggtgttcacctttccactctggggtgtgaggagatggtaagctgaggacaagtgtgttccagatgcaggccaactctgttctccaacagtttgaaccaacttggccttggggttccaagggtaggatgaagggtgtcacggcaggacggggcctggcgtgaggcaacagcaagcagagcgaggacacaacagtggcagcagtgtacagacacaggacgtcagcttcaaacgatgcaacagcagggatatcttgggcacggctctgattcgagccactcccaactctcttgcctccaggatggaggcactgtacatgcaacagtccagagaaagattctagccagtccaagcccaggcacatccagagaaggtgggagctcttcgggttgactccaccgaggaaaacaggcatttgggtatttcagattcccgctccacaataaggcaacttttaaaaaaatattatttccaaaaacaaaacaaaaattccagggggagggaattcagcggatcagtcttaagaggagcttttttttggagcgagaaatcatataaaataaaatgaaataaaacaaggaggaaggcaaccagctgttaggggaaaaataaggcagataaaggagcggggagagaaattaattgccaaccaggaggagttgggctgtatttttcaaaggtggggagagtggagcacacaccttgaggaggaaagcgagaaagaaaagaaaaaagcaagtgaaggggggctcgcccaagaagggtgaagaagcgaagaaagtcgaggcgccgaggctcccaaagctggcagctccgggtggcggtgcaggggcgaaggggggggcggggggaacgtcggacatgcggctctggagttgggtgctgcacctggggctgctgagcgccgcgctgggctgcgggctggccgagcgtccccgccgggcccggagagacccgcgggccggccgacccccgcgccccgccgccggcccggccacctgcgccacccgcggcccgcggccgccgcgcctcgccgccgccgccgccgccgccgggcggtgcctgggaagccgtgcgcgtcccccggcggcggcagcagcgggaggcgaggggcgccaccgaggagccgagcccgccgagccgggcgctctatttcagcgggcgaggcgagcagctgcgcctccgggccgacctcgagctgccccgggacgcgttcacgctgcaagtgtggctgcgagcggaggggggccagaggtctccggcagtgatcacagggctgtatgacaaatgttcttatatctcacgtgaccgaggatgggtcgtgggcattcacaccatcagtgaccaagacaacaaagacccacgctactttttctccttgaagacagaccgagcccggcaagtgaccaccatcaatgcccaccgcagctacctcccaggccagtgggtatacctagctgccacctatgatgggcagttcatgaagctctatgtgaatggtgcccaggtggccacctctggggaacaagtgggtggcatattcagcccactgacccagaagtgcaaagtgctcatgttagggggcagtgccctgaatcacaactaccggggctacatcgagcacttcagtctgtggaaggtggccaggactcagcgggagatactgtctgacatggaaacccatggcgcccacactgctctacctcagctcctcctccaggagaactgggacaatgtgaagcatgcctggtcccccatgaaggatggcagcagccccaaagtggaattcagcaatgcccacggctttctgctggacacgagtctggagcctcctctgtgcggacagacattgtgtgacaacacagaggtcattgccagctacaatcagctctcaagtttccgccagcccaaggtggtgcgctaccgcgtggtcaacctctatgaagatgatcataagaacccgacggtgacgcgcgagcaggtggacttccagcaccatcagctggctgaggccttcaagcaatacaacatctcctgggagctggacgtgctggaggtgagcaactcctcccttcgccgccgcctcatcctggccaactgtgacatcagcaagattggggatgagaactgtgaccccgagtgcaaccacacgctgacgggccacgacggcggggattgccgccacctgcgccaccctgccttcgtgaagaagcagcacaacggggtgtgtgacatggactgcaactatgaacggttcaactttgatggtggagagtgctgtgaccctgaaatcaccaatgtcactcagacttgctttgaccccgactctccacacagagcctacttggatgttaatgagctgaagaacattcttaaattggatggatcaacacatctcaatattttctttgcaaaatcctcagaggaggagttggcaggagtagcaacttggccatgggacaaggaggccctgatgcacttaggtggcattgtcttgaacccatctttctatggcatgcctgggcacacccacaccatgatccatgagattggtcacagcctgggcctctatcacgtcttccgaggcatctcagaaatccagtcctgcagtgacccctgcatggagacagagccctccttcgagactggagacctctgcaatgataccaacccagcccctaaacacaagtcctgtggtgacccagggccaggaaatgacacctgtggctttcatagcttcttcaacactccttacaacaacttcatgagctatgcagatgacgactgtacggactccttcacgcccaatcaagtcgccagaatgcactgttacctggacctggtctaccagggctggcagccctccaggaaaccagcgcctgttgccctcgccccccaagttctgggccacacaacggactctgtgacactggagtggttcccacctatagatggccatttctttgaaagagaattgggatcagcatgtcatctttgcctggaagggagaatcctggtgcagtatgcttccaacgcttcctccccaatgccctgcagcccatcaggacactggagccctcgtgaagcagaaggtcatcctgatgttgaacagccctgtaagtccagtgtccgcacctggagcccaaattcagctgtcaacccacacacggttcctccagcctgccctgagcctcaaggctgctacctcgagctggagttcctctaccccttggtccctgagtctctgaccatttgggtgacctttgtctccactgactgggactctagtggagctgtcaatgacatcaaactgttggctgtcagtgggaagaacatctccctgggtcctcagaatgtcttctgtgatgtcccactgaccatcagactctgggacgtgggcgaggaggtgtatggcatccaaatctacacgctggatgagcacctggagatcgatgctgccatgttgacctccactgcagacaccccactctgtctacagtgtaagcccctgaagtataaggtggtccgggaccctcctctccagatggatgtggcctccatcctacatctcaataggaaattcgtagacatggatctaaatcttggcagtgtgtaccagtattgggtcataactatttcaggaactgaagagagtgagccatcacctgctgtcacatacatccatggaagtgggtactgtggcgatggcattatacaaaaagaccaaggtgaacaatgcgacgacatgaataagatcaatggtgatggctgctcccttttctgccgacaagaagtctccttcaattgtattgatgaacccagccggtgctatttccatgatggtgatggggtatgtgaggagtttgaacaaaaaaccagcattaaggactgtggtgtctacacgccccagggattcctggatcagtgggcatccaatgcttcagtatctcatcaagaccagcaatgcccaggctgggtcatcatcggacagccagcagcatcccaggtgtgtcgaaccaaggtgatagatctcagtgaaggcatttcccagcatgcctggtacccttgcaccatcagctacccatattcccagctggctcagaccactttttggctccgggcgtatttttctcaaccaatggttgccgcagctgtcattgtccacctggtgacggatgggacatattatggggaccaaaagcaggagaccatcagcgtgcagctgcttgataccaaagatcagagccacgatctaggcctccatgtcctgagctgcaggaacaatcccctgattatccctgtggtccatgacctcagccagcccttctaccacagccaggcggtacgtgtgagcttcagttcgcccctggtcgccatctcgggggtggccctccgttccttcgacaactttgaccccgtcaccctgagcagctgccagagaggggagacctacagccctgccgagcagagctgcgtgcacttcgcatgtgagaaaactgactgtccagagctggctgtggagaatgcttatctcaattgctccagcagcgaccgctaccacggtgcccagtgtactgtgagctgccggacaggctacgtgctccagatacggcgggatgatgagctgatcaagagccagacgggacccagcgtcacagtgacctgtacagagggcaagtggaataagcaggtggcctgtgagccagtcgactgcagcatcccagatcaccatcaagtctatgctgcctccttctcctgccctgagggcaccacctttggcagtcaatgttccttccagtgccgtcaccctgcacaattgaaaggcaacaacagcctcctgacctgcatggaggatgggctgtggtccttcccagaggccctgtgtgagctcatgtgcctcgctccaccccctgtgcccaatgcagacctccagaccgcccggtgccgagagaataagcacaaggtgggctccttctgcaaatacaaatgcaagcctggataccatgtgcctggatcctctcggaagtcaaagaaacgggccttcaagactcagtgtacccaggatggcagctggcaggagggagcttgtgttcctgtgacctgtgacccacctccaccaaaattccatgggctctaccagtgtactaatggcttccagttcaacagtgagtgtaggatcaagtgtgaagacagtgatgcctcccagggacttgggagcaatgtcattcattgccggaaagatggcacctggaacggctccttccatgtctgccaggagatgcaaggccagtgctcggttccaaacgagctcaacagcaacctcaaactgcagtgccctgatggctatgccatagggtcggagtgtgccacctcgtgcctggaccacaacagcgagtccatcatcctgccaatgaacgtgaccgtgcgtgacatcccccactggctgaaccccacacgggtagagagagttgtctgcactgctggtctcaagtggtatcctcaccctgctctgattcactgtgtcaaaggctgtgagcccttcatgggagacaattattgtgatgccatcaacaaccgagccttttgcaactatgacggtggggattgctgcacctccacagtgaagaccaaaaaggtcaccccattccctatgtcctgtgacctacaaggtgactgtgcttgtcgggacccccaggcccaagaacacagccggaaagacctccggggatacagccatggctaaggaaggacaagaagttgtcaaagaattcccaacgccaggacccacatccctttggtattgatttcacagtcagctgctcaacggaatggcctctccacaccagggatccttagcacccaaccggtctgcctttaattttacccaggaaggactcacattggggcgaatgaaccaagtttcgccatgctggatgatgaaatggattcccatcccaaagtctgagatggattgcatatacagtgtgcagtcccagagcctcctaaaattctagccatttgtcacacaaccacagcaagaaacgtgttctatatctagagtgtgcccatctgtgtttagtacacatgcatgcatacacacccatacaaacatctgtgtgagggcagttctggagatgagcagagagagaccggaataaactcaatcttttctttcccaagctcctagccaacactatccttgggagaaagaaatttgcagaaactgctaagaccaagtgtggagatgtcaagctagttcacactctgaggctcagaatatgtaggacatgcacaattgtgcagtcctttgggattggaagtgaaacagtctgtgatcccctaccttctagggaactaggacctaggaagaggtaaagattatcaggtatgcaaagcgccccaattcttctgctgccatgggggattttaccccaactccagggttcgaggccaatctgagaatggcttaggattgcaatgtcaaggtattatatcagccccttgcttgaggcttgaggtcataatatccctctaggacttacctgttcccccagatcttgccttgggaccacatttgctgctacttttcctgctgctctatcctatacattgaataatccaagatggtagaactaggttaggaaaaattccacacaaccaaacagtctgccttaaaagtgacccacatttttccatagctcctcactttttagcccttctgcaagagaaaaaccctcatgggtccacatggtgagaagttaagtttcctgtaagtgggcctctcaccctggaaaggagttgagggacatcagatgctggaaccctcactgaaagtccagaatgtctaagccagtgttagattttgtaaacaagtggaacagtgttaaatttctatgatgttggagccatccagagactactggaattgtcgagacttttggattattatccttatccttatcctaatcttcctagcccttcaggctagagtaggcttcgatcctgagaaccttgctgttgctctgaggagatataattctgggagaaagaatcttttataagaacagtacagattgttctcaagagggccatcagaaggaagccaaagagttcacagcctcagcaccaacaactcaacatggtcatcatgttttctatatggtttttccagctagcagtactcccttccatacctgtgactgggcagtgcttttctctctcccatgtctagcctccaaaagttaagtgaaaattagtcaactgcacgtggaagcccccaccactttggggatctctttatttcttttcagccagggacctgtccactccctttgaattaatatgggaagaaattaatacaggatgaactggagagaagggttgagtgtggcatactttctgaaacctggagctgggaattgcggagaagggaaggtctagactagttacatcacatagggattactgtaaatcaagtcatctcaagtctagtgaagacagccaacagaaacaaaacctagcatagggatagaaaataccatgcacgtgtgcagccccacctaattcctgcatccaaggcaggtgttgttaatctatcatagcacttaaaaaaaaaaaaaaagagaccaaaaataactttaggaaccaccatattatatcactcccaatagcactgacctggtgatcaaaaacacttgagaagacatctattggccatctctggccaattacactaagaaacatatcaaggtgcttttggcacaggtgcccacaaatacggatgcagtgctgagatagtttatgagacttgtaccatttcacaaactctgaaattgggttccatattggcaaggctgccacagttgttaagaataatcctctatgtttcttcctcacaaaaccatatctcatttatatccagaccattacttcactataattacaaggacaaattattagcaagaaataagaatagtattagaagaattgatcctattttgaacccctctccagtatcttcacactcttgtcaactctccaggcctctctcttgccctgagttatcagcctgtgtggtgttaactaccttagaaggtacaagctaagaaatgtaacagtatcaaccctcccagttgcttaattatacccataggtaatacaaaaagctctgaagacccaaagatgacattactaatgatgtgatttcaggagccacagaagaaccttaccagcttccctcaaatcagtccttatcctctttctatcttcactcccatcatcatctattttcacactatccagctaagcaaagattcctggaggctgacttgtatcttcagactcacagagtgaattcagctcttctgaatcaagacccacccagtctctttcattcagacctgttgctaacaaatttatatttgccaaggatattaggcaaaagaggctacttgattggtggccaacctcgtgcccacatggaaggtatctttaatagggtcttttcaaaccttagtggaggagggtcagctcaatttgggcaatgcatttgttcccagtttcattttcttcctgggaattaactcgtcatttcattccttcagtcatcttctgtgtaggtgaccggagcactgagaggcagctctgatgcactattgtgtgtcagcagctcaaaggccctaaaacactgaaggttctgcatctgaagtattagattgttagcagcaaaatatgaaagatgaggtggacagtcctctaagccctatttagggaagcttttccaagccacaatcttaactacctacccaaaggatttgcattacccccagattctgtgccaacaaccttttaaggaaatacagtccttgggaaatgagttttgatggtgaattggggtgttaaggaagggaaagattgtcatagatggtagggctttgaaaatgcagggtatcagctgccactcctggcttcaacacattgagtcactgcctagacggttctcttggtcttattcccatcctggccaatgcttaaatactatttgttgaaaataattctttgagacagatttcagctacctcccttccaggttcgatttaacttggttgtaattgtcaatttgttgttataggtcttacctgtgtgaaagaaagaaaaagaaagaaagaaagaaagagaaaggaaattataaggtcaagttaacagttttgaggttttgtgtttttttctggaactacttcaagtgagaaaataaaaaaaaatggtgacaaagctgtacagatagagataatagaagacaaagagattaaaaggaaataaaaatgcatgattaaaaactaagaataaaaaacctatttttatgtttcctaaaggaaattgtttattctacagactcagtaggtagacacaaacataaagatttccctagaagacatagagtgggatttgataacactgtctgttattttctgtacattgtggtaggtccaggaaatatgacattttcccccttgatgtgttattgttgttgttgggtggggtgggcattttgtttatttgtttggtggcaatcagtggtagtagggagtgggagggcttatattggtttttccagctattaaggggacatattgtgtcgttgtgcttttcacgttataaaatgtttatatttaccagtacagcactgggctttataaagactgcactcagaaccacactgcacagtccagttttttaaaaagctgctacatgacagacaggtaatcccactgagtgagttttgagaaacaaatcaaacgaagtaaacaagaaacataaaaaccaaatagcaaatgaataaaagcctgttcttgtaacttattcaacttttgccaaattcctaccaatcacttgctttttaaaagaaatgtataatagccaaaagagaaattatgtccctgttgtacagaagttagaatttttgactccaggcagcagtttgctcagtgatcttgaacaagttatccaattgcctctacatttgcatcagtttctctagctgcaaaatggggataatactatatacctacctcacagtgggagggcaggagattttgaggccctgaggttttaggtgggctgtgagggccaacgcttgacacaaagtccatgggttattattcaagaatgcacaggcccatcggccttttagaaagacaagacagggagtgcttgtttgatatttcaaggaataaagccggagctcctgaattgtagtccaccttaaaagagagacctgtattggagaatattttatttttttggcaaatttgatcttaccctttaccagttctataatttggttaaaagctgattacgtcctacaatgtcaaagtcagctaactgtcgtctacttaagacttctggtcatttccaacttatagaggaagggagtctctaaaatctcttcttcagaaggcacctcacttctcagacttaaaattccacatcaagtgttccattaaaagaagataaggcattctgagtgcaaacaaatgggggcttcttaaactacacaccagcagtcagtgaggaaaactttgaacaattattgagttgctttcttgggtctctataatcaataacctgtctgcagatatctatctatataaagatattatatataaatataaatttacatatatatgcacatgtatatatagttgtacatatatgtgtgtatatatatacttaaatgtaatatttacaaaataaaactgtgatctcgtctagagaaaatgtattcatattacaaactgctcttccatatttatgtaccatattatacctttttattattgttataattattatgggtatttctaattaatatgatgttgaaacctgtttggcaccttctggaagctaccaaaaaaatgacactccattgaagtgcttaaaagctgttctcataagaattctactggcctattgtaaaaaagaaaaaaaaaagaaaaagaagaaagacacaaagaaaataatctaaacaccaaaaactaaacacaattccaatcctttttctgtacctcacgcgcataaatttggctgctcctatttttttttctgtttatgtgtttttatggatctaagttaaatcttttggcaatatataaaaatgtaaatagtaaactttatttattaagaatgtcatcttttttaatttatatttacacaattgttcatctaatttattttttctatacagttttaaatactcagacatattttgctgttcatgatatttttatcctgttctcatggatttgttttcccatactgttttctctgatctcaattacaggttggatctcacaaataataatgtcagagacagaaatattttgccactgttgattactatactttaaagttctatattatgaaaatatataatagcttgtacgct

SEQ ID NO: 455131 - DNA, 7801 bp, Homo sapiens
cattagggaaaacataaagtggctgaatttacaaattattggtatccccaagcacaaagaaaggattagaaaacctatttaacaaagtaatgatgaaaactctcaagatctagcaagacatagagacattcagatataggagacacaatgatccctaggaagatacagtgcaaaaaaggtcttctcaacaaggcattataatcagactctctaaagtcaaagataagagtgaatcctaaaaatagcaagaaaaaagcatgtagctacctataaaggaaaccccatcaaactaacagtagatttttcagcagaaaccttacagctcgtgccgaattcggcacgaggtttgtcgcagcaagaacaaacagcattccttccagcaaatcaagtgcctgttttacaacagaacacttcagttgctgcaaaacaaccccagacttctgtggtacagaatcaacaacagatatcacaacagggacctatatatgatgaagtggaattggatgcattggctgaaattgagcgaatagagagagaatcagctattgaaagggagcgcttctcaaaagaagttcaagataaagataagcctttgaaaaaaagaaaacaagattcttacccacaggaggctgggggtgctacaggaggtaatagaccagcttctcaggagacgggttctacgggaaatgggtcaaggccagcattaatggttagcattgatcttcatcaggcaggaagagtggactctcaggcttctataactcaggattcagactccataaaaaagcctgaagaaatcaaacaatgtaatgatgcacctgtttctgttcttcaggaagatattgttggaagtcttaaatctacaccagaaaaccatcctgagacacctaaaaaaaagtctgatcctgagctttcaaagagtgaaatgaaacaaagtgaaagtagattagcagaatctaaaccaaatgaaaaccgattggtggagacaaaatcaagtgaaaataagttagaaactaaagttgagacccaaacagaagaacttaaacagaatgagagcagaacaactgaatgcaaacaaaacgagagcaccatagttgagcctaaacaaaatgaaaatagactgtctgacacaaaaccaaatgacaacaaacaaaataatggcagatcagaaacaacaaaatcaaggcctgaaaccccaaagcaaaagggtgaaagccggcctgagactccaaaacaaaagagtgatgggcatcctgaaaccccaaaacagaagggtgatggaaggcctgaaactccaaagcaaaaaggtgagagccgccctgaaactccaaagcaaaaaaatgaagggcgacctgaaacaccaaaacacaggcatgacaataggagggattctggaaagccatctacagagaaaaaacctgaagtgtctaaacataaacaagatactaaatctgactcacctcggttaaaatcagaacgagctgaagccttaaagcagagacctgatgggcgatctgtttctgagtcactaagacgtgaccatgataataaacaaaaatcagatgacaggggtgaatcagagcgacatcgaggggatcagtctagggttcgaagaccagaaacattgagatcctctagtagaaatgaacatggcattaaatctgatagttcaaaaactgataaactagaacgaaaacacaggcatgaatcaggggactcaagggaaagaccatcttctggggaacaaaaatcaagacctgacagtcctcgtgttaaacaaggagattctaataaatcaagatctgataaacttggttttaaatcaccaactagtaaagatgacaaaaggacagagggtaacaagagtaaagtagacactaataaagcacaccctgacaataaggcagaatttccaagttatttgttggggggcaggtctggtgcgttgaaaaattttgtcattccgaaaatcaagagggataaagatggcaatgttactcaggagacaaagaaaatggaaatgaaaggagagccgaaagacaaagtagaaaaaataggattagttgaagatctaaataaaggagctaagcctgtagttgtgctacaaaaactgtctttggatgatgttcagaaacttattaaagatagagaggacaaatcaagaagttcccttaaacctatcaagaataaaccatcaaagtcaaataaaggtagtatagatcaatcagtgttaaaagaattaccccctgaactcctggcagaaattgagtccaccatgccactttgtgaacgtgtgaaaatgaacaaacgcaagcgtagcacagttaatgaaaagccaaaatatgctgaaatcagttcagatgaagataatgatagtgatgaagcttttgaatcctctaggaaacgacataaaaaagatgatgataaagcttgggaatatgaagagcgtgacagaagaagctctggggatcataggagaagtggccactctcatgaaggaagaaggagttcaggtggtggtcgttatcgaaaccgaagtccgtcagattctgacatggaagattattctcctcctcccagccttagtgaggttgctaggaaaatgaagaaaaaagaaaaacagaagaaaaggaaagcatatgaaccaaaactaacacctgaagaaatgatggactcttcaacttttaagagattcacagcctcaatagagaatattttggataatttggaagatatggattttactgcgtttggtgatgatgatgaaattcctcaggaactgctcttaggaaaacatcagcttaatgaacttggcagtgaatctgctaaaataaaagcaatgggtataatggataagctttcaactgacaaaactgtgaaagtcttaaatatcttggagaagaatattcaggatgggtcaaagctttccactttgttaaatcataataacgatactgaagaagaagaaaggttatggagagaccttattatggagagagttacaaaatcagcggatgcttgtcttacaactatcaacattatgacatcccctaacatgccaaaagctgtgtacattgaggatgtaattgaaagagttatacagtacactaaatttcatttgcagaatacactttatcctcagtatgatcctgtttacagattagatcctcatggaggaggcttattaagttcaaaagcaaaacgggctaaatgttctacccataagcagagagtaatagtaatgctttataacaaagtttgtgacattgttagcagcttatcagaattgctagagatacaacttcttacagacacaacaattcttcaggtttcatctatgggaataacaccattttttgtggaaaatgtcagtgaactacagttgtgtgccattaagttagtcactgcagtattctcaagatatgaaaaacataggcagttaattttggaagaaatttttacttcacttgcaagattaccaaccagcaagaggagtttaaggaacttcaggttaaacagtagtgatatggatggagaacctatgtatattcagatggttacagcactggttttacaacttattcagtgtgtggtacacttaccatcatcagagaaggactctaatgcagaagaagattcaaataaaaaaattgaccaggatgttgtcattactaactcttatgaaacagctatgcgaacagcccaaaacttcctctccatcttccttaaaaaatgtggtagtaagcaaggtgaagaagattacagaccactgtttgaaaattttgttcaagaccttctttcaacagtcaataagcctgaatggccagctgctgaactactccttagtttgttagggagactgttggttcatcagttcagtaacaagtcaacagagatggctttaagagtggcatctcttgattaccttggaactgttgctgcacggctaagaaaagatgctgttacaagcaaaatggatcaaggatctatagaacgcattttaaaacaggtttcaggaggggaagatgaaatccaacaattacaaaaagcattgcttgattacttggatgaaaacactgagactgatccttcactagtgttttctcgtaaattctatatagcccagtggtttcgagacacaactctggaaacagaaaaagcaatgaaatcacaaaaagatgaagaatcatctgaaggaacacatcatgcaaaggaaattgagacaactggccaaattatgcatcgagctgaaaaccgaaaaaagtttcttagaagcattatcaaaaccacaccttctcagtttagcacattaaagatgaactctgatactgtggactatgatgatgcttgcttgattgttcgatacttggcctccatgaggccgtttgcccagagctttgatatttatttgacacagatcctacgagttcttggtgaaaatgcaattgctgttcgaacaaaagccatgaagtgtttgtctgaggttgttgctgtagaccccagtattctagcaaggcttgatatgcaacgaggtgttcatggacgattgatggataattcgactagtgtccgagaagcagcagtagaattactaggtcgatttgtcctttgtcgacctcagcttgctgaacagtattatgatatgctgattgaaagaatattggatactggtatcagtgtcaggaaaagagtaataaagattctcagagacatttgtattgaacaaccaacatttccaaaaatcacagaaatgtgtgtaaaaatgattcgcagagtcaatgatgaagagggcattaagaaattagtaaatgaaacattccagaaactctggtttactccaactccacacaatgacaaagaagcaatgacaaggaaaattttaaacattaccgatgtggttgcagcatgcagagatactggatatgactggtttgagcaactgcttcaaaacttgttgaagtccgaagaggattcctcatataaacctgtgaagaaagcttgtactcaacttgttgataacctagttgagcacattcttaaatatgaggaatctctagctgactctgacaataaaggtgtgaattctggaagattggtagcttgcataaccactttgttcttattcagcaaaataagaccccagctcatggttaaacatgcaatgactatgcaaccataccttaccactaaatgtagtacgcaaaatgatttcatggttatctgcaatgttgcaaaaatcctagagctagttgtaccactgatggagcatccaagtgaaacttttcttgccactattgaggaagatctaatgaagctcatcatcaaatatggcatgactgtagtgcaacattgtgtgagctgtcttggagctgttgtaaataaagtgacacaaaattttaaatttgtgtgggcttgtttcaatagatactatggtgccatttcaaaattaaaaagtcaacaccaagaggacccaaataacacttcacttctaacaaacaaaccagcacttcttagatcccttttcaccgttggagcactatgtcggcattttgattttgatctggaagattttaaaggcaacagcaaggttaacataaaagataaagtacttgaactattgatgtattttacaaaacactcagatgaagaagtacaaacaaaagctatcattggtctaggatttgcctttattcagcatccaagtctaatgttcgagcaagaagtgaagaatctatataataatattttatctgataagaactcctcagtcaatttaaaaatacaagtgttaaaaaacctccagacctacctacaagaagaagatacacgtatgcagcaggcagatagagactggaagaaagttgcaaaacaggaagacttaaaagaaatgggtgatgtttcctcagggatgagtagttccatcatgcagctttatctcaaacaggtgcttgaggcattttttcacacccagtcaagtgtacgccactttgccctaaatgtcattgcattgactctaaatcaaggtcttattcatccagttcagtgtgtgccatatttaattgctatgggcacagacccagaacctgctatgcggaacaaggctgatcagcaacttgtggaaatagacaaaaaatatgctggattcattcatatgaaagcagtggctggtatgaagatgtcttaccaggtacaacaggcaatcaacacatgcctaaaagatcctgtaaggggtttcagacaagacgagtcctctagcgctttgtgttcacacctttactccatgatccgtggaaaccgccaacacagacgagcctttcttatttctttactcaacctctttgatgacacagcaaaaacagacgtgactatgctcttgtatatagcagacaatctagcctgttttccataccagacacaggaagagccgttgtttataatgcatcatatagacattacactctcagtttctggtagtaacctactgcagtcattcaaggagtctatggtaaaggacaaaaggaaagagagaaaatcatcacctagtaaggaaaatgagtcaagcgacagtgaagaagaagtttccaggcctcggaagtcacggaaacgtgtagattcagattcagattcagattcagaagacgatataaattcagtgatgaaatgtttgccagaaaattcagctcctttaatcgaatttgcaaatgtgtcccagggtattttattacttctcatgttaaaacaacatttgaagaatctttgtggattttctgatagtaaaattcagaagtactctccatctgaatctgcaaaagtatatgataaagcgataaaccgaaaaacaggagttcattttcatccaaaacaaacactggacttcctgcggagtgacatggctaattccaaaatcacagaagaggtgaaaaggagtatagtaaaacagtatctagatttcaaacttctcatggaacatctggaccctgatgaagaagaagaagaaggggaggtttcagctagcacaaatgctcggaacaaagcaattacctcactgcttggaggaggcagccctaaaaataatacagcagcagagacagaagatgatgaaagtgatggggaggatagaggaggaggcacttcagggtcattgagaaggtcaaaacgaaattcagactctacggagttggcagcacagatgaatgaaagtgttgacgtcatggatgtcatcgctatttgctgtccaaagtacaaagatcgaccacaaattgcaagagtagtgcagaaaaccagcagtggcttcagtgttcagtggatggcaggctcctacagtggctcctggactgaggctaagcgccgtgatggccgcaaactggtgccttgggtagacactattaaagagtcagacattatttacaaaaaaattgctctaacgagtgctaataagctgactaataaagttgttcagactttacgatccctgtatgccgccaaggatgggacttccagctaatgaatttgtacatgcagccaaatttacaggaatttttttaaaaggcagaaaaacttgaaataccaacattctggcaaaaaaaaatcagttttatgaagagtaagtggaacctgggatgcaggaacaaaagaaggaaatgttgggcaaacatttttgtgggagctcccttcgctgttgtgcagcagaaacagattctcagttcatttttactcccactgtattatagtttaacaaaaattgtttatatcttggaaaaaaaactttctgtttaaaaaaaataaacaagtgaatgttgga

SEQ ID NO: 455132 - DNA, 402 bp, Homo sapiens
cagcatcggtatcaagtcccattgttgcaggtggtttgagaaacatacatgataataaagtttctggtccgttgtctggcaattcagctaatcatcatgctgataatcctagacatggttcaagtgaggactacctacacatggtgcacaggctaagtagtgacgtatgtaatatattatcattaaggtgataaaatagttctaatatttgtcatataacctagtatttccatttcaaaatttgaatgatacctaccgtatatcattatactgggtactgagtacaacatggctcctgcacatacagagcttagtctagagcaggattggtcaagtgtgaccagtagcctgaaccacaaagtgagaatggtttttacatttatacagagttatttaaaaaaa

SEQ ID NO: 455133 - DNA, 8664 bp, Homo sapiens
cattagggaaaacataaagtggctgaatttacaaattattggtatccccaagcacaaagaaaggattagaaaacctatttaacaaagtaatgatgaaaactctcaagatctagcaagacatagagacattcagatataggagacacaatgatccctaggaagatacagtgcaaaaaaggtcttctcaacaaggcattataatcagactctctaaagtcaaagataagagtgaatcctaaaaatagcaagaaaaaagcatgtagctacctataaaggaaaccccatcaaactaacagtagatttttcagcagaaaccttacagctcgtgccgaattcggcacgaggtttgtcgcagcaagaacaaacagcattccttccagcaaatcaagtgcctgttttacaacagaacacttcagttgctgcaaaacaaccccagacttctgtggtacagaatcaacaacagatatcacaacagggacctatatatgatgaagtggaattggatgcattggctgaaattgagcgaatagagagagaatcagctattgaaagggagcgcttctcaaaagaagttcaagataaagataagcctttgaaaaaaagaaaacaagattcttacccacaggaggctgggggtgctacaggaggtaatagaccagcttctcaggagacgggttctacgggaaatgggtcaaggccagcattaatggttagcattgatcttcatcaggcaggaagagtggactctcaggcttctataactcaggattcagactccataaaaaagcctgaagaaatcaaacaatgtaatgatgcacctgtttctgttcttcaggaagatattgttggaagtcttaaatctacaccagaaaaccatcctgagacacctaaaaaaaagtctgatcctgagctttcaaagagtgaaatgaaacaaagtgaaagtagattagcagaatctaaaccaaatgaaaaccgattggtggagacaaaatcaagtgaaaataagttagaaactaaagttgagacccaaacagaagaacttaaacagaatgagagcagaacaactgaatgcaaacaaaacgagagcaccatagttgagcctaaacaaaatgaaaatagactgtctgacacaaaaccaaatgacaacaaacaaaataatggcagatcagaaacaacaaaatcaaggcctgaaaccccaaagcaaaagggtgaaagccggcctgagactccaaaacaaaagagtgatgggcatcctgaaaccccaaaacagaagggtgatggaaggcctgaaactccaaagcaaaaaggtgagagccgccctgaaactccaaagcaaaaaaatgaagggcgacctgaaacaccaaaacacaggcatgacaataggagggattctggaaagccatctacagagaaaaaacctgaagtgtctaaacataaacaagatactaaatctgactcacctcggttaaaatcagaacgagctgaagccttaaagcagagacctgatgggcgatctgtttctgagtcactaagacgtgaccatgataataaacaaaaatcagatgacaggggtgaatcagagcgacatcgaggggatcagtctagggttcgaagaccagaaacattgagatcctctagtagaaatgaacatggcattaaatctgatagttcaaaaactgataaactagaacgaaaacacaggcatgaatcaggggactcaagggaaagaccatcttctggggaacaaaaatcaagacctgacagtcctcgtgttaaacaaggagattctaataaatcaagatctgataaacttggttttaaatcaccaactagtaaagatgacaaaaggacagagggtaacaagagtaaagtagacactaataaagcacaccctgacaataaggcagaatttccaagttatttgttggggggcaggtctggtgcgttgaaaaattttgtcattccgaaaatcaagagggataaagatggcaatgttactcaggagacaaagaaaatggaaatgaaaggagagccgaaagacaaagtagaaaaaataggattagttgaagatctaaataaaggagctaagcctgtagttgtgctacaaaaactgtctttggatgatgttcagaaacttattaaagatagagaggacaaatcaagaagttcccttaaacctatcaagaataaaccatcaaagtcaaataaaggtagtatagatcaatcagtgttaaaagaattaccccctgaactcctggcagaaattgagtccaccatgccactttgtgaacgtgtgaaaatgaacaaacgcaagcgtagcacagttaatgaaaagccaaaatatgctgaaatcagttcagatgaagataatgatagtgatgaagcttttgaatcctctaggaaacgacataaaaaagatgatgataaagcttgggaatatgaagagcgtgacagaagaagctctggggatcataggagaagtggccactctcatgaaggaagaaggagttcaggtggtggtcgttatcgaaaccgaagtccgtcagattctgacatggaagattattctcctcctcccagccttagtgaggttgctaggaaaatgaagaaaaaagaaaaacagaagaaaaggaaagcatatgaaccaaaactaacacctgaagaaatgatggactcttcaacttttaagagattcacagcctcaatagagaatattttggataatttggaagatatggattttactgcgtttggtgatgatgatgaaattcctcaggaactgctcttaggaaaacatcagcttaatgaacttggcagtgaatctgctaaaataaaagcaatgggtataatggataagctttcaactgacaaaactgtgaaagtcttaaatatcttggagaagaatattcaggatgggtcaaagctttccactttgttaaatcataataacgatactgaagaagaagaaaggttatggagagaccttattatggagagagttacaaaatcagcggatgcttgtcttacaactatcaacattatgacatcccctaacatgccaaaagctgtgtacattgaggatgtaattgaaagagttatacagtacactaaatttcatttgcagaatacactttatcctcagtatgatcctgtttacagattagatcctcatggaggaggcttattaagttcaaaagcaaaacgggctaaatgttctacccataagcagagagtaatagtaatgctttataacaaagtttgtgacattgttagcagcttatcagaattgctagagatacaacttcttacagacacaacaattcttcaggtttcatctatgggaataacaccattttttgtggaaaatgtcagtgaactacagttgtgtgccattaagttagtcactgcagtattctcaagatatgaaaaacataggcagttaattttggaagaaatttttacttcacttgcaagattaccaaccagcaagaggagtttaaggaacttcaggttaaacagtagtgatatggatggagaacctatgtatattcagatggttacagcactggttttacaacttattcagtgtgtggtacacttaccatcatcagagaaggactctaatgcagaagaagattcaaataaaaaaattgaccaggatgttgtcattactaactcttatgaaacagctatgcgaacagcccaaaacttcctctccatcttccttaaaaaatgtggtagtaagcaaggtgaagaagattacagaccactgtttgaaaattttgttcaagaccttctttcaacagtcaataagcctgaatggccagctgctgaactactccttagtttgttagggagactgttggttcatcagttcagtaacaagtcaacagagatggctttaagagtggcatctcttgattaccttggaactgttgctgcacggctaagaaaagatgctgttacaagcaaaatggatcaaggatctatagaacgcattttaaaacaggtttcaggaggggaagatgaaatccaacaattacaaaaagcattgcttgattacttggatgaaaacactgagactgatccttcactagtgttttctcgtaaattctatatagcccagtggtttcgagacacaactctggaaacagaaaaagcaatgaaatcacaaaaagatgaagaatcatctgaaggaacacatcatgcaaaggaaattgagacaactggccaaattatgcatcgagctgaaaaccgaaaaaagtttcttagaagcattatcaaaaccacaccttctcagtttagcacattaaagatgaactctgatactgtggactatgatgatgcttgcttgattgttcgatacttggcctccatgaggccgtttgcccagagctttgatatttatttgacacagatcctacgagttcttggtgaaaatgcaattgctgttcgaacaaaagccatgaagtgtttgtctgaggttgttgctgtagaccccagtattctagcaaggcttgatatgcaacgaggtgttcatggacgattgatggataattcgactagtgtccgagaagcagcagtagaattactaggtcgatttgtcctttgtcgacctcagcttgctgaacagtattatgatatgctgattgaaagaatattggatactggtatcagtgtcaggaaaagagtaataaagattctcagagacatttgtattgaacaaccaacatttccaaaaatcacagaaatgtgtgtaaaaatgattcgcagagtcaatgatgaagagggcattaagaaattagtaaatgaaacattccagaaactctggtttactccaactccacacaatgacaaagaagcaatgacaaggaaaattttaaacattaccgatgtggttgcagcatgcagagatactggatatgactggtttgagcaactgcttcaaaacttgttgaagtccgaagaggattcctcatataaacctgtgaagaaagcttgtactcaacttgttgataacctagttgagcacattcttaaatatgaggaatctctagctgactctgacaataaaggtgtgaattctggaagattggtagcttgcataaccactttgttcttattcagcaaaataagaccccagctcatggttaaacatgcaatgactatgcaaccataccttaccactaaatgtagtacgcaaaatgatttcatggttatctgcaatgttgcaaaaatcctagagctagttgtaccactgatggagcatccaagtgaaacttttcttgccactattgaggaagatctaatgaagctcatcatcaaatatggcatgactgtagtgcaacattgtgtgagctgtcttggagctgttgtaaataaagtgacacaaaattttaaatttgtgtgggcttgtttcaatagatactatggtgccatttcaaaattaaaaagtcaacaccaagaggacccaaataacacttcacttctaacaaacaaaccagcacttcttagatcccttttcaccgttggagcactatgtcggcattttgattttgatctggaagattttaaaggcaacagcaaggttaacataaaagataaagtacttgaactattgatgtattttacaaaacactcagatgaagaagtacaaacaaaagctatcattggtctaggatttgcctttattcagcatccaagtctaatgttcgagcaagaagtgaagaatctatataataatattttatctgataagaactcctcagtcaatttaaaaatacaagtgttaaaaaacctccagacctacctacaagaagaagatacacgtatgcagcaggcagatagagactggaagaaagttgcaaaacaggaagacttaaaagaaatgggtgatgtttcctcagggatgagtagttccatcatgcagctttatctcaaacaggtgcttgaggcattttttcacacccagtcaagtgtacgccactttgccctaaatgtcattgcattgactctaaatcaaggtcttattcatccagttcagtgtgtgccatatttaattgctatgggcacagacccagaacctgctatgcggaacaaggctgatcagcaacttgtggaaatagacaaaaaatatgctggattcattcatatgaaagcagtggctggtatgaagatgtcttaccaggtacaacaggcaatcaacacatgcctaaaagatcctgtaaggggtttcagacaagacgagtcctctagcgctttgtgttcacacctttactccatgatccgtggaaaccgccaacacagacgagcctttcttatttctttactcaacctctttgatgacacagcaaaaacagacgtgactatgctcttgtatatagcagacaatctagcctgttttccataccagacacaggaagagccgttgtttataatgcatcatatagacattacactctcagtttctggtagtaacctactgcagtcattcaaggagtctatggtaaaggacaaaaggaaagagagaaaatcatcacctagtaaggaaaatgagtcaagcgacagtgaagaagaagtttccaggcctcggaagtcacggaaacgtgtagattcagattcagattcagattcagaagacgatataaattcagtgatgaaatgtttgccagaaaattcagctcctttaatcgaatttgcaaatgtgtcccagggtattttattacttctcatgttaaaacaacatttgaagaatctttgtggattttctgatagtaaaattcagaagtactctccatctgaatctgcaaaagtatatgataaagcgataaaccgaaaaacaggagttcattttcatccaaaacaaacactggacttcctgcggagtgacatggctaattccaaaatcacagaagaggtgaaaaggagtatagtaaaacagtatctagatttcaaacttctcatggaacatctggaccctgatgaagaagaagaagaaggggaggtttcagctagcacaaatgctcggaacaaagcaattacctcactgcttggaggaggcagccctaaaaataatacagcagcagagacagaagatgatgaaagtgatggggaggatagaggaggaggcacttcaggggtgaggcggaggaggagtcaacgtatttcgcagcgtattacgtaaaatgatttttatgtgcttatatatgtcagtctattaaatgtacaccaagtaatgtaatacttaaaagagaaaacattttgtagatagagattctctacttacccgtttatacatccttttgtagaaagtttaacataaaagacaataaaaaaacagaaatgagatttatccagcataaagggttaatttttctttgaattgtattaatgtgtgttatttttattgttgctaagttttatgtagctatatggttcatatgtatatataattttatatatcaataagagtaaagacacgggtacaaattaagagttatatggttttacaagtatatgttaaccccttggcgctggcggtcacggtgcgtctcattgccggcaatggaagtgtgccgggaaatcccaactcccggcgtcaagggattaaaagcaataaaaacaataatttcactaaaattcttttgtgtaacacttggtcttttttcccccctcccaatgttttagtcattgagaaggtcaaaacgaaattcagactctacggagttggcagcacagatgaatgaaagtgttgacgtcatggatgtcatcgctatttgctgtccaaagtacaaagatcgaccacaaattgcaagagtagtgcagaaaaccagcagtggcttcagtgttcagtggatggcaggctcctacagtggctcctggactgaggctaagcgccgtgatggccgcaaactggtgccttgggtagacactattaaagagtcagacattatttacaaaaaaattgctctaacgagtgctaataagctgactaataaagttgttcagactttacgatccctgtatgccgccaaggatgggacttccagctaatgaatttgtacatgcagccaaatttacaggaatttttttaaaaggcagaaaaacttgaaataccaacattctggcaaaaaaaaatcagttttatgaagagtaagtggaacctgggatgcaggaacaaaagaaggaaatgttgggcaaacatttttgtgggagctcccttcgctgttgtgcagcagaaacagattctcagttcatttttactcccactgtattatagtttaacaaaaattgtttatatcttggaaaaaaaactttctgtttaaaaaaaataaacaagtgaatgttggaaattagtctgttaatgttcttaataaagtgttcttggagtttaacctagcagcggatggctttctttagcttagcccagtttccagggaagcattgttttttccaggctgtaaaatggcagaatctcctggatatataatttattctgttgaaaaaaaaaaaagcatgcagtatctatgacctatctgcagaaggagtttttgtaaatgtagattttgatgtattaggtcaccctgaaaacaatacaagaaaagggatccccaggtaatctggtggagcgaatactgcaataaatttttttacttctctttgtta

SEQ ID NO: 455134 - DNA, 8349 bp, Homo sapiens
cattagggaaaacataaagtggctgaatttacaaattattggtatccccaagcacaaagaaaggattagaaaacctatttaacaaagtaatgatgaaaactctcaagatctagcaagacatagagacattcagatataggagacacaatgatccctaggaagatacagtgcaaaaaaggtcttctcaacaaggcattataatcagactctctaaagtcaaagataagagtgaatcctaaaaatagcaagaaaaaagcatgtagctacctataaaggaaaccccatcaaactaacagtagatttttcagcagaaaccttacagctcgtgccgaattcggcacgaggtttgtcgcagcaagaacaaacagcattccttccagcaaatcaagtgcctgttttacaacagaacacttcagttgctgcaaaacaaccccagacttctgtggtacagaatcaacaacagatatcacaacagggacctatatatgatgaagtggaattggatgcattggctgaaattgagcgaatagagagagaatcagctattgaaagggagcgcttctcaaaagaagttcaagataaagataagcctttgaaaaaaagaaaacaagattcttacccacaggaggctgggggtgctacaggaggtaatagaccagcttctcaggagacgggttctacgggaaatgggtcaaggccagcattaatggttagcattgatcttcatcaggcaggaagagtggactctcaggcttctataactcaggattcagactccataaaaaagcctgaagaaatcaaacaatgtaatgatgcacctgtttctgttcttcaggaagatattgttggaagtcttaaatctacaccagaaaaccatcctgagacacctaaaaaaaagtctgatcctgagctttcaaagagtgaaatgaaacaaagtgaaagtagattagcagaatctaaaccaaatgaaaaccgattggtggagacaaaatcaagtgaaaataagttagaaactaaagttgagacccaaacagaagaacttaaacagaatgagagcagaacaactgaatgcaaacaaaacgagagcaccatagttgagcctaaacaaaatgaaaatagactgtctgacacaaaaccaaatgacaacaaacaaaataatggcagatcagaaacaacaaaatcaaggcctgaaaccccaaagcaaaagggtgaaagccggcctgagactccaaaacaaaagagtgatgggcatcctgaaaccccaaaacagaagggtgatggaaggcctgaaactccaaagcaaaaaggtgagagccgccctgaaactccaaagcaaaaaaatgaagggcgacctgaaacaccaaaacacaggcatgacaataggagggattctggaaagccatctacagagaaaaaacctgaagtgtctaaacataaacaagatactaaatctgactcacctcggttaaaatcagaacgagctgaagccttaaagcagagacctgatgggcgatctgtttctgagtcactaagacgtgaccatgataataaacaaaaatcagatgacaggggtgaatcagagcgacatcgaggggatcagtctagggttcgaagaccagaaacattgagatcctctagtagaaatgaacatggcattaaatctgatagttcaaaaactgataaactagaacgaaaacacaggcatgaatcaggggactcaagggaaagaccatcttctggggaacaaaaatcaagacctgacagtcctcgtgttaaacaaggagattctaataaatcaagatctgataaacttggttttaaatcaccaactagtaaagatgacaaaaggacagagggtaacaagagtaaagtagacactaataaagcacaccctgacaataaggcagaatttccaagttatttgttggggggcaggtctggtgcgttgaaaaattttgtcattccgaaaatcaagagggataaagatggcaatgttactcaggagacaaagaaaatggaaatgaaaggagagccgaaagacaaagtagaaaaaataggattagttgaagatctaaataaaggagctaagcctgtagttgtgctacaaaaactgtctttggatgatgttcagaaacttattaaagatagagaggacaaatcaagaagttcccttaaacctatcaagaataaaccatcaaagtcaaataaaggtagtatagatcaatcagtgttaaaagaattaccccctgaactcctggcagaaattgagtccaccatgccactttgtgaacgtgtgaaaatgaacaaacgcaagcgtagcacagttaatgaaaagccaaaatatgctgaaatcagttcagatgaagataatgatagtgatgaagcttttgaatcctctaggaaacgacataaaaaagatgatgataaagcttgggaatatgaagagcgtgacagaagaagctctggggatcataggagaagtggccactctcatgaaggaagaaggagttcaggtggtggtcgttatcgaaaccgaagtccgtcagattctgacatggaagattattctcctcctcccagccttagtgaggttgctaggaaaatgaagaaaaaagaaaaacagaagaaaaggaaagcatatgaaccaaaactaacacctgaagaaatgatggactcttcaacttttaagagattcacagcctcaatagagaatattttggataatttggaagatatggattttactgcgtttggtgatgatgatgaaattcctcaggaactgctcttaggaaaacatcagcttaatgaacttggcagtgaatctgctaaaataaaagcaatgggtataatggataagctttcaactgacaaaactgtgaaagtcttaaatatcttggagaagaatattcaggatgggtcaaagctttccactttgttaaatcataataacgatactgaagaagaagaaaggttatggagagaccttattatggagagagttacaaaatcagcggatgcttgtcttacaactatcaacattatgacatcccctaacatgccaaaagctgtgtacattgaggatgtaattgaaagagttatacagtacactaaatttcatttgcagaatacactttatcctcagtatgatcctgtttacagattagatcctcatggaggaggcttattaagttcaaaagcaaaacgggctaaatgttctacccataagcagagagtaatagtaatgctttataacaaagtttgtgacattgttagcagcttatcagaattgctagagatacaacttcttacagacacaacaattcttcaggtttcatctatgggaataacaccattttttgtggaaaatgtcagtgaactacagttgtgtgccattaagttagtcactgcagtattctcaagatatgaaaaacataggcagttaattttggaagaaatttttacttcacttgcaagattaccaaccagcaagaggagtttaaggaacttcaggttaaacagtagtgatatggatggagaacctatgtatattcagatggttacagcactggttttacaacttattcagtgtgtggtacacttaccatcatcagagaaggactctaatgcagaagaagattcaaataaaaaaattgaccaggatgttgtcattactaactcttatgaaacagctatgcgaacagcccaaaacttcctctccatcttccttaaaaaatgtggtagtaagcaaggtgaagaagattacagaccactgtttgaaaattttgttcaagaccttctttcaacagtcaataagcctgaatggccagctgctgaactactccttagtttgttagggagactgttggttcatcagttcagtaacaagtcaacagagatggctttaagagtggcatctcttgattaccttggaactgttgctgcacggctaagaaaagatgctgttacaagcaaaatggatcaaggatctatagaacgcattttaaaacaggtttcaggaggggaagatgaaatccaacaattacaaaaagcattgcttgattacttggatgaaaacactgagactgatccttcactagtgttttctcgtaaattctatatagcccagtggtttcgagacacaactctggaaacagaaaaagcaatgaaatcacaaaaagatgaagaatcatctgaaggaacacatcatgcaaaggaaattgagacaactggccaaattatgcatcgagctgaaaaccgaaaaaagtttcttagaagcattatcaaaaccacaccttctcagtttagcacattaaagatgaactctgatactgtggactatgatgatgcttgcttgattgttcgatacttggcctccatgaggccgtttgcccagagctttgatatttatttgacacagatcctacgagttcttggtgaaaatgcaattgctgttcgaacaaaagccatgaagtgtttgtctgaggttgttgctgtagaccccagtattctagcaaggcttgatatgcaacgaggtgttcatggacgattgatggataattcgactagtgtccgagaagcagcagtagaattactaggtcgatttgtcctttgtcgacctcagcttgctgaacagtattatgatatgctgattgaaagaatattggatactggtatcagtgtcaggaaaagagtaataaagattctcagagacatttgtattgaacaaccaacatttccaaaaatcacagaaatgtgtgtaaaaatgattcgcagagtcaatgatgaagagggcattaagaaattagtaaatgaaacattccagaaactctggtttactccaactccacacaatgacaaagaagcaatgacaaggaaaattttaaacattaccgatgtggttgcagcatgcagagatactggatatgactggtttgagcaactgcttcaaaacttgttgaagtccgaagaggattcctcatataaacctgtgaagaaagcttgtactcaacttgttgataacctagttgagcacattcttaaatatgaggaatctctagctgactctgacaataaaggtgtgaattctggaagattggtagcttgcataaccactttgttcttattcagcaaaataagaccccagctcatggttaaacatgcaatgactatgcaaccataccttaccactaaatgtagtacgcaaaatgatttcatggttatctgcaatgttgcaaaaatcctagagctagttgtaccactgatggagcatccaagtgaaacttttcttgccactattgaggaagatctaatgaagctcatcatcaaatatggcatgactgtagtgcaacattgtgtgagctgtcttggagctgttgtaaataaagtgacacaaaattttaaatttgtgtgggcttgtttcaatagatactatggtgccatttcaaaattaaaaagtcaacaccaagaggacccaaataacacttcacttctaacaaacaaaccagcacttcttagatcccttttcaccgttggagcactatgtcggcattttgattttgatctggaagattttaaaggcaacagcaaggttaacataaaagataaagtacttgaactattgatgtattttacaaaacactcagatgaagaagtacaaacaaaagctatcattggtctaggatttgcctttattcagcatccaagtctaatgttcgagcaagaagtgaagaatctatataataatattttatctgataagaactcctcagtcaatttaaaaatacaagtgttaaaaaacctccagacctacctacaagaagaagatacacgtatgcagcaggcagatagagactggaagaaagttgcaaaacaggaagacttaaaagaaatgggtgatgtttcctcagggatgagtagttccatcatgcagctttatctcaaacaggtgcttgaggcattttttcacacccagtcaagtgtacgccactttgccctaaatgtcattgcattgactctaaatcaaggtcttattcatccagttcagtgtgtgccatatttaattgctatgggcacagacccagaacctgctatgcggaacaaggctgatcagcaacttgtggaaatagacaaaaaatatgctggattcattcatatgaaagcagtggctggtatgaagatgtcttaccaggtacaacaggcaatcaacacatgcctaaaagatcctgtaaggggtttcagacaagacgagtcctctagcgctttgtgttcacacctttactccatgatccgtggaaaccgccaacacagacgagcctttcttatttctttactcaacctctttgatgacacagcaaaaacagacgtgactatgctcttgtatatagcagacaatctagcctgttttccataccagacacaggaagagccgttgtttataatgcatcatatagacattacactctcagtttctggtagtaacctactgcagtcattcaaggagtctatggtaaaggacaaaaggaaagagagaaaatcatcacctagtaaggaaaatgagtcaagcgacagtgaagaagaagtttccaggcctcggaagtcacggaaacgtgtagattcagattcagattcagattcagaagacgatataaattcagtgatgaaatgtttgccagaaaattcagctcctttaatcgaatttgcaaatgtgtcccagggtattttattacttctcatgttaaaacaacatttgaagaatctttgtggattttctgatagtaaaattcagaagtactctccatctgaatctgcaaaagtatatgataaagcgataaaccgaaaaacaggagttcattttcatccaaaacaaacactggacttcctgcggagtgacatggctaattccaaaatcacagaagaggtgaaaaggagtatagtaaaacagtatctagatttcaaacttctcatggaacatctggaccctgatgaagaagaagaagaaggggaggtttcagctagcacaaatgctcggaacaaagcaattacctcactgcttggaggaggcagccctaaaaataatacagcagcagagacagaagatgatgaaagtgatggggaggatagaggaggaggcacttcaggggtgaggcggaggaggagtcaacgtatttcgcagcgtattacgtaaaatgatttttatgtgcttatatatgtcagtctattaaatgtacaccaagtaatgtaatacttaaaagagaaaacattttgtagatagagattctctacttacccgtttatacatccttttgtagaaagtttaacataaaagacaataaaaaaacagaaatgagatttatccagcataaagggttaatttttctttgaattgtattaatgtgtgttatttttattgttgctaagttttatgtagctatatggttcatatgtatatataattttatatatcaataagagtaaagacacgggtacaaattaagagttatatggttttacaagtatatgttaaccccttggcgctggcggtcacggtgcgtctcattgccggcaatggaagtgtgccgggaaatcccaactcccggcgtcaagggattaaaagcaataaaaacaataatttcactaaaattcttttgtgtaacacttggtcttttttcccccctcccaatgttttagtcattgagaaggtcaaaacgaaattcagactctacggagttggcagcacagatgaatgaaagtgttgacgtcatggatgtcatcgctatttgctgtccaaagtacaaagatcgaccacaaattgcaagagtagtgcagaaaaccagcagtggcttcagtgttcagtggatggcaggctcctacagtggctcctggactgaggctaagcgccgtgatggccgcaaactggtgccttgggtagacactattaaagagtcagacattatttacaaaaaaattgctctaacgagtgctaataagctgactaataaagttgttcagactttacgatccctgtatgccgccaaggatgggacttccagctaatgaatttgtacatgcagccaaatttacaggaatttttttaaaaggcagaaaaacttgaaataccaacattctggcaaaaaaaaatcagttttatgaagagtaagtggaacctgggatgcaggaacaaaagaaggaaatgttgggcaaacatttttgtgggagctcccttcgctgttgtgcagcagaaacagattctcagttcatttttactcccactgtattatagtttaacaaaaattgtttatatcttggaaaaaaaactttctgtttaaaaaaaataaacaagtgaatgttgga

SEQ ID NO: 455135 - DNA, 8968 bp, Homo sapiens
cagcatcggtatcaagtcccattgttgcaggtggtttgagaaacatacatgataataaagtttctggtccgttgtctggcaattcagctaatcatcatgctgataatcctagacatggttcaagtgaggactacctacacatggtgcacaggctaagtagtgacgatggagattcttcaacaatgaggaatgctgcatcttttcccttgagatctccacagccagtatgctcccctgctggaagtgaaggaactcctaaaggctcaagaccacctttaatcctacaatctcagtctctaccttgttcatcacctcgagatgttccaccagatatcttgctagattctccagaaagaaaacaaaagaagcagaagaaaatgaaattaggcaaggatgaaaaagagcagagtgagaaagcggcaatgtatgatataattagttctccatccaaggactctactaaacttacattaagactttctcgtgtaaggtcttcagacatggaccagcaagaggatatgatttctggtgtggaaaatagcaatgtttcagaaaatgatattccttttaatgtgcagtacccaggacagacttcaaaaacacccattactccacaagatataaaccgcccactaaatgctgctcaatgtttgtcgcagcaagaacaaacagcattccttccagcaaatcaagtgcctgttttacaacagaacacttcagttgctgcaaaacaaccccagacttctgtggtacagaatcaacaacagatatcacaacagggacctatatatgatgaagtggaattggatgcattggctgaaattgagcgaatagagagagaatcagctattgaaagggagcgcttctcaaaagaagttcaagataaagataagcctttgaaaaaaagaaaacaagattcttacccacaggaggctgggggtgctacaggaggtaatagaccagcttctcaggagacgggttctacgggaaatgggtcaaggccagcattaatggttagcattgatcttcatcaggcaggaagagtggactctcaggcttctataactcaggattcagactccataaaaaagcctgaagaaatcaaacaatgtaatgatgcacctgtttctgttcttcaggaagatattgttggaagtcttaaatctacaccagaaaaccatcctgagacacctaaaaaaaagtctgatcctgagctttcaaagagtgaaatgaaacaaagtgaaagtagattagcagaatctaaaccaaatgaaaaccgattggtggagacaaaatcaagtgaaaataagttagaaactaaagttgagacccaaacagaagaacttaaacagaatgagagcagaacaactgaatgcaaacaaaacgagagcaccatagttgagcctaaacaaaatgaaaatagactgtctgacacaaaaccaaatgacaacaaacaaaataatggcagatcagaaacaacaaaatcaaggcctgaaaccccaaagcaaaagggtgaaagccggcctgagactccaaaacaaaagagtgatgggcatcctgaaaccccaaaacagaagggtgatggaaggcctgaaactccaaagcaaaaaggtgagagccgccctgaaactccaaagcaaaaaaatgaagggcgacctgaaacaccaaaacacaggcatgacaataggagggattctggaaagccatctacagagaaaaaacctgaagtgtctaaacataaacaagatactaaatctgactcacctcggttaaaatcagaacgagctgaagccttaaagcagagacctgatgggcgatctgtttctgagtcactaagacgtgaccatgataataaacaaaaatcagatgacaggggtgaatcagagcgacatcgaggggatcagtctagggttcgaagaccagaaacattgagatcctctagtagaaatgaacatggcattaaatctgatagttcaaaaactgataaactagaacgaaaacacaggcatgaatcaggggactcaagggaaagaccatcttctggggaacaaaaatcaagacctgacagtcctcgtgttaaacaaggagattctaataaatcaagatctgataaacttggttttaaatcaccaactagtaaagatgacaaaaggacagagggtaacaagagtaaagtagacactaataaagcacaccctgacaataaggcagaatttccaagttatttgttggggggcaggtctggtgcgttgaaaaattttgtcattccgaaaatcaagagggataaagatggcaatgttactcaggagacaaagaaaatggaaatgaaaggagagccgaaagacaaagtagaaaaaataggattagttgaagatctaaataaaggagctaagcctgtagttgtgctacaaaaactgtctttggatgatgttcagaaacttattaaagatagagaggacaaatcaagaagttcccttaaacctatcaagaataaaccatcaaagtcaaataaaggtagtatagatcaatcagtgttaaaagaattaccccctgaactcctggcagaaattgagtccaccatgccactttgtgaacgtgtgaaaatgaacaaacgcaagcgtagcacagttaatgaaaagccaaaatatgctgaaatcagttcagatgaagataatgatagtgatgaagcttttgaatcctctaggaaacgacataaaaaagatgatgataaagcttgggaatatgaagagcgtgacagaagaagctctggggatcataggagaagtggccactctcatgaaggaagaaggagttcaggtggtggtcgttatcgaaaccgaagtccgtcagattctgacatggaagattattctcctcctcccagccttagtgaggttgctaggaaaatgaagaaaaaagaaaaacagaagaaaaggaaagcatatgaaccaaaactaacacctgaagaaatgatggactcttcaacttttaagagattcacagcctcaatagagaatattttggataatttggaagatatggattttactgcgtttggtgatgatgatgaaattcctcaggaactgctcttaggaaaacatcagcttaatgaacttggcagtgaatctgctaaaataaaagcaatgggtataatggataagctttcaactgacaaaactgtgaaagtcttaaatatcttggagaagaatattcaggatgggtcaaagctttccactttgttaaatcataataacgatactgaagaagaagaaaggttatggagagaccttattatggagagagttacaaaatcagcggatgcttgtcttacaactatcaacattatgacatcccctaacatgccaaaagctgtgtacattgaggatgtaattgaaagagttatacagtacactaaatttcatttgcagaatacactttatcctcagtatgatcctgtttacagattagatcctcatggaggaggcttattaagttcaaaagcaaaacgggctaaatgttctacccataagcagagagtaatagtaatgctttataacaaagtttgtgacattgttagcagcttatcagaattgctagagatacaacttcttacagacacaacaattcttcaggtttcatctatgggaataacaccattttttgtggaaaatgtcagtgaactacagttgtgtgccattaagttagtcactgcagtattctcaagatatgaaaaacataggcagttaattttggaagaaatttttacttcacttgcaagattaccaaccagcaagaggagtttaaggaacttcaggttaaacagtagtgatatggatggagaacctatgtatattcagatggttacagcactggttttacaacttattcagtgtgtggtacacttaccatcatcagagaaggactctaatgcagaagaagattcaaataaaaaaattgaccaggatgttgtcattactaactcttatgaaacagctatgcgaacagcccaaaacttcctctccatcttccttaaaaaatgtggtagtaagcaaggtgaagaagattacagaccactgtttgaaaattttgttcaagaccttctttcaacagtcaataagcctgaatggccagctgctgaactactccttagtttgttagggagactgttggttcatcagttcagtaacaagtcaacagagatggctttaagagtggcatctcttgattaccttggaactgttgctgcacggctaagaaaagatgctgttacaagcaaaatggatcaaggatctatagaacgcattttaaaacaggtttcaggaggggaagatgaaatccaacaattacaaaaagcattgcttgattacttggatgaaaacactgagactgatccttcactagtgttttctcgtaaattctatatagcccagtggtttcgagacacaactctggaaacagaaaaagcaatgaaatcacaaaaagatgaagaatcatctgaaggaacacatcatgcaaaggaaattgagacaactggccaaattatgcatcgagctgaaaaccgaaaaaagtttcttagaagcattatcaaaaccacaccttctcagtttagcacattaaagatgaactctgatactgtggactatgatgatgcttgcttgattgttcgatacttggcctccatgaggccgtttgcccagagctttgatatttatttgacacagatcctacgagttcttggtgaaaatgcaattgctgttcgaacaaaagccatgaagtgtttgtctgaggttgttgctgtagaccccagtattctagcaaggcttgatatgcaacgaggtgttcatggacgattgatggataattcgactagtgtccgagaagcagcagtagaattactaggtcgatttgtcctttgtcgacctcagcttgctgaacagtattatgatatgctgattgaaagaatattggatactggtatcagtgtcaggaaaagagtaataaagattctcagagacatttgtattgaacaaccaacatttccaaaaatcacagaaatgtgtgtaaaaatgattcgcagagtcaatgatgaagagggcattaagaaattagtaaatgaaacattccagaaactctggtttactccaactccacacaatgacaaagaagcaatgacaaggaaaattttaaacattaccgatgtggttgcagcatgcagagatactggatatgactggtttgagcaactgcttcaaaacttgttgaagtccgaagaggattcctcatataaacctgtgaagaaagcttgtactcaacttgttgataacctagttgagcacattcttaaatatgaggaatctctagctgactctgacaataaaggtgtgaattctggaagattggtagcttgcataaccactttgttcttattcagcaaaataagaccccagctcatggttaaacatgcaatgactatgcaaccataccttaccactaaatgtagtacgcaaaatgatttcatggttatctgcaatgttgcaaaaatcctagagctagttgtaccactgatggagcatccaagtgaaacttttcttgccactattgaggaagatctaatgaagctcatcatcaaatatggcatgactgtagtgcaacattgtgtgagctgtcttggagctgttgtaaataaagtgacacaaaattttaaatttgtgtgggcttgtttcaatagatactatggtgccatttcaaaattaaaaagtcaacaccaagaggacccaaataacacttcacttctaacaaacaaaccagcacttcttagatcccttttcaccgttggagcactatgtcggcattttgattttgatctggaagattttaaaggcaacagcaaggttaacataaaagataaagtacttgaactattgatgtattttacaaaacactcagatgaagaagtacaaacaaaagctatcattggtctaggatttgcctttattcagcatccaagtctaatgttcgagcaagaagtgaagaatctatataataatattttatctgataagaactcctcagtcaatttaaaaatacaagtgttaaaaaacctccagacctacctacaagaagaagatacacgtatgcagcaggcagatagagactggaagaaagttgcaaaacaggaagacttaaaagaaatgggtgatgtttcctcagggatgagtagttccatcatgcagctttatctcaaacaggtgcttgaggcattttttcacacccagtcaagtgtacgccactttgccctaaatgtcattgcattgactctaaatcaaggtcttattcatccagttcagtgtgtgccatatttaattgctatgggcacagacccagaacctgctatgcggaacaaggctgatcagcaacttgtggaaatagacaaaaaatatgctggattcattcatatgaaagcagtggctggtatgaagatgtcttaccaggtacaacaggcaatcaacacatgcctaaaagatcctgtaaggggtttcagacaagacgagtcctctagcgctttgtgttcacacctttactccatgatccgtggaaaccgccaacacagacgagcctttcttatttctttactcaacctctttgatgacacagcaaaaacagacgtgactatgctcttgtatatagcagacaatctagcctgttttccataccagacacaggaagagccgttgtttataatgcatcatatagacattacactctcagtttctggtagtaacctactgcagtcattcaaggagtctatggtaaaggacaaaaggaaagagagaaaatcatcacctagtaaggaaaatgagtcaagcgacagtgaagaagaagtttccaggcctcggaagtcacggaaacgtgtagattcagattcagattcagattcagaagacgatataaattcagtgatgaaatgtttgccagaaaattcagctcctttaatcgaatttgcaaatgtgtcccagggtattttattacttctcatgttaaaacaacatttgaagaatctttgtggattttctgatagtaaaattcagaagtactctccatctgaatctgcaaaagtatatgataaagcgataaaccgaaaaacaggagttcattttcatccaaaacaaacactggacttcctgcggagtgacatggctaattccaaaatcacagaagaggtgaaaaggagtatagtaaaacagtatctagatttcaaacttctcatggaacatctggaccctgatgaagaagaagaagaaggggaggtttcagctagcacaaatgctcggaacaaagcaattacctcactgcttggaggaggcagccctaaaaataatacagcagcagagacagaagatgatgaaagtgatggggaggatagaggaggaggcacttcaggggtgaggcggaggaggagtcaacgtatttcgcagcgtattacgtaaaatgatttttatgtgcttatatatgtcagtctattaaatgtacaccaagtaatgtaatacttaaaagagaaaacattttgtagatagagattctctacttacccgtttatacatccttttgtagaaagtttaacataaaagacaataaaaaaacagaaatgagatttatccagcataaagggttaatttttctttgaattgtattaatgtgtgttatttttattgttgctaagttttatgtagctatatggttcatatgtatatataattttatatatcaataagagtaaagacacgggtacaaattaagagttatatggttttacaagtatatgttaaccccttggcgctggcggtcacggtgcgtctcattgccggcaatggaagtgtgccgggaaatcccaactcccggcgtcaagggattaaaagcaataaaaacaataatttcactaaaattcttttgtgtaacacttggtcttttttcccccctcccaatgttttagtcattgagaaggtcaaaacgaaattcagactctacggagttggcagcacagatgaatgaaagtgttgacgtcatggatgtcatcgctatttgctgtccaaagtacaaagatcgaccacaaattgcaagagtagtgcagaaaaccagcagtggcttcagtgttcagtggatggcaggctcctacagtggctcctggactgaggctaagcgccgtgatggccgcaaactggtgccttgggtagacactattaaagagtcagacattatttacaaaaaaattgctctaacgagtgctaataagctgactaataaagttgttcagactttacgatccctgtatgccgccaaggatgggacttccagctaatgaatttgtacatgcagccaaatttacaggaatttttttaaaaggcagaaaaacttgaaataccaacattctggcaaaaaaaaatcagttttatgaagagtaagtggaacctgggatgcaggaacaaaagaaggaaatgttgggcaaacatttttgtgggagctcccttcgctgttgtgcagcagaaacagattctcagttcatttttactcccactgtattatagtttaacaaaaattgtttatatcttggaaaaaaaactttctgtttaaaaaaaataaacaagtgaatgttggaaattagtctgttaatgttcttaataaagtgttcttggagtttaacctagcagcggatggctttctttagcttagcccagtttccagggaagcattgttttttccaggctgtaaaatggcagaatctcctggatatataatttattctgttgaaaaaaaaaaaagcatgcagtatctatgacctatctgcagaaggagtttttgtaaatgtagattttgatgtattaggtcaccctgaaaacaatacaagaaaagggatccccaggtaatctggtggagcgaatactgcaataaatttttttacttctctttgtta

SEQ ID NO: 455136 - DNA, 5182 bp, Homo sapiens
tacaaaatttataaactattatttgagaacattatacatagagatattttattttattttttaactggtgggatatgcaattgaaagaaatgggatactactaagctcttcagccaaatactgtaggttttcagtttgtattcaaaggaacagatttacaggtgtgtctcagtgttaaactatttcagtgacaattgtcttgtgtgtttcttggagaactaaggcaaaatttgaaaacagatgaagtcttctaccttcagcattttatcaatttgttttaaactttcctagttgacccatcatctgtttaactttgtcatgatgttgtccttgattaagtagttgataatagtattctatatttaatacagttgtgtttatcaaattatcttgacttcattaatataagtattggaacatagtaaaataataagttttctaacatttaggatattctatattttctggctttcttaaaatctgtttttatcacatggaagttgttttaaagtaaactttaatatttgtattcctgtaatgtgagcactctaactttattaacttggaaatcttgttgctaatttcatcaagctcaagtctgtctaatttctttccagttttctcgtaaattctatatagcccagtggtttcgagacacaactctggaaacagaaaaagcaatgaaatcacaaaaagatgaagaatcatctgaaggaacacatcatgcaaaggaaattgagacaactggccaaattatgcatcgagctgaaaaccgaaaaaagtttcttagaagcattatcaaaaccacaccttctcagtttagcacattaaagatgaactctgatactgtggactatgatgatgcttgcttgattgttcgatacttggcctccatgaggccgtttgcccagagctttgatatttatttgacacagatcctacgagttcttggtgaaaatgcaattgctgttcgaacaaaagccatgaagtgtttgtctgaggttgttgctgtagaccccagtattctagcaaggcttgatatgcaacgaggtgttcatggacgattgatggataattcgactagtgtccgagaagcagcagtagaattactaggtcgatttgtcctttgtcgacctcagcttgctgaacagtattatgatatgctgattgaaagaatattggatactggtatcagtgtcaggaaaagagtaataaagattctcagagacatttgtattgaacaaccaacatttccaaaaatcacagaaatgtgtgtaaaaatgattcgcagagtcaatgatgaagagggcattaagaaattagtaaatgaaacattccagaaactctggtttactccaactccacacaatgacaaagaagcaatgacaaggaaaattttaaacattaccgatgtggttgcagcatgcagagatactggatatgactggtttgagcaactgcttcaaaacttgttgaagtccgaagaggattcctcatataaacctgtgaagaaagcttgtactcaacttgttgataacctagttgagcacattcttaaatatgaggaatctctagctgactctgacaataaaggtgtgaattctggaagattggtagcttgcataaccactttgttcttattcagcaaaataagaccccagctcatggttaaacatgcaatgactatgcaaccataccttaccactaaatgtagtacgcaaaatgatttcatggttatctgcaatgttgcaaaaatcctagagctagttgtaccactgatggagcatccaagtgaaacttttcttgccactattgaggaagatctaatgaagctcatcatcaaatatggcatgactgtagtgcaacattgtgtgagctgtcttggagctgttgtaaataaagtgacacaaaattttaaatttgtgtgggcttgtttcaatagatactatggtgccatttcaaaattaaaaagtcaacaccaagaggacccaaataacacttcacttctaacaaacaaaccagcacttcttagatcccttttcaccgttggagcactatgtcggcattttgattttgatctggaagattttaaaggcaacagcaaggttaacataaaagataaagtacttgaactattgatgtattttacaaaacactcagatgaagaagtacaaacaaaagctatcattggtctaggatttgcctttattcagcatccaagtctaatgttcgagcaagaagtgaagaatctatataataatattttatctgataagaactcctcagtcaatttaaaaatacaagtgttaaaaaacctccagacctacctacaagaagaagatacacgtatgcagcaggcagatagagactggaagaaagttgcaaaacaggaagacttaaaagaaatgggtgatgtttcctcagggatgagtagttccatcatgcagctttatctcaaacaggtgcttgaggcattttttcacacccagtcaagtgtacgccactttgccctaaatgtcattgcattgactctaaatcaaggtcttattcatccagttcagtgtgtgccatatttaattgctatgggcacagacccagaacctgctatgcggaacaaggctgatcagcaacttgtggaaatagacaaaaaatatgctggattcattcatatgaaagcagtggctggtatgaagatgtcttaccaggtacaacaggcaatcaacacatgcctaaaagatcctgtaaggggtttcagacaagacgagtcctctagcgctttgtgttcacacctttactccatgatccgtggaaaccgccaacacagacgagcctttcttatttctttactcaacctctttgatgacacagcaaaaacagacgtgactatgctcttgtatatagcagacaatctagcctgttttccataccagacacaggaagagccgttgtttataatgcatcatatagacattacactctcagtttctggtagtaacctactgcagtcattcaaggagtctatggtaaaggacaaaaggaaagagagaaaatcatcacctagtaaggaaaatgagtcaagcgacagtgaagaagaagtttccaggcctcggaagtcacggaaacgtgtagattcagattcagattcagattcagaagacgatataaattcagtgatgaaatgtttgccagaaaattcagctcctttaatcgaatttgcaaatgtgtcccagggtattttattacttctcatgttaaaacaacatttgaagaatctttgtggattttctgatagtaaaattcagaagtactctccatctgaatctgcaaaagtatatgataaagcgataaaccgaaaaacaggagttcattttcatccaaaacaaacactggacttcctgcggagtgacatggctaattccaaaatcacagaagaggtgaaaaggagtatagtaaaacagtatctagatttcaaacttctcatggaacatctggaccctgatgaagaagaagaagaaggggaggtttcagctagcacaaatgctcggaacaaagcaattacctcactgcttggaggaggcagccctaaaaataatacagcagcagagacagaagatgatgaaagtgatggggaggatagaggaggaggcacttcaggggtgaggcggaggaggagtcaacgtatttcgcagcgtattacgtaaaatgatttttatgtgcttatatatgtcagtctattaaatgtacaccaagtaatgtaatacttaaaagagaaaacattttgtagatagagattctctacttacccgtttatacatccttttgtagaaagtttaacataaaagacaataaaaaaacagaaatgagatttatccagcataaagggttaatttttctttgaattgtattaatgtgtgttatttttattgttgctaagttttatgtagctatatggttcatatgtatatataattttatatatcaataagagtaaagacacgggtacaaattaagagttatatggttttacaagtatatgttaaccccttggcgctggcggtcacggtgcgtctcattgccggcaatggaagtgtgccgggaaatcccaactcccggcgtcaagggattaaaagcaataaaaacaataatttcactaaaattcttttgtgtaacacttggtcttttttcccccctcccaatgttttagtcattgagaaggtcaaaacgaaattcagactctacggagttggcagcacagatgaatgaaagtgttgacgtcatggatgtcatcgctatttgctgtccaaagtacaaagatcgaccacaaattgcaagagtagtgcagaaaaccagcagtggcttcagtgttcagtggatggcaggctcctacagtggctcctggactgaggctaagcgccgtgatggccgcaaactggtgccttgggtagacactattaaagagtcagacattatttacaaaaaaattgctctaacgagtgctaataagctgactaataaagttgttcagactttacgatccctgtatgccgccaaggatgggacttccagctaatgaatttgtacatgcagccaaatttacaggaatttttttaaaaggcagaaaaacttgaaataccaacattctggcaaaaaaaaatcagttttatgaagagtaagtggaacctgggatgcaggaacaaaagaaggaaatgttgggcaaacatttttgtgggagctcccttcgctgttgtgcagcagaaacagattctcagttcatttttactcccactgtattatagtttaacaaaaattgtttatatcttggaaaaaaaactttctgtttaaaaaaaataaacaagtgaatgttggaaattagtctgttaatgttcttaataaagtgttcttggagtttaacctagcagcggatggctttctttagcttagcccagtttccagggaagcattgttttttccaggctgtaaaatggcagaatctcctggatatataatttattctgttgaaaaaaaaaaaagcatgcagtatctatgacctatctgcagaaggagtttttgtaaatgtagattttgatgtattaggtcaccctgaaaacaatacaagaaaagggatccccaggtaatctggtggagcgaatactgcaataaatttttttacttctctttgtta

SEQ ID NO: 455137 - DNA, 8420 bp, Homo sapiens
cagcatcggtatcaagtcccattgttgcaggtggtttgagaaacatacatgataataaagtttctggtccgttgtctggcaattcagctaatcatcatgctgataatcctagacatggttcaagtgaggactacctacacatggtgcacaggctaagtagtgacgatggagattcttcaacaatgaggaatgctgcatcttttcccttgagatctccacagccagtatgctcccctgctggaagtgaaggaactcctaaaggctcaagaccacctttaatcctacaatctcagtctctaccttgttcatcacctcgagatgttccaccagatatcttgctagattctccagaaagaaaacaaaagaagcagaagaaaatgaaattaggcaaggatgaaaaagagcagagtgagaaagcggcaatgtatgatataattagttctccatccaaggactctactaaacttacattaagactttctcgtgtaaggtcttcagacatggaccagcaagaggatatgatttctggtgtggaaaatagcaatgtttcagaaaatgatattccttttaatgtgcagtacccaggacagacttcaaaaacacccattactccacaagatataaaccgcccactaaatgctgctcaatgtttgtcgcagcaagaacaaacagcattccttccagcaaatcaagtgcctgttttacaacagaacacttcagttgctgcaaaacaaccccagacttctgtggtacagaatcaacaacagatatcacaacagggacctatatatgatgaagtggaattggatgcattggctgaaattgagcgaatagagagagaatcagctattgaaagggagcgcttctcaaaagaagttcaagataaagataagcctttgaaaaaaagaaaacaagattcttacccacaggaggctgggggtgctacaggaggtaatagaccagcttctcaggagacgggttctacgggaaatgggtcaaggccagcattaatggttagcattgatcttcatcaggcaggaagagtggactctcaggcttctataactcaggattcagactccataaaaaagcctgaagaaatcaaacaatgtaatgatgcacctgtttctgttcttcaggaagatattgttggaagtcttaaatctacaccagaaaaccatcctgagacacctaaaaaaaagtctgatcctgagctttcaaagagtgaaatgaaacaaagtgaaagtagattagcagaatctaaaccaaatgaaaaccgattggtggagacaaaatcaagtgaaaataagttagaaactaaagttgagacccaaacagaagaacttaaacagaatgagagcagaacaactgaatgcaaacaaaacgagagcaccatagttgagcctaaacaaaatgaaaatagactgtctgacacaaaaccaaatgacaacaaacaaaataatggcagatcagaaacaacaaaatcaaggcctgaaaccccaaagcaaaagggtgaaagccggcctgagactccaaaacaaaagagtgatgggcatcctgaaaccccaaaacagaagggtgatggaaggcctgaaactccaaagcaaaaaggtgagagccgccctgaaactccaaagcaaaaaaatgaagggcgacctgaaacaccaaaacacaggcatgacaataggagggattctggaaagccatctacagagaaaaaacctgaagtgtctaaacataaacaagatactaaatctgactcacctcggttaaaatcagaacgagctgaagccttaaagcagagacctgatgggcgatctgtttctgagtcactaagacgtgaccatgataataaacaaaaatcagatgacaggggtgaatcagagcgacatcgaggggatcagtctagggttcgaagaccagaaacattgagatcctctagtagaaatgaacatggcattaaatctgatagttcaaaaactgataaactagaacgaaaacacaggcatgaatcaggggactcaagggaaagaccatcttctggggaacaaaaatcaagacctgacagtcctcgtgttaaacaaggagattctaataaatcaagatctgataaacttggttttaaatcaccaactagtaaagatgacaaaaggacagagggtaacaagagtaaagtagacactaataaagcacaccctgacaataaggcagaatttccaagttatttgttggggggcaggtctggtgcgttgaaaaattttgtcattccgaaaatcaagagggataaagatggcaatgttactcaggagacaaagaaaatggaaatgaaaggagagccgaaagacaaagtagaaaaaataggattagttgaagatctaaataaaggagctaagcctgtagttgtgctacaaaaactgtctttggatgatgttcagaaacttattaaagatagagaggacaaatcaagaagttcccttaaacctatcaagaataaaccatcaaagtcaaataaaggtagtatagatcaatcagtgttaaaagaattaccccctgaactcctggcagaaattgagtccaccatgccactttgtgaacgtgtgaaaatgaacaaacgcaagcgtagcacagttaatgaaaagccaaaatatgctgaaatcagttcagatgaagataatgatagtgatgaagcttttgaatcctctaggaaacgacataaaaaagatgatgataaagcttgggaatatgaagagcgtgacagaagaagctctggggatcataggagaagtggccactctcatgaaggaagaaggagttcaggtggtggtcgttatcgaaaccgaagtccgtcagattctgacatggaagattattctcctcctcccagccttagtgaggttgctaggaaaatgaagaaaaaagaaaaacagaagaaaaggaaagcatatgaaccaaaactaacacctgaagaaatgatggactcttcaacttttaagagattcacagcctcaatagagaatattttggataatttggaagatatggattttactgcgtttggtgatgatgatgaaattcctcaggaactgctcttaggaaaacatcagcttaatgaacttggcagtgaatctgctaaaataaaagcaatgggtataatggataagctttcaactgacaaaactgtgaaagtcttaaatatcttggagaagaatattcaggatgggtcaaagctttccactttgttaaatcataataacgatactgaagaagaagaaaggttatggagagaccttattatggagagagttacaaaatcagcggatgcttgtcttacaactatcaacattatgacatcccctaacatgccaaaagctgtgtacattgaggatgtaattgaaagagttatacagtacactaaatttcatttgcagaatacactttatcctcagtatgatcctgtttacagattagatcctcatggaggaggcttattaagttcaaaagcaaaacgggctaaatgttctacccataagcagagagtaatagtaatgctttataacaaagtttgtgacattgttagcagcttatcagaattgctagagatacaacttcttacagacacaacaattcttcaggtttcatctatgggaataacaccattttttgtggaaaatgtcagtgaactacagttgtgtgccattaagttagtcactgcagtattctcaagatatgaaaaacataggcagttaattttggaagaaatttttacttcacttgcaagattaccaaccagcaagaggagtttaaggaacttcaggttaaacagtagtgatatggatggagaacctatgtatattcagatggttacagcactggttttacaacttattcagtgtgtggtacacttaccatcatcagagaaggactctaatgcagaagaagattcaaataaaaaaattgaccaggatgttgtcattactaactcttatgaaacagctatgcgaacagcccaaaacttcctctccatcttccttaaaaaatgtggtagtaagcaaggtgaagaagattacagaccactgtttgaaaattttgttcaagaccttctttcaacagtcaataagcctgaatggccagctgctgaactactccttagtttgttagggagactgttggttcatcagttcagtaacaagtcaacagagatggctttaagagtggcatctcttgattaccttggaactgttgctgcacggctaagaaaagatgctgttacaagcaaaatggatcaaggatctatagaacgcattttaaaacaggtttcaggaggggaagatgaaatccaacaattacaaaaagcattgcttgattacttggatgaaaacactgagactgatccttcactagtgttttctcgtaaattctatatagcccagtggtttcgagacacaactctggaaacagaaaaagcaatgaaatcacaaaaagatgaagaatcatctgaaggaacacatcatgcaaaggaaattgagacaactggccaaattatgcatcgagctgaaaaccgaaaaaagtttcttagaagcattatcaaaaccacaccttctcagtttagcacattaaagatgaactctgatactgtggactatgatgatgcttgcttgattgttcgatacttggcctccatgaggccgtttgcccagagctttgatatttatttgacacagatcctacgagttcttggtgaaaatgcaattgctgttcgaacaaaagccatgaagtgtttgtctgaggttgttgctgtagaccccagtattctagcaaggcttgatatgcaacgaggtgttcatggacgattgatggataattcgactagtgtccgagaagcagcagtagaattactaggtcgatttgtcctttgtcgacctcagcttgctgaacagtattatgatatgctgattgaaagaatattggatactggtatcagtgtcaggaaaagagtaataaagattctcagagacatttgtattgaacaaccaacatttccaaaaatcacagaaatgtgtgtaaaaatgattcgcagagtcaatgatgaagagggcattaagaaattagtaaatgaaacattccagaaactctggtttactccaactccacacaatgacaaagaagcaatgacaaggaaaattttaaacattaccgatgtggttgcagcatgcagagatactggatatgactggtttgagcaactgcttcaaaacttgttgaagtccgaagaggattcctcatataaacctgtgaagaaagcttgtactcaacttgttgataacctagttgagcacattcttaaatatgaggaatctctagctgactctgacaataaaggtgtgaattctggaagattggtagcttgcataaccactttgttcttattcagcaaaataagaccccagctcatggttaaacatgcaatgactatgcaaccataccttaccactaaatgtagtacgcaaaatgatttcatggttatctgcaatgttgcaaaaatcctagagctagttgtaccactgatggagcatccaagtgaaacttttcttgccactattgaggaagatctaatgaagctcatcatcaaatatggcatgactgtagtgcaacattgtgtgagctgtcttggagctgttgtaaataaagtgacacaaaattttaaatttgtgtgggcttgtttcaatagatactatggtgccatttcaaaattaaaaagtcaacaccaagaggacccaaataacacttcacttctaacaaacaaaccagcacttcttagatcccttttcaccgttggagcactatgtcggcattttgattttgatctggaagattttaaaggcaacagcaaggttaacataaaagataaagtacttgaactattgatgtattttacaaaacactcagatgaagaagtacaaacaaaagctatcattggtctaggatttgcctttattcagcatccaagtctaatgttcgagcaagaagtgaagaatctatataataatattttatctgataagaactcctcagtcaatttaaaaatacaagtgttaaaaaacctccagacctacctacaagaagaagatacacgtatgcagcaggcagatagagactggaagaaagttgcaaaacaggaagacttaaaagaaatgggtgatgtttcctcagggatgagtagttccatcatgcagctttatctcaaacaggtgcttgaggcattttttcacacccagtcaagtgtacgccactttgccctaaatgtcattgcattgactctaaatcaaggtcttattcatccagttcagtgtgtgccatatttaattgctatgggcacagacccagaacctgctatgcggaacaaggctgatcagcaacttgtggaaatagacaaaaaatatgctggattcattcatatgaaagcagtggctggtatgaagatgtcttaccaggtacaacaggcaatcaacacatgcctaaaagatcctgtaaggggtttcagacaagacgagtcctctagcgctttgtgttcacacctttactccatgatccgtggaaaccgccaacacagacgagcctttcttatttctttactcaacctctttgatgacacagcaaaaacagacgtgactatgctcttgtatatagcagacaatctagcctgttttccataccagacacaggaagagccgttgtttataatgcatcatatagacattacactctcagtttctggtagtaacctactgcagtcattcaaggagtctatggtaaaggacaaaaggaaagagagaaaatcatcacctagtaaggaaaatgagtcaagcgacagtgaagaagaagtttccaggcctcggaagtcacggaaacgtgtagattcagattcagattcagattcagaagacgatataaattcagtgatgaaatgtttgccagaaaattcagctcctttaatcgaatttgcaaatgtgtcccagggtattttattacttctcatgttaaaacaacatttgaagaatctttgtggattttctgatagtaaaattcagaagtactctccatctgaatctgcaaaagtatatgataaagcgataaaccgaaaaacaggagttcattttcatccaaaacaaacactggacttcctgcggagtgacatggctaattccaaaatcacagaagaggtgaaaaggagtatagtaaaacagtatctagatttcaaacttctcatggaacatctggaccctgatgaagaagaagaagaaggggaggtttcagctagcacaaatgctcggaacaaagcaattacctcactgcttggaggaggcagccctaaaaataatacagcagcagagacagaagatgatgaaagtgatggggaggatagaggaggaggcacttcagggtcattgagaaggtcaaaacgaaattcagactctacggagttggcagcacagatgaatgaaagtgttgacgtcatggatgtcatcgctatttgctgtccaaagtacaaagatcgaccacaaattgcaagagtagtgcagaaaaccagcagtggcttcagtgttcagtggatggcaggctcctacagtggctcctggactgaggctaagcgccgtgatggccgcaaactggtgccttgggtagacactattaaagagtcagacattatttacaaaaaaattgctctaacgagtgctaataagctgactaataaagttgttcagactttacgatccctgtatgccgccaaggatgggacttccagctaatgaatttgtacatgcagccaaatttacaggaatttttttaaaaggcagaaaaacttgaaataccaacattctggcaaaaaaaaatcagttttatgaagagtaagtggaacctgggatgcaggaacaaaagaaggaaatgttgggcaaacatttttgtgggagctcccttcgctgttgtgcagcagaaacagattctcagttcatttttactcccactgtattatagtttaacaaaaattgtttatatcttggaaaaaaaactttctgtttaaaaaaaataaacaagtgaatgttggaaattagtctgttaatgttcttaataaagtgttcttggagtttaacctagcagcggatggctttctttagcttagcccagtttccagggaagcattgttttttccaggctgtaaaatggcagaatctcctggatatataatttattctgttgaaaaaaaaaaaagcatgcagtatctatgacctatctgcagaaggagtttttgtaaatgtagattttgatgtattaggtcaccctgaaaacaatacaagaaaagggatccccaggtaatctggtggagcgaatactgcaataaatttttttacttctctttgtta

SEQ ID NO: 455138 - DNA, 8793 bp, Homo sapiens
cagcatcggtatcaagtcccattgttgcaggtggtttgagaaacatacatgataataaagtttctggtccgttgtctggcaattcagctaatcatcatgctgataatcctagacatggttcaagtgaggactacctacacatggtgcacaggctaagtagtgacgatggagattcttcaacaatgaggaatgctgcatcttttcccttgagatctccacagccagtatgctcccctgctggaagtgaaggaactcctaaaggctcaagaccacctttaatcctacaatctcagtctctaccttgttcatcacctcgagatgttccaccagatatcttgctagattctccagaaagaaaacaaaagaagcagaagaaaatgaaattaggcaaggatgaaaaagagcagagtgagaaagcggcaatgtatgatataattagttctccatccaaggactctactaaacttacattaagactttctcgtgtaaggtcttcagacatggaccagcaagaggatatgatttctggtgtggaaaatagcaatgtttcagaaaatgatattccttttaatgtgcagtacccaggacagacttcaaaaacacccattactccacaagatataaaccgcccactaaatgctgctcaatgtttgtcgcagcaagaacaaacagcattccttccagcaaatcaagtgcctgttttacaacagaacacttcagttgctgcaaaacaaccccagacttctgtggtacagaatcaacaacagatatcacaacagggacctatatatgatgaagtggaattggatgcattggctgaaattgagcgaatagagagagaatcagctattgaaagggagcgcttctcaaaagaagttcaagataaagataagcctttgaaaaaaagaaaacaagattcttacccacaggaggctgggggtgctacaggaggtaatagaccagcttctcaggagacgggttctacgggaaatgggtcaaggccagcattaatggttagcattgatcttcatcaggcaggaagagtggactctcaggcttctataactcaggattcagactccataaaaaagcctgaagaaatcaaacaatgtaatgatgcacctgtttctgttcttcaggaagatattgttggaagtcttaaatctacaccagaaaaccatcctgagacacctaaaaaaaagtctgatcctgagctttcaaagagtgaaatgaaacaaagtgaaagtagattagcagaatctaaaccaaatgaaaaccgattggtggagacaaaatcaagtgaaaataagttagaaactaaagttgagacccaaacagaagaacttaaacagaatgagagcagaacaactgaatgcaaacaaaacgagagcaccatagttgagcctaaacaaaatgaaaatagactgtctgacacaaaaccaaatgacaacaaacaaaataatggcagatcagaaacaacaaaatcaaggcctgaaaccccaaagcaaaagggtgaaagccggcctgagactccaaaacaaaagagtgatgggcatcctgaaaccccaaaacagaagggtgatggaaggcctgaaactccaaagcaaaaaggtgagagccgccctgaaactccaaagcaaaaaaatgaagggcgacctgaaacaccaaaacacaggcatgacaataggagggattctggaaagccatctacagagaaaaaacctgaagtgtctaaacataaacaagatactaaatctgactcacctcggttaaaatcagaacgagctgaagccttaaagcagagacctgatgggcgatctgtttctgagtcactaagacgtgaccatgataataaacaaaaatcagatgacaggggtgaatcagagcgacatcgaggggatcagtctagggttcgaagaccagaaacattgagatcctctagtagaaatgaacatggcattaaatctgatagttcaaaaactgataaactagaacgaaaacacaggcatgaatcaggggactcaagggaaagaccatcttctggggaacaaaaatcaagacctgacagtcctcgtgttaaacaaggagattctaataaatcaagatctgataaacttggttttaaatcaccaactagtaaagatgacaaaaggacagagggtaacaagagtaaagtagacactaataaagcacaccctgacaataaggcagaatttccaagttatttgttggggggcaggtctggtgcgttgaaaaattttgtcattccgaaaatcaagagggataaagatggcaatgttactcaggagacaaagaaaatggaaatgaaaggagagccgaaagacaaagtagaaaaaataggattagttgaagatctaaataaaggagctaagcctgtagttgtgctacaaaaactgtctttggatgatgttcagaaacttattaaagatagagaggacaaatcaagaagttcccttaaacctatcaagaataaaccatcaaagtcaaataaaggtagtatagatcaatcagtgttaaaagaattaccccctgaactcctggcagaaattgagtccaccatgccactttgtgaacgtgtgaaaatgaacaaacgcaagcgtagcacagttaatgaaaagccaaaatatgctgaaatcagttcagatgaagataatgatagtgatgaagcttttgaatcctctaggaaacgacataaaaaagatgatgataaagcttgggaatatgaagagcgtgacagaagaagctctggggatcataggagaagtggccactctcatgaaggaagaaggagttcaggtggtggtcgttatcgaaaccgaagtccgtcagattctgacatggaagattattctcctcctcccagccttagtgaggttgctaggaaaatgaagaaaaaagaaaaacagaagaaaaggaaagcatatgaaccaaaactaacacctgaagaaatgatggactcttcaacttttaagagattcacagcctcaatagagaatattttggataatttggaagatatggattttactgcgtttggtgatgatgatgaaattcctcaggaactgctcttaggaaaacatcagcttaatgaacttggcagtgaatctgctaaaataaaagcaatgggtataatggataagctttcaactgacaaaactgtgaaagtcttaaatatcttggagaagaatattcaggatgggtcaaagctttccactttgttaaatcataataacgatactgaagaagaagaaaggttatggagagaccttattatggagagagttacaaaatcagcggatgcttgtcttacaactatcaacattatgacatcccctaacatgccaaaagctgtgtacattgaggatgtaattgaaagagttatacagtacactaaatttcatttgcagaatacactttatcctcagtatgatcctgtttacagattagatcctcatggaggaggcttattaagttcaaaagcaaaacgggctaaatgttctacccataagcagagagtaatagtaatgctttataacaaagtttgtgacattgttagcagcttatcagaattgctagagatacaacttcttacagacacaacaattcttcaggtttcatctatgggaataacaccattttttgtggaaaatgtcagtgaactacagttgtgtgccattaagttagtcactgcagtattctcaagatatgaaaaacataggcagttaattttggaagaaatttttacttcacttgcaagattaccaaccagcaagaggagtttaaggaacttcaggttaaacagtagtgatatggatggagaacctatgtatattcagatggttacagcactggttttacaacttattcagtgtgtggtacacttaccatcatcagagaaggactctaatgcagaagaagattcaaataaaaaaattgaccaggatgttgtcattactaactcttatgaaacagctatgcgaacagcccaaaacttcctctccatcttccttaaaaaatgtggtagtaagcaaggtgaagaagattacagaccactgtttgaaaattttgttcaagaccttctttcaacagtcaataagcctgaatggccagctgctgaactactccttagtttgttagggagactgttggttcatcagttcagtaacaagtcaacagagatggctttaagagtggcatctcttgattaccttggaactgttgctgcacggctaagaaaagatgctgttacaagcaaaatggatcaaggatctatagaacgcattttaaaacaggtttcaggaggggaagatgaaatccaacaattacaaaaagcattgcttgattacttggatgaaaacactgagactgatccttcactagtgttttctcgtaaattctatatagcccagtggtttcgagacacaactctggaaacagaaaaagcaatgaaatcacaaaaagatgaagaatcatctgaaggaacacatcatgcaaaggaaattgagacaactggccaaattatgcatcgagctgaaaaccgaaaaaagtttcttagaagcattatcaaaaccacaccttctcagtttagcacattaaagatgaactctgatactgtggactatgatgatgcttgcttgattgttcgatacttggcctccatgaggccgtttgcccagagctttgatatttatttgacacagatcctacgagttcttggtgaaaatgcaattgctgttcgaacaaaagccatgaagtgtttgtctgaggttgttgctgtagaccccagtattctagcaaggcttgatatgcaacgaggtgttcatggacgattgatggataattcgactagtgtccgagaagcagcagtagaattactaggtcgatttgtcctttgtcgacctcagcttgctgaacagtattatgatatgctgattgaaagaatattggatactggtatcagtgtcaggaaaagagtaataaagattctcagagacatttgtattgaacaaccaacatttccaaaaatcacagaaatgtgtgtaaaaatgattcgcagagtcaatgatgaagagggcattaagaaattagtaaatgaaacattccagaaactctggtttactccaactccacacaatgacaaagaagcaatgacaaggaaaattttaaacattaccgatgtggttgcagcatgcagagatactggatatgactggtttgagcaactgcttcaaaacttgttgaagtccgaagaggattcctcatataaacctgtgaagaaagcttgtactcaacttgttgataacctagttgagcacattcttaaatatgaggaatctctagctgactctgacaataaaggtgtgaattctggaagattggtagcttgcataaccactttgttcttattcagcaaaataagaccccagctcatggttaaacatgcaatgactatgcaaccataccttaccactaaatgtagtacgcaaaatgatttcatggttatctgcaatgttgcaaaaatcctagagctagttgtaccactgatggagcatccaagtgaaacttttcttgccactattgaggaagatctaatgaagctcatcatcaaatatggcatgactgtagtgcaacattgtgtgagctgtcttggagctgttgtaaataaagtgacacaaaattttaaatttgtgtgggcttgtttcaatagatactatggtgccatttcaaaattaaaaagtcaacaccaagaggacccaaataacacttcacttctaacaaacaaaccagcacttcttagatcccttttcaccgttggagcactatgtcggcattttgattttgatctggaagattttaaaggcaacagcaaggttaacataaaagataaagtacttgaactattgatgtattttacaaaacactcagatgaagaagtacaaacaaaagctatcattggtctaggatttgcctttattcagcatccaagtctaatgttcgagcaagaagtgaagaatctatataataatattttatctgataagaactcctcagtcaatttaaaaatacaagtgttaaaaaacctccagacctacctacaagaagaagatacacgtatgcagcaggcagatagagactggaagaaagttgcaaaacaggaagacttaaaagaaatgggtgatgtttcctcagggatgagtagttccatcatgcagctttatctcaaacaggtgcttgaggcattttttcacacccagtcaagtgtacgccactttgccctaaatgtcattgcattgactctaaatcaaggtcttattcatccagttcagtgtgtgccatatttaattgctatgggcacagacccagaacctgctatgcggaacaaggctgatcagcaacttgtggaaatagacaaaaaatatgctggattcattcatatgaaagcagtggctggtatgaagatgtcttaccaggtacaacaggcaatcaacacatgcctaaaagatcctgtaaggggtttcagacaagacgagtcctctagcgctttgtgttcacacctttactccatgatccgtggaaaccgccaacacagacgagcctttcttatttctttactcaacctctttgatgacacagcaaaaacagacgtgactatgctcttgtatatagcagacaatctagcctgttttccataccagacacaggaagagccgttgtttataatgcatcatatagacattacactctcagtttctggtagtaacctactgcagtcattcaaggagtctatggtaaaggacaaaaggaaagagagaaaatcatcacctagtaaggaaaatgagtcaagcgacagtgaagaagaagtttccaggcctcggaagtcacggaaacgtgtagattcagattcagattcagattcagaagacgatataaattcagtgatgaaatgtttgccagaaaattcagctcctttaatcgaatttgcaaatgtgtcccagggtattttattacttctcatgttaaaacaacatttgaagaatctttgtggattttctgatagttcaaacttctcatggaacatctggaccctgatgaagaagaagaagaaggggaggtttcagctagcacaaatgctcggaacaaagcaattacctcactgcttggaggaggcagccctaaaaataatacagcagcagagacagaagatgatgaaagtgatggggaggatagaggaggaggcacttcaggggtgaggcggaggaggagtcaacgtatttcgcagcgtattacgtaaaatgatttttatgtgcttatatatgtcagtctattaaatgtacaccaagtaatgtaatacttaaaagagaaaacattttgtagatagagattctctacttacccgtttatacatccttttgtagaaagtttaacataaaagacaataaaaaaacagaaatgagatttatccagcataaagggttaatttttctttgaattgtattaatgtgtgttatttttattgttgctaagttttatgtagctatatggttcatatgtatatataattttatatatcaataagagtaaagacacgggtacaaattaagagttatatggttttacaagtatatgttaaccccttggcgctggcggtcacggtgcgtctcattgccggcaatggaagtgtgccgggaaatcccaactcccggcgtcaagggattaaaagcaataaaaacaataatttcactaaaattcttttgtgtaacacttggtcttttttcccccctcccaatgttttagtcattgagaaggtcaaaacgaaattcagactctacggagttggcagcacagatgaatgaaagtgttgacgtcatggatgtcatcgctatttgctgtccaaagtacaaagatcgaccacaaattgcaagagtagtgcagaaaaccagcagtggcttcagtgttcagtggatggcaggctcctacagtggctcctggactgaggctaagcgccgtgatggccgcaaactggtgccttgggtagacactattaaagagtcagacattatttacaaaaaaattgctctaacgagtgctaataagctgactaataaagttgttcagactttacgatccctgtatgccgccaaggatgggacttccagctaatgaatttgtacatgcagccaaatttacaggaatttttttaaaaggcagaaaaacttgaaataccaacattctggcaaaaaaaaatcagttttatgaagagtaagtggaacctgggatgcaggaacaaaagaaggaaatgttgggcaaacatttttgtgggagctcccttcgctgttgtgcagcagaaacagattctcagttcatttttactcccactgtattatagtttaacaaaaattgtttatatcttggaaaaaaaactttctgtttaaaaaaaataaacaagtgaatgttggaaattagtctgttaatgttcttaataaagtgttcttggagtttaacctagcagcggatggctttctttagcttagcccagtttccagggaagcattgttttttccaggctgtaaaatggcagaatctcctggatatataatttattctgttgaaaaaaaaaaaagcatgcagtatctatgacctatctgcagaaggagtttttgtaaatgtagattttgatgtattaggtcaccctgaaaacaatacaagaaaagggatccccaggtaatctggtggagcgaatactgcaataaatttttttacttctctttgtta

SEQ ID NO: 455139 - DNA, 3646 bp, Homo sapiens
taaaaagcatagtatttgcatataacctacatacatcctcccatatgctttaagtcatttctagattacttataatacctaatacaatgtaaatgctatatacatagttgttatactgcattttttttaagttgtattttttattgtaatgctgtttgttttgttttgagacggagtttcactcttgttgcccaggctggtctcaaactcctgacctcaggtgatccgccggcctcccaaagtgctgggattacaggcatgagccaccatacctggccagtgctgttattttttattgtggcattttccaaatagtttttgatccactgtgggttgaatccgcaggtgcggaatccggggatacagagggctatgtttttaattcagaaaaatacatggcttatatgtcataaaaggtaaaactgcaagcagtcattctcttaccgtgtttggctattctgttcctttcttttctgataaccaatattattactttttcgtatgttcttatatgagtaatgccaatatatatatatgtagattttctcacttatcaagtatgcaaatgtatgtatataaaatgtgctttaaaaatagagacagataatagactagaggttaccaaggaccggggaaggaaagaacggggagttattgtttaatgaggacagctgtggtttccagtgattaaaaaaaaaaagaaacagctctggaaatggacagtggtgatagttgtacaatatgccaatgaattatacatttaaaatggttaaactggtaggctggacatgctggcttatacctgtaatcttagcaccttgggaggcctatgtaggaggtttgcttgagtccaggaagtccaggccagcctgagcaacagggtgagaccctgtctctacaaaaaatacaaacattagccagacatggcggtgtgcacctgtagtcccaactgctggggaggctgaggtgggaggaccacctaagcctgggaggtggaggctacagtgagccatgatcgtgccactgcacttcagcctgagtgacagagtgagaccctgtctcaatttaaaaagaaaaaaaaaaagggttaagctggcaaattttatgatatttctattttatcacaatataaaagtttttaaaaatgtttttgaaattagaggactatcctaaaaaataaaaataaagttttatattttaatctacttaatttcaggtgtagtggctcacaagcactttgggaggctgaggtgggcagatcactcgaggccagaggtttgacaccagtttggccaacattgcaaaaccccatttctatttttcttaaaaaaatttttaaaaatctactttaaagcaagtagctgaacataaaataaggttttttgaactaagaatataatctacacagtggcttttcatattattcattgactgcaaaccttactctaaaatttaaaaatattttagttcttatttaaaatttttcaacattctttgctttctcttgtatcgtcttagcagagagcaaagaggggagataactagaaaatgtctatcagtaatatcacctgattgcttgatgacttggaccaagggtctgaaaactctggctgtttttgtatctaacccattgcctgtttttgcaaacaaagttttattgaaaacattcatgcccactcatttatttgtctgtagctgctttcatactacagtggcagagttgggtagttgtgacagactatttgaccttcaaaatgaaaaatatttaccacctggctgtttacagaaaatgtttactagcccctaatttagatgatggctaacgtctgtttcacccacaccaaactactgccatagaaaacatttaggaatttgacaatcttgcttgaaatatttacttaaaattctgaaataatatctgttttttgtagttcaaacttctcatggaacatctggaccctgatgaagaagaagaagaaggggaggtttcagctagcacaaatgctcggaacaaagcaattacctcactgcttggaggaggcagccctaaaaataatacagcagcagagacagaagatgatgaaagtgatggggaggatagaggaggaggcacttcaggggtgaggcggaggaggagtcaacgtatttcgcagcgtattacgtaaaatgatttttatgtgcttatatatgtcagtctattaaatgtacaccaagtaatgtaatacttaaaagagaaaacattttgtagatagagattctctacttacccgtttatacatccttttgtagaaagtttaacataaaagacaataaaaaaacagaaatgagatttatccagcataaagggttaatttttctttgaattgtattaatgtgtgttatttttattgttgctaagttttatgtagctatatggttcatatgtatatataattttatatatcaataagagtaaagacacgggtacaaattaagagttatatggttttacaagtatatgttaaccccttggcgctggcggtcacggtgcgtctcattgccggcaatggaagtgtgccgggaaatcccaactcccggcgtcaagggattaaaagcaataaaaacaataatttcactaaaattcttttgtgtaacacttggtcttttttcccccctcccaatgttttagtcattgagaaggtcaaaacgaaattcagactctacggagttggcagcacagatgaatgaaagtgttgacgtcatggatgtcatcgctatttgctgtccaaagtacaaagatcgaccacaaattgcaagagtagtgcagaaaaccagcagtggcttcagtgttcagtggatggcaggctcctacagtggctcctggactgaggctaagcgccgtgatggccgcaaactggtgccttgggtagacactattaaagagtcagacattatttacaaaaaaattgctctaacgagtgctaataagctgactaataaagttgttcagactttacgatccctgtatgccgccaaggatgggacttccagctaatgaatttgtacatgcagccaaatttacaggaatttttttaaaaggcagaaaaacttgaaataccaacattctggcaaaaaaaaatcagttttatgaagagtaagtggaacctgggatgcaggaacaaaagaaggaaatgttgggcaaacatttttgtgggagctcccttcgctgttgtgcagcagaaacagattctcagttcatttttactcccactgtattatagtttaacaaaaattgtttatatcttggaaaaaaaactttctgtttaaaaaaaataaacaagtgaatgttggaaattagtctgttaatgttcttaataaagtgttcttggagtttaacctagcagcggatggctttctttagcttagcccagtttccagggaagcattgttttttccaggctgtaaaatggcagaatctcctggatatataatttattctgttgaaaaaaaaaaaagcatgcagtatctatgacctatctgcagaaggagtttttgtaaatgtagattttgatgtattaggtcaccctgaaaacaatacaagaaaagggatccccaggtaatctggtggagcgaatactgcaataaatttttttacttctctttgtta

SEQ ID NO: 455140 - DNA, 2477 bp, Homo sapiens
tcccttggtctctctgtgtctctccccactctctccgtgtgtgtctgcttatctctgtctaacattaagtgaggtgaaagtgccctgtattttttctaaaaaaggtttttggttgggtttctagattatccgctaaacatgtgtgctttttcttaaaatttacagaaaacagacgtgactatgctcttgtatatagcagacaatctagcctgttttccataccagacacaggaagagccgttgtttataatgcatcatatagacattacactctcagtttctggtagtaacctactgcagtcattcaaggagtctatggtaaaggacaaaaggaaagagagaaaatcatcacctagtaaggaaaatgagtcaagcgacagtgaagaagaagtttccaggcctcggaagtcacggaaacgtgtagattcagattcagattcagattcagaagacgatataaattcagtgatgaaatgtttgccagaaaattcagctcctttaatcgaatttgcaaatgtgtcccagggtattttattacttctcatgttaaaacaacatttgaagaatctttgtggattttctgatagtaaaattcagaagtactctccatctgaatctgcaaaagtatatgataaagcgataaaccgaaaaacaggagttcattttcatccaaaacaaacactggacttcctgcggagtgacatggctaattccaaaatcacagaagaggtgaaaaggagtatagtaaaacagtatctagatttcaaacttctcatggaacatctggaccctgatgaagaagaagaagaaggggaggtttcagctagcacaaatgctcggaacaaagcaattacctcactgcttggaggaggcagccctaaaaataatacagcagcagagacagaagatgatgaaagtgatggggaggatagaggaggaggcacttcaggggtgaggcggaggaggagtcaacgtatttcgcagcgtattacgtaaaatgatttttatgtgcttatatatgtcagtctattaaatgtacaccaagtaatgtaatacttaaaagagaaaacattttgtagatagagattctctacttacccgtttatacatccttttgtagaaagtttaacataaaagacaataaaaaaacagaaatgagatttatccagcataaagggttaatttttctttgaattgtattaatgtgtgttatttttattgttgctaagttttatgtagctatatggttcatatgtatatataattttatatatcaataagagtaaagacacgggtacaaattaagagttatatggttttacaagtatatgttaaccccttggcgctggcggtcacggtgcgtctcattgccggcaatggaagtgtgccgggaaatcccaactcccggcgtcaagggattaaaagcaataaaaacaataatttcactaaaattcttttgtgtaacacttggtcttttttcccccctcccaatgttttagtcattgagaaggtcaaaacgaaattcagactctacggagttggcagcacagatgaatgaaagtgttgacgtcatggatgtcatcgctatttgctgtccaaagtacaaagatcgaccacaaattgcaagagtagtgcagaaaaccagcagtggcttcagtgttcagtggatggcaggctcctacagtggctcctggactgaggctaagcgccgtgatggccgcaaactggtgccttgggtagacactattaaagagtcagacattatttacaaaaaaattgctctaacgagtgctaataagctgactaataaagttgttcagactttacgatccctgtatgccgccaaggatgggacttccagctaatgaatttgtacatgcagccaaatttacaggaatttttttaaaaggcagaaaaacttgaaataccaacattctggcaaaaaaaaatcagttttatgaagagtaagtggaacctgggatgcaggaacaaaagaaggaaatgttgggcaaacatttttgtgggagctcccttcgctgttgtgcagcagaaacagattctcagttcatttttactcccactgtattatagtttaacaaaaattgtttatatcttggaaaaaaaactttctgtttaaaaaaaataaacaagtgaatgttggaaattagtctgttaatgttcttaataaagtgttcttggagtttaacctagcagcggatggctttctttagcttagcccagtttccagggaagcattgttttttccaggctgtaaaatggcagaatctcctggatatataatttattctgttgaaaaaaaaaaaagcatgcagtatctatgacctatctgcagaaggagtttttgtaaatgtagattttgatgtattaggtcaccctgaaaacaatacaagaaaagggatccccaggtaatctggtggagcgaatactgcaataaatttttttacttctctttgtta

SEQ ID NO: 455141 - DNA, 6075 bp, Homo sapiens
  misc_feature (6054)..(6054): n is a, c, g, or t
cagcatcggtatcaagtcccattgttgcaggtggtttgagaaacatacatgataataaagtttctggtccgttgtctggcaattcagctaatcatcatgctgataatcctagacatggttcaagtgaggactacctacacatggtgcacaggctaagtagtgacgatggagattcttcaacaatgaggaatgctgcatcttttcccttgagatctccacagccagtatgctcccctgctggaagtgaaggaactcctaaaggctcaagaccacctttaatcctacaatctcagtctctaccttgttcatcacctcgagatgttccaccagatatcttgctagattctccagaaagaaaacaaaagaagcagaagaaaatgaaattaggcaaggatgaaaaagagcagagtgagaaagcggcaatgtatgatataattagttctccatccaaggactctactaaacttacattaagactttctcgtgtaaggtcttcagacatggaccagcaagaggatatgatttctggtgtggaaaatagcaatgtttcagaaaatgatattccttttaatgtgcagtacccaggacagacttcaaaaacacccattactccacaagatataaaccgcccactaaatgctgctcaatgtttgtcgcagcaagaacaaacagcattccttccagcaaatcaagtgcctgttttacaacagaacacttcagttgctgcaaaacaaccccagacttctgtggtacagaatcaacaacagatatcacaacagggacctatatatgatgaagtggaattggatgcattggctgaaattgagcgaatagagagagaatcagctattgaaagggagcgcttctcaaaagaagttcaagataaagataagcctttgaaaaaaagaaaacaagattcttacccacaggaggctgggggtgctacaggaggtaatagaccagcttctcaggagacgggttctacgggaaatgggtcaaggccagcattaatggttagcattgatcttcatcaggcaggaagagtggactctcaggcttctataactcaggattcagactccataaaaaagcctgaagaaatcaaacaatgtaatgatgcacctgtttctgttcttcaggaagatattgttggaagtcttaaatctacaccagaaaaccatcctgagacacctaaaaaaaagtctgatcctgagctttcaaagagtgaaatgaaacaaagtgaaagtagattagcagaatctaaaccaaatgaaaaccgattggtggagacaaaatcaagtgaaaataagttagaaactaaagttgagacccaaacagaagaacttaaacagaatgagagcagaacaactgaatgcaaacaaaacgagagcaccatagttgagcctaaacaaaatgaaaatagactgtctgacacaaaaccaaatgacaacaaacaaaataatggcagatcagaaacaacaaaatcaaggcctgaaaccccaaagcaaaagggtgaaagccggcctgagactccaaaacaaaagagtgatgggcatcctgaaaccccaaaacagaagggtgatggaaggcctgaaactccaaagcaaaaaggtgagagccgccctgaaactccaaagcaaaaaaatgaagggcgacctgaaacaccaaaacacaggcatgacaataggagggattctggaaagccatctacagagaaaaaacctgaagtgtctaaacataaacaagatactaaatctgactcacctcggttaaaatcagaacgagctgaagccttaaagcagagacctgatgggcgatctgtttctgagtcactaagacgtgaccatgataataaacaaaaatcagatgacaggggtgaatcagagcgacatcgaggggatcagtctagggttcgaagaccagaaacattgagatcctctagtagaaatgaacatggcattaaatctgatagttcaaaaactgataaactagaacgaaaacacaggcatgaatcaggggactcaagggaaagaccatcttctggggaacaaaaatcaagacctgacagtcctcgtgttaaacaaggagattctaataaatcaagatctgataaacttggttttaaatcaccaactagtaaagatgacaaaaggacagagggtaacaagagtaaagtagacactaataaagcacaccctgacaataaggcagaatttccaagttatttgttggggggcaggtctggtgcgttgaaaaattttgtcattccgaaaatcaagagggataaagatggcaatgttactcaggagacaaagaaaatggaaatgaaaggagagccgaaagacaaagtagaaaaaataggattagttgaagatctaaataaaggagctaagcctgtagttgtgctacaaaaactgtctttggatgatgttcagaaacttattaaagatagagaggacaaatcaagaagttcccttaaacctatcaagaataaaccatcaaagtcaaataaaggtagtatagatcaatcagtgttaaaagaattaccccctgaactcctggcagaaattgagtccaccatgccactttgtgaacgtgtgaaaatgaacaaacgcaagcgtagcacagttaatgaaaagccaaaatatgctgaaatcagttcagatgaagataatgatagtgatgaagcttttgaatcctctaggaaacgacataaaaaagatgatgataaagcttgggaatatgaagagcgtgacagaagaagctctggggatcataggagaagtggccactctcatgaaggaagaaggagttcaggtggtggtcgttatcgaaaccgaagtccgtcagattctgacatggaagattattctcctcctcccagccttagtgaggttgctaggaaaatgaagaaaaaagaaaaacagaagaaaaggaaagcatatgaaccaaaactaacacctgaagaaatgatggactcttcaacttttaagagattcacagcctcaatagagaatattttggataatttggaagatatggattttactgcgtttggtgatgatgatgaaattcctcaggaactgctcttaggaaaacatcagcttaatgaacttggcagtgaatctgctaaaataaaagcaatgggtataatggataagctttcaactgacaaaactgtgaaagtcttaaatatcttggagaagaatattcaggatgggtcaaagctttccactttgttaaatcataataacgatactgaagaagaagaaaggttatggagagaccttattatggagagagttacaaaatcagcggatgcttgtcttacaactatcaacattatgacatcccctaacatgccaaaagctgtgtacattgaggatgtaattgaaagagttatacagtacactaaatttcatttgcagaatacactttatcctcagtatgatcctgtttacagattagatcctcatggaggaggcttattaagttcaaaagcaaaacgggctaaatgttctacccataagcagagagtaatagtaatgctttataacaaagtttgtgacattgttagcagcttatcagaattgctagagatacaacttcttacagacacaacaattcttcaggtttcatctatgggaataacaccattttttgtggaaaatgtcagtgaactacagttgtgtgccattaagttagtcactgcagtattctcaagatatgaaaaacataggcagttaattttggaagaaatttttacttcacttgcaagattaccaaccagcaagaggagtttaaggaacttcaggttaaacagtagtgatatggatggagaacctatgtatattcagatggttacagcactggttttacaacttattcagtgtgtggtacacttaccatcatcagagaaggactctaatgcagaagaagattcaaataaaaaaattgaccaggatgttgtcattactaactcttatgaaacagctatgcgaacagcccaaaacttcctctccatcttccttaaaaaatgtggtagtaagcaaggtgaagaagattacagaccactgtttgaaaattttgttcaagaccttctttcaacagtcaataagcctgaatggccagctgctgaactactccttagtttgttagggagactgttggttcatcagttcagtaacaagtcaacagagatggctttaagagtggcatctcttgattaccttggaactgttgctgcacggctaagaaaagatgctgttacaagcaaaatggatcaaggatctatagaacgcattttaaaacaggtttcaggaggggaagatgaaatccaacaattacaaaaagcattgcttgattacttggatgaaaacactgagactgatccttcactagtgttttctcgtaaattctatatagcccagtggtttcgagacacaactctggaaacagaaaaagcaatgaaatcacaaaaagatgaagaatcatctgaaggaacacatcatgcaaaggaaattgagacaactggccaaattatgcatcgagctgaaaaccgaaaaaagtttcttagaagcattatcaaaaccacaccttctcagtttagcacattaaagatgaactctgatactgtggactatgatgatgcttgcttgattgttcgatacttggcctccatgaggccgtttgcccagagctttgatatttatttgacacagatcctacgagttcttggtgaaaatgcaattgctgttcgaacaaaagccatgaagtgtttgtctgaggttgttgctgtagaccccagtattctagcaaggcttgatatgcaacgaggtgttcatggacgattgatggataattcgactagtgtccgagaagcagcagtagaattactaggtcgatttgtcctttgtcgacctcagcttgctgaacagtattatgatatgctgattgaaagaatattggatactggtatcagtgtcaggaaaagagtaataaagattctcagagacatttgtattgaacaaccaacatttccaaaaatcacagaaatgtgtgtaaaaatgattcgcagagtcaatgatgaagagggcattaagaaattagtaaatgaaacattccagaaactctggtttactccaactccacacaatgacaaagaagcaatgacaaggaaaattttaaacattaccgatgtggttgcagcatgcagagatactggatatgactggtttgagcaactgcttcaaaacttgttgaagtccgaagaggattcctcatataaacctgtgaagaaagcttgtactcaacttgttgataacctagttgagcacattcttaaatatgaggaatctctagctgactctgacaataaaggtgtgaattctggaagattggtagcttgcataaccactttgttcttattcagcaaaataagaccccagctcatggttaaacatgcaatgactatgcaaccataccttaccactaaatgtagtgtgtttacatatttcctttggatcaccactacaaacaatttttaaataaacattccaatttaaatacctaaaaaaaaaaaaaaaaaaaaaaaaaaaaaaaaaaaaaaaaagaagaggggggagcgggaaaaaaaaaaaaagggggggcaaaagaaaaagagaaaacaagaggggaaaagggggccccaaaagagagagccgactaaataataacgaccagcgcacggggccgccggtttaaaacaccacgcgcgaggaagggggaaccaacactgggcacacgtggggaaccccttcggacagggacccatcacgcttccggagggggggggacacaaaatgtgggacacaacattatacccccaacagaaaagtaattataaaagggcctcataggggaggaacaatattgaaaacttttgaacagggggggtaataaagggggggtaaaaccaataaggcgcggaacattattcgtggcgtgcctggaaaaaattttgggaagacagaggagtagtgacttttcggaacataatattatcacggggagggngtatgaaaaaacagaaatata

SEQ ID NO: 455142 - DNA, 3237 bp, Homo sapiens
cagcatcggtatcaagtcccattgttgcaggtggtttgagaaacatacatgataataaagtttctggtccgttgtctggcaattcagctaatcatcatgctgataatcctagacatggttcaagtgaggactacctacacatggtgcacaggctaagtagtgacgatggagattcttcaacaatgaggaatgctgcatcttttcccttgagatctccacagccagtatgctcccctgctggaagtgaaggaactcctaaaggctcaagaccacctttaatcctacaatctcagtctctaccttgttcatcacctcgagatgttccaccagatatcttgctagattctccagaaagaaaacaaaagaagcagaagaaaatgaaattaggcaaggatgaaaaagagcagagtgagaaagcggcaatgtatgatataattagttctccatccaaggactctactaaacttacattaagactttctcgtgtaaggtcttcagacatggaccagcaagaggatatgatttctggtgtggaaaatagcaatgtttcagaaaatgatattccttttaatgtgcagtacccaggacagacttcaaaaacacccattactccacaagatataaaccgcccactaaatgctgctcaatgtttgtcgcagcaagaacaaacagcattccttccagcaaatcaagtgcctgttttacaacagaacacttcagttgctgcaaaacaaccccagacttctgtggtacagaatcaacaacagatatcacaacagggacctatatatgatgaagtggaattggatgcattggctgaaattgagcgaatagagagagaatcagctattgaaagggagcgcttctcaaaagaagttcaagataaagataagcctttgaaaaaaagaaaacaagattcttacccacaggaggctgggggtgctacaggaggtaatagaccagcttctcaggagacgggttctacgggaaatgggtcaaggccagcattaatggttagcattgatcttcatcaggcaggaagagtggactctcaggcttctataactcaggattcagactccataaaaaagcctgaagaaatcaaacaatgtaatgatgcacctgtttctgttcttcaggaagatattgttggaagtcttaaatctacaccagaaaaccatcctgagacacctaaaaaaaagtctgatcctgagctttcaaagagtgaaatgaaacaaagtgaaagtagattagcagaatctaaaccaaatgaaaaccgattggtggagacaaaatcaagtgaaaataagttagaaactaaagttgagacccaaacagaagaacttaaacagaatgagagcagaacaactgaatgcaaacaaaacgagagcaccatagttgagcctaaacaaaatgaaaatagactgtctgacacaaaaccaaatgacaacaaacaaaataatggcagatcagaaacaacaaaatcaaggcctgaaaccccaaagcaaaagggtgaaagccggcctgagactccaaaacaaaagagtgatgggcatcctgaaaccccaaaacagaagggtgatggaaggcctgaaactccaaagcaaaaaggtgagagccgccctgaaactccaaagcaaaaaaatgaagggcgacctgaaacaccaaaacacaggcatgacaataggagggattctggaaagccatctacagagaaaaaacctgaagtgtctaaacataaacaagatactaaatctgactcacctcggttaaaatcagaacgagctgaagccttaaagcagagacctgatgggcgatctgtttctgagtcactaagacgtgaccatgataataaacaaaaatcagatgacaggggtgaatcagagcgacatcgaggggatcagtctagggttcgaagaccagaaacattgagatcctctagtagaaatgaacatggcattaaatctgatagttcaaaaactgataaactagaacgaaaacacaggcatgaatcaggggactcaagggaaagaccatcttctggggaacaaaaatcaagacctgacagtcctcgtgttaaacaaggagattctaataaatcaagatctgataaacttggttttaaatcaccaactagtaaagatgacaaaaggacagagggtaacaagagtaaagtagacactaataaagcacaccctgacaataaggcagaatttccaagttatttgttggggggcaggtctggtgcgttgaaaaattttgtcattccgaaaatcaagagggataaagatggcaatgttactcaggagacaaagaaaatggaaatgaaaggagagccgaaagacaaagtagaaaaaataggattagttgaagatctaaataaaggagctaagcctgtagttgtgctacaaaaactgtctttggatgatgttcagaaacttattaaagatagagaggacaaatcaagaagttcccttaaacctatcaagaataaaccatcaaagtcaaataaaggtagtatagatcaatcagtgttaaaagaattaccccctgaactcctggcagaaattgagtccaccatgccactttgtgaacgtgtgaaaatgaacaaacgcaagcgtagcacagttaatgaaaagccaaaatatgctgaaatcagttcagatgaagataatgatagtgatgaagcttttgaatagctggcttcttcactacacagctacctctctacaacactgtgatcacctgtctttgcactagacttgctatacctcgcctgtcttcctactggtccactgaaaaagttcttctcttttatccctatcttccttcttctggagcaagagaattgagcctagccaagaggggtcagcaaccttgtttgacttaaacggcattcagtggaaacagactatgggagatcttcacttgtgtgccaactgacttagtcataatgaccaaaagaagtgggaagaccaccagtgttctactttttccacctagtgtccatagattgaggtgtgacaagcaagggcaggaaggacagatgcatgctgccatttttaaatgtatattgctgatggaagcccttcacctcctccaaagtttttaatgttaatttactgatttttttttaattgtgagctcttgagctatgagcagtagactatgaatactgaacaaatctgaaaaaagttttaaaattgaaataaaatatacagcaaacttaacatttaa

SEQ ID NO: 455143 - DNA, 353 bp, Homo sapiens
tcagtgttaaaagaattaccccctgaactcctggcagaaattgagtccaccatgccactttgtgaacgtgtgaaaatgaacaaacgcaagcgtagcacagttaatgaaaagccaaaatatgctgaaatcagttcagatgaagataatgatagtgatgaagcttttgaatgtaagtatcacagaactctttgttattattttagagtttaaaagcaggttgatgtgtttttctcatttataatttgggggtttagcaaaagcacagtcaccttaattcttaataacacagtatagtaagttttttttctctatactttaaaaatgcgtgaaagatgagatcagttggcaccaag

SEQ ID NO: 455144 - DNA, 353 bp, Homo sapiens
ggagttcaggtggtggtcgttatcgaaaccgaagtccgtcagattctgacatggaagattattctcctcctcccagccttagtgagggtaattcatcagtgtcaacggatttcttacataaaccaatttaaatttagggctttaactttgaagaatattttatatctttttatgagttaataactaattttcaattaagacaaaaatacttagtttctatgtgcagtgattatcgtttaagtctttaacgttcaggaaaaaaactagaaacaaaaatggaattattttaagttgtcagtcctgcatttcagtacttctttttgttcgttttagttgctaggaaaatgaagaaa

SEQ ID NO: 455145 - DNA, 315 bp, Homo sapiens
ggtaaatggttgtgttactgaaaaaatagtttactttaaaaataaacttttgaattgagaaaattgaaacatgtttcaggctaaagcataacaaaagtatattttattcacatttataaatatacttctaactttgattcttttcatcacccttaggttgcagcatgcagagatactggatatgactggtttgagcaactgcttcaaaacgtgagtgttcttttgactcctgataacctaaaatttaataggttagttttttgttgttggtgtttttttttttttggactgtatgatttaaaagaacctttttag

SEQ ID NO: 455146 - DNA, 141 bp, Homo sapiens
agtgaatatactgcgtatggatacttattttctaatttcatacactaggcatctcaatttttctgactcttaaaaatacctttctgtttttaggatactggtatcagtgtcaggaaaagagtaataaagattctcagagac

SEQ ID NO: 455147 - DNA, 493 bp, Homo sapiens
ttaatataagtattggaacatagtaaaataataagttttctaacatttaggatattctatattttctggctttcttaaaatctgtttttatcacatggaagttgttttaaagtaaactttaatatttgtattcctgtaatgtgagcactctaactttattaacttggaaatcttgttgctaatttcatcaagctcaagtctgtctaatttctttccagttttctcgtaaattctatatagcccagtggtttcgagacacaactctggaaacagaaaaagcaatgaaatcacaaaaagatgaagaatcatctgaaggaacacatcatgcaaaggaaattgagacaactggccaaattatgcatcgagctgaaaaccgaaaaaagtttcttagaagcattatcaaaaccacaccttctcagtttagcacattaaagtaagatccaaggagaaaacagtttacatttatctccttgatatctatttccctaagtta

SEQ ID NO: 455148 - DNA, 733 bp, Homo sapiens
gtacagctattatgtatccataaaaaaaaaattttaagtttagtcctaaattcattagtaaatttacatttatatataataatatgtataattgtcccttttttttaagtttagcaaacactgtaacaacttcttctccaaaagcagtaaatatattttttagtttgatcataaacatttgagtgtatagtatgaagaagttctaggctagggatagtatcacccattcgtattgtttaaaatctttaccaaattgaaaatttttatagttttgagaaattagtagttttagaaaaaactgaggaaattaataccagaaattcctggcagtttgtgttttgattagttatttatagctttgtgttgggcctaatgagaatttggaattgtgaaattgccgtatttgttataattagttaatttgaaatttctcttccttctagaaattagtaaatgaaacattccagaaactctggtttactccaactccacacaatgacaaagaagcaatgacaaggaaaattttaaacattaccgatgtggtaagaaggactggaacaagggtgtggtcactgttgatccagacctaattgaggcctacatgtcttatgaaggaagagacaataatgagatatttcattaatcttgacatttcgtactgctgcctttactttatatttctggagatgctgaagggatgcaagtaacatgtcgttgatgcttccatatagcc

SEQ ID NO: 455149 - DNA, 8982 bp, Homo sapiens
cattagggaaaacataaagtggctgaatttacaaattattggtatccccaagcacaaagaaaggattagaaaacctatttaacaaagtaatgatgaaaactctcaagatctagcaagacatagagacattcagatataggagacacaatgatccctaggaagatacagtgcaaaaaaggtcttctcaacaaggcattataatcagactctctaaagtcaaagataagagtgaatcctaaaaatagcaagaaaaaagcatgtagctacctataaaggaaaccccatcaaactaacagtagatttttcagcagaaaccttacagctcgtgccgaattcggcacgaggtttgtcgcagcaagaacaaacagcattccttccagcaaatcaagtgcctgttttacaacagaacacttcagttgctgcaaaacaaccccagacttctgtggtacagaatcaacaacagatatcacaacagggacctatatatgatgaagtggaattggatgcattggctgaaattgagcgaatagagagagaatcagctattgaaagggagcgcttctcaaaagaagttcaagataaagataagcctttgaaaaaaagaaaacaagattcttacccacaggaggctgggggtgctacaggaggtaatagaccagcttctcaggagacgggttctacgggaaatgggtcaaggccagcattaatggttagcattgatcttcatcaggcaggaagagtggactctcaggcttctataactcaggattcagactccataaaaaagcctgaagaaatcaaacaatgtaatgatgcacctgtttctgttcttcaggaagatattgttggaagtcttaaatctacaccagaaaaccatcctgagacacctaaaaaaaagtctgatcctgagctttcaaagagtgaaatgaaacaaagtgaaagtagattagcagaatctaaaccaaatgaaaaccgattggtggagacaaaatcaagtgaaaataagttagaaactaaagttgagacccaaacagaagaacttaaacagaatgagagcagaacaactgaatgcaaacaaaacgagagcaccatagttgagcctaaacaaaatgaaaatagactgtctgacacaaaaccaaatgacaacaaacaaaataatggcagatcagaaacaacaaaatcaaggcctgaaaccccaaagcaaaagggtgaaagccggcctgagactccaaaacaaaagagtgatgggcatcctgaaaccccaaaacagaagggtgatggaaggcctgaaactccaaagcaaaaaggtgagagccgccctgaaactccaaagcaaaaaaatgaagggcgacctgaaacaccaaaacacaggcatgacaataggagggattctggaaagccatctacagagaaaaaacctgaagtgtctaaacataaacaagatactaaatctgactcacctcggttaaaatcagaacgagctgaagccttaaagcagagacctgatgggcgatctgtttctgagtcactaagacgtgaccatgataataaacaaaaatcagatgacaggggtgaatcagagcgacatcgaggggatcagtctagggttcgaagaccagaaacattgagatcctctagtagaaatgaacatggcattaaatctgatagttcaaaaactgataaactagaacgaaaacacaggcatgaatcaggggactcaagggaaagaccatcttctggggaacaaaaatcaagacctgacagtcctcgtgttaaacaaggagattctaataaatcaagatctgataaacttggttttaaatcaccaactagtaaagatgacaaaaggacagagggtaacaagagtaaagtagacactaataaagcacaccctgacaataaggcagaatttccaagttatttgttggggggcaggtctggtgcgttgaaaaattttgtcattccgaaaatcaagagggataaagatggcaatgttactcaggagacaaagaaaatggaaatgaaaggagagccgaaagacaaagtagaaaaaataggattagttgaagatctaaataaaggagctaagcctgtagttgtgctacaaaaactgtctttggatgatgttcagaaacttattaaagatagagaggacaaatcaagaagttcccttaaacctatcaagaataaaccatcaaagtcaaataaaggtagtatagatcaatcagtgttaaaagaattaccccctgaactcctggcagaaattgagtccaccatgccactttgtgaacgtgtgaaaatgaacaaacgcaagcgtagcacagttaatgaaaagccaaaatatgctgaaatcagttcagatgaagataatgatagtgatgaagcttttgaatcctctaggaaacgacataaaaaagatgatgataaagcttgggaatatgaagagcgtgacagaagaagctctggggatcataggagaagtggccactctcatgaaggaagaaggagttcaggtggtggtcgttatcgaaaccgaagtccgtcagattctgacatggaagattattctcctcctcccagccttagtgaggttgctaggaaaatgaagaaaaaagaaaaacagaagaaaaggaaagcatatgaaccaaaactaacacctgaagaaatgatggactcttcaacttttaagagattcacagcctcaatagagaatattttggataatttggaagatatggattttactgcgtttggtgatgatgatgaaattcctcaggaactgctcttaggaaaacatcagcttaatgaacttggcagtgaatctgctaaaataaaagcaatgggtataatggataagctttcaactgacaaaactgtgaaagtcttaaatatcttggagaagaatattcaggatgggtcaaagctttccactttgttaaatcataataacgatactgaagaagaagaaaggttatggagagaccttattatggagagagttacaaaatcagcggatgcttgtcttacaactatcaacattatgacatcccctaacatgccaaaagctgtgtacattgaggatgtaattgaaagagttatacagtacactaaatttcatttgcagaatacactttatcctcagtatgatcctgtttacagattagatcctcatggaggaggcttattaagttcaaaagcaaaacgggctaaatgttctacccataagcagagagtaatagtaatgctttataacaaagtttgtgacattgttagcagcttatcagaattgctagagatacaacttcttacagacacaacaattcttcaggtttcatctatgggaataacaccattttttgtggaaaatgtcagtgaactacagttgtgtgccattaagttagtcactgcagtattctcaagatatgaaaaacataggcagttaattttggaagaaatttttacttcacttgcaagattaccaaccagcaagaggagtttaaggaacttcaggttaaacagtagtgatatggatggagaacctatgtatattcagatggttacagcactggttttacaacttattcagtgtgtggtacacttaccatcatcagagaaggactctaatgcagaagaagattcaaataaaaaaattgaccaggatgttgtcattactaactcttatgaaacagctatgcgaacagcccaaaacttcctctccatcttccttaaaaaatgtggtagtaagcaaggtgaagaagattacagaccactgtttgaaaattttgttcaagaccttctttcaacagtcaataagcctgaatggccagctgctgaactactccttagtttgttagggagactgttggttcatcagttcagtaacaagtcaacagagatggctttaagagtggcatctcttgattaccttggaactgttgctgcacggctaagaaaagatgctgttacaagcaaaatggatcaaggatctatagaacgcattttaaaacaggtttcaggaggggaagatgaaatccaacaattacaaaaagcattgcttgattacttggatgaaaacactgagactgatccttcactagtgttttctcgtaaattctatatagcccagtggtttcgagacacaactctggaaacagaaaaagcaatgaaatcacaaaaagatgaagaatcatctgaaggaacacatcatgcaaaggaaattgagacaactggccaaattatgcatcgagctgaaaaccgaaaaaagtttcttagaagcattatcaaaaccacaccttctcagtttagcacattaaagatgaactctgatactgtggactatgatgatgcttgcttgattgttcgatacttggcctccatgaggccgtttgcccagagctttgatatttatttgacacagatcctacgagttcttggtgaaaatgcaattgctgttcgaacaaaagccatgaagtgtttgtctgaggttgttgctgtagaccccagtattctagcaaggcttgatatgcaacgaggtgttcatggacgattgatggataattcgactagtgtccgagaagcagcagtagaattactaggtcgatttgtcctttgtcgacctcagcttgctgaacagtattatgatatgctgattgaaagaatattggatactggtatcagtgtcaggaaaagagtaataaagattctcagagacatttgtattgaacaaccaacatttccaaaaatcacagaaatgtgtgtaaaaatgattcgcagagtcaatgatgaagagggcattaagaaattagtaaatgaaacattccagaaactctggtttactccaactccacacaatgacaaagaagcaatgacaaggaaaattttaaacattaccgatgtggttgcagcatgcagagatactggatatgactggtttgagcaactgcttcaaaacttgttgaagtccgaagaggattcctcatataaacctgtgaagaaagcttgtactcaacttgttgataacctagttgagcacattcttaaatatgaggaatctctagctgactctgacaataaaggtgtgaattctggaagattggtagcttgcataaccactttgttcttattcagcaaaataagaccccagctcatggttaaacatgcaatgactatgcaaccataccttaccactaaatgtagtacgcaaaatgatttcatggttatctgcaatgttgcaaaaatcctagagctagttgtaccactgatggagcatccaagtgaaacttttcttgccactattgaggaagatctaatgaagctcatcatcaaatatggcatgactgtagtgcaacattgtgtgagctgtcttggagctgttgtaaataaagtgacacaaaattttaaatttgtgtgggcttgtttcaatagatactatggtgccatttcaaaattaaaaagtcaacaccaagaggacccaaataacacttcacttctaacaaacaaaccagcacttcttagatcccttttcaccgttggagcactatgtcggcattttgattttgatctggaagattttaaaggcaacagcaaggttaacataaaagataaagtacttgaactattgatgtattttacaaaacactcagatgaagaagtacaaacaaaagctatcattggtctaggatttgcctttattcagcatccaagtctaatgttcgagcaagaagtgaagaatctatataataatattttatctgataagaactcctcagtcaatttaaaaatacaagtgttaaaaaacctccagacctacctacaagaagaagatacacgtatgcagcaggcagatagagactggaagaaagttgcaaaacaggaagacttaaaagaaatgggtgatgtttcctcagggatgagtagttccatcatgcagctttatctcaaacaggtgcttgaggcattttttcacacccagtcaagtgtacgccactttgccctaaatgtcattgcattgactctaaatcaaggtcttattcatccagttcagtgtgtgccatatttaattgctatgggcacagacccagaacctgctatgcggaacaaggctgatcagcaacttgtggaaatagacaaaaaatatgctggattcattcatatgaaagcagtggctggtatgaagatgtcttaccaggtacaacaggcaatcaacacatgcctaaaagatcctgtaaggggtttcagacaagacgagtcctctagcgctttgtgttcacacctttactccatgatccgtggaaaccgccaacacagacgagcctttcttatttctttactcaacctctttgatgacacagcaaaaacagacgtgactatgctcttgtatatagcagacaatctagcctgttttccataccagacacaggaagagccgttgtttataatgcatcatatagacattacactctcagtttctggtagtaacctactgcagtcattcaaggagtctatggtaaaggacaaaaggaaagagagaaaatcatcacctagtaaggaaaatgagtcaagcgacagtgaagaagaagtttccaggcctcggaagtcacggaaacgtgtagattcagattcagattcagattcagaagacgatataaattcagtgatgaaatgtttgccagaaaattcagctcctttaatcgaatttgcaaatgtgtcccagggtattttattacttctcatgttaaaacaacatttgaagaatctttgtggattttctgatagtaaaattcagaagtactctccatctgaatctgcaaaagtatatgataaagcgataaaccgaaaaacaggagttcattttcatccaaaacaaacactggacttcctgcggagtgacatggctaattccaaaatcacagaagaggtgaaaaggagtatagtaaaacagtatctagatttcaaacttctcatggaacatctggaccctgatgaagaagaagaagaaggggaggtttcagctagcacaaatgctcggaacaaagcaattacctcactgcttggaggaggcagccctaaaaataatacagcagcagagacagaagatgatgaaagtgatggggaggatagaggaggaggcacttcaggggtgaggcggaggaggagtcaacgtatttcgcagcgtattacgtaaaatgatttttatgtgcttatatatgtcagtctattaaatgtacaccaagtaatgtaatacttaaaagagaaaacattttgtagatagagattctctacttacccgtttatacatccttttgtagaaagtttaacataaaagacaataaaaaaacagaaatgagatttatccagcataaagggttaatttttctttgaattgtattaatgtgtgttatttttattgttgctaagttttatgtagctatatggttcatatgtatatataattttatatatcaataagagtaaagacacgggtacaaattaagagttatatggttttacaagtatatgttaaccccttggcgctggcggtcacggtgcgtctcattgccggcaatggaagtgtgccgggaaatcccaactcccggcgtcaagggattaaaagcaataaaaacaataatttcactaaaattcttttgtgtaacacttggtcttttttcccccctcccaatgttttagtcattgagaaggtcaaaacgaaattcagactctacggagttggcagcacagatgaatgaaagtgttgacgtcatggatgtcatcgctatttgctgtccaaagtacaaagatcgaccacaaattgcaagagtagtgcagaaaaccagcagtggcttcagtgttcagtggatggcaggctcctacagtggctcctggactgaggctaagcgccgtgatggccgcaaactggtgccttgggtagacactattaaagagtcagacattatttacaaaaaaattgctctaacgagtgctaataagctgactaataaagttgttcagactttacgatccctgtatgccgccaaggatgggacttccagctaatgaatttgtacatgcagccaaatttacaggaatttttttaaaaggcagaaaaacttgaaataccaacattctggcaaaaaaaaatcagttttatgaagagtaagtggaacctgggatgcaggaacaaaagaaggaaatgttgggcaaacatttttgtgggagctcccttcgctgttgtgcagcagaaacagattctcagttcatttttactcccactgtattatagtttaacaaaaattgtttatatcttggaaaaaaaactttctgtttaaaaaaaataaacaagtgaatgttggaaattagtctgttaatgttcttaataaagtgttcttggagtttaacctagcagcggatggctttctttagcttagcccagtttccagggaagcattgttttttccaggctgtaaaatggcagaatctcctggatatataatttattctgttgaaaaaaaaaaaagcatgcagtatctatgacctatctgcagaaggagtttttgtaaatgtagattttgatgtattaggtcaccctgaaaacaatacaagaaaagggatccccaggtaatctggtggagcgaatactgcaataaatttttttacttctctttgttacttgtctgtttccatttgaatttcttattgtaaaaatctgtttaaatccatttatattattttacagtcttttatgtaaaatttattatatcactggttttcaaagcaaaacataaaatattgtttatacagtttgtataggctgacttctgaataattggtatctattattttcattcccataagagggtgtaaacaattaactccagggttttattgtatcctgcaatatttagtattaactatatatgatttagcactgtgccaaacacattttcaagagtacattttgatataaaaagaaactattgtttattc

SEQ ID NO: 455150 - DNA, 8284 bp, Homo sapiens
cattagggaaaacataaagtggctgaatttacaaattattggtatccccaagcacaaagaaaggattagaaaacctatttaacaaagtaatgatgaaaactctcaagatctagcaagacatagagacattcagatataggagacacaatgatccctaggaagatacagtgcaaaaaaggtcttctcaacaaggcattataatcagactctctaaagtcaaagataagagtgaatcctaaaaatagcaagaaaaaagcatgtagctacctataaaggaaaccccatcaaactaacagtagatttttcagcagaaaccttacagctcgtgccgaattcggcacgaggtttgtcgcagcaagaacaaacagcattccttccagcaaatcaagtgcctgttttacaacagaacacttcagttgctgcaaaacaaccccagacttctgtggtacagaatcaacaacagatatcacaacagggacctatatatgatgaagtggaattggatgcattggctgaaattgagcgaatagagagagaatcagctattgaaagggagcgcttctcaaaagaagttcaagataaagataagcctttgaaaaaaagaaaacaagattcttacccacaggaggctgggggtgctacaggaggtaatagaccagcttctcaggagacgggttctacgggaaatgggtcaaggccagcattaatggttagcattgatcttcatcaggcaggaagagtggactctcaggcttctataactcaggattcagactccataaaaaagcctgaagaaatcaaacaatgtaatgatgcacctgtttctgttcttcaggaagatattgttggaagtcttaaatctacaccagaaaaccatcctgagacacctaaaaaaaagtctgatcctgagctttcaaagagtgaaatgaaacaaagtgaaagtagattagcagaatctaaaccaaatgaaaaccgattggtggagacaaaatcaagtgaaaataagttagaaactaaagttgagacccaaacagaagaacttaaacagaatgagagcagaacaactgaatgcaaacaaaacgagagcaccatagttgagcctaaacaaaatgaaaatagactgtctgacacaaaaccaaatgacaacaaacaaaataatggcagatcagaaacaacaaaatcaaggcctgaaaccccaaagcaaaagggtgaaagccggcctgagactccaaaacaaaagagtgatgggcatcctgaaaccccaaaacagaagggtgatggaaggcctgaaactccaaagcaaaaaggtgagagccgccctgaaactccaaagcaaaaaaatgaagggcgacctgaaacaccaaaacacaggcatgacaataggagggattctggaaagccatctacagagaaaaaacctgaagtgtctaaacataaacaagatactaaatctgactcacctcggttaaaatcagaacgagctgaagccttaaagcagagacctgatgggcgatctgtttctgagtcactaagacgtgaccatgataataaacaaaaatcagatgacaggggtgaatcagagcgacatcgaggggatcagtctagggttcgaagaccagaaacattgagatcctctagtagaaatgaacatggcattaaatctgatagttcaaaaactgataaactagaacgaaaacacaggcatgaatcaggggactcaagggaaagaccatcttctggggaacaaaaatcaagacctgacagtcctcgtgttaaacaaggagattctaataaatcaagatctgataaacttggttttaaatcaccaactagtaaagatgacaaaaggacagagggtaacaagagtaaagtagacactaataaagcacaccctgacaataaggcagaatttccaagttatttgttggggggcaggtctggtgcgttgaaaaattttgtcattccgaaaatcaagagggataaagatggcaatgttactcaggagacaaagaaaatggaaatgaaaggagagccgaaagacaaagtagaaaaaataggattagttgaagatctaaataaaggagctaagcctgtagttgtgctacaaaaactgtctttggatgatgttcagaaacttattaaagatagagaggacaaatcaagaagttcccttaaacctatcaagaataaaccatcaaagtcaaataaaggtagtatagatcaatcagtgttaaaagaattaccccctgaactcctggcagaaattgagtccaccatgccactttgtgaacgtgtgaaaatgaacaaacgcaagcgtagcacagttaatgaaaagccaaaatatgctgaaatcagttcagatgaagataatgatagtgatgaagcttttgaatcctctaggaaacgacataaaaaagatgatgataaagcttgggaatatgaagagcgtgacagaagaagctctggggatcataggagaagtggccactctcatgaaggaagaaggagttcaggtggtggtcgttatcgaaaccgaagtccgtcagattctgacatggaagattattctcctcctcccagccttagtgaggttgctaggaaaatgaagaaaaaagaaaaacagaagaaaaggaaagcatatgaaccaaaactaacacctgaagaaatgatggactcttcaacttttaagagattcacagcctcaatagagaatattttggataatttggaagatatggattttactgcgtttggtgatgatgatgaaattcctcaggaactgctcttaggaaaacatcagcttaatgaacttggcagtgaatctgctaaaataaaagcaatgggtataatggataagctttcaactgacaaaactgtgaaagtcttaaatatcttggagaagaatattcaggatgggtcaaagctttccactttgttaaatcataataacgatactgaagaagaagaaaggttatggagagaccttattatggagagagttacaaaatcagcggatgcttgtcttacaactatcaacattatgacatcccctaacatgccaaaagctgtgtacattgaggatgtaattgaaagagttatacagtacactaaatttcatttgcagaatacactttatcctcagtatgatcctgtttacagattagatcctcatggaggaggcttattaagttcaaaagcaaaacgggctaaatgttctacccataagcagagagtaatagtaatgctttataacaaagtttgtgacattgttagcagcttatcagaattgctagagatacaacttcttacagacacaacaattcttcaggtttcatctatgggaataacaccattttttgtggaaaatgtcagtgaactacagttgtgtgccattaagttagtcactgcagtattctcaagatatgaaaaacataggcagttaattttggaagaaatttttacttcacttgcaagattaccaaccagcaagaggagtttaaggaacttcaggttaaacagtagtgatatggatggagaacctatgtatattcagatggttacagcactggttttacaacttattcagtgtgtggtacacttaccatcatcagagaaggactctaatgcagaagaagattcaaataaaaaaattgaccaggatgttgtcattactaactcttatgaaacagctatgcgaacagcccaaaacttcctctccatcttccttaaaaaatgtggtagtaagcaaggtgaagaagattacagaccactgtttgaaaattttgttcaagaccttctttcaacagtcaataagcctgaatggccagctgctgaactactccttagtttgttagggagactgttggttcatcagttcagtaacaagtcaacagagatggctttaagagtggcatctcttgattaccttggaactgttgctgcacggctaagaaaagatgctgttacaagcaaaatggatcaaggatctatagaacgcattttaaaacaggtttcaggaggggaagatgaaatccaacaattacaaaaagcattgcttgattacttggatgaaaacactgagactgatccttcactagtgttttctcgtaaattctatatagcccagtggtttcgagacacaactctggaaacagaaaaagcaatgaaatcacaaaaagatgaagaatcatctgaaggaacacatcatgcaaaggaaattgagacaactggccaaattatgcatcgagctgaaaaccgaaaaaagtttcttagaagcattatcaaaaccacaccttctcagtttagcacattaaagatgaactctgatactgtggactatgatgatgcttgcttgattgttcgatacttggcctccatgaggccgtttgcccagagctttgatatttatttgacacagatcctacgagttcttggtgaaaatgcaattgctgttcgaacaaaagccatgaagtgtttgtctgaggttgttgctgtagaccccagtattctagcaaggcttgatatgcaacgaggtgttcatggacgattgatggataattcgactagtgtccgagaagcagcagtagaattactaggtcgatttgtcctttgtcgacctcagcttgctgaacagtattatgatatgctgattgaaagaatattggatactggtatcagtgtcaggaaaagagtaataaagattctcagagacatttgtattgaacaaccaacatttccaaaaatcacagaaatgtgtgtaaaaatgattcgcagagtcaatgatgaagagggcattaagaaattagtaaatgaaacattccagaaactctggtttactccaactccacacaatgacaaagaagcaatgacaaggaaaattttaaacattaccgatgtggttgcagcatgcagagatactggatatgactggtttgagcaactgcttcaaaacttgttgaagtccgaagaggattcctcatataaacctgtgaagaaagcttgtactcaacttgttgataacctagttgagcacattcttaaatatgaggaatctctagctgactctgacaataaaggtgtgaattctggaagattggtagcttgcataaccactttgttcttattcagcaaaataagaccccagctcatggttaaacatgcaatgactatgcaaccataccttaccactaaatgtagtacgcaaaatgatttcatggttatctgcaatgttgcaaaaatcctagagctagttgtaccactgatggagcatccaagtgaaacttttcttgccactattgaggaagatctaatgaagctcatcatcaaatatggcatgactgtagtgcaacattgtgtgagctgtcttggagctgttgtaaataaagtgacacaaaattttaaatttgtgtgggcttgtttcaatagatactatggtgccatttcaaaattaaaaagtcaacaccaagaggacccaaataacacttcacttctaacaaacaaaccagcacttcttagatcccttttcaccgttggagcactatgtcggcattttgattttgatctggaagattttaaaggcaacagcaaggttaacataaaagataaagtacttgaactattgatgtattttacaaaacactcagatgaagaagtacaaacaaaagctatcattggtctaggatttgcctttattcagcatccaagtctaatgttcgagcaagaagtgaagaatctatataataatattttatctgataagaactcctcagtcaatttaaaaatacaagtgttaaaaaacctccagacctacctacaagaagaagatacacgtatgcagcaggcagatagagactggaagaaagttgcaaaacaggaagacttaaaagaaatgggtgatgtttcctcagggatgagtagttccatcatgcagctttatctcaaacaggtgcttgaggcattttttcacacccagtcaagtgtacgccactttgccctaaatgtcattgcattgactctaaatcaaggtcttattcatccagttcagtgtgtgccatatttaattgctatgggcacagacccagaacctgctatgcggaacaaggctgatcagcaacttgtggaaatagacaaaaaatatgctggattcattcatatgaaagcagtggctggtatgaagatgtcttaccaggtacaacaggcaatcaacacatgcctaaaagatcctgtaaggggtttcagacaagacgagtcctctagcgctttgtgttcacacctttactccatgatccgtggaaaccgccaacacagacgagcctttcttatttctttactcaacctctttgatgacacagcaaaaacagacgtgactatgctcttgtatatagcagacaatctagcctgttttccataccagacacaggaagagccgttgtttataatgcatcatatagacattacactctcagtttctggtagtaacctactgcagtcattcaaggagtctatggtaaaggacaaaaggaaagagagaaaatcatcacctagtaaggaaaatgagtcaagcgacagtgaagaagaagtttccaggcctcggaagtcacggaaacgtgtagattcagattcagattcagattcagaagacgatataaattcagtgatgaaatgtttgccagaaaattcagctcctttaatcgaatttgcaaatgtgtcccagggtattttattacttctcatgttaaaacaacatttgaagaatctttgtggattttctgatagtaaaattcagaagtactctccatctgaatctgcaaaagtatatgataaagcgataaaccgaaaaacaggagttcattttcatccaaaacaaacactggacttcctgcggagtgacatggctaattccaaaatcacagaagaggtgaaaaggagtatagtaaaacagtatctagatttcaaacttctcatggaacatctggaccctgatgaagaagaagaagaaggggaggtttcagctagcacaaatgctcggaacaaagcaattacctcactgcttggaggaggcagccctaaaaataatacagcagcagagacagaagatgatgaaagtgatggggaggatagaggaggaggcacttcaggggtgaggcggaggaggagtcaacgtatttcgcagcgtattacgtaaaatgatttttatgtgcttatatatgtcagtctattaaatgtacaccaagtaatgtaatacttaaaagagaaaacattttgtagatagagattctctacttacccgtttatacatccttttgtagaaagtttaacataaaagacaataaaaaaacagaaatgagatttatccagcataaagggttaatttttctttgaattgtattaatgtgtgttatttttattgttgctaagttttatgtagctatatggttcatatgtatatataattttatatatcaataagagtaaagacacgggtacaaattaagagttatatggttttacaagtatatgttaaccccttggcgctggcggtcacggtgcgtctcattgccggcaatggaagtgtgccgggaaatcccaactcccggcgtcaagggattaaaagcaataaaaacaataatttcactaaaattcttttgtgtaacacttggtcttttttcccccctcccaatgttttagtcattgagaaggtcaaaacgaaattcagactctacggagttggcagcacagatgaatgaaagtgttgacgtcatggatgtcatcgctatttgctgtccaaagtacaaagatcgaccacaaattgcaagagtagtgcagaaaaccagcagtggcttcagtgttcagtggatggcaggctcctacagtggctcctggactgaggctaagcgccgtgatggccgcaaactggtgccttgggtagacactattaaagagtcagacattatttacaaaaaaattgctctaacgagtgctaataagctgactaataaagttgttcagactttacgatccctgtatgccgccaaggatgggacttccagctaatgaatttgtacatgcagccaaatttacaggaatttttttaaaaggcagaaaaacttgaaataccaccggaactggtcgaatgaggcacctaaaaattgtataccgcagattcaggcatggattccgtgaaggaacaacacctaaacccaagagggcagctgttgcagcatccagttcatcttaagaatgtcaacgattagtcatgcaataaatgttctggttttaaaaaata

SEQ ID NO: 455151 - DNA, 6754 bp, Homo sapiens
agacgcagcaagctaccaccagaaacaaagtcaatacaaatacactcaggcgctgaacaatctcagtagtgggtggtgtagaaatagaacttggtgaattctgcttcacaatgaaaggagagccgaaagacaaagtagaaaaaataggattagttgaagatctaaataaaggagctaagcctgtagttgtgctacaaaaactgtctttggatgatgttcagaaacttattaaagatagagaggacaaatcaagaagttcccttaaacctatcaagaataaaccatcaaagtcaaataaaggtagtatagatcaatcagtgttaaaagaattaccccctgaactcctggcagaaattgagtccaccatgccactttgtgaacgtgtgaaaatgaacaaacgcaagcgtagcacagttaatgaaaagccaaaatatgctgaaatcagttcagatgaagataatgatagtgatgaagcttttgaatcctctaggaaacgacataaaaaagatgatgataaagcttgggaatatgaagagcgtgacagaagaagctctggggatcataggagaagtggccactctcatgaaggaagaaggagttcaggtggtggtcgttatcgaaaccgaagtccgtcagattctgacatggaagattattctcctcctcccagccttagtgaggttgctaggaaaatgaagaaaaaagaaaaacagaagaaaaggaaagcatatgaaccaaaactaacacctgaagaaatgatggactcttcaacttttaagagattcacagcctcaatagagaatattttggataatttggaagatatggattttactgcgtttggtgatgatgatgaaattcctcaggaactgctcttaggaaaacatcagcttaatgaacttggcagtgaatctgctaaaataaaagcaatgggtataatggataagctttcaactgacaaaactgtgaaagtcttaaatatcttggagaagaatattcaggatgggtcaaagctttccactttgttaaatcataataacgatactgaagaagaagaaaggttatggagagaccttattatggagagagttacaaaatcagcggatgcttgtcttacaactatcaacattatgacatcccctaacatgccaaaagctgtgtacattgaggatgtaattgaaagagttatacagtacactaaatttcatttgcagaatacactttatcctcagtatgatcctgtttacagattagatcctcatggaggaggcttattaagttcaaaagcaaaacgggctaaatgttctacccataagcagagagtaatagtaatgctttataacaaagtttgtgacattgttagcagcttatcagaattgctagagatacaacttcttacagacacaacaattcttcaggtttcatctatgggaataacaccattttttgtggaaaatgtcagtgaactacagttgtgtgccattaagttagtcactgcagtattctcaagatatgaaaaacataggcagttaattttggaagaaatttttacttcacttgcaagattaccaaccagcaagaggagtttaaggaacttcaggttaaacagtagtgatatggatggagaacctatgtatattcagatggttacagcactggttttacaacttattcagtgtgtggtacacttaccatcatcagagaaggactctaatgcagaagaagattcaaataaaaaaattgaccaggatgttgtcattactaactcttatgaaacagctatgcgaacagcccaaaacttcctctccatcttccttaaaaaatgtggtagtaagcaaggtgaagaagattacagaccactgtttgaaaattttgttcaagaccttctttcaacagtcaataagcctgaatggccagctgctgaactactccttagtttgttagggagactgttggttcatcagttcagtaacaagtcaacagagatggctttaagagtggcatctcttgattaccttggaactgttgctgcacggctaagaaaagatgctgttacaagcaaaatggatcaaggatctatagaacgcattttaaaacaggtttcaggaggggaagatgaaatccaacaattacaaaaagcattgcttgattacttggatgaaaacactgagactgatccttcactagtgttttctcgtaaattctatatagcccagtggtttcgagacacaactctggaaacagaaaaagcaatgaaatcacaaaaagatgaagaatcatctgaaggaacacatcatgcaaaggaaattgagacaactggccaaattatgcatcgagctgaaaaccgaaaaaagtttcttagaagcattatcaaaaccacaccttctcagtttagcacattaaagatgaactctgatactgtggactatgatgatgcttgcttgattgttcgatacttggcctccatgaggccgtttgcccagagctttgatatttatttgacacagatcctacgagttcttggtgaaaatgcaattgctgttcgaacaaaagccatgaagtgtttgtctgaggttgttgctgtagaccccagtattctagcaaggcttgatatgcaacgaggtgttcatggacgattgatggataattcgactagtgtccgagaagcagcagtagaattactaggtcgatttgtcctttgtcgacctcagcttgctgaacagtattatgatatgctgattgaaagaatattggatactggtatcagtgtcaggaaaagagtaataaagattctcagagacatttgtattgaacaaccaacatttccaaaaatcacagaaatgtgtgtaaaaatgattcgcagagtcaatgatgaagagggcattaagaaattagtaaatgaaacattccagaaactctggtttactccaactccacacaatgacaaagaagcaatgacaaggaaaattttaaacattaccgatgtggttgcagcatgcagagatactggatatgactggtttgagcaactgcttcaaaacttgttgaagtccgaagaggattcctcatataaacctgtgaagaaagcttgtactcaacttgttgataacctagttgagcacattcttaaatatgaggaatctctagctgactctgacaataaaggtgtgaattctggaagattggtagcttgcataaccactttgttcttattcagcaaaataagaccccagctcatggttaaacatgcaatgactatgcaaccataccttaccactaaatgtagtacgcaaaatgatttcatggttatctgcaatgttgcaaaaatcctagagctagttgtaccactgatggagcatccaagtgaaacttttcttgccactattgaggaagatctaatgaagctcatcatcaaatatggcatgactgtagtgcaacattgtgtgagctgtcttggagctgttgtaaataaagtgacacaaaattttaaatttgtgtgggcttgtttcaatagatactatggtgccatttcaaaattaaaaagtcaacaccaagaggacccaaataacacttcacttctaacaaacaaaccagcacttcttagatcccttttcaccgttggagcactatgtcggcattttgattttgatctggaagattttaaaggcaacagcaaggttaacataaaagataaagtacttgaactattgatgtattttacaaaacactcagatgaagaagtacaaacaaaagctatcattggtctaggatttgcctttattcagcatccaagtctaatgttcgagcaagaagtgaagaatctatataataatattttatctgataagaactcctcagtcaatttaaaaatacaagtgttaaaaaacctccagacctacctacaagaagaagatacacgtatgcagcaggcagatagagactggaagaaagttgcaaaacaggaagacttaaaagaaatgggtgatgtttcctcagggatgagtagttccatcatgcagctttatctcaaacaggtgcttgaggcattttttcacacccagtcaagtgtacgccactttgccctaaatgtcattgcattgactctaaatcaaggtcttattcatccagttcagtgtgtgccatatttaattgctatgggcacagacccagaacctgctatgcggaacaaggctgatcagcaacttgtggaaatagacaaaaaatatgctggattcattcatatgaaagcagtggctggtatgaagatgtcttaccaggtacaacaggcaatcaacacatgcctaaaagatcctgtaaggggtttcagacaagacgagtcctctagcgctttgtgttcacacctttactccatgatccgtggaaaccgccaacacagacgagcctttcttatttctttactcaacctctttgatgacacagcaaaaacagacgtgactatgctcttgtatatagcagacaatctagcctgttttccataccagacacaggaagagccgttgtttataatgcatcatatagacattacactctcagtttctggtagtaacctactgcagtcattcaaggagtctatggtaaaggacaaaaggaaagagagaaaatcatcacctagtaaggaaaatgagtcaagcgacagtgaagaagaagtttccaggcctcggaagtcacggaaacgtgtagattcagattcagattcagattcagaagacgatataaattcagtgatgaaatgtttgccagaaaattcagctcctttaatcgaatttgcaaatgtgtcccagggtattttattacttctcatgttaaaacaacatttgaagaatctttgtggattttctgatagtaaaattcagaagtactctccatctgaatctgcaaaagtatatgataaagcgataaaccgaaaaacaggagttcattttcatccaaaacaaacactggacttcctgcggagtgacatggctaattccaaaatcacagaagaggtgaaaaggagtatagtaaaacagtatctagatttcaaacttctcatggaacatctggaccctgatgaagaagaagaagaaggggaggtttcagctagcacaaatgctcggaacaaagcaattacctcactgcttggaggaggcagccctaaaaataatacagcagcagagacagaagatgatgaaagtgatggggaggatagaggaggaggcacttcaggggtgaggcggaggaggagtcaacgtatttcgcagcgtattacgtaaaatgatttttatgtgcttatatatgtcagtctattaaatgtacaccaagtaatgtaatacttaaaagagaaaacattttgtagatagagattctctacttacccgtttatacatccttttgtagaaagtttaacataaaagacaataaaaaaacagaaatgagatttatccagcataaagggttaatttttctttgaattgtattaatgtgtgttatttttattgttgctaagttttatgtagctatatggttcatatgtatatataattttatatatcaataagagtaaagacacgggtacaaattaagagttatatggttttacaagtatatgttaaccccttggcgctggcggtcacggtgcgtctcattgccggcaatggaagtgtgccgggaaatcccaactcccggcgtcaagggattaaaagcaataaaaacaataatttcactaaaattcttttgtgtaacacttggtcttttttcccccctcccaatgttttagtcattgagaaggtcaaaacgaaattcagactctacggagttggcagcacagatgaatgaaagtgttgacgtcatggatgtcatcgctatttgctgtccaaagtacaaagatcgaccacaaattgcaagagtagtgcagaaaaccagcagtggcttcagtgttcagtggatggcaggctcctacagtggctcctggactgaggctaagcgccgtgatggccgcaaactggtgccttgggtagacactattaaagagtcagacattatttacaaaaaaattgctctaacgagtgctaataagctgactaataaagttgttcagactttacgatccctgtatgccgccaaggatgggacttccagctaatgaatttgtacatgcagccaaatttacaggaatttttttaaaaggcagaaaaacttgaaataccaacattctggcaaaaaaaaatcagttttatgaagagtaagtggaacctgggatgcaggaacaaaagaaggaaatgttgggcaaacatttttgtgggagctcccttcgctgttgtgcagcagaaacagattctcagttcatttttactcccactgtattatagtttaacaaaaattgtttatatcttggaaaaaaaactttctgtttaaaaaaaataaacaagtgaatgttggaaattagtctgttaatgttcttaataaagtgttcttggagtttaacctagcagcggatggctttctttagcttagcccagtttccagggaagcattgttttttccaggctgtaaaatggcagaatctcctggatatataatttattctgttgaaaaaaaaaaaagcatgcagtatctatgacctatctgcagaaggagtttttgtaaatgtagattttgatgtattaggtcaccctgaaaacaatacaagaaaagggatccccaggtaatctggtggagcgaatactgcaataaatttttttacttctctttgtta

SEQ ID NO: 455152 - DNA, 8738 bp, Homo sapiens
cagcatcggtatcaagtcccattgttgcaggtggtttgagaaacatacatgataataaagtttctggtccgttgtctggcaattcagctaatcatcatgctgataatcctagacatggttcaagtgaggactacctacacatggtgcacaggctaagtagtgacgatggagattcttcaacaatgaggaatgctgcatcttttcccttgagatctccacagccagtatgctcccctgctggaagtgaaggaactcctaaaggctcaagaccacctttaatcctacaatctcagtctctaccttgttcatcacctcgagatgttccaccagatatcttgctagattctccagaaagaaaacaaaagaagcagaagaaaatgaaattaggcaaggatgaaaaagagcagagtgagaaagcggcaatgtatgatataattagttctccatccaaggactctactaaacttacattaagactttctcgtgtaaggtcttcagacatggaccagcaagaggatatgatttctggtgtggaaaatagcaatgtttcagaaaatgatattccttttaatgtgcagtacccaggacagacttcaaaaacacccattactccacaagatataaaccgcccactaaatgctgctcaatgtttgtcgcagcaagaacaaacagcattccttccagcaaatcaagtgcctgttttacaacagaacacttcagttgctgcaaaacaaccccagacttctgtggtacagaatcaacaacagatatcacaacagggacctatatatgatgaagtggaattggatgcattggctgaaattgagcgaatagagagagaatcagctattgaaagggagcgcttctcaaaagaagttcaagataaagataagcctttgaaaaaaagaaaacaagattcttacccacaggaggctgggggtgctacaggaggtaatagaccagcttctcaggagacgggttctacgggaaatgggtcaaggccagcattaatggttagcattgatcttcatcaggcaggaagagtggactctcaggcttctataactcaggattcagactccataaaaaagcctgaagaaatcaaacaatgtaatgatgcacctgtttctgttcttcaggaagatattgttggaagtcttaaatctacaccagaaaaccatcctgagacacctaaaaaaaagtctgatcctgagctttcaaagagtgaaatgaaacaaagtgaaagtagattagcagaatctaaaccaaatgaaaaccgattggtggagacaaaatcaagtgaaaataagttagaaactaaagttgagacccaaacagaagaacttaaacagaatgagagcagaacaactgaatgcaaacaaaacgagagcaccatagttgagcctaaacaaaatgaaaatagactgtctgacacaaaaccaaatgacaacaaacaaaataatggcagatcagaaacaacaaaatcaaggcctgaaaccccaaagcaaaagggtgaaagccggcctgagactccaaaacaaaagagtgatgggcatcctgaaaccccaaaacagaagggtgatggaaggcctgaaactccaaagcaaaaaggtgagagccgccctgaaactccaaagcaaaaaaatgaagggcgacctgaaacaccaaaacacaggcatgacaataggagggattctggaaagccatctacagagaaaaaacctgaagtgtctaaacataaacaagatactaaatctgactcacctcggttaaaatcagaacgagctgaagccttaaagcagagacctgatgggcgatctgtttctgagtcactaagacgtgaccatgataataaacaaaaatcagatgacaggggtgaatcagagcgacatcgaggggatcagtctagggttcgaagaccagaaacattgagatcctctagtagaaatgaacatggcattaaatctgatagttcaaaaactgataaactagaacgaaaacacaggcatgaatcaggggactcaagggaaagaccatcttctggggaacaaaaatcaagacctgacagtcctcgtgttaaacaaggagattctaataaatcaagatctgataaacttggttttaaatcaccaactagtaaagatgacaaaaggacagagggtaacaagagtaaagtagacactaataaagcacaccctgacaataaggcagaatttccaagttatttgttggggggcaggtctggtgcgttgaaaaattttgtcattccgaaaatcaagagggataaagatggcaatgttactcaggagacaaagaaaatggaaatgaaaggagagccgaaagacaaagtagaaaaaataggattagttgaagatctaaataaaggagctaagcctgtagttgtgctacaaaaactgtctttggatgatgttcagaaacttattaaagatagagaggacaaatcaagaagttcccttaaacctatcaagaataaaccatcaaagtcaaataaaggtagtatagatcaatcagtgttaaaagaattaccccctgaactcctggcagaaattgagtccaccatgccactttgtgaacgtgtgaaaatgaacaaacgcaagcgtagcacagttaatgaaaagccaaaatatgctgaaatcagttcagatgaagataatgatagtgatgaagcttttgaatcctctaggaaacgacataaaaaagatgatgataaagcttgggaatatgaagagcgtgacagaagaagctctggggatcataggagaagtggccactctcatgaaggaagaaggagttcaggtggtggtcgttatcgaaaccgaagtccgtcagattctgacatggaagattattctcctcctcccagccttagtgaggttgctaggaaaatgaagaaaaaagaaaaacagaagaaaaggaaagcatatgaaccaaaactaacacctgaagaaatgatggactcttcaacttttaagagattcacagcctcaatagagaatattttggataatttggaagatatggattttactgcgtttggtgatgatgatgaaattcctcaggaactgctcttaggaaaacatcagcttaatgaacttggcagtgaatctgctaaaataaaagcaatgggtataatggataagctttcaactgacaaaactgtgaaagtcttaaatatcttggagaagaatattcaggatgggtcaaagctttccactttgttaaatcataataacgatactgaagaagaagaaaggttatggagagaccttattatggagagagttacaaaatcagcggatgcttgtcttacaactatcaacattatgacatcccctaacatgccaaaagctgtgtacattgaggatgtaattgaaagagttatacagtacactaaatttcatttgcagaatacactttatcctcagtatgatcctgtttacagattagatcctcatggaggaggcttattaagttcaaaagcaaaacgggctaaatgttctacccataagcagagagtaatagtaatgctttataacaaagtttgtgacattgttagcagcttatcagaattgctagagatacaacttcttacagacacaacaattcttcaggtttcatctatgggaataacaccattttttgtggaaaatgtcagtgaactacagttgtgtgccattaagttagtcactgcagtattctcaagatatgaaaaacataggcagttaattttggaagaaatttttacttcacttgcaagattaccaaccagcaagaggagtttaaggaacttcaggttaaacagtagtgatatggatggagaacctatgtatattcagatggttacagcactggttttacaacttattcagtgtgtggtacacttaccatcatcagagaaggactctaatgcagaagaagattcaaataaaaaaattgaccaggatgttgtcattactaactcttatgaaacagctatgcgaacagcccaaaacttcctctccatcttccttaaaaaatgtggtagtaagcaaggtgaagaagattacagaccactgtttgaaaattttgttcaagaccttctttcaacagtcaataagcctgaatggccagctgctgaactactccttagtttgttagggagactgttggttcatcagttcagtaacaagtcaacagagatggctttaagagtggcatctcttgattaccttggaactgttgctgcacggctaagaaaagatgctgttacaagcaaaatggatcaaggatctatagaacgcattttaaaacaggtttcaggaggggaagatgaaatccaacaattacaaaaagcattgcttgattacttggatgaaaacactgagactgatccttcactagtgttttctcgtaaattctatatagcccagtggtttcgagacacaactctggaaacagaaaaagcaatgaaatcacaaaaagatgaagaatcatctgaaggaacacatcatgcaaaggaaattgagacaactggccaaattatgcatcgagctgaaaaccgaaaaaagtttcttagaagcattatcaaaaccacaccttctcagtttagcacattaaagatgaactctgatactgtggactatgatgatgcttgcttgattgttcgatacttggcctccatgaggccgtttgcccagagctttgatatttatttgacacagatcctacgagttcttggtgaaaatgcaattgctgttcgaacaaaagccatgaagtgtttgtctgaggttgttgctgtagaccccagtattctagcaaggcttgatatgcaacgaggtgttcatggacgattgatggataattcgactagtgtccgagaagcagcagtagaattactaggtcgatttgtcctttgtcgacctcagcttgctgaacagtattatgatatgctgattgaaagaatattggatactggtatcagtgtcaggaaaagagtaataaagattctcagagacatttgtattgaacaaccaacatttccaaaaatcacagaaatgtgtgtaaaaatgattcgcagagtcaatgatgaagagggcattaagaaattagtaaatgaaacattccagaaactctggtttactccaactccacacaatgacaaagaagcaatgacaaggaaaattttaaacattaccgatgtggttgcagcatgcagagatactggatatgactggtttgagcaactgcttcaaaacttgttgaagtccgaagaggattcctcatataaacctgtgaagaaagcttgtactcaacttgttgataacctagttgagcacattcttaaatatgaggaatctctagctgactctgacaataaaggtgtgaattctggaagattggtagcttgcataaccactttgttcttattcagcaaaataagaccccagctcatggttaaacatgcaatgactatgcaaccataccttaccactaaatgtagtacgcaaaatgatttcatggttatctgcaatgttgcaaaaatcctagagctagttgtaccactgatggagcatccaagtgaaacttttcttgccactattgaggaagatctaatgaagctcatcatcaaatatggcatgactgtagtgcaacattgtgtgagctgtcttggagctgttgtaaataaagtgacacaaaattttaaatttgtgtgggcttgtttcaatagatactatggtgccatttcaaaattaaaaagtcaacaccaagaggacccaaataacacttcacttctaacaaacaaaccagcacttcttagatcccttttcaccgttggagcactatgtcggcattttgattttgatctggaagattttaaaggcaacagcaaggttaacataaaagataaagtacttgaactattgatgtattttacaaaacactcagatgaagaagtacaaacaaaagctatcattggtctaggatttgcctttattcagcatccaagtctaatgttcgagcaagaagtgaagaatctatataataatattttatctgataagaactcctcagtcaatttaaaaatacaagtgttaaaaaacctccagacctacctacaagaagaagatacacgtatgcagcaggcagatagagactggaagaaagttgcaaaacaggaagacttaaaagaaatgggtgatgtttcctcagggatgagtagttccatcatgcagctttatctcaaacaggtgcttgaggcattttttcacacccagtcaagtgtacgccactttgccctaaatgtcattgcattgactctaaatcaaggtcttattcatccagttcagtgtgtgccatatttaattgctatgggcacagacccagaacctgctatgcggaacaaggctgatcagcaacttgtggaaatagacaaaaaatatgctggattcattcatatgaaagcagtggctggtatgaagatgtcttaccaggtacaacaggcaatcaacacatgcctaaaagatcctgtaaggggtttcagacaagacgagtcctctagcgctttgtgttcacacctttactccatgatccgtggaaaccgccaacacagacgagcctttcttatttctttactcaacctctttgatgacacagcaaaaacagacgtgactatgctcttgtatatagcagacaatctagcctgttttccataccagacacaggaagagccgttgtttataatgcatcatatagacattacactctcagtttctggtagtaacctactgcagtcattcaaggagtctatggtaaaggacaaaaggaaagagagaaaatcatcacctagtaaggaaaatgagtcaagcgacagtgaagaagaagtttccaggcctcggaagtcacggaaacgtgtagattcagattcagattcagattcagaagacgatataaattcagtgatgaaatgtttgccagaaaattcagctcctttaatcgaatttgcaaatgtgtcccagggtattttattacttctcatgttaaaacaacatttgaagaatctttgtggattttctgatagtaaaattcagaagtactctccatctgaatctgcaaaagtatatgataaagcgataaaccgaaaaacaggagttcattttcatccaaaacaaacactggacttcctgcggagtgacatggctaattccaaaatcacagaagaggtgaaaaggagtatagtaaaacagtatctagatttcaaacttctcatggaacatctggaccctgatgaagaagaagaagaaggggaggtttcagctagcacaaatgctcggaacaaagcaattacctcactgcttggaggaggcagccctaaaaataatacagcagcagagacagaagatgatgaaagtgatggggaggatagaggaggaggcacttcagggtcattgagaaggtcaaaacgaaattcagactctacggagttggcagcacagatgaatgaaagtgttgacgtcatggatgtcatcgctatttgctgtccaaagtacaaagatcgaccacaaattgcaagagtagtgcagaaaaccagcagtggcttcagtgttcagtggatggcaggctcctacagtggctcctggactgaggctaagcgccgtgatggccgcaaactggtgccttgggtagacactattaaagagtcagacattatttacaaaaaaattgctctaacgagtgctaataagctgactaataaagttgttcagactttacgatccctgtatgccgccaaggatgggacttccagctaatgaatttgtacatgcagccaaatttacaggaatttttttaaaaggcagaaaaacttgaaataccaacattctggcaaaaaaaaatcagttttatgaagagtaagtggaacctgggatgcaggaacaaaagaaggaaatgttgggcaaacatttttgtgggagctcccttcgctgttgtgcagcagaaacagattctcagttcatttttactcccactgtattatagtttaacaaaaattgtttatatcttggaaaaaaaactttctgtttaaaaaaaataaacaagtgaatgttggaaattagtctgttaatgttcttaataaagtgttcttggagtttaacctagcagcggatggctttctttagcttagcccagtttccagggaagcattgttttttccaggctgtaaaatggcagaatctcctggatatataatttattctgttgaaaaaaaaaaaagcatgcagtatctatgacctatctgcagaaggagtttttgtaaatgtagattttgatgtattaggtcaccctgaaaacaatacaagaaaagggatccccaggtaatctggtggagcgaatactgcaataaatttttttacttctctttgttacttgtctgtttccatttgaatttcttattgtaaaaatctgtttaaatccatttatattattttacagtcttttatgtaaaatttattatatcactggttttcaaagcaaaacataaaatattgtttatacagtttgtataggctgacttctgaataattggtatctattattttcattcccataagagggtgtaaacaattaactccagggttttattgtatcctgcaatatttagtattaactatatatgatttagcactgtgccaaacacattttcaagagtacattttgatataaaaagaaactattgtttattc

SEQ ID NO: 455153 - DNA, 8461 bp, Homo sapiens
cagcatcggtatcaagtcccattgttgcaggtggtttgagaaacatacatgataataaagtttctggtccgttgtctggcaattcagctaatcatcatgctgataatcctagacatggttcaagtgaggactacctacacatggtgcacaggctaagtagtgacgatggagattcttcaacaatgaggaatgctgcatcttttcccttgagatctccacagccagtatgctcccctgctggaagtgaaggaactcctaaaggctcaagaccacctttaatcctacaatctcagtctctaccttgttcatcacctcgagatgttccaccagatatcttgctagattctccagaaagaaaacaaaagaagcagaagaaaatgaaattaggcaaggatgaaaaagagcagagtgagaaagcggcaatgtatgatataattagttctccatccaaggactctactaaacttacattaagactttctcgtgtaaggtcttcagacatggaccagcaagaggatatgatttctggtgtggaaaatagcaatgtttcagaaaatgatattccttttaatgtgcagtacccaggacagacttcaaaaacacccattactccacaagatataaaccgcccactaaatgctgctcaatgtttgtcgcagcaagaacaaacagcattccttccagcaaatcaagtgcctgttttacaacagaacacttcagttgctgcaaaacaaccccagacttctgtggtacagaatcaacaacagatatcacaacagggacctatatatgatgaagtggaattggatgcattggctgaaattgagcgaatagagagagaatcagctattgaaagggagcgcttctcaaaagaagttcaagataaagataagcctttgaaaaaaagaaaacaagattcttacccacaggaggctgggggtgctacaggaggtaatagaccagcttctcaggagacgggttctacgggaaatgggtcaaggccagcattaatggttagcattgatcttcatcaggcaggaagagtggactctcaggcttctataactcaggattcagactccataaaaaagcctgaagaaatcaaacaatgtaatgatgcacctgtttctgttcttcaggaagatattgttggaagtcttaaatctacaccagaaaaccatcctgagacacctaaaaaaaagtctgatcctgagctttcaaagagtgaaatgaaacaaagtgaaagtagattagcagaatctaaaccaaatgaaaaccgattggtggagacaaaatcaagtgaaaataagttagaaactaaagttgagacccaaacagaagaacttaaacagaatgagagcagaacaactgaatgcaaacaaaacgagagcaccatagttgagcctaaacaaaatgaaaatagactgtctgacacaaaaccaaatgacaacaaacaaaataatggcagatcagaaacaacaaaatcaaggcctgaaaccccaaagcaaaagggtgaaagccggcctgagactccaaaacaaaagagtgatgggcatcctgaaaccccaaaacagaagggtgatggaaggcctgaaactccaaagcaaaaaggtgagagccgccctgaaactccaaagcaaaaaaatgaagggcgacctgaaacaccaaaacacaggcatgacaataggagggattctggaaagccatctacagagaaaaaacctgaagtgtctaaacataaacaagatactaaatctgactcacctcggttaaaatcagaacgagctgaagccttaaagcagagacctgatgggcgatctgtttctgagtcactaagacgtgaccatgataataaacaaaaatcagatgacaggggtgaatcagagcgacatcgaggggatcagtctagggttcgaagaccagaaacattgagatcctctagtagaaatgaacatggcattaaatctgatagttcaaaaactgataaactagaacgaaaacacaggcatgaatcaggggactcaagggaaagaccatcttctggggaacaaaaatcaagacctgacagtcctcgtgttaaacaaggagattctaataaatcaagatctgataaacttggttttaaatcaccaactagtaaagatgacaaaaggacagagggtaacaagagtaaagtagacactaataaagcacaccctgacaataaggcagaatttccaagttatttgttggggggcaggtctggtgcgttgaaaaattttgtcattccgaaaatcaagagggataaagatggcaatgttactcaggagacaaagaaaatggaaatgaaaggagagccgaaagacaaagtagaaaaaataggattagttgaagatctaaataaaggagctaagcctgtagttgtgctacaaaaactgtctttggatgatgttcagaaacttattaaagatagagaggacaaatcaagaagttcccttaaacctatcaagaataaaccatcaaagtcaaataaaggtagtatagatcaatcagtgttaaaagaattaccccctgaactcctggcagaaattgagtccaccatgccactttgtgaacgtgtgaaaatgaacaaacgcaagcgtagcacagttaatgaaaagccaaaatatgctgaaatcagttcagatgaagataatgatagtgatgaagcttttgaatcctctaggaaacgacataaaaaagatgatgataaagcttgggaatatgaagagcgtgacagaagaagctctggggatcataggagaagtggccactctcatgaaggaagaaggagttcaggtggtggtcgttatcgaaaccgaagtccgtcagattctgacatggaagattattctcctcctcccagccttagtgaggttgctaggaaaatgaagaaaaaagaaaaacagaagaaaaggaaagcatatgaaccaaaactaacacctgaagaaatgatggactcttcaacttttaagagattcacagcctcaatagagaatattttggataatttggaagatatggattttactgcgtttggtgatgatgatgaaattcctcaggaactgctcttaggaaaacatcagcttaatgaacttggcagtgaatctgctaaaataaaagcaatgggtataatggataagctttcaactgacaaaactgtgaaagtcttaaatatcttggagaagaatattcaggatgggtcaaagctttccactttgttaaatcataataacgatactgaagaagaagaaaggttatggagagaccttattatggagagagttacaaaatcagcggatgcttgtcttacaactatcaacattatgacatcccctaacatgccaaaagctgtgtacattgaggatgtaattgaaagagttatacagtacactaaatttcatttgcagaatacactttatcctcagtatgatcctgtttacagattagatcctcatggaggaggcttattaagttcaaaagcaaaacgggctaaatgttctacccataagcagagagtaatagtaatgctttataacaaagtttgtgacattgttagcagcttatcagaattgctagagatacaacttcttacagacacaacaattcttcaggtttcatctatgggaataacaccattttttgtggaaaatgtcagtgaactacagttgtgtgccattaagttagtcactgcagtattctcaagatatgaaaaacataggcagttaattttggaagaaatttttacttcacttgcaagattaccaaccagcaagaggagtttaaggaacttcaggttaaacagtagtgatatggatggagaacctatgtatattcagatggttacagcactggttttacaacttattcagtgtgtggtacacttaccatcatcagagaaggactctaatgcagaagaagattcaaataaaaaaattgaccaggatgttgtcattactaactcttatgaaacagctatgcgaacagcccaaaacttcctctccatcttccttaaaaaatgtggtagtaagcaaggtgaagaagattacagaccactgtttgaaaattttgttcaagaccttctttcaacagtcaataagcctgaatggccagctgctgaactactccttagtttgttagggagactgttggttcatcagttcagtaacaagtcaacagagatggctttaagagtggcatctcttgattaccttggaactgttgctgcacggctaagaaaagatgctgttacaagcaaaatggatcaaggatctatagaacgcattttaaaacaggtttcaggaggggaagatgaaatccaacaattacaaaaagcattgcttgattacttggatgaaaacactgagactgatccttcactagtgttttctcgtaaattctatatagcccagtggtttcgagacacaactctggaaacagaaaaagcaatgaaatcacaaaaagatgaagaatcatctgaaggaacacatcatgcaaaggaaattgagacaactggccaaattatgcatcgagctgaaaaccgaaaaaagtttcttagaagcattatcaaaaccacaccttctcagtttagcacattaaagatgaactctgatactgtggactatgatgatgcttgcttgattgttcgatacttggcctccatgaggccgtttgcccagagctttgatatttatttgacacagatcctacgagttcttggtgaaaatgcaattgctgttcgaacaaaagccatgaagtgtttgtctgaggttgttgctgtagaccccagtattctagcaaggcttgatatgcaacgaggtgttcatggacgattgatggataattcgactagtgtccgagaagcagcagtagaattactaggtcgatttgtcctttgtcgacctcagcttgctgaacagtattatgatatgctgattgaaagaatattggatactggtatcagtgtcaggaaaagagtaataaagattctcagagacatttgtattgaacaaccaacatttccaaaaatcacagaaatgtgtgtaaaaatgattcgcagagtcaatgatgaagagggcattaagaaattagtaaatgaaacattccagaaactctggtttactccaactccacacaatgacaaagaagcaatgacaaggaaaattttaaacattaccgatgtggttgcagcatgcagagatactggatatgactggtttgagcaactgcttcaaaacttgttgaagtccgaagaggattcctcatataaacctgtgaagaaagcttgtactcaacttgttgataacctagttgagcacattcttaaatatgaggaatctctagctgactctgacaataaaggtgtgaattctggaagattggtagcttgcataaccactttgttcttattcagcaaaataagaccccagctcatggttaaacatgcaatgactatgcaaccataccttaccactaaatgtagtacgcaaaatgatttcatggttatctgcaatgttgcaaaaatcctagagctagttgtaccactgatggagcatccaagtgaaacttttcttgccactattgaggaagatctaatgaagctcatcatcaaatatggcatgactgtagtgcaacattgtgtgagctgtcttggagctgttgtaaataaagtgacacaaaattttaaatttgtgtgggcttgtttcaatagatactatggtgccatttcaaaattaaaaagtcaacaccaagaggacccaaataacacttcacttctaacaaacaaaccagcacttcttagatcccttttcaccgttggagcactatgtcggcattttgattttgatctggaagattttaaaggcaacagcaaggttaacataaaagataaagtacttgaactattgatgtattttacaaaacactcagatgaagaagtacaaacaaaagctatcattggtctaggatttgcctttattcagcatccaagtctaatgttcgagcaagaagtgaagaatctatataataatattttatctgataagaactcctcagtcaatttaaaaatacaagtgttaaaaaacctccagacctacctacaagaagaagatacacgtatgcagcaggcagatagagactggaagaaagttgcaaaacaggaagacttaaaagaaatgggtgatgtttcctcagggatgagtagttccatcatgcagctttatctcaaacaggtgcttgaggcattttttcacacccagtcaagtgtacgccactttgccctaaatgtcattgcattgactctaaatcaaggtcttattcatccagttcagtgtgtgccatatttaattgctatgggcacagacccagaacctgctatgcggaacaaggctgatcagcaacttgtggaaatagacaaaaaatatgctggattcattcatatgaaagcagtggctggtatgaagatgtcttaccaggtacaacaggcaatcaacacatgcctaaaagatcctgtaaggggtttcagacaagacgagtcctctagcgctttgtgttcacacctttactccatgatccgtggaaaccgccaacacagacgagcctttcttatttctttactcaacctctttgatgacacagcaaaaacagacgtgactatgctcttgtatatagcagacaatctagcctgttttccataccagacacaggaagagccgttgtttataatgcatcatatagacattacactctcagtttctggtagtaacctactgcagtcattcaaggagtctatggtaaaggacaaaaggaaagagagaaaatcatcacctagtaaggaaaatgagtcaagcgacagtgaagaagaagtttccaggcctcggaagtcacggaaacgtgtagattcagattcagattcagattcagaagacgatataaattcagtgatgaaatgtttgccagaaaattcagctcctttaatcgaatttgcaaatgtgtcccagggtattttattacttctcatgttaaaacaacatttgaagaatctttgtggattttctgatagtaaaattcagaagtactctccatctgaatctgcaaaagtatatgataaagcgataaaccgaaaaacaggagttcattttcatccaaaacaaacactggacttcctgcggagtgacatggctaattccaaaatcacagaagaggtgaaaaggagtatagtaaaacagtatctagatttcaaacttctcatggaacatctggaccctgatgaagaagaagaagaaggggaggtttcagctagcacaaatgctcggaacaaagcaattacctcactgcttggaggaggcagccctaaaaataatacagcagcagagacagaagatgatgaaagtgatggggaggatagaggaggaggcacttcaggggtgaggcggaggaggagtcaacgtatttcgcagcgtattactcattgagaaggtcaaaacgaaattcagactctacggagttggcagcacagatgaatgaaagtgttgacgtcatggatgtcatcgctatttgctgtccaaagtacaaagatcgaccacaaattgcaagagtagtgcagaaaaccagcagtggcttcagtgttcagtggatggcaggctcctacagtggctcctggactgaggctaagcgccgtgatggccgcaaactggtgccttgggtagacactattaaagagtcagacattatttacaaaaaaattgctctaacgagtgctaataagctgactaataaagttgttcagactttacgatccctgtatgccgccaaggatgggacttccagctaatgaatttgtacatgcagccaaatttacaggaatttttttaaaaggcagaaaaacttgaaataccaacattctggcaaaaaaaaatcagttttatgaagagtaagtggaacctgggatgcaggaacaaaagaaggaaatgttgggcaaacatttttgtgggagctcccttcgctgttgtgcagcagaaacagattctcagttcatttttactcccactgtattatagtttaacaaaaattgtttatatcttggaaaaaaaactttctgtttaaaaaaaataaacaagtgaatgttggaaattagtctgttaatgttcttaataaagtgttcttggagtttaacctagcagcggatggctttctttagcttagcccagtttccagggaagcattgttttttccaggctgtaaaatggcagaatctcctggatatataatttattctgttgaaaaaaaaaaaagcatgcagtatctatgacctatctgcagaaggagtttttgtaaatgtagattttgatgtattaggtcaccctgaaaacaatacaagaaaagggatccccaggtaatctggtggagcgaatactgcaataaatttttttacttctctttgtta

SEQ ID NO: 455154 - DNA, 7219 bp, Homo sapiens
cagcatcggtatcaagtcccattgttgcaggtggtttgagaaacatacatgataataaagtttctggtccgttgtctggcaattcagctaatcatcatgctgataatcctagacatggttcaagtgaggactacctacacatggtgcacaggctaagtagtgacgatggagattcttcaacaatgaggaatgctgcatcttttcccttgagatctccacagccagtatgctcccctgctggaagtgaaggaactcctaaaggctcaagaccacctttaatcctacaatctcagtctctaccttgttcatcacctcgagatgttccaccagatatcttgctagattctccagaaagaaaacaaaagaagcagaagaaaatgaaattaggcaaggatgaaaaagagcagagtgagaaagcggcaatgtatgatataattagttctccatccaaggactctactaaacttacattaagactttctcgtgtaaggtcttcagacatggaccagcaagaggatatgatttctggtgtggaaaatagcaatgtttcagaaaatgatattccttttaatgtgcagtacccaggacagacttcaaaaacacccattactccacaagatataaaccgcccactaaatgctgctcaatgtttgtcgcagcaagaacaaacagcattccttccagcaaatcaagtgcctgttttacaacagaacacttcagttgctgcaaaacaaccccagacttctgtggtacagaatcaacaacagatatcacaacagggacctatatatgatgaagtggaattggatgcattggctgaaattgagcgaatagagagagaatcagctattgaaagggagcgcttctcaaaagaagttcaagataaagataagcctttgaaaaaaagaaaacaagattcttacccacaggaggctgggggtgctacaggaggtaatagaccagcttctcaggagacgggttctacgggaaatgggtcaaggccagcattaatggttagcattgatcttcatcaggcaggaagagtggactctcaggcttctataactcaggattcagactccataaaaaagcctgaagaaatcaaacaatgtaatgatgcacctgtttctgttcttcaggaagatattgttggaagtcttaaatctacaccagaaaaccatcctgagacacctaaaaaaaagtctgatcctgagctttcaaagagtgaaatgaaacaaagtgaaagtagattagcagaatctaaaccaaatgaaaaccgattggtggagacaaaatcaagtgaaaataagttagaaactaaagttgagacccaaacagaagaacttaaacagaatgagagcagaacaactgaatgcaaacaaaacgagagcaccatagttgagcctaaacaaaatgaaaatagactgtctgacacaaaaccaaatgacaacaaacaaaataatggcagatcagaaacaacaaaatcaaggcctgaaaccccaaagcaaaagggtgaaagccggcctgagactccaaaacaaaagagtgatgggcatcctgaaaccccaaaacagaagggtgatggaaggcctgaaactccaaagcaaaaaggtgagagccgccctgaaactccaaagcaaaaaaatgaagggcgacctgaaacaccaaaacacaggcatgacaataggagggattctggaaagccatctacagagaaaaaacctgaagtgtctaaacataaacaagatactaaatctgactcacctcggttaaaatcagaacgagctgaagccttaaagcagagacctgatgggcgatctgtttctgagtcactaagacgtgaccatgataataaacaaaaatcagatgacaggggtgaatcagagcgacatcgaggggatcagtctagggttcgaagaccagaaacattgagatcctctagtagaaatgaacatggcattaaatctgatagttcaaaaactgataaactagaacgaaaacacaggcatgaatcaggggactcaagggaaagaccatcttctggggaacaaaaatcaagacctgacagtcctcgtgttaaacaaggagattctaataaatcaagatctgataaacttggttttaaatcaccaactagtaaagatgacaaaaggacagagggtaacaagagtaaagtagacactaataaagcacaccctgacaataaggcagaatttccaagttatttgttggggggcaggtctggtgcgttgaaaaattttgtcattccgaaaatcaagagggataaagatggcaatgttactcaggagacaaagaaaatggaaatgaaaggagagccgaaagacaaagtagaaaaaataggattagttgaagatctaaataaaggagctaagcctgtagttgtgctacaaaaactgtctttggatgatgttcagaaacttattaaagatagagaggacaaatcaagaagttcccttaaacctatcaagaataaaccatcaaagtcaaataaaggtagtatagatcaatcagtgttaaaagaattaccccctgaactcctggcagaaattgagtccaccatgccactttgtgaacgtgtgaaaatgaacaaacgcaagcgtagcacagttaatgaaaagccaaaatatgctgaaatcagttcagatgaagataatgatagtgatgaagcttttgaatcctctaggaaacgacataaaaaagatgatgataaagcttgggaatatgaagagcgtgacagaagaagctctggggatcataggagaagtggccactctcatgaaggaagaaggagttcaggtggtggtcgttatcgaaaccgaagtccgtcagattctgacatggaagattattctcctcctcccagccttagtgaggttgctaggaaaatgaagaaaaaagaaaaacagaagaaaaggaaagcatatgaaccaaaactaacacctgaagaaatgatggactcttcaacttttaagagattcacagcctcaatagagaatattttggataatttggaagatatggattttactgcgtttggtgatgatgatgaaattcctcaggaactgctcttaggaaaacatcagcttaatgaacttggcagtgaatctgctaaaataaaagcaatgggtataatggataagctttcaactgacaaaactgtgaaagtcttaaatatcttggagaagaatattcaggatgggtcaaagctttccactttgttaaatcataataacgatactgaagaagaagaaaggttatggagagaccttattatggagagagttacaaaatcagcggatgcttgtcttacaactatcaacattatgacatcccctaacatgccaaaagctgtgtacattgaggatgtaattgaaagagttatacagtacactaaatttcatttgcagaatacactttatcctcagtatgatcctgtttacagattagatcctcatggaggaggcttattaagttcaaaagcaaaacgggctaaatgttctacccataagcagagagtaatagtaatgctttataacaaagtttgtgacattgttagcagcttatcagaattgctagagatacaacttcttacagacacaacaattcttcaggtttcatctatgggaataacaccattttttgtggaaaatgtcagtgaactacagttgtgtgccattaagttagtcactgcagtattctcaagatatgaaaaacataggcagttaattttggaagaaatttttacttcacttgcaagattaccaaccagcaagaggagtttaaggaacttcaggttaaacagtagtgatatggatggagaacctatgtatattcagatggttacagcactggttttacaacttattcagtgtgtggtacacttaccatcatcagagaaggactctaatgcagaagaagattcaaataaaaaaattgaccaggatgttgtcattactaactcttatgaaacagctatgcgaacagcccaaaacttcctctccatcttccttaaaaaatgtggtagtaagcaaggtgaagaagattacagaccactgtttgaaaattttgttcaagaccttctttcaacagtcaataagcctgaatggccagctgctgaactactccttagtttgttagggagactgttggttcatcagttcagtaacaagtcaacagagatggctttaagagtggcatctcttgattaccttggaactgttgctgcacggctaagaaaagatgctgttacaagcaaaatggatcaaggatctatagaacgcattttaaaacaggtttcaggaggggaagatgaaatccaacaattacaaaaagcattgcttgattacttggatgaaaacactgagactgatccttcactagtgttttctcgtaaattctatatagcccagtggtttcgagacacaactctggaaacagaaaaagcaatgaaatcacaaaaagatgaagaatcatctgaaggaacacatcatgcaaaggaaattgagacaactggccaaattatgcatcgagctgaaaaccgaaaaaagtttcttagaagcattatcaaaaccacaccttctcagtttagcacattaaagatgaactctgatactgtggactatgatgatgcttgcttgattgttcgatacttggcctccatgaggccgtttgcccagagctttgatatttatttgacacagatcctacgagttcttggtgaaaatgcaattgctgttcgaacaaaagccatgaagtgtttgtctgaggttgttgctgtagaccccagtattctagcaaggcttgatatgcaacgaggtgttcatggacgattgatggataattcgactagtgtccgagaagcagcagtagaattactaggtcgatttgtcctttgtcgacctcagcttgctgaacagtattatgatatgctgattgaaagaatattggatactggtatcagtgtcaggaaaagagtaataaagattctcagagacatttgtattgaacaaccaacatttccaaaaatcacagaaatgtgtgtaaaaatgattcgcagagtcaatgatgaagagggcattaagaaattagtaaatgaaacattccagaaactctggtttactccaactccacacaatgacaaagaagcaatgacaaggaaaattttaaacattaccgatgtggttgcagcatgcagagatactggatatgactggtttgagcaactgcttcaaaacttgttgaagtccgaagaggattcctcatataaacctgtgaagaaagcttgtactcaacttgttgataacctagttgagcacattcttaaatatgaggaatctctagctgactctgacaataaaggtgtgaattctggaagattggtagcttgcataaccactttgttcttattcagcaaaataagaccccagctcatggttaaacatgcaatgactatgcaaccataccttaccactaaatgtagtacgcaaaatgatttcatggttatctgcaatgttgcaaaaatcctagagctagttgtaccactgatggagcatccaagtgaaacttttcttgccactattgaggaagatctaatgaagctcatcatcaaatatggcatgactgtagtgcaacattgtgtgagctgtcttggagctgttgtaaataaagtgacacaaaattttaaatttgtgtgggcttgtttcaatagatactatggtgccatttcaaaattaaaaagtcaacaccaagaggacccaaataacacttcacttctaacaaacaaaccagcacttcttagatcccttttcaccgttggagcactatgtcggcattttgattttgatctggaagattttaaaggcaacagcaaggttaacataaaagataaagtacttgaactattgatgtattttacaaaacactcagatgaagaagtacaaacaaaagctatcattggtctaggatttgcctttattcagcatccaagtctaatgttcgagcaagaagtgaagaatctatataataatattttatctgataagaactcctcagtcaatttaaaaatacaagtgttaaaaaacctccagacctacctacaagaagaagatacacgtatgcagcaggcagatagagactggaagaaagttgcaaaacaggaagacttaaaagaaatgggtgatgtttcctcagggatgagtagttccatcatgcagctttatctcaaacaggtgcttgaggcattttttcacacccagtcaagtgtacgccactttgccctaaatgtcattgcattgactctaaatcaaggtcttattcatccagttcagtgtgtgccatatttaattgctatgggcacagacccagaacctgctatgcggaacaaggctgatcagcaacttgtggaaatagacaaaaaatatgctggattcattcatatgaaagcagtggctggtatgaagatgtcttaccaggtacaacaggcaatcaacacatgcctaaaagatcctgtaaggggtttcagacaagacgagtcctctagcgctttgtgttcacacctttactccatgatccgtggaaaccgccaacacagacgagcctttcttatttctttactcaacctctttgatgacacagcagtaagcacaaaaacttattattttaagaaaataagtgctctagaaattttatggataaagtagtcattttttaaatattaccattttattagtatatgatagtaacttcattaagtgttttcttaatcttctaagttatttacaaagtacacagtcagaagtgaaggggaaattttgtatgagaataagtgtaatgaggaataatgtataattttgcctccatactgaatatcctataaactttgataacagtttctgtaagcgtatctttaaataagcaacatcactaaactaatcgctttgggaaccgattacctcaaatattgttagagaataactgttctaggtttttggctattgagatccctagttgttcaacttgatttcccttaatgaagggaagtcacttttctgtatagtagtccacttttgtgtatagtagtcctcccttatcattaaagatacatttcatgacccccagtggatgcatgaaaccatggatagtactaattattatatatacagtcatgcatcacttaatgacagggatacatttggagaaa

SEQ ID NO: 455155 - DNA, 3782 bp, Homo sapiens
cagcatcggtatcaagtcccattgttgcaggtggtttgagaaacatacatgataataaagtttctggtccgttgtctggcaattcagctaatcatcatgctgataatcctagacatggttcaagtgaggactacctacacatggtgcacaggctaagtagtgacgatggagattcttcaacaatgaggaatgctgcatcttttcccttgagatctccacagccagtatgctcccctgctggaagtgaaggaactcctaaaggctcaagaccacctttaatcctacaatctcagtctctaccttgttcatcacctcgagatgttccaccagatatcttgctagattctccagaaagaaaacaaaagaagcagaagaaaatgaaattaggcaaggatgaaaaagagcagagtgagaaagcggcaatgtatgatataattagttctccatccaaggactctactaaacttacattaagactttctcgtgtaaggtcttcagacatggaccagcaagaggatatgatttctggtgtggaaaatagcaatgtttcagaaaatgatattccttttaatgtgcagtacccaggacagacttcaaaaacacccattactccacaagatataaaccgcccactaaatgctgctcaatgtttgtcgcagcaagaacaaacagcattccttccagcaaatcaagtgcctgttttacaacagaacacttcagttgctgcaaaacaaccccagacttctgtggtacagaatcaacaacagatatcacaacagggacctatatatgatgaagtggaattggatgcattggctgaaattgagcgaatagagagagaatcagctattgaaagggagcgcttctcaaaagaagttcaagataaagataagcctttgaaaaaaagaaaacaagattcttacccacaggaggctgggggtgctacaggaggtaatagaccagcttctcaggagacgggttctacgggaaatgggtcaaggccagcattaatggttagcattgatcttcatcaggcaggaagagtggactctcaggcttctataactcaggattcagactccataaaaaagcctgaagaaatcaaacaatgtaatgatgcacctgtttctgttcttcaggaagatattgttggaagtcttaaatctacaccagaaaaccatcctgagacacctaaaaaaaagtctgatcctgagctttcaaagagtgaaatgaaacaaagtgaaagtagattagcagaatctaaaccaaatgaaaaccgattggtggagacaaaatcaagtgaaaataagttagaaactaaagttgagacccaaacagaagaacttaaacagaatgagagcagaacaactgaatgcaaacaaaacgagagcaccatagttgagcctaaacaaaatgaaaatagactgtctgacacaaaaccaaatgacaacaaacaaaataatggcagatcagaaacaacaaaatcaaggcctgaaaccccaaagcaaaagggtgaaagccggcctgagactccaaaacaaaagagtgatgggcatcctgaaaccccaaaacagaagggtgatggaaggcctgaaactccaaagcaaaaaggtgagagccgccctgaaactccaaagcaaaaaaatgaagggcgacctgaaacaccaaaacacaggcatgacaataggagggattctggaaagccatctacagagaaaaaacctgaagtgtctaaacataaacaagatactaaatctgactcacctcggttaaaatcagaacgagctgaagccttaaagcagagacctgatgggcgatctgtttctgagtcactaagacgtgaccatgataataaacaaaaatcagatgacaggggtgaatcagagcgacatcgaggggatcagtctagggttcgaagaccagaaacattgagatcctctagtagaaatgaacatggcattaaatctgatagttcaaaaactgataaactagaacgaaaacacaggcatgaatcaggggactcaagggaaagaccatcttctggggaacaaaaatcaagacctgacagtcctcgtgttaaacaaggagattctaataaatcaagatctgataaacttggttttaaatcaccaactagtaaagatgacaaaaggacagagggtaacaagagtaaagtagacactaataaagcacaccctgacaataaggcagaatttccaagttatttgttggggggcaggtctggtgcgttgaaaaattttgtcattccgaaaatcaagagggataaagatggcaatgttactcaggagacaaagaaaatggaaatgaaaggagagccgaaagacaaagtagaaaaaataggattagttgaagatctaaataaaggagctaagcctgtagttgtgctacaaaaactgtctttggatgatgttcagaaacttattaaagatagagaggacaaatcaagaagttcccttaaacctatcaagaataaaccatcaaagtcaaataaaggtagtatagatcaatcagtgttaaaagaattaccccctgaactcctggcagaaattgagtccaccatgccactttgtgaacgtgtgaaaatgaacaaacgcaagcgtagcacagttaatgaaaagccaaaatatgctgaaatcagttcagatgaagataatgatagtgatgaagcttttgaatcctctaggaaacgacataaaaaagatgatgataaagcttgggaatatgaagagcgtgacagaagaagctctggggatcataggagaagtggccactctcatgaaggaagaaggagttcaggtggtggtcgttatcgaaaccgaagtccgtcagattctgacatggaagattattctcctcctcccagccttagtgaggttgctaggaaaatgaagaaaaaagaaaaacagaagaaaaggaaagcatatgaaccaaaactaacacctgaagaaatgatggactcttcaacttttaagagattcacagcctcaatagagaatattttggataatttggaagatatggattttactgcgtttggtgatgatgatgaaattcctcaggaactgctcttaggaaaacatcagcttaatgaacttggcagtgaatctgctaaaataaaagcaatgggtataatggataagctttcaactgacaaaactgtgaaagtcttaaatatcttggagaagaatattcaggatgggtcaaagctttccactttgttaaatcataataacgatactgaagaagaagaaaggttatggagagaccttattatggagagagttacaaaatcagcggatgcttgtcttacaactatcaacattatgacatcccctaacatgccaaaagctgtgtacattgaggatgtaattgaaagagttatacagtacactaaatttcatttgcagaatacactttatcctcagtatgatcctgtttacagattagatcctcatggaggaggcttattaagttcaaaagcaaaacgggctaaatgttctacccataagcagagagtaatagtaatgctttataacaaagtttgtgacattgttagcagcttatcagaattgctagagatacaacttcttacagacacaacaattcttcaggtttcatctatgggaataacaccattttttgtggaaaatgtcagtgaactacagttgtgtgccattaagttagtcactgcagtattctcaagatatgaaacctgaagaattgttgtgtctgtaaaaagttgtatctctagcaattctgat

SEQ ID NO: 455156 - DNA, 664 bp, Homo sapiens
atcaagcgagttggttagcgaagggattcggtgcagatggatggaccgtctgggctgcggagtccacgggcctgaaacgcggtcgctcctgacccgtcctccgcaaccctcgtcccaccaggccgcggtccccggagcaggccggcgggtggcaggaagacaccaggctgcagggggctggagaagcaacacccctctccctccccgccagagaactggagcgcggggacctcggttgcggatgctggcggcgagccgggttgctaggcgacatcgagagaggaagaggagaaagtcttcatggggtgctagagcatcttaaatgtccctctcatgcagggacatttccctgctgaacgaagagaaggcagacctcggcgagggacccgtggtcagcagcagcttctgaggactcatcccttagaaaggatgataaggtgcaaggcgtggtggctcacgcctgtaatcccagcactttgggaggccgaaatgggaggatcgcttgatcccaggagtccaagaccagcctgggcaacaaagtgagacttcatctcaaaaaaataaaaataaaaatacaaaagttagcagggcgtggtggcacgcacctgtaatcccagctactcaggagggtgaggaaggagaattgcttgaacccgggaggtgg

SEQ ID NO: 455157 - DNA, 414 bp, Homo sapiens
atcaagcgagttggttagcgaagggattcggtgcagatggatggaccgtctgggctgcggagtccacgggcctgaaacgcggtcgctcctgacccgtcctccgcaaccctcgtcccaccaggccgcggtccccggagcaggccggcgggtggcaggaagacaccaggctgcagggggctggagaagcaacacccctctccctccccgccagagaactggagcgcggggacctcggttgcggatgctggcggcgagccgggttgctaggcgacatcggtgagtgtaggcgggatgtaccgggcgtgtgggcagggctggaacccaatccggcaggcgggactggaaagacaaaaacggaagggcaggctgtcacctgcatctgcaaggtcacggacaggagcgagaggcggccgc

SEQ ID NO: 455158 - DNA, 1914 bp, Homo sapiens
gggccggcggcggcggcggcgcgcggaggagaccgcagtgcggccggcgctaggacccgcgggggcctcccaggccgcggcgcctcgcgctttcccccactccccgacccttcttcgcccccaaaatgaggaaacggagcaactcgctccaagttgtgcagccgggaccgcctcggggtgtgcagccggctcgcggaggccctcctgggggcgggcgcggggcgcggctcgggggcgccccctgagcaggtgagcccccgcttcctccgagcctggcacccccctcccgtctcagccaggatgccaacgaggcgctgggccccgggcacccagtgtatcaccaaatgcgagcacacccgccccaagccaggggagctggccttccgcaagggcgacgtggtcaccatcctggaggcctgcgagaacaagagctggtaccgcgtcaagcaccacaccagtggacaggaggggctgctggcagctggggcgctgcgggagcgggaggccctctccgcagaccccaagctcagcctcatgccgtggttccacgggaagatctcgggccaggaggctgtccagcagctgcagcctcccgaggatgggctgttcctggtgcgggagtccgcgcgccaccccggcgactacgtcctgtgcgtgagctttggccgcgacgtcatccactaccgcgtgctgcaccgcgacggccacctcacaatcgatgaggccgtgttcttctgcaacctcatggacatggtggagcattacagcaaggacaagggcgctatctgcaccaagctggtgagaccaaagcggaaacacgggaccaagtcggccgaggaggagctggccagggcgggctggttactgaacctgcagcatttgacattgggagcacagatcggagagggagagtttggagctgtcctgcagggtgagtacctggggcaaaaggtggccgtgaagaatatcaagtgtgatgtgacagcccaggccttcctggacgagacggccgtcatgacgaagatgcaacacgagaacctggtgcgtctcctgggcgtgatcctgcaccaggggctgtacattgtcatggagcacgtgagcaagggcaacctggtgaactttctgcggacccggggtcgagccctcgtgaacaccgctcagctcctgcagttttctctgcacgtggccgagggcatggagtacctggagagcaagaagcttgtgcaccgcgacctggccgcccgcaacatcctggtctcagaggacctggtggccaaggtcagcgactttggcctggccaaagccgagcggaaggggctagactcaagccggctgcccgtcaagtggacggcgcccgaggctctcaaacacgggaagttcaccagcaagtcggatgtctggagttttggggtgctgctctgggaggtcttctcatatggacgggctccgtaccctaaaatgtcactgaaagaggtgtcggaggccgtggagaaggggtaccgcatggaaccccccgagggctgtccaggccccgtgcacgtcctcatgagcagctgctgggaggcagagcccgcccgccggccacccttccgcaaactggccgagaagctggcccgggagctacgcagtgcaggtgccccagcctccgtctcagggcaggacgccgacggctccacctcgccccgaagccaggagccctgaccccacccggtggggcccttggccccagaggaccgagagagtggagagtgcggcgtgggggcactgaccaggcccaaggagggtccaggcgggcaagtcatcctcctggtgcccacagcaggggctggcccacgtagggggctctgggcggcccgtggacaccccagacctgcgaaggatgatcgcccgataaagacggattctaaggactct

SEQ ID NO: 455159 - DNA, 2077 bp, Homo sapiens
gggccggcggcggcggcggcgcgcggaggagaccgcagtgcggccggcgctaggacccgcgggggcctcccaggccgcggcgcctcgcgctttcccccactccccgacccttcttcgcccccaaaatgaggaaacggagcaactcgctccaagttgtgcagccgggaccgcctcggggtgtgcagccggctcgcggaggccctcctgggggcgggcgcggggcgcggctcgggggcgccccctgagcagaaaacaggaagaaccaggctcggtccagtggcacccagctccctacctcctgtgccagccgcctggcctgtggcaggccattcccagcgtccccgactgtgaccacttgctcagtgtgcctctcacctgcctcagtttccctctgggggcgatggcggggcgaggctctctggtttcctggcgggcatttcacggctgtgattctgctgaggaacttccccgggtgagcccccgcttcctccgagcctggcacccccctcccgtctcagccaggatgccaacgaggcgctgggccccgggcacccagtgtatcaccaaatgcgagcacacccgccccaagccaggggagctggccttccgcaagggcgacgtggtcaccatcctggaggcctgcgagaacaagagctggtaccgcgtcaagcaccacaccagtggacaggaggggctgctggcagctggggcgctgcgggagcgggaggccctctccgcagaccccaagctcagcctcatgccgtggttccacgggaagatctcgggccaggaggctgtccagcagctgcagcctcccgaggatgggctgttcctggtgcgggagtccgcgcgccaccccggcgactacgtcctgtgcgtgagctttggccgcgacgtcatccactaccgcgtgctgcaccgcgacggccacctcacaatcgatgaggccgtgttcttctgcaacctcatggacatggtggagcattacagcaaggacaagggcgctatctgcaccaagctggtgagaccaaagcggaaacacgggaccaagtcggccgaggaggagctggccagggcgggctggttactgaacctgcagcatttgacattgggagcacagatcggagagggagagtttggagctgtcctgcagggtgagtacctggggcaaaaggtggccgtgaagaatatcaagtgtgatgtgacagcccaggccttcctggacgagacggccgtcatgacgaagatgcaacacgagaacctggtgcgtctcctgggcgtgatcctgcaccaggggctgtacattgtcatggagcacgtgagcaagggcaacctggtgaactttctgcggacccggggtcgagccctcgtgaacaccgctcagctcctgcagttttctctgcacgtggccgagggcatggagtacctggagagcaagaagcttgtgcaccgcgacctggccgcccgcaacatcctggtctcagaggacctggtggccaaggtcagcgactttggcctggccaaagccgagcggaaggggctagactcaagccggctgcccgtcaagtggacggcgcccgaggctctcaaacacgggaagttcaccagcaagtcggatgtctggagttttggggtgctgctctgggaggtcttctcatatggacgggctccgtaccctaaaatgtcactgaaagaggtgtcggaggccgtggagaaggggtaccgcatggaaccccccgagggctgtccaggccccgtgcacgtcctcatgagcagctgctgggaggcagagcccgcccgccggccacccttccgcaaactggccgagaagctggcccgggagctacgcagtgcaggtgccccagcctccgtctcagggcaggacgccgacggctccacctcgccccgaagccaggagccctgaccccacccggtggggcccttggccccagaggaccgagagagtggagagtgcggcgtgggggcactgaccaggcccaaggagggtccaggcgggcaagtcatccccagacctgcgaaggatgatcgcccgataaagacggattctaaggactct

SEQ ID NO: 455160 - DNA, 2335 bp, Homo sapiens
gggccggcggcggcggcggcgcgcggaggagaccgcagtgcggccggcgctaggacccgcgggggcctcccaggccgcggcgcctcgcgctttcccccactccccgacccttcttcgcccccaaaatgaggaaacggagcaactcgctccaagttgtgcagccgggaccgcctcggggtgtgcagccggctcgcggaggccctcctgggggcgggcgcggggcgcggctcgggggcgccccctgagcagaaaacaggaagaaccaggctcggtccagtggcacccagctccctacctcctgtgccagccgcctggcctgtggcaggccattcccagcgtccccgactgtgaccacttgctcagtgtgcctctcacctgcctcagtttccctctgggggcgatggcggggcgaggctctctggtttcctggcgggcatttcacggctgtgattctgctgaggaacttccccgggtgagcccccgcttcctccgagcctggcacccccctcccgtctcagccaggatgccaacgaggcgctgggccccgggcacccagtgtatcaccaaatgcgagcacacccgccccaagccaggggagctggccttccgcaagggcgacgtggtcaccatcctggaggcctgcgagaacaagagctggtaccgcgtcaagcaccacaccagtggacaggaggggctgctggcagctggggcgctgcgggagcgggaggccctctccgcagaccccaagctcagcctcatgccgtggttccacgggaagatctcgggccaggaggctgtccagcagctgcagcctcccgaggatgggctgttcctggtgcgggagtccgcgcgccaccccggcgactacgtcctgtgcgtgagctttggccgcgacgtcatccactaccgcgtgctgcaccgcgacggccacctcacaatcgatgaggccgtgttcttctgcaacctcatggacatggtggagaggccacccgggaacggaacaggatgctggggttcccctccctggggctgggctcatggctgtcccaccatcctgcagcattacagcaaggacaagggcgctatctgcaccaagctggtgagaccaaagcggaaacacgggaccaagtcggccgaggaggagctggccaggggtccccagcttcgccactcatctgtcaccatcatccaccatctgagccagaaacctggccccgaacctccacccaccccatcctccagcattccctccttggccaggttcccaagacctgcgggctggttactgaacctgcagcatttgacattgggagcacagatcggagagggagagtttggagctgtcctgcagggtgagtacctggggcaaaaggtggccgtgaagaatatcaagtgtgatgtgacagcccaggccttcctggacgagacggccgtcatgacgaagatgcaacacgagaacctggtgcgtctcctgggcgtgatcctgcaccaggggctgtacattgtcatggagcacgtgagcaagggcaacctggtgaactttctgcggacccggggtcgagccctcgtgaacaccgctcagctcctgcagttttctctgcacgtggccgagggcatggagtacctggagagcaagaagcttgtgcaccgcgacctggccgcccgcaacatcctggtctcagaggacctggtggccaaggtcagcgactttggcctggccaaagccgagcggaaggggctagactcaagccggctgcccgtcaagtggacggcgcccgaggctctcaaacacgggaagttcaccagcaagtcggatgtctggagttttggggtgctgctctgggaggtcttctcatatggacgggctccgtaccctaaaatgtcactgaaagaggtgtcggaggccgtggagaaggggtaccgcatggaaccccccgagggctgtccaggccccgtgcacgtcctcatgagcagctgctgggaggcagagcccgcccgccggccacccttccgcaaactggccgagaagctggcccgggagctacgcagtgcaggtgccccagcctccgtctcagggcaggacgccgacggctccacctcgccccgaagccaggagccctgaccccacccggtggggcccttggccccagaggaccgagagagtggagagtgcggcgtgggggcactgaccaggcccaaggagggtccaggcgggcaagtcatcctcctggtgcccacagcaggggctggcccacgtagggggctctgggcggcccgtggacaccccagacctgcgaaggatgatcgcccgataaagacggattctaaggactct

SEQ ID NO: 455161 - DNA, 2073 bp, Homo sapiens
atcaagcgagttggttagcgaagggattcggtgcagatggatggaccgtctgggctgcggagtccacgggcctgaaacgcggtcgctcctgacccgtcctccgcaaccctcgtcccaccaggccgcggtccccggagcaggccggcgggtggcaggaagacaccaggctgcagggggctggagaagcaacacccctctccctccccgccagagaactggagcgcggggacctcggttgcggatgctggcggcgagccgggttgctaggcgacatcgagagaggaagaggagaaagtcttcatggggtgctagagcatcttaaatgtccctctcatgcagggacatttccctgctgaacgaagagaaggcagacctcggcgagggacccgtggtcagcagcagcttctggtgagcccccgcttcctccgagcctggcacccccctcccgtctcagccaggatgccaacgaggcgctgggccccgggcacccagtgtatcaccaaatgcgagcacacccgccccaagccaggggagctggccttccgcaagggcgacgtggtcaccatcctggaggcctgcgagaacaagagctggtaccgcgtcaagcaccacaccagtggacaggaggggctgctggcagctggggcgctgcgggagcgggaggccctctccgcagaccccaagctcagcctcatgccgtggttccacgggaagatctcgggccaggaggctgtccagcagctgcagcctcccgaggatgggctgttcctggtgcgggagtccgcgcgccaccccggcgactacgtcctgtgcgtgagctttggccgcgacgtcatccactaccgcgtgctgcaccgcgacggccacctcacaatcgatgaggccgtgttcttctgcaacctcatggacatggtggagcattacagcaaggacaagggcgctatctgcaccaagctggtgagaccaaagcggaaacacgggaccaagtcggccgaggaggagctggccagggcgggctggttactgaacctgcagcatttgacattgggagcacagatcggagagggagagtttggagctgtcctgcagggtgagtacctggggcaaaaggtggccgtgaagaatatcaagtgtgatgtgacagcccaggccttcctggacgagacggccgtcatgacgaagatgcaacacgagaacctggtgcgtctcctgggcgtgatcctgcaccaggggctgtacattgtcatggagcacgtgagcaagggcaacctggtgaactttctgcggacccggggtcgagccctcgtgaacaccgctcagctcctgcagttttctctgcacgtggccgagggcatggagtacctggagagcaagaagcttgtgcaccgcgacctggccgcccgcaacatcctggtctcagaggacctggtggccaaggtcagcgactttggcctggccaaagccgagcggaaggggctagactcaagccggctgcccgtcaagtggacggcgcccgaggctctcaaacacgggaagttcaccagcaagtcggatgtctggagttttggggtgctgctctgggaggtcttctcatatggacgggctccgtaccctaaaatgtcactgaaagaggtgtcggaggccgtggagaaggggtaccgcatggaaccccccgagggctgtccaggccccgtgcacgtcctcatgagcagctgctgggaggcagagcccgcccgccggccacccttccgcaaactggccgagaagctggcccgggagctacgcagtgcaggtgccccagcctccgtctcagggcaggacgccgacggctccacctcgccccgaagccaggagccctgaccccacccggtggggcccttggccccagaggaccgagagagtggagagtgcggcgtgggggcactgaccaggcccaaggagggtccaggcgggcaagtcatcctcctggtgcccacagcaggggctggcccacgtagggggctctgggcggcccgtggacaccccagacctgcgaaggatgatcgcccgataaagacggattctaaggactct

SEQ ID NO: 455162 - DNA, 1585 bp, Homo sapiens
gggccggcggcggcggcggcgcgcggaggagaccgcagtgcggccggcgctaggacccgcgggggcctcccaggccgcggcgcctcgcgctttcccccactccccgacccttcttcgcccccaaaatgaggaaacggagcaactcgctccaagttgtgcagccgggaccgcctcggggtgtgcagccggctcgcggaggccctcctgggggcgggcgcggggcgcggctcgggggcgccccctgagcagaaaacaggaagaaccaggctcggtccagtggcacccagctccctacctcctgtgccagccgcctggcctgtggcaggccattcccagcgtccccgactgtgaccacttgctcagtgtgcctctcacctgcctcagtttccctctgggggcgatggcggggcgaggctctctggtttcctggcgggcatttcacggctgtgattctgctgaggaacttccccgggtgagcccccgcttcctccgagcctggcacccccctcccgtctcagccaggatgccaacgaggcgctgggccccgggcacccagtgtatcaccaaatgcgagcacacccgccccaagccaggggagctggccttccgcaagggcgacgtggtcaccatcctggaggcctgcgagaacaagagctggtaccgcgtcaagcaccacaccagtggacaggaggggctgctggcagctggggcgctgcgggagcgggaggccctctccgcagaccccaagctcagcctcatgccgtggttccacgggaagatctcgggccaggaggctgtccagcagctgcagcctcccgaggatgggctgttcctggtgcgggagtccgcgcgccaccccggcgactacgtcctgtgcgtgagctttggccgcgacgtcatccactaccgcgtgctgcaccgcgacggccacctcacaatcgatgaggccgtgttcttctgcaacctcatggacatggtggagcattacagcaaggacaagggcgctatctgcaccaagctggtgagaccaaagcggaaacacgggaccaagtcggccgaggaggagctggccaggggtccccagcttcgccactcatctgtcaccatcatccaccatctgagccagaaacctggccccgaacctccacccaccccatcctccagcattccctccttggccaggttcccaagacctggtgaatcttctcccctcccctccccacagcccagcctcaggccctcccatcagaccgcctcattcccagagggcgagtcccccttccagcccaggccttgagtgcagcctcaaggttatctttctatcatgaaaccatgcctccagggagagaggcccagcagctccaccaccttccagaacctgcctgcatggcctgagccacctttccagcctcatctgcaaagcccttcctccacacatccaccccctcccaggtcaactgtgatcatcgttttcttcatgcctctgagccattgtatattctgttcccttcacctgaaatgcttttccagcccctaagtagtgaaatcctcaatatttaaggtcaaaagcaaatgcctcctctga

SEQ ID NO: 455163 - DNA, 2137 bp, Homo sapiens
gggccggcggcggcggcggcgcgcggaggagaccgcagtgcggccggcgctaggacccgcgggggcctcccaggccgcggcgcctcgcgctttcccccactccccgacccttcttcgcccccaaaatgaggaaacggagcaactcgctccaagttgtgcagccgggaccgcctcggggtgtgcagccggctcgcggaggccctcctgggggcgggcgcggggcgcggctcgggggcgccccctgagcagaaaacaggaagaaccaggctcggtccagtggcacccagctccctacctcctgtgccagccgcctggcctgtggcaggccattcccagcgtccccgactgtgaccacttgctcagtgtgcctctcacctgcctcagtttccctctgggggcgatggcggggcgaggctctctggtttcctggcgggcatttcacggctgtgattctgctgaggaacttccccgggtgagcccccgcttcctccgagcctggcacccccctcccgtctcagccaggatgccaacgaggcgctgggccccgggcacccagtgtatcaccaaatgcgagcacacccgccccaagccaggggagctggccttccgcaagggcgacgtggtcaccatcctggaggcctgcgagaacaagagctggtaccgcgtcaagcaccacaccagtggacaggaggggctgctggcagctggggcgctgcgggagcgggaggccctctccgcagaccccaagctcagcctcatgccgtggttccacgggaagatctcgggccaggaggctgtccagcagctgcagcctcccgaggatgggctgttcctggtgcgggagtccgcgcgccaccccggcgactacgtcctgtgcgtgagctttggccgcgacgtcatccactaccgcgtgctgcaccgcgacggccacctcacaatcgatgaggccgtgttcttctgcaacctcatggacatggtggagcattacagcaaggacaagggcgctatctgcaccaagctggtgagaccaaagcggaaacacgggaccaagtcggccgaggaggagctggccagggcgggctggttactgaacctgcagcatttgacattgggagcacagatcggagagggagagtttggagctgtcctgcagggtgagtacctggggcaaaaggtggccgtgaagaatatcaagtgtgatgtgacagcccaggccttcctggacgagacggccgtcatgacgaagatgcaacacgagaacctggtgcgtctcctgggcgtgatcctgcaccaggggctgtacattgtcatggagcacgtgagcaagggcaacctggtgaactttctgcggacccggggtcgagccctcgtgaacaccgctcagctcctgcagttttctctgcacgtggccgagggcatggagtacctggagagcaagaagcttgtgcaccgcgacctggccgcccgcaacatcctggtctcagaggacctggtggccaaggtcagcgactttggcctggccaaagccgagcggaaggggctagactcaagccggctgcccgtcaagtggacggcgcccgaggctctcaaacacgggaagttcaccagcaagtcggatgtctggagttttggggtgctgctctgggaggtcttctcatatggacgggctccgtaccctaaaatgtcactgaaagaggtgtcggaggccgtggagaaggggtaccgcatggaaccccccgagggctgtccaggccccgtgcacgtcctcatgagcagctgctgggaggcagagcccgcccgccggccacccttccgcaaactggccgagaagctggcccgggagctacgcagtgcaggtgccccagcctccgtctcagggcaggacgccgacggctccacctcgccccgaagccaggagccctgaccccacccggtggggcccttggccccagaggaccgagagagtggagagtgcggcgtgggggcactgaccaggcccaaggagggtccaggcgggcaagtcatcctcctggtgcccacagcaggggctggcccacgtagggggctctgggcggcccgtggacaccccagacctgcgaaggatgatcgcccgataaagacggattctaaggactct

SEQ ID NO: 455164 - DNA, 2215 bp, Homo sapiens
gggccggcggcggcggcggcgcgcggaggagaccgcagtgcggccggcgctaggacccgcgggggcctcccaggccgcggcgcctcgcgctttcccccactccccgacccttcttcgcccccaaaatgaggaaacggagcaactcgctccaagttgtgcagccgggaccgcctcggggtgtgcagccggctcgcggaggccctcctgggggcgggcgcggggcgcggctcgggggcgccccctgagcagaaaacaggaagaaccaggctcggtccagtggcacccagctccctacctcctgtgccagccgcctggcctgtggcaggccattcccagcgtccccgactgtgaccacttgctcagtgtgcctctcacctgcctcagtttccctctgggggcgatggcggggcgaggctctctggtttcctggcgggcatttcacggctgtgattctgctgaggaacttccccgggtgagcccccgcttcctccgagcctggcacccccctcccgtctcagccaggatgccaacgaggcgctgggccccgggcacccagtgtatcaccaaatgcgagcacacccgccccaagccaggggagctggccttccgcaagggcgacgtggtcaccatcctggaggcctgcgagaacaagagctggtaccgcgtcaagcaccacaccagtggacaggaggggctgctggcagctggggcgctgcgggagcgggaggccctctccgcagaccccaagctcagcctcatgccgtggttccacgggaagatctcgggccaggaggctgtccagcagctgcagcctcccgaggatgggctgttcctggtgcgggagtccgcgcgccaccccggcgactacgtcctgtgcgtgagctttggccgcgacgtcatccactaccgcgtgctgcaccgcgacggccacctcacaatcgatgaggccgtgttcttctgcaacctcatggacatggtggagaggccacccgggaacggaacaggatgctggggttcccctccctggggctgggctcatggctgtcccaccatcctgcagcattacagcaaggacaagggcgctatctgcaccaagctggtgagaccaaagcggaaacacgggaccaagtcggccgaggaggagctggccagggcgggctggttactgaacctgcagcatttgacattgggagcacagatcggagagggagagtttggagctgtcctgcagggtgagtacctggggcaaaaggtggccgtgaagaatatcaagtgtgatgtgacagcccaggccttcctggacgagacggccgtcatgacgaagatgcaacacgagaacctggtgcgtctcctgggcgtgatcctgcaccaggggctgtacattgtcatggagcacgtgagcaagggcaacctggtgaactttctgcggacccggggtcgagccctcgtgaacaccgctcagctcctgcagttttctctgcacgtggccgagggcatggagtacctggagagcaagaagcttgtgcaccgcgacctggccgcccgcaacatcctggtctcagaggacctggtggccaaggtcagcgactttggcctggccaaagccgagcggaaggggctagactcaagccggctgcccgtcaagtggacggcgcccgaggctctcaaacacgggaagttcaccagcaagtcggatgtctggagttttggggtgctgctctgggaggtcttctcatatggacgggctccgtaccctaaaatgtcactgaaagaggtgtcggaggccgtggagaaggggtaccgcatggaaccccccgagggctgtccaggccccgtgcacgtcctcatgagcagctgctgggaggcagagcccgcccgccggccacccttccgcaaactggccgagaagctggcccgggagctacgcagtgcaggtgccccagcctccgtctcagggcaggacgccgacggctccacctcgccccgaagccaggagccctgaccccacccggtggggcccttggccccagaggaccgagagagtggagagtgcggcgtgggggcactgaccaggcccaaggagggtccaggcgggcaagtcatcctcctggtgcccacagcaggggctggcccacgtagggggctctgggcggcccgtggacaccccagacctgcgaaggatgatcgcccgataaagacggattctaaggactct

SEQ ID NO: 455165 - DNA, 1937 bp, Homo sapiens
aggaagggccggtgtgtgcgcgagtgtgcgcgtcccgggcgcgcagcggaaaacaggaagaaccaggctcggtccagtggcacccagctccctacctcctgtgccagccgcctggcctgtggcaggccattcccagcgtccccgactgtgaccacttgctcagtgtgcctctcacctgcctcagtttccctctgggggcgatggcggggcgaggctctctggtttcctggcgggcatttcacggctgtgattctgctgaggaacttccccgggtgagcccccgcttcctccgagcctggcacccccctcccgtctcagccaggatgccaacgaggcgctgggccccgggcacccagtgtatcaccaaatgcgagcacacccgccccaagccaggggagctggccttccgcaagggcgacgtggtcaccatcctggaggcctgcgagaacaagagctggtaccgcgtcaagcaccacaccagtggacaggaggggctgctggcagctggggcgctgcgggagcgggaggccctctccgcagaccccaagctcagcctcatgccgtggttccacgggaagatctcgggccaggaggctgtccagcagctgcagcctcccgaggatgggctgttcctggtgcgggagtccgcgcgccaccccggcgactacgtcctgtgcgtgagctttggccgcgacgtcatccactaccgcgtgctgcaccgcgacggccacctcacaatcgatgaggccgtgttcttctgcaacctcatggacatggtggagcattacagcaaggacaagggcgctatctgcaccaagctggtgagaccaaagcggaaacacgggaccaagtcggccgaggaggagctggccagggcgggctggttactgaacctgcagcatttgacattgggagcacagatcggagagggagagtttggagctgtcctgcagggtgagtacctggggcaaaaggtggccgtgaagaatatcaagtgtgatgtgacagcccaggccttcctggacgagacggccgtcatgacgaagatgcaacacgagaacctggtgcgtctcctgggcgtgatcctgcaccaggggctgtacattgtcatggagcacgtgagcaagggcaacctggtgaactttctgcggacccggggtcgagccctcgtgaacaccgctcagctcctgcagttttctctgcacgtggccgagggcatggagtacctggagagcaagaagcttgtgcaccgcgacctggccgcccgcaacatcctggtctcagaggacctggtggccaaggtcagcgactttggcctggccaaagccgagcggaaggggctagactcaagccggctgcccgtcaagtggacggcgcccgaggctctcaaacacgggaagttcaccagcaagtcggatgtctggagttttggggtgctgctctgggaggtcttctcatatggacgggctccgtaccctaaaatgtcactgaaagaggtgtcggaggccgtggagaaggggtaccgcatggaaccccccgagggctgtccaggccccgtgcacgtcctcatgagcagctgctgggaggcagagcccgcccgccggccacccttccgcaaactggccgagaagctggcccgggagctacgcagtgcaggtgccccagcctccgtctcagggcaggacgccgacggctccacctcgccccgaagccaggagccctgaccccacccggtggggcccttggccccagaggaccgagagagtggagagtgcggcgtgggggcactgaccaggcccaaggagggtccaggcgggcaagtcatcctcctggtgcccacagcaggggctggcccacgtagggggctctgggcggcccgtggacaccccagacctgcgaaggatgatcgcccgataaagacggattctaaggactct

SEQ ID NO: 455166 - DNA, 2088 bp, Homo sapiens
gggccggcggcggcggcggcgcgcggaggagaccgcagtgcggccggcgctaggacccgcgggggcctcccaggccgcggcgcctcgcgctttcccccactccccgacccttcttcgcccccaaaatgaggaaacggagcaactcgctccaagttgtgcagccgggaccgcctcggggtgtgcagccggctcgcggaggccctcctgggggcgggcgcggggcgcggctcgggggcgccccctgagcagaaaacaggaagaaccaggctcggtccagtggcacccagctccctacctcctgtgccagccgcctggcctgtggcaggccattcccagcgtccccgactgtgaccacttgctcagtgtgcctctcacctgcctcagtttccctctgggggcgatggcggggcgaggctctctggtttcctggcgggcatttcacggctgtgattctgctgaggaacttccccgggtgagcccccgcttcctccgagcctggcacccccctcccgtctcagccaggatgccaacgaggcgctgggccccgggcacccagtgtatcaccaaatgcgagcacacccgccccaagccaggggagctggccttccgcaagggcgacgtggtcaccatcctggaggcctgcgagaacaagagctggtaccgcgtcaagcaccacaccagtggacaggaggggctgctggcagctggggcgctgcgggagcgggaggccctctccgcagaccccaagctcagcctcatgccgtggttccacgggaagatctcgggccaggaggctgtccagcagctgcagcctcccgaggatgggctgttcctggtgcgggagtccgcgcgccaccccggcgactacgtcctgtgcgtgagctttggccgcgacgtcatccactaccgcgtgctgcaccgcgacggccacctcacaatcgatgaggccgtgttcttctgcaacctcatggacatggtggagcattacagcaaggacaagggcgctatctgcaccaagctggtgagaccaaagcggaaacacgggaccaagtcggccgaggaggagctggccagggcgggctggttactgaacctgcagcatttgacattgggagcacagatcggagagggagagtttggagctgtcctgcagggtgagtacctggggcaaaaggtggccgtgaagaatatcaagtgtgatgtgacagcccaggccttcctggacgagacggccgtcatgacgaagatgcaacacgagaacctggtgcgtctcctgggcgtgatcctgcaccaggggctgtacattgtcatggagcacgtgagcaagggcaacctggtgaactttctgcggacccggggtcgagccctcgtgaacaccgctcagctcctgcagttttctctgcacgtggccgagggcatggagtacctggagagcaagaagcttgtgcaccgcgacctggccgcccgcaacatcctggtctcagaggacctggtggccaaggtcagcgactttggcctggccaaagccgagcggaaggggctagactcaagccggctgcccgtcaagtggacggcgcccgaggctctcaaacacgggaagttcaccagcaagtcggatgtctggagttttggggtgctgctctgggaggtcttctcatatggacgggctccgtaccctaaaatgcccccgagggctgtccaggccccgtgcacgtcctcatgagcagctgctgggaggcagagcccgcccgccggccacccttccgcaaactggccgagaagctggcccgggagctacgcagtgcaggtgccccagcctccgtctcagggcaggacgccgacggctccacctcgccccgaagccaggagccctgaccccacccggtggggcccttggccccagaggaccgagagagtggagagtgcggcgtgggggcactgaccaggcccaaggagggtccaggcgggcaagtcatcctcctggtgcccacagcaggggctggcccacgtagggggctctgggcggcccgtggacaccccagacctgcgaaggatgatcgcccgataaagacggattctaaggactct

SEQ ID NO: 455167 - DNA, 1067 bp, Homo sapiens
catgggcggagactgcaggcttctgggcctgagagggctggagctggctttccggagccgggggcggggcgcgggcgggcctcagctgtggttactggtgacaggtcgcctgactgggctcctccccgggcccgccccgacaggtttgtcttgtgaccgcgggcggccgctgcttctttcccgagcttggaacttcgttatccgcgatgcgtttcctggcagctacattcctgctcctggcgctcagcaccgctgcccaggccgaaccggtgcagttcaaggactgcggttctgtggatggagttataaaggaagtgaatgtgagcccatgccccacccaaccctgccagctgagcaaaggacagtcttacagcgtcaatgtcaccttcaccagcaatattcagtctaaaagcagcaaggccgtggtgcatggcatcctgatgggcgtcccagttccctttcccattcctgagcctgatggttgtaagagtggaattaactgccctatccaaaaagacaagacctatagctacctgaataaactaccagtgaaaagcgaatatccctctataaaactggtggtggagtggcaacttcaggatgacaaaaaccaaagtctcttctgctgggaaatcccagtacagatcgtttctcatctctaagtgcctcattgagttcggtgcatctggccaatgagtctgctgagactcttgacagcacctccagctctgctgcttcaacaacagtgacttgctctccaatggtatccagtgattcgttgaagaggaggtgctctgtagcagaaactgagctccgggtggctggttctcagtggttgtctcatgtctctttttctgtcttaggtggtttcattaaatgcagcacttggttagcagatgtttaattttttttttaacaacattaacttgtggcctctttctacacctggaaatttactcttgaataaataaaaactcgtttgtcttgtcttctgctctgcaaaaaaaaagaattggggtttatttgggggcggaaagggttgagggggatgtaaatttgtcgtaccg

SEQ ID NO: 455168 - DNA, 888 bp, Homo sapiens
  misc_feature (876)..(876): n is a, c, g, or t
catgggcggagactgcaggcttctgggcctgagagggctggagctggctttccggagccgggggcggggcgcgggcgggcctcagctgtggttactggtgacaggtcgcctgactgggctcctccccgggcccgccccgacaggtttgtcttgtgaccgcgggcggccgctgcttctttcccgagcttggaacttcgttatccgcgatgcgtttcctggcagctacattcctgctcctggcgctcagcaccgctgcccaggccgaaccggtgcagttcaaggactgcggttctgtggatggagttataaaggaagtgaatgtgagcccatgccccacccaaccctgccagctgagcaaaggacagtcttacagcgtcaatgtcaccttcaccagcaatattcagtctaaaagcagcaaggccgtggtgcatggcatcctgatgggcgtcccagttccctttcccattcctgagcctgatggttgtaagagtggaattaactgccctatccaaaaagacaagacctatagctacctgaataaactaccagtgaaaagcgaatatccctctataaaactggtggtggagtggcaacttcaggatgacaaaaaccaaagtctcttctgctgggaaatcccagtacagatcgtttctcatctctaagtgcctcattgagttcggtgcatctggccaatgagtctgctgagactcttgacagcacctccagctctgctgcttcaacaacagtgacttgctctccaatggtatccagtgattcgttgaagaggaggtgctctgtagcagaaactgagctccgggtggctggttctcagtggttgtctcatgtctctttttctgcggttccaagtggtcgggnacctctagaaca

SEQ ID NO: 455169 - DNA, 649 bp, Homo sapiens
ggtcggacccaattcattccagcgtagcgtcaatgtcaccttcaccagcaatattcagtctaaaagcagcaaggccgtggtgcatggcatcctgatgggcgtcccagttccctttcccattcctgagcctgatggttgtaagagtggaattaactgccctatccaaaaagacaagacctatagctacctgaataaactaccagtgaaaagcgaatatccctctataaaactggtggtggagtggcaacttcaggatgacaaaaaccaaagtctcttctgctgggaaatcccagtacagatcgtttctcatctctaagtgcctcattgagttcggtgcatctggccaatgagtctgctgagactcttgacagcacctccagctctgctgcttcaacaacagtgacttgctctccaatggtatccagtgattcgttgaagaggaggtgctctgtagcagaaactgagctccgggtggctggttctcagtggttgtctcatgtctctttttctgtcttaggtggtttcattaaatgcagcacttggttagcagatgtttaattttttttttaacaacattaacttgtggcctctttctacacctggaaatttactcttgaataaataaaaactcgtttgtcttgtcttctgc

SEQ ID NO: 455170 - DNA, 906 bp, Homo sapiens
acgattcctcgttccatggtgctcagaatcgttgtacatggtcaaaagctggtccatgtcaatgacatgtcgcgcacttgtggagtggatgttcctagagcgaagctgagattgtcgagcccgatgtgcgcctagggtcaagagtccgtggcccgactgtaccctggaaggagatgacttatcctggttgttgttcaactttcacgcagcgattatgtcgaggttctaaaaaataccagcttagagaccgatgattcgtgtggacttcccttgactcgtcgtcgtaaccaggttccctttcccattcctgagcctgatggttgtaagagtggaattaactgccctatccaaaaagacaagacctatagctacctgaataaactaccagtgaaaagcgaatatccctctataaaactggtggtggagtggcaacttcaggatgacaaaaaccaaagtctcttctgctgggaaatcccagtacagatcgtttctcatctctaagtgcctcattgagttcggtgcatctggccaatgagtctgctgagactcttgacagcacctccagctctgctgcttcaacaacagtgacttgctctccaatggtatccagtgattcgttgaagaggaggtgctctgtagcagaaactgagctccgggtggctggttctcagtggttgtctcatgtctctttttctgtcttaggtggtttcattaaatgcagcacttggttagcagatgtttaattttttttttaacaacattaacttgtggcctctttctacacctggaaatttactcttgaataaataaaaactcgtttgtcttgtcttctgctctgcaaaaaaaaagaattggggtttatttgggggcggaaagggttgagggggatgtaaatttgtcgtaccg

SEQ ID NO: 455171 - DNA, 464 bp, Homo sapiens
atcgtgcagaagattaccttcgtgcagaatatccctctataaaactggtggtggagtggcaacttcaggatgacaaaaaccaaagtctcttctgctgggaaatcccagtacagatcgtttctcatctctaagtgcctcattgagttcggtgcatctggccaatgagtctgctgagactcttgacagcacctccagctctgctgcttcaacaacagtgacttgctctccaatggtatccagtgattcgttgaagaggaggtgctctgtagcagaaactgagctccgggtggctggttctcagtggttgtctcatgtctctttttctgtcttaggtggtttcattaaatgcagcacttggttagcagatgtttaattttttttttaacaacattaacttgtggcctctttctacacctggaaatttactcttgaataaataaaaactcgtttgtcttgtcttctgc

SEQ ID NO: 455172 - DNA, 419 bp, Homo sapiens
tcggtaccgtagcgctgcatggtaaactgcccaaaaagacaagacctatagctacctgaataaactaccagtgaaaagcgaatatccctctataaaactggtggtggagtggcaacttcaggatgacaaaaaccaaagtctcttctgctgggaaatcccagtacagatcgtttctcatctctaagtgcctcattgagttcggtgcatctggccaatgagtctgctgagactcttgacagcacctccagctctgctgcttcaacaacagtgacttgctctccaatggtatccagtgattcgttgaagaggaggtgctctgtagcagaaactgagctccgggtggctggttctcagtggttgtctcatgtctctttttctgcagtttaccatgcagcgctacgaccgagctcgattctatc

SEQ ID NO: 455173 - DNA, 713 bp, Homo sapiens
ctactcgtacaagcacagtggatacgcgaatatccctctataaaactggtggtggagtggcaacttcaggatgacaaaaaccaaagtctcttctgctgggaaatcccagtacagatcgtttctcatctctaagtgcctcattgagttcggtgcatctggccaatgagtctgctgagactcttgacagcacctccagctctgctgcttcaacaacagtgacttgctctccaatggtatccagtgattcgttgaagaggaggtgctctgtagcagaaactgagctccgggtggctggttctcagtggttgtctcatgtctctttttctgtcttaggtggtttcattaaatgcagcacttggaaacaaaaaaaaaaaaaaacaaaaaaaaaaaaaaaaaaaggggggggggggaaaaaaaacccgggggggggccatggccccttcttttgaaaaagggggccaagaggagagagttaaaaaaagagagaggcgcgcgaggtaaacacagggcggggggaaaccgacgcgcgcacttgggaggacccctctcggggggcgcatgggggaccacagccaatgagcgccgcgaaaaaatgggttgtgggagccggcgtgcgccgaatgcttgttttagtatccgtcgcataacacggggggacaggccgaatgaacgacgccgatcatgacaagtagaggagtgcagacgcccttgcc

SEQ ID NO: 455174 - DNA, 1222 bp, Homo sapiens
catgggcggagactgcaggcttctgggcctgagagggctggagctggctttccggagccgggggcggggcgcgggcgggcctcagctgtggttactggtgacaggtcgcctgactgggctcctccccgggcccgccccgacaggtttgtcttgtgaccgcgggcggccgctgcttctttcccgagcttggaacttcgttatccgcgatgcgtttcctggcagctacattcctgctcctggcgctcagcaccgctgcccaggccgaaccggtgcagttcaaggactgcggatctagtaggatggagataaaaaaaaaagaaaaaaaaccccagaccacacccaaccgcaccaatcgagcaaaaaacaagagaacaacaacaaagacaccaacaccaacaaaaaacaaacgaaaaacaacaaaaccaaagacaaacaaccgagagagagacggacccggtgagcccgaggacccatatgccgaaagccgagaagaggaggagagaggagagagagagacgaacccgaagaccgagagaagacgaagaaccggaagaagcgaaccgaagaaggagagacgaacccagggagaagaagcgaaggagaccctgcaaaaagaaacagaataaggaagagagtaaagaagactgagcagtagagaagagcaagagagagctcagagaggtgacagcaagcaactagggagaagaggacccaggtaacagagaaacagtaggacgacagagcagcaaagtagagccacagaagaagtgagaccggtagctagacaaaagcccaagggaggggacgagatcggaggggacgacgagagaaacgagtcggaccgaccgagtcgaaccggatcgggtctgagacgaagcgagaccagggagaaacggagagctgacggaccaaggaaagaggtgaagacccggtgaaagaggccgtgggagacggaggggagaggaggaggctaccaggaggggtgtgagagaaggcaaagaggccgccctggggaaggcgtaggaggaagccaccgcgggtggggtggaagagctacgccgaggagcgcacgaggtaggccagggggcagaaggggggagaggataggcgcagaagagggagcgtgtgccgcgagagggtggggcggcggaaaagagagagggcgtggtggtggtggagagcaggtcgagagccggagaagggtcccgcagagaggactgcc

SEQ ID NO: 455175 - DNA, 196 bp, Homo sapiens
gcggccgcctactactactactactgctcgaattcaagcttctaacgatgtacggggatcttaggtggtttcattaaatgcagcacttggttagcagatgtttaattttttttttaacaacattaacttgtggcctctttctacacctggaaatttactcttgaataaataaaaactcgtttgtcttgtcttctgc

SEQ ID NO: 455176 - DNA, 911 bp, Homo sapiens
  misc_feature (880)..(880): n is a, c, g, or t
catgggcggagactgcaggcttctgggcctgagagggctggagctggctttccggagccgggggcggggcgcgggcgggcctcagctgtggttactggtgacaggtcgcctgactgggctcctccccgggcccgccccgacaggtttgtcttgtgaccgcgggcggccgctgcttctttcccgagcttggaacttcgttatccgcgatgcgtttcctggcagctacattcctgctcctggcgctcagcaccgctgcccaggccgaaccggtgcagttcaaggactgcggttctgtggatggagttataaaggaagtgaatgtgagcccatgccccacccaaccctgccagctgagcaaaggacagtcttacagcgtcaatgtcaccttcaccagcaatattcagtctaaaagcagcaaggccgtggtgcatggcatcctgatgggcgtcccagttccctttcccattcctgagcctgatggttgtaagagtggaattaactgccctatccaaaaagacaagacctatagctacctgaataaactaccagtgaaaagcgaatatccctctataaaactggtggtggagtggcaacttcaggatgacaaaaaccaaagtctcttctgctgggaaatcccagtacagatcgtttctcatctctaagtgcctcattgagttcggtgcatctggccaatgagtctgctgagactcttgacagcacctccagctctgctgcttcaacaacagtgacttgctctccaatggtatccagtgattcgttgaagaggaggtgctctgtagcagaaactgagctccgggtggctggttctcagtggttgtctcatgtctctttttctgataactgctaggtgtttcataancgaccgtgtttattttggactgagggtaggc

SEQ ID NO: 455177 - DNA, 973 bp, Homo sapiens
catgggcggagactgcaggcttctgggcctgagagggctggagctggctttccggagccgggggcggggcgcgggcgggcctcagctgtggttactggtgacaggtcgcctgactgggctcctccccgggcccgccccgacaggtttgtcttgtgaccgcgggcggccgctgcttctttcccgagcttggaacttcgttatccgcgatgcgtttcctggcagctacattcctgctcctggcgctcagcaccgctgcccaggccgaaccggtgcagttcaaggactgcggttctgtggatggagttataaaggaagtgaatgtgagcccatgccccacccaaccctgccagctgagcaaaggacagtcttacagcgtcaatgtcaccttcaccagcaatattcagtctaaaagcagcaaggccgtggtgcatggcatcctgatgggcgtcccagttccctttcccattcctgagcctgatggttgtaagagtggaattaactgccctatccaaaaagacaagacctatagctacctgaataaactaccagtgaaaagcgaatatccctctataaaactggtggtggagtggcaacttcaggatgacaaaaaccaaagtctcttctgctgggaaatcccagtacagatcgtttctcatctctaagtgcctcattgagttcggtgcatctggccaatgagtctgctgagactcttgacagcacctccagctctgctgcttcaacaacagtgacttgctctccaatggtatccagtgattcgttgaagaggaggtgctctgtagcagaaactgagctccgggtggctggttctcagtggttgtctcatgtctctttttctgggatagggcagttaattccactcttacaaccatcaggctcaggactgggaaagggaactgggacgcccatcaggatgccatgcaccacggccttgctgcttttagactgaatattg

SEQ ID NO: 455178 - DNA, 957 bp, Homo sapiens
catgggcggagactgcaggcttctgggcctgagagggctggagctggctttccggagccgggggcggggcgcgggcgggcctcagctgtggttactggtgacaggtcgcctgactgggctcctccccgggcccgccccgacaggtttgtcttgtgaccgcgggcggccgctgcttctttcccgagcttggaacttcgttatccgcgatgcgtttcctggcagctacattcctgctcctggcgctcagcaccgctgcccaggccgaaccggtgcagttcaaggactgcggttctgtggatggagttataaaggaagtgaatgtgagcccatgccccacccaaccctgccagctgagcaaaggacagtcttacagcgtcaatgtcaccttcaccagcaatattcagtctaaaagcagcaaggccgtggtgcatggcatcctgatgggcgtcccagttccctttcccattcctgagcctgatggttgtaagagtggaattaactgccctatccaaaaagacaagacctatagctacctgaataaactaccagtgaaaagcgaatatccctctataaaactggtggtggagtggcaacttcaggatgacaaaagtttctcatctctaagtgcctcattgagttcggtgcatctggccaatgagtctgctgagactcttgacagcacctccagctctgctgcttcaacaacagtgacttgctctccaatggtatccagtgattcgttgaagaggaggtgctctgtagcagaaactgagctccgggtggctggttctcagtggttgtctcatgtctctttttctgtcttaggtggtttcattaaatgcagcacttggttagcagatgtttaattttttttttaacaacattaacttgtggcctctttctacacctggaaatttactcttgaataaataaaaactcgtttgtcttgtcttctgc

SEQ ID NO: 455179 - DNA, 465 bp, Homo sapiens
ctactcgtacaagcacagtggatacgcgaatatccctctataaaactggtggtggagtggcaacttcaggatgacaaaaaccaaagtctcttctgctgggaaatcccagtacagatcgtttctcatctctaagtgcctcattgagttcggtgcatctggccaatgagtctgctgagactcttgacagcacctccagctctgctgcttcaacaacagtgacttgctctccaatggtatccagtgattcgttgaagaggaggtgctctgtagcagaaactgagctccgggtggctggttctcagtggttgtctcatgtctctttttctgtcttaggtggtttcattaaatgcagcacttggttagcagatgtttaattttttttttaacaacattaacttgtggcctctttctacacctggaaatttactcttgaataaataaaaactcgtttgtcttgtcttctgc

SEQ ID NO: 455180 - DNA, 995 bp, Homo sapiens
catgggcggagactgcaggcttctgggcctgagagggctggagctggctttccggagccgggggcggggcgcgggcgggcctcagctgtggttactggtgacaggtcgcctgactgggctcctccccgggcccgccccgacaggtttgtcttgtgaccgcgggcggccgctgcttctttcccgagcttggaacttcgttatccgcgatgcgtttcctggcagctacattcctgctcctggcgctcagcaccgctgcccaggccgaaccggtgcagttcaaggactgcggttctgtggatggagttataaaggaagtgaatgtgagcccatgccccacccaaccctgccagctgagcaaaggacagtcttacagcgtcaatgtcaccttcaccagcaatattcagtctaaaagcagcaaggccgtggtgcatggcatcctgatgggcgtcccagttccctttcccattcctgagcctgatggttgtaagagtggaattaactgccctatccaaaaagacaagacctatagctacctgaataaactaccagtgaaaagcgaatatccctctataaaactggtggtggagtggcaacttcaggatgacaaaaaccaaagtctcttctgctgggaaatcccagtacagatcgtttctcatctctaagtgcctcattgagttcggtgcatctggccaatgagtctgctgagactcttgacagcacctccagctctgctgcttcaacaacagtgacttgctctccaatggtatccagtgattcgttgaagaggaggtgctctgtagcagaaactgagctccgggtggctggttctcagtggttgtctcatgtctctttttctgtcttaggtggtttcattaaatgcagcacttggttagcagatgtttaattttttttttaacaacattaacttgtggcctctttctacacctggaaatttactcttgaataaataaaaactcgtttgtcttgtcttctgc

SEQ ID NO: 455181 - DNA, 1075 bp, Homo sapiens
catgggcggagactgcaggcttctgggcctgagagggctggagctggctttccggagccgggggcggggcgcgggcgggcctcagctgtggttactggtgacaggtcgcctgactgggctcctccccgggcccgccccgacaggtttgtcttgtgaccgcgggcggccgctgcttctttcccgagcttggaacttcgttatccgcgatgcgtttcctggcagctacattcctgctcctggcgctcagcaccgctgcccaggccgaaccggtgcagttcaaggactgcggttctgtggatggagttataaaggaagtgaatgtgagcccatgccccacccaaccctgccagctgagcaaaggacagtcttacagcgtcaatgtcaccttcaccagcaatattcagtctaaaagcagcaaggccgtggtgcatggcatcctgatgggcgtcccagttccctttcccattcctgagcctgatggttgtaagagtggaattaactgccctatccaaaaagacaagacctatagctacctgaataaactaccagtgaaaagcgaatatccctctataaaactggtggtggagtggcaacttcaggatgacaaaaaccaaagtctcttctgctgggaaatcccagtacagatcgtttctcatctctaagtgcctcattgagttcggtgcatctggccaatgagtctgctgagactcttgacagcacctccagctctgctgcttcaacaacagtgacttgctctccaatggtatccagtgattcgttgaagaggaggtgctctgtagcagaaactgagctccgggtggctggttctcagtggttgtctcatgtctctttttctgtcttaggtggtttcattaaatgcagcacttggttagcagatgtttaattttttttttaacaacatacacataactggggcttttaactggattacctgataataaaatcttggttgcaacaaaaaaaaaatgtgggcggccgaagttaaaatttggggccaaagaaagagcaaccgcgaggggtgcaaaaccggcggtaaaatgttttaacaaccact

SEQ ID NO: 455182 - DNA, 1003 bp, Homo sapiens
ggtcggacccaattcattccagcgtagcgtcaatgtcaccttcaccagcaatattcagtctaaaagcagcaaggccgtggtgcatggcatcctgatgggcgtcccagttccctttcccattcctgagcctgatggttgtaagagtggaattaactgccctatccaaaaagacaagacctatagctacctgaataaactaccagtgaaaagcgaatatccctctataaaactggtggtggagtggcaacttcaggatgacaaaaaccaaagtctcttctgctgggaaatcccagtacagatcgtttctcatctctaagtgcctcattgagttcggtgcatctggccaatgagtctgctgagactcttgacagcacctccagctctgctgcttcaacaacagtgacttgctctccaatggtatccagtgattcgttgaagaggaggtgctctgtagcagaaactgagctccgggtggctggttctcagtggttgtctcatgtctctttttctgtcttaggtggtttcattaaatgcagcacttggttagcagatgtttaattttttttttaacaacattaacttgtggcctctttctacacctggaaatttactcttgaataaataaaaactcgtttgtcttgtcttctgcaaacaaaaaaaaaaaaaaacaaaaaaaaaaaaaaaaaaaggggggggggggaaaaaaaacccgggggggggccatggccccttcttttgaaaaagggggccaagaggagagagttaaaaaaagagagaggcgcgcgaggtaaacacagggcggggggaaaccgacgcgcgcacttgggaggacccctctcggggggcgcatgggggaccacagccaatgagcgccgcgaaaaaatgggttgtgggagccggcgtgcgccgaatgcttgttttagtatccgtcgcataacacggggggacaggccgaatgaacgacgccgatcatgacaagtagaggagtgcagacgcccttgcc

SEQ ID NO: 455183 - DNA, 516 bp, Homo sapiens
  misc_feature (502)..(502): n is a, c, g, or t
  misc_feature (509)..(509): n is a, c, g, or t
agaggatccccatagcgacaccgtaccgcgatgcgtttcctggcagctacattcctgctcctggcgctcagcaccgctgcccaggccgaaccggtgcagttcaaggactgcggttctgtggatggagttataaaggaagtgaatgtgagcccatgccccacccaaccctgccagctgagcaaaggacagtcttacagcgtcaatgtcaccttcaccagcaatattcagtctaaaagcagcaaggccgtggtgcatggcatcctgatgggcgtcccagttccctttcccattcctgagcctgatggttgtaagagtggaattaactgccctatccaaaaagacaagacctatagctacctgaataaactaccagtgaaaagcgaatatccctctataaaactggtggtggagtggcaacttcaggatgacaaaaaccaaagtctcttctgctgggaaatcccagtacagatcttctctctctaatgcctcattgatacgttcnctatggnccggcta

SEQ ID NO: 455184 - DNA, 1349 bp, Homo sapiens
catgggcggagactgcaggcttctgggcctgagagggctggagctggctttccggagccgggggcggggcgcgggcgggcctcagctgtggttactggtgacaggtcgcctgactgggctcctccccgggcccgccccgacaggtttgtcttgtgaccgcgggcggccgctgcttctttcccgagcttggaacttcgttatccgcgatgcgtttcctggcagctacattcctgctcctggcgctcagcaccgctgcccaggccgaaccggtgcagttcaaggactgcggttctgtggatggagttataaaggaagtgaatgtgagcccatgccccacccaaccctgccagctgagcaaaggacagtcttacagcgtcaatgtcaccttcaccagcaatattcagtctaaaagcagcaaggccgtggtgcatggcatcctgatgggcgtcccagttccctttcccattcctgagcctgatggttgtaagagtggaattaactgccctatccaaaaagacaagacctatagctacctgaataaactaccagtgaaaagcgaatatccctctataaaactggtggtggagtggcaacttcaggatgacaaaaaccaaagtctcttctgctgggaaatcccagtacagatcgtttctcatctctaagtgcctcattgagttcggtgcatctggccaatgagtctgctgagactcttgacagcacctccagctctgctgcttcaacaacagtgacttgctctccaatggtatccagtgattcgttgaagaggaggtgctctgtagcagaaactgagctccgggtggctggttctcagtggttgtctcatgtctctttttctgtcttaggtggtttcattaaatgcagcacttggttagcagatgtttaattttttttttaacaacattaacttgtggcctctttctacacctggaaatttactcttgaataaataaaaactcgtttgtcttgtcttctgcaaacaaaaaaaaaaaaaaacaaaaaaaaaaaaaaaaaaaggggggggggggaaaaaaaacccgggggggggccatggccccttcttttgaaaaagggggccaagaggagagagttaaaaaaagagagaggcgcgcgaggtaaacacagggcggggggaaaccgacgcgcgcacttgggaggacccctctcggggggcgcatgggggaccacagccaatgagcgccgcgaaaaaatgggttgtgggagccggcgtgcgccgaatgcttgttttagtatccgtcgcataacacggggggacaggccgaatgaacgacgccgatcatgacaagtagaggagtgcagacgcccttgcc

SEQ ID NO: 455185 - DNA, 1409 bp, Homo sapiens
catgggcggagactgcaggcttctgggcctgagagggctggagctggctttccggagccgggggcggggcgcgggcgggcctcagctgtggttactggtgacaggtcgcctgactgggctcctccccgggcccgccccgacaggtttgtcttgtgaccgcgggcggccgctgcttctttcccgagcttggaacttcgttatccgcgatgcgtttcctggcagctacattcctgctcctggcgctcagcaccgctgcccaggccgaaccggtgcagttcaaggactgcggttctgtggatggagttataaaggaagtgaatgtgagcccatgccccacccaaccctgccagctgagcaaaggacagtcttacagcgtcaatgtcaccttcaccagcaatattcagtctaaaagcagcaaggccgtggtgcatggcatcctgatgggcgtcccagttccctttcccattcctgagcctgatggttgtaagagtggaattaactgccctatccaaaaagacaagacctatagctacctgaataaactaccagtgaaaagcgaatatccctctataaaactggtggtggagtggcaacttcaggatgacaaaaaccaaagtctcttctgctgggaaatcccagtacagatcataagtctatctgggggtgagagggcatgggtggagggaagaaagtggaggagaaatcagactgaaactaaatcagtgccataagataaaaggaatttcaagactgctgttttatgcctctcaacctctaaaagcatctgagaccctatttcctgagagctcagaactgttgcctttgtaatatcctttgttaaaaaaaaaaaaggttgaaggaaagaagagagagtgagactgtagagattgatttaactgtcttcattggtttttttctgtcggagtaaggaaggtccagccagacaggacctgaaggaggttgcttaggaatgtctgataacttgccctagggttattgccctgacagtggaggaaaggttccaaaccacttccactgagctgggacattacatccacagggtttctcatctctaagtgcctcattgagttcggtgcatctggccaatgagtctgctgagactcttgacagcacctccagctctgctgcttcaacaacagtgacttgctctccaatggtatccagtgattcgttgaagaggaggtgctctgtagcagaaactgagctccgggtggctggttctcagtggttgtctcatgtctctttttctgtcttaggtggtttcattaaatgcagcacttggttagcagatgtttaattttttttttaacaacattaacttgtggcctctttctacacctggaaatttactcttgaataaataaaaactcgtttgtcttgtcttctgc

SEQ ID NO: 455186 - DNA, 318 bp, Homo sapiens
cattcggggagggttaggcaaggatggagactctggggacctgctctcagccacaggggacaaagcacacctgggcaccagcctcctgggggccctggaggtgatttacaggcccaacccacgctgcatgcatgctccgggtggctggttctcagtggttgtctcatgtctctttttctgtcttaggtggtttcattaaatgcagcacttggttagcagatgtttaattttttttttaacaacattaacttgtggcctctttctacacctggaaatttactcttgaataaataaaaactcgtttgtcttgtcttctgc

SEQ ID NO: 455187 - DNA, 1836 bp, Homo sapiens
agcggagagtccccggagccgcgagctgggagcgctgtgccgggagccgggagccgagcgcgccgggctggggccggggccggagcggagcggagagggagcgcgcccgccccagccccgagtcccgccgccttccctcccgccgcagcgcgggcccaccggccgccgccccagccatggagcaagacaacagcccccgaaagatccagttcacggtcccgctgctggagccgcaccttgaccccgaggcggcggagcagattcggaggcgccgccccacccctgccaccctcgtgctgaccagtgaccagtcatccccagagatagatgaagaccggatccccaacccacatctcaagtccactttggcaatgtctccacggcaacggaagaagatgacaaggatcacacccacaatgaaagagctccagatgatggttgaacatcacctggggcaacagcagcaaggagaggaacctgagggggccgctgagagcacaggaacccaggagtcccgcccacctgggatcccagacacagaagtggagtcaaggctgggcacctctgggacagcaaaaaaaactgcagaatgcatccctaaaactcacgagagaggcagtaaggaacccagcacaaaagaaccctcaacccatataccaccactggattccaagggagccaactcggtctgagagaggaggaggtatcttgggatcaagactgcagtttgggaatgcatggacaccggatttgtttcttattccttcacttttggggaaaatctcttgtttttaaaaagtgataaatttggtgttaggtccttggcactttccttcttttccaactgggagaatcctttctccctgccttcttgccctgccctctctgtagcccccaccctcctgccaagctgcctctgggaaggaagaaacaggagctaggcagaagccttgagcagggaagagttcttcccttagccctgactttacttgctgtgggaagagagatgagggtcagataggtgggaggactaacttccagggtgccaagaaggaagaaaagccccaggttctcttttcttattgaggaacgatccgaccacctcacaggcctgccctgcagctggaagactcggcgctctaaggcctgtgccgtgtccagctgtgactgtgcggtgggctccatctgctggacaaaaggggaactgcaccatggcacttggcccatgggaaagagggtgtggtggtgtgccgatacctcctcgcctgccctccaagccccagctgccttccttttggattcccaagcttcaggatgtgttccctcttccagctgtgggaccgctgtcccttatttcaacccgttagcaacaatggatagagaacacagtggctattaatgaagaggcccatgctggagactggaagggttcccttgtcctagacattgaggggcccagataagaccaaaaccaagcataagagaagaaactgtctcagatctcacggccaggcctctctcctgctgctgtttttgattttcccaggtagtgggagagaggaaaggagggaaggcaagattctttccccctccctgctgaagcatgtggtacagaggcaagagcagagcctgagaagcgtcaggtcccacttctgccatgcagctactatgagccctcggggcctcctcctgggcctcagcttgcccagatacatacctaaatatatatatatatatatgagggagaacgcctcacccagattttatcatgctggaaagagtgtatgtatgtgaagatgcttggtcaacttgtacccagtgaacacacacagtcag

SEQ ID NO: 455188 - DNA, 393 bp, Homo sapiens
cggcacgagggggcgacagagcaagactccgtctaaaaataaataggtaaataaataaaaaataaataaatatcactggggcaactggacatggtggctcacgcctgtaatcctagcactttgggagattgaggtgggcgggttgcgtgagcccagaaggttgagagcagcctaggcaacatagagaggcagtaaggaacccagcacaaaagaaccctcaacccatataccaccactggattccaagggagccaactcggtctgagagaggaggaggtatcttgggatcaagactgcagtttgggaatgcatggacaccggatttgtttcttattccttcacttttggggaaaatctcttgtttttaaaaagtgataaatttggtgttaggtc

SEQ ID NO: 455189 - DNA, 820 bp, Homo sapiens
agcggagagtccccggagccgcgagctgggagcgctgtgccgggagccgggagccgagcgcgccgggctggggccggggccggagcggagcggagagggagcgcgcccgccccagccccgagtcccgccgccttccctcccgccgcagcgcgggcccaccggccgccgccccagccatggagcaagacaacagcccccgaaagatccagttcacggtcccgctgctggagccgcaccttgaccccgaggcggcggagcagattcggaggcgccgccccacccctgccaccctcgtgctgaccagtgaccagtcatccccagagatagatgaagaccggatccccaacccacatctcaagtccactttggcaatgtctccacggcaacggaagaagatgacaaggatcacacccacaatgaaagagctccagatgatggttgaacatcacctggggcaacagcagcaaggagaggaacctgagggggccgctgagagcacaggaacccaggagtcccgcccacctgggatcccagacacagaagtggagtcaaggctgggcacctctgggacagcaaaaaaaactgcagaatgcatccctaaaactcacgagagaggcagtaaggaacccagcacaaaagaaccctcaacccatataccaccactggattccaagggagccaactcggtctgagagaggaggaggtatcttgggatcaagactgcagtttgggaatgcatggacaccggatttgtttcttattccttcacttttggggaaaatctcttgtttttaaaaagtgataaatttggtgttaggtc

SEQ ID NO: 455190 - DNA, 5198 bp, Homo sapiens
cgggtccgggcggagcgcggggtgcggagggcggaggcggctccggcgcccgctctgcccgccgctgggtccgaccgcgctcgccttccttgcagccgcgcctcggccccatggacgccctgtgcggttccggggagctcggctccaagttctgggactccaacctgtctgtgcacacagaaaacccggacctcactccctgcttccagaactccctgctggcctgggtgccctgcatctacctgtgggtcgccctgccctgctacttgctctacctgcggcaccattgtcgtggctacatcatcctctcccacctgtccaagctcaagatggtcctgggtgtcctgctgtggtgcgtctcctgggcggaccttttttactccttccatggcctggtccatggccgggcccctgcccctgttttctttgtcacccccttggtggtgggggtcaccatgctgctggccaccctgctgatacagtatgagcggctgcagggcgtacagtcttcgggggtcctcattatcttctggttcctgtgtgtggtctgcgccatcgtcccattccgctccaagatccttttagccaaggcagagggtgagatctcagaccccttccgcttcaccaccttctacatccactttgccctggtactctctgccctcatcttggcctgcttcagggagaaacctccatttttctccgcaaagaatgtcgaccctaacccctaccctgagaccagcgctggctttctctcccgcctgtttttctggtggttcacaaagatggccatctatggctaccggcatcccctggaggagaaggacctctggtccctaaaggaagaggacagatcccagatggtggtgcagcagctgctggaggcatggaggaagcaggaaaagcagacggcacgacacaaggcttcagcagcacctgggaaaaatgcctccggcgaggacgaggtgctgctgggtgcccggcccaggccccggaagccctccttcctgaaggccctgctggccaccttcggctccagcttcctcatcagtgcctgcttcaagcttatccaggacctgctctccttcatcaatccacagctgctcagcatcctgatcaggtttatctccaaccccatggccccctcctggtggggcttcctggtggctgggctgatgttcctgtgctccatgatgcagtcgctgatcttacaacactattaccactacatctttgtgactggggtgaagtttcgtactgggatcatgggtgtcatctacaggaaggctctggttatcaccaactcagtcaaacgtgcgtccactgtgggggaaattgtcaacctcatgtcagtggatgcccagcgcttcatggaccttgcccccttcctcaatctgctgtggtcagcacccctgcagatcatcctggcgatctacttcctctggcagaacctaggtccctctgtcctggctggagtcgctttcatggtcttgctgattccactcaacggagctgtggccgtgaagatgcgcgccttccaggtaaagcaaatgaaattgaaggactcgcgcatcaagctgatgagtgagatcctgaacggcatcaaggtgctgaagctgtacgcctgggagcccagcttcctgaagcaggtggagggcatcaggcagggtgagctccagctgctgcgcacggcggcctacctccacaccacaaccaccttcacctggatgtgcagccccttcctggtgaccctgatcaccctctgggtgtacgtgtacgtggacccaaacaatgtgctggacgccgagaaggcctttgtgtctgtgtccttgtttaatatcttaagacttcccctcaacatgctgccccagttaatcagcaacctgactcaggccagtgtgtctctgaaacggatccagcaattcctgagccaagaggaacttgacccccagagtgtggaaagaaagaccatctccccaggctatgccatcaccatacacagtggcaccttcacctgggcccaggacctgccccccactctgcacagcctagacatccaggtcccgaaaggggcactggtggccgtggtggggcctgtgggctgtgggaagtcctccctggtgtctgccctgctgggagagatggagaagctagaaggcaaagtgcacatgaagggctccgtggcctatgtgccccagcaggcatggatccagaactgcactcttcaggaaaacgtgcttttcggcaaagccctgaaccccaagcgctaccagcagactctggaggcctgtgccttgctagctgacctggagatgctgcctggtggggatcagacagagattggagagaagggcattaacctgtctgggggccagcggcagcgggtcagtctggctcgagctgtttacagtgatgccgatattttcttgctggatgacccactgtccgcggtggactctcatgtggccaagcacatctttgaccacgtcatcgggccagaaggcgtgctggcaggcaagacgcgagtgctggtgacgcacggcattagcttcctgccccagacagacttcatcattgtgctagctgatggacaggtgtctgagatgggcccgtacccagccctgctgcagcgcaacggctcctttgccaactttctctgcaactatgcccccgatgaggaccaagggcacctggaggacagctggaccgcgttggaaggtgcagaggataaggaggcactgctgattgaagacacactcagcaaccacacggatctgacagacaatgatccagtcacctatgtggtccagaagcagtttatgagacagctgagtgccctgtcctcagatggggagggacagggtcggcctgtaccccggaggcacctgggtccatcagagaaggtgcaggtgacagaggcgaaggcagatggggcactgacccaggaggagaaagcagccattggcactgtggagctcagtgtgttctgggattatgccaaggccgtggggctctgtaccacgctggccatctgtctcctgtatgtgggtcaaagtgcggctgccattggagccaatgtgtggctcagtgcctggacaaatgatgccatggcagacagtagacagaacaacacttccctgaggctgggcgtctatgctgctttaggaattctgcaagggttcttggtgatgctggcagccatggccatggcagcgggtggcatccaggctgcccgtgtgttgcaccaggcactgctgcacaacaagatacgctcgccacagtccttctttgacaccacaccatcaggccgcatcctgaactgcttctccaaggacatctatgtcgttgatgaggttctggcccctgtcatcctcatgctgctcaattccttcttcaacgccatctccactcttgtggtcatcatggccagcacgccgctcttcactgtggtcatcctgcccctggctgtgctctacaccttagtgcagcgcttctatgcagccacatcacggcaactgaagcggctggaatcagtcagccgctcacctatctactcccacttttcggagacagtgactggtgccagtgtcatccgggcctacaaccgcagccgggattttgagatcatcagtgatactaaggtggatgccaaccagagaagctgctacccctacatcatctccaaccggtggctgagcatcggagtggagttcgtggggaactgcgtggtgctctttgctgcactatttgccgtcatcgggaggagcagcctgaacccggggctggtgggcctttctgtgtcctactccttgcaggtgacatttgctctgaactggatgatacgaatgatgtcagatttggaatctaacatcgtggctgtggagagggtcaaggagtactccaagacagagacagaggcgccctgggtggtggaaggcagccgccctcccgaaggttggcccccacgtggggaggtggagttccggaattattctgtgcgctaccggccgggcctagacctggtgctgagagacctgagtctgcatgtgcacggtggcgagaaggtggggatcgtgggccgcactggggctggcaagtcttccatgaccctttgcctgttccgcatcctggaggcggcaaagggtgaaatccgcattgatggcctcaatgtggcagacatcggcctccatgacctgcgctctcagctgaccatcatcccgcaggaccccatcctgttctcggggaccctgcgcatgaacctggaccccttcggcagctactcagaggaggacatttggtgggctttggagctgtcccacctgcacacgtttgtgagctcccagccggcaggcctggacttccagtgctcagagggcggggagaatctcagcgtgggccagaggcagctcgtgtgcctggcccgagccctgctccgcaagagccgcatcctggttttagacgaggccacagctgccatcgacctggagactgacaacctcatccaggctaccatccgcacccagtttgatacctgcactgtcctgaccatcgcacaccggcttaacactatcatggactacaccagggtcctggtcctggacaaaggagtagtagctgaatttgattctccagccaacctcattgcagctagaggcatcttctacgggatggccagagatgctggacttgcctaaaatatattcctgagatttcctcctggcctttcctggttttcatcaggaaggaaatgacaccaaatatgtccgcagaatggacttgatagcaaacactgggggcaccttaagattttgcacctgtaaagtgccttacagggtaactgtgctgaatgctttagatgaggaaatgatccccaagtggtgaatgacacgcctaaggtcacagctagtttgagccagttagactagtccccggtctcccgattcccaactgagtgttatttgcacactgcactgttttcaaataacgattttatgaaatgacctctgtcctccctctgatttttcatattttctaaagtttcgtttctgttttttaataaaaagctttttcctcctggaacagaagacagctgctgggtcaggccacccctaggaactcagtcctgtactctggggtgctgcctgaatccattaaaaatgggagtactgatgaaataaaactacatggtcaacagtata

SEQ ID NO: 455191 - DNA, 5402 bp, Homo sapiens
cgggtccgggcggagcgcggggtgcggagggcggaggcggctccggcgcccgctctgcccgccgctgggtccgaccgcgctcgccttccttgcagccgcgcctcggccccatggacgccctgtgcggttccggggagctcggctccaagttctgggactccaacctgtctgtgcacacagaaaacccggacctcactccctgcttccagaactccctgctggcctgggtgccctgcatctacctgtgggtcgccctgccctgctacttgctctacctgcggcaccattgtcgtggctacatcatcctctcccacctgtccaagctcaagatggtcctgggtgtcctgctgtggtgcgtctcctgggcggaccttttttactccttccatggcctggtccatggccgggcccctgcccctgttttctttgtcacccccttggtggtgggggtcaccatgctgctggccaccctgctgatacagtatgagcggctgcagggcgtacagtcttcgggggtcctcattatcttctggttcctgtgtgtggtctgcgccatcgtcccattccgctccaagatccttttagccaaggcagagggtgagatctcagaccccttccgcttcaccaccttctacatccactttgccctggtactctctgccctcatcttggcctgcttcagggagaaacctccatttttctccgcaaagaatgtcgaccctaacccctaccctgagaccagcgctggctttctctcccgcctgtttttctggtggttcacaaagctgctaaaccctgaccctctgcggggctgcctgccgggcttcacctccccccaggatggccatctatggctaccggcatcccctggaggagaaggacctctggtccctaaaggaagaggacagatcccagatggtggtgcagcagctgctggaggcatggaggaagcaggaaaagcagacggcacgacacaaggcttcagcagcacctgggaaaaatgcctccggcgaggacgaggtgctgctgggtgcccggcccaggccccggaagccctccttcctgaaggccctgctggccaccttcggctccagcttcctcatcagtgcctgcttcaagcttatccaggacctgctctccttcatcaatccacagctgctcagcatcctgatcaggtttatctccaaccccatggccccctcctggtggggcttcctggtggctgggctgatgttcctgtgctccatgatgcagtcgctgatcttacaacactattaccactacatctttgtgactggggtgaagtttcgtactgggatcatgggtgtcatctacaggaaggctctggttatcaccaactcagtcaaacgtgcgtccactgtgggggaaattgtcaacctcatgtcagtggatgcccagcgcttcatggaccttgcccccttcctcaatctgctgtggtcagcacccctgcagatcatcctggcgatctacttcctctggcagaacctaggtccctctgtcctggctggagtcgctttcatggtcttgctgattccactcaacggagctgtggccgtgaagatgcgcgccttccaggtaaagcaaatgaaattgaaggactcgcgcatcaagctgatgagtgagatcctgaacggcatcaaggtgctgaagctgtacgcctgggagcccagcttcctgaagcaggtggagggcatcaggcagggtgagctccagctgctgcgcacggcggcctacctccacaccacaaccaccttcacctggatgtgcagccccttcctggtgaccctgatcaccctctgggtgtacgtgtacgtggacccaaacaatgtgctggacgccgagaaggcctttgtgtctgtgtccttgtttaatatcttaagacttcccctcaacatgctgccccagttaatcagcaacctgactcaggccagtgtgtctctgaaacggatccagcaattcctgagccaagaggaacttgacccccagagtgtggaaagaaagaccatctccccaggctatgccatcaccatacacagtggcaccttcacctgggcccaggacctgccccccactctgcacagcctagacatccaggtcccgaaaggggcactggtggccgtggtggggcctgtgggctgtgggaagtcctccctggtgtctgccctgctgggagagatggagaagctagaaggcaaagtgcacatgaagggctccgtggcctatgtgccccagcaggcatggatccagaactgcactcttcaggaaaacgtgcttttcggcaaagccctgaaccccaagcgctaccagcagactctggaggcctgtgccttgctagctgacctggagatgctgcctggtggggatcagacagagattggagagaagggcattaacctgtctgggggccagcggcagcgggtcagtctggctcgagctgtttacagtgatgccgatattttcttgctggatgacccactgtccgcggtggactctcatgtggccaagcacatctttgaccacgtcatcgggccagaaggcgtgctggcaggcaagacgcgagtgctggtgacgcacggcattagcttcctgccccagacagacttcatcattgtgctagctgatggacaggtgtctgagatgggcccgtacccagccctgctgcagcgcaacggctcctttgccaactttctctgcaactatgcccccgatgaggaccaagggcacctggaggacagctggaccgcgttggaaggtgcagaggataaggaggcactgctgattgaagacacactcagcaaccacacggatctgacagacaatgatccagtcacctatgtggtccagaagcagtttatgagacagctgagtgccctgtcctcagatggggagggacagggtcggcctgtaccccggaggcacctgggtccatcagagaaggtgcaggtgacagaggcgaaggcagatggggcactgacccaggaggagaaagcagccattggcactgtggagctcagtgtgttctgggattatgccaaggccgtggggctctgtaccacgctggccatctgtctcctgtatgtgggtcaaagtgcggctgccattggagccaatgtgtggctcagtgcctggacaaatgatgccatggcagacagtagacagaacaacacttccctgaggctgggcgtctatgctgctttaggaattctgcaagggttcttggtgatgctggcagccatggccatggcagcgggtggcatccaggctgcccgtgtgttgcaccaggcactgctgcacaacaagatacgctcgccacagtccttctttgacaccacaccatcaggccgcatcctgaactgcttctccaaggacatctatgtcgttgatgaggttctggcccctgtcatcctcatgctgctcaattccttcttcaacgccatctccactcttgtggtcatcatggccagcacgccgctcttcactgtggtcatcctgcccctggctgtgctctacaccttagtgcagcgcttctatgcagccacatcacggcaactgaagcggctggaatcagtcagccgctcacctatctactcccacttttcggagacagtgactggtgccagtgtcatccgggcctacaaccgcagccgggattttgagatcatcagtgatactaaggtggatgccaaccagagaagctgctacccctacatcatctccaaccggtcagaagccgcctccctcgctccctgctcctccaggaattcccagcaggctctctggtgttcagggtccttgtccctcctttcccctaagcagaaaactggccctgccctgcccctgccccatttcctcctcatctgatcccccataggtggctgagcatcggagtggagttcgtggggaactgcgtggtgctctttgctgcactatttgccgtcatcgggaggagcagcctgaacccggggctggtgggcctttctgtgtcctactccttgcaggtgacatttgctctgaactggatgatacgaatgatgtcagatttggaatctaacatcgtggctgtggagagggtcaaggagtactccaagacagagacagaggcgccctgggtggtggaaggcagccgccctcccgaaggttggcccccacgtggggaggtggagttccggaattattctgtgcgctaccggccgggcctagacctggtgctgagagacctgagtctgcatgtgcacggtggcgagaaggtggggatcgtgggccgcactggggctggcaagtcttccatgaccctttgcctgttccgcatcctggaggcggcaaagggtgaaatccgcattgatggcctcaatgtggcagacatcggcctccatgacctgcgctctcagctgaccatcatcccgcaggaccccatcctgttctcggggaccctgcgcatgaacctggaccccttcggcagctactcagaggaggacatttggtgggctttggagctgtcccacctgcacacgtttgtgagctcccagccggcaggcctggacttccagtgctcagagggcggggagaatctcagcgtgggccagaggcagctcgtgtgcctggcccgagccctgctccgcaagagccgcatcctggttttagacgaggccacagctgccatcgacctggagactgacaacctcatccaggctaccatccgcacccagtttgatacctgcactgtcctgaccatcgcacaccggcttaacactatcatggactacaccagggtcctggtcctggacaaaggagtagtagctgaatttgattctccagccaacctcattgcagctagaggcatcttctacgggatggccagagatgctggacttgcctaaaatatattcctgagatttcctcctggcctttcctggttttcatcaggaaggaaatgacaccaaatatgtccgcagaatggacttgatagcaaacactgggggcaccttaagattttgcacctgtaaagtgccttacagggtaactgtgctgaatgctttagatgaggaaatgatccccaagtggtgaatgacacgcctaaggtcacagctagtttgagccagttagactagtccccggtctcccgattcccaactgagtgttatttgcacactgcactgttttcaaataacgattttatgaaatgacctctgtcctccctctgatttttcatattttctaaagtttcgtttctgttttttaataaaaagctttttcctcctggaacagaagacagctgctgggtcaggccacccctaggaactcagtcctgtactctggggtgctgcctgaatccattaaaaatgggagtactgatgaaataaaactacatggtcaacagtata

SEQ ID NO: 455192 - DNA, 4799 bp, Homo sapiens
cgggtccgggcggagcgcggggtgcggagggcggaggcggctccggcgcccgctctgcccgccgctgggtccgaccgcgctcgccttccttgcagccgcgcctcggccccatggacgccctgtgcggttccggggagctcggctccaagttctgggactccaacctgtctgtgcacacagaaaacccggacctcactccctgcttccagaactccctgctggcctgggtgccctgcatctacctgtgggtcgccctgccctgctacttgctctacctgcggcaccattgtcgtggctacatcatcctctcccacctgtccaagctcaagatggtcctgggtgtcctgctgtggtgcgtctcctgggcggaccttttttactccttccatggcctggtccatggccgggcccctgcccctgttttctttgtcacccccttggtggtgggggtcaccatgctgctggccaccctgctgatacagtatgagcggctgcagggcgtacagtcttcgggggtcctcattatcttctggttcctgtgtgtggtctgcgccatcgtcccattccgctccaagatccttttagccaaggcagagggtgagatctcagaccccttccgcttcaccaccttctacatccactttgccctggtactctctgccctcatcttggcctgcttcagggagaaacctccatttttctccgcaaagaatgtcgaccctaacccctaccctgagaccagcgctggctttctctcccgcctgtttttctggtggttcacaaagatggccatctatggctaccggcatcccctggaggagaaggacctctggtccctaaaggaagaggacagatcccagatggtggtgcagcagctgctggaggcatggaggaagcaggaaaagcagacggcacgacacaaggcttcagcagcacctgggaaaaatgcctccggcgaggacgaggtgctgctgggtgcccggcccaggccccggaagccctccttcctgaaggccctgctggccaccttcggctccagcttcctcatcagtgcctgcttcaagcttatccaggacctgctctccttcatcaatccacagctgctcagcatcctgatcaggtttatctccaaccccatggccccctcctggtggggcttcctggtggctgggctgatgttcctgtgctccatgatgcagtcgctgatcttacaacactattaccactacatctttgtgactggggtgaagtttcgtactgggatcatgggtgtcatctacaggaaggctctggttatcaccaactcagtcaaacgtgcgtccactgtgggggaaattgtcaacctcatgtcagtggatgcccagcgcttcatggaccttgcccccttcctcaatctgctgtggtcagcacccctgcagatcatcctggcgatctacttcctctggcagaacctaggtccctctgtcctggctggagtcgctttcatggtcttgctgattccactcaacggagctgtggccgtgaagatgcgcgccttccaggtaaagcaaatgaaattgaaggactcgcgcatcaagctgatgagtgagatcctgaacggcatcaaggtgctgaagctgtacgcctgggagcccagcttcctgaagcaggtggagggcatcaggcagggtgagctccagctgctgcgcacggcggcctacctccacaccacaaccaccttcacctggatgtgcagccccttcctggtgaccctgatcaccctctgggtgtacgtgtacgtggacccaaacaatgtgctggacgccgagaaggcctttgtgtctgtgtccttgtttaatatcttaagacttcccctcaacatgctgccccagttaatcagcaacctgactcaggccagtgtgtctctgaaacggatccagcaattcctgagccaagaggaacttgacccccagagtgtggaaagaaagaccatctccccaggctatgccatcaccatacacagtggcaccttcacctgggcccaggacctgccccccactctgcacagcctagacatccaggtcccgaaaggggcactggtggccgtggtggggcctgtgggctgtgggaagtcctccctggtgtctgccctgctgggagagatggagaagctagaaggcaaagtgcacatgaagggctccgtggcctatgtgccccagcaggcatggatccagaactgcactcttcaggaaaacgtgcttttcggcaaagccctgaaccccaagcgctaccagcagactctggaggcctgtgccttgctagctgacctggagatgctgcctggtggggatcagacagagattggagagaagggcattaacctgtctgggggccagcggcagcgggtcagtctggctcgagctgtttacagtgatgccgatattttcttgctggatgacccactgtccgcggtggactctcatgtggccaagcacatctttgaccacgtcatcgggccagaaggcgtgctggcaggcaagacgcgagtgctggtgacgcacggcattagcttcctgccccagacagacttcatcattgtgctagctgatggacaggtgtctgagatgggcccgtacccagccctgctgcagcgcaacggctcctttgccaactttctctgcaactatgcccccgatgaggaccaagggcacctggaggacagctggaccgcgttggaaggtgcagaggataaggaggcactgctgattgaagacacactcagcaaccacacggatctgacagacaatgatccagtcacctatgtggtccagaagcagtttatgagacagctgagtgccctgtcctcagatggggagggacagggtcggcctgtaccccggaggcacctgggtccatcagagaaggtgcaggtgacagaggcgaaggcagatggggcactgacccaggaggagaaagcagccattggcactgtggagctcagtgtgttctgggattatgccaaggccgtggggctctgtaccacgctggccatctgtctcctgtatgtgggtcaaagtgcggctgccattggagccaatgtgtggctcagtgcctggacaaatgatgccatggcagacagtagacagaacaacacttccctgaggctgggcgtctatgctgctttaggaattctgcaagggttcttggtgatgctggcagccatggccatggcagcgggtggcatccaggctgcccgtgtgttgcaccaggcactgctgcacaacaagatacgctcgccacagtccttctttgacaccacaccatcaggccgcatcctgaactgcttctccaaggacatctatgtcgttgatgaggttctggcccctgtcatcctcatgctgctcaattccttcttcaacgccatctccactcttgtggtcatcatggccagcacgccgctcttcactgtggtcatcctgcccctggctgtgctctacaccttagtgcagcgcttctatgcagccacatcacggcaactgaagcggctggaatcagtcagccgctcacctatctactcccacttttcggagacagtgactggtgccagtgtcatccgggcctacaaccgcagccgggattttgagatcatcagtgatactaaggtggatgccaaccagagaagctgctacccctacatcatctccaaccggtggctgagcatcggagtggagttcgtggggaactgcgtggtgctctttgctgcactatttgccgtcatcgggaggagcagcctgaacccggggctggtgggcctttctgtgtcctactccttgcaggtgacatttgctctgaactggatgatacgaatgatgtcagatttggaatctaacatcgtggctgtggagagggtcaaggagtactccaagacagagacagaggcgccctgggtggtggaaggcagccgccctcccgaaggttggcccccacgtggggaggtggagttccggaattattctgtgcgctaccggccgggcctagacctggtgctgagagacctgagtctgcatgtgcacggtggcgagaaggtggggatcgtgggccgcactggggctggcaagtcttccatgaccctttgcctgttccgcatcctggaggcggcaaagggtgaaatccgcattgatggcctcaatgtggcagacatcggcctccatgacctgcgctctcagctgaccatcatcccgcaggaccccatcctgttctcggggaccctgcgcatgaacctggaccccttcggcagctactcagaggaggacatttggtgggctttggagctgtcccacctgcacacgtttgtgagctcccagccggcaggcctggacttccagtgctcagagggcggggagaatctcagcgtgggccagaggcagctcgtgtgcctggcccgagccctgctccgcaagagccgcatcctggttttagacgaggccacagctgccatcgacctggagactgacaacctcatccaggctaccatccgcacccagtttgatacctgcactgtcctgaccatcgcacaccggcttaacactatcatggactacaccagggtcctggtcctggacaaaggagtagtagctgaatttgattctccagccaacctcattgcagctagaggcatcttctacgggatggccagagatgctggacttgcctaaaatatattcctgagatttcctcctggcctttcctggttttcatcaggaaggaaatgacaccaaatatgtccgcagaatggacttgccggattccggccggaattc

SEQ ID NO: 455193 - DNA, 3312 bp, Homo sapiens
tagtgggaataccccaacaggccttcactcactcaagaaacacttgcaggacgatggagtgggaagggtgccatggacagggcaatgggtcagaccttgctctcttggaagtgcccccatgcagccagcagtgtcttgggagccaagctgagaatgcctgatgctaccctctgtctgttccatccctctcctaccctcaccccccactcccatttaggaccccactgggagaagggagggtgggcaggaagtgctgagccctgggtttggaggagggacagggctgggctgagaggacctgttcccaggcctaaccaaaactgtttcattcaccagcagccctagggtgaggggcttggatggaccttggaggttgggagttcattcattctagtggaacaggcagaaattaatcaaataatcatgtgtaaatagggcccataggaaggacgcaaaggcctgtgtgtgcaggccagaaaaaggctatccacacagggtggccaggacactttctcctgtaaggaagggatgcaccagccaggcctgaaagaatgagtaagagttggaggatggaggtggggcaataaggtagggagcgagctgaaaattgcaggcaaaggatataacacatgccccaaggcaggagggtacaggaggctggagtgcgtgggagggaggcagtagaaccaagatgggggtggagaacaggccgcactctgctgcactttgaggaccatgggagagcattcagtccttacccaagagcaatcaaaagccgctgaagaccttgattttggagtcagggttgggatcggcgggaggggagggggggcggtggccaggcagtgatgtcacagacacagtccttcccaggacacatctgggagcccagtaggctgagaaccagaatgcagtcagccccctcccatggaggagcacttctccaggctggggagagccccttcccctcctgccgtaccctggtggagccagcccactggccttgtaccaggtgcactcggtgagtggttggtgggagattctaaccctgggctcaggcctagctgtttgtgtgtgagctggagacccaccgagcagcagcagcagcagcagcagccgcagcagccgccaccagatttgcagcccaagccccagattccagtgtcagcctcgctgcagctggtttcctgccgtgtgcttttgtgagccgacacaaagcagatggatgtgcacagagcccagcgcacaggcccatggctccctgcgcacagcctgctgaagtcctgtgaccccggcaaggggaagggctcattagggaaggttttcagagccctgactagcagagatgaataggaccttgtgtttgatcccagaaactgcttcacttgccagaactaacagaatggctaaaataaccagccttgcaagtgtgcacatgtggtgcggtggctgtgttgggtgggttggcatgtcactgtgggcctgagcaagtacccagaagagcaggattagacgatgtgaccaggtcagggctgatggaaacctgaccacttctctcttttttgactagggtcctggtcctggacaaaggagtagtagctgaatttgattctccagccaacctcattgcagctagaggcatcttctacgggatggccagagatgctggacttgcctaaaatatattcctgagatttcctcctggcctttcctggttttcatcaggaaggaaatgacaccaaatatgtccgcagaatggacttgatagcaaacactgggggcaccttaagattttgcacctgtaaagtgccttacagggtaactgtgctgaatgctttagatgaggaaatgatccccaagtggtgaatgacacgcctaaggtcacagctagtttgagccagttagactagtccccggtctcccgattcccaactgagtgttatttgcacactgcactgttttcaaataacgattttatgaaatgacctctgtcctccctctgatttttcatattttctaaagtttcgtttctgttttttaataaaaagctttttcctcctggaacagaagacagctgctgggtcaggccacccctaggaactcagtcctgtactctggggtgctgcctgaatccattaaaaatgggagtactgatgaaataaaactacatggtcaacagtatatacacagtagtctttttgcacttgttcacaaggtttggggattaggatctttggaggaggccaagaggaagactttctacacatgtacatggttgtagttacctgaacttcagacccaagagctcttggctgcaaatattgccttcacagccaaaattccctgggtaattgccagtagctcctgctctgctgtgcagatattgtaaaacggtgagaaaggccctgaaatctgacctggggcctcttgggaaagctgctgtgaacacctccacgttaatgtcatccctcagccctctatgcctgtttctctagggactgagaagtgcatgatgcttttacttccttgctcatttcgaagtctgttccagacagttcctataaccagtgaggcctcccaaagtgctgggattacaggcgtgagccactgtgcccagcttcaacaatgacattttctaacacatggggaagggcacactgggctccacaggcactgtctttgtgcacaggccacttgcatcctgcctcctccatgaggcaatgtaaggggaactggaggcttcatgctgagtcccatcacttcctaagaaacctgctggcagagtgcctgcatgtccctcaccttattggtgtctcacagccactctggtcacagatgaagaagcaactcaagtggcagctggaccgtgacagcaccatgaggagctgagccttgtggggagagcactgtgtctggagtcccaggctgctgtgtgaccctgggcaatttgcaaaacctttctgagcctgtttcaaatgaaaatgatgcttcgtgggattgtcgtagtcaatgagggctgggcacagtggctcacacctgtaatctcagcactttgggaggccaaggagggcggatgacttgaggtgaggagttcaagaccagcctggccaacatggagaaaccctgtctctactaaaaacaaaacaaaacaaaacaaaaacaaaaatttgccggatgtggtggtgcatgcctgtaatctcagctactcgggaggctgacagagaattgcttgaactcaggaagcaaagattgcagtgagccaagattacgccaggacactccagtctgagtgacagagggagacgttgtctc

SEQ ID NO: 455194 - DNA, 659 bp, Homo sapiens
  misc_feature (41)..(41): n is a, c, g, or t
tgtaccctcccaggctgctaggatcacaggcgttacgcaantgtgcctgggagaccaagacgggtggatcacgaggtcaggagatcgagaccatcctgccaacacggtgaaccccgtctccactaaaaatacaaaaaattagccgggcgtggtggtgggcctttctgtgtcctactccttgcaggtatgaagggcctggaccccagggcagggccaccactgggacagaaaccacacaggtgttccaggcatctcccgagtgcccctccctgctcagtatgggcaccagccacagggtctgttctcaaggactgtgagaaaaaaaaaaagaaaaaaatcattgagttgacaagtttataaccacacaccatggctggatgttcctactttccttccccaagaagcccatgttctcacattcagaaagaattctgttgaataatctctgtcctcaaaccccacatctctctcctgctcagccgtcgaccttgcctgacacctcacagttcaactggagagacccccatcagcaggagattgtgctgcaggctgagcaggtctttgtggctggagaaacaaaatgttttaaaagcccagaagagggactgggtgcagtggctcacacctaatcccagcactttgggaggcggaggtgggcg

SEQ ID NO: 455195 - DNA, 460 bp, Homo sapiens
cagctgatgtgaccccatctgcccctcctgccaggcgccctgggtggtggaaggcagccgccctcccgaaggttggcccccacgtggggaggtggagttccggaattattctgtgcgctaccggccgggcctagacctggtgctgagagacctgagtctgcatgtgcacggtggcgagaaggtggggatcgtgggccgcactggggctggcaagtcttccatgaccctttgcctgttccgcatcctggaggcggcaaagggtgaaatccgcattgatggcctcaatgtggcagacatcggcctccatgacctgcgctctcagctgaccatcatcccgcaggtaggagcctggcatgggctggccacactcacccctcactgtctgggagcttccagttcccctgcttcatgtctagcagcccagttcctgcatggatacccatgctcctgtctctgtatc

SEQ ID NO: 455196 - DNA, 6327 bp, Homo sapiens
cgggtccgggcggagcgcggggtgcggagggcggaggcggctccggcgcccgctctgcccgccgctgggtccgaccgcgctcgccttccttgcagccgcgcctcggccccatggacgccctgtgcggttccggggagctcggctccaagttctgggactccaacctgtctgtgcacacagaaaacccggacctcactccctgcttccagaactccctgctggcctgggtgccctgcatctacctgtgggtcgccctgccctgctacttgctctacctgcggcaccattgtcgtggctacatcatcctctcccacctgtccaagctcaagatggtcctgggtgtcctgctgtggtgcgtctcctgggcggaccttttttactccttccatggcctggtccatggccgggcccctgcccctgttttctttgtcacccccttggtggtgggggtcaccatgctgctggccaccctgctgatacagtatgagcggctgcagggcgtacagtcttcgggggtcctcattatcttctggttcctgtgtgtggtctgcgccatcgtcccattccgctccaagatccttttagccaaggcagagggtgagatctcagaccccttccgcttcaccaccttctacatccactttgccctggtactctctgccctcatcttggcctgcttcagggagaaacctccatttttctccgcaaagaatgtcgaccctaacccctaccctgagaccagcgctggctttctctcccgcctgtttttctggtggttcacaaagatggccatctatggctaccggcatcccctggaggagaaggacctctggtccctaaaggaagaggacagatcccagatggtggtgcagcagctgctggaggcatggaggaagcaggaaaagcagacggcacgacacaaggcttcagcagcacctgggaaaaatgcctccggcgaggacgaggtgctgctgggtgcccggcccaggccccggaagccctccttcctgaaggccctgctggccaccttcggctccagcttcctcatcagtgcctgcttcaagcttatccaggacctgctctccttcatcaatccacagctgctcagcatcctgatcaggtttatctccaaccccatggccccctcctggtggggcttcctggtggctgggctgatgttcctgtgctccatgatgcagtcgctgatcttacaacactattaccactacatctttgtgactggggtgaagtttcgtactgggatcatgggtgtcatctacaggaaggctctggttatcaccaactcagtcaaacgtgcgtccactgtgggggaaattgtcaacctcatgtcagtggatgcccagcgcttcatggaccttgcccccttcctcaatctgctgtggtcagcacccctgcagatcatcctggcgatctacttcctctggcagaacctaggtccctctgtcctggctggagtcgctttcatggtcttgctgattccactcaacggagctgtggccgtgaagatgcgcgccttccaggtaaagcaaatgaaattgaaggactcgcgcatcaagctgatgagtgagatcctgaacggcatcaaggtgctgaagctgtacgcctgggagcccagcttcctgaagcaggtggagggcatcaggcagggtgagctccagctgctgcgcacggcggcctacctccacaccacaaccaccttcacctggatgtgcagccccttcctggtgaccctgatcaccctctgggtgtacgtgtacgtggacccaaacaatgtgctggacgccgagaaggcctttgtgtctgtgtccttgtttaatatcttaagacttcccctcaacatgctgccccagttaatcagcaacctgactcaggccagtgtgtctctgaaacggatccagcaattcctgagccaagaggaacttgacccccagagtgtggaaagaaagaccatctccccaggctatgccatcaccatacacagtggcaccttcacctgggcccaggacctgccccccactctgcacagcctagacatccaggtcccgaaaggggcactggtggccgtggtggggcctgtgggctgtgggaagtcctccctggtgtctgccctgctgggagagatggagaagctagaaggcaaagtgcacatgaagggctccgtggcctatgtgccccagcaggcatggatccagaactgcactcttcaggaaaacgtgcttttcggcaaagccctgaaccccaagcgctaccagcagactctggaggcctgtgccttgctagctgacctggagatgctgcctggtggggatcagacagagattggagagaagggcattaacctgtctgggggccagcggcagcgggtcagtctggctcgagctgtttacagtgatgccgatattttcttgctggatgacccactgtccgcggtggactctcatgtggccaagcacatctttgaccacgtcatcgggccagaaggcgtgctggcaggcaagacgcgagtgctggtgacgcacggcattagcttcctgccccagacagacttcatcattgtgctagctgatggacaggtgtctgagatgggcccgtacccagccctgctgcagcgcaacggctcctttgccaactttctctgcaactatgcccccgatgaggaccaagggcacctggaggacagctggaccgcgttggaaggtgcagaggataaggaggcactgctgattgaagacacactcagcaaccacacggatctgacagacaatgatccagtcacctatgtggtccagaagcagtttatgagacagctgagtgccctgtcctcagatggggagggacagggtcggcctgtaccccggaggcacctgggtccatcagagaaggtgcaggtgacagaggcgaaggcagatggggcactgacccaggaggagaaagcagccattggcactgtggagctcagtgtgttctgggattatgccaaggccgtggggctctgtaccacgctggccatctgtctcctgtatgtgggtcaaagtgcggctgccattggagccaatgtgtggctcagtgcctggacaaatgatgccatggcagacagtagacagaacaacacttccctgaggctgggcgtctatgctgctttaggaattctgcaagggttcttggtgatgctggcagccatggccatggcagcgggtggcatccaggctgcccgtgtgttgcaccaggcactgctgcacaacaagatacgctcgccacagtccttctttgacaccacaccatcaggccgcatcctgaactgcttctccaaggacatctatgtcgttgatgaggttctggcccctgtcatcctcatgctgctcaattccttcttcaacgccatctccactcttgtggtcatcatggccagcacgccgctcttcactgtggtcatcctgcccctggctgtgctctacaccttagtgcagcgcttctatgcagccacatcacggcaactgaagcggctggaatcagtcagccgctcacctatctactcccacttttcggagacagtgactggtgccagtgtcatccgggcctacaaccgcagccgggattttgagatcatcagtgatactaaggtggatgccaaccagagaagctgctacccctacatcatctccaaccggtggctgagcatcggagtggagttcgtggggaactgcgtggtgctctttgctgcactatttgccgtcatcgggaggagcagcctgaacccggggctggtgggcctttctgtgtcctactccttgcaggtgacatttgctctgaactggatgatacgaatgatgtcagatttggaatctaacatcgtggctgtggagagggtcaaggagtactccaagacagagacagaggcgccctgggtggtggaaggcagccgccctcccgaaggttggcccccacgtggggaggtggagttccggaattattctgtgcgctaccggccgggcctagacctggtgctgagagacctgagtctgcatgtgcacggtggcgagaaggtggggatcgtgggccgcactggggctggcaagtcttccatgaccctttgcctgttccgcatcctggaggcggcaaagggtgaaatccgcattgatggcctcaatgtggcagacatcggcctccatgacctgcgctctcagctgaccatcatcccgcaggaccccatcctgttctcggggaccctgcgcatgaacctggaccccttcggcagctactcagaggaggacatttggtgggctttggagctgtcccacctgcacacgtttgtgagctcccagccggcaggcctggacttccagtgctcagagggcggggagaatctcagcgtgggccagaggcagctcgtgtgcctggcccgagccctgctccgcaagagccgcatcctggttttagacgaggccacagctgccatcgacctggagactgacaacctcatccaggctaccatccgcacccagtttgatacctgcactgtcctgaccatcgcacaccggcttaacactatcatggactacaccagggtcctggtcctggacaaaggagtagtagctgaatttgattctccagccaacctcattgcagctagaggcatcttctacgggatggccagagatgctggacttgcctaaaatatattcctgagatttcctcctggcctttcctggttttcatcaggaaggaaatgacaccaaatatgtccgcagaatggacttgatagcaaacactgggggcaccttaagattttgcacctgtaaagtgccttacagggtaactgtgctgaatgctttagatgaggaaatgatccccaagtggtgaatgacacgcctaaggtcacagctagtttgagccagttagactagtccccggtctcccgattcccaactgagtgttatttgcacactgcactgttttcaaataacgattttatgaaatgacctctgtcctccctctgatttttcatattttctaaagtttcgtttctgttttttaataaaaagctttttcctcctggaacagaagacagctgctgggtcaggccacccctaggaactcagtcctgtactctggggtgctgcctgaatccattaaaaatgggagtactgatgaaataaaactacatggtcaacagtatatacacagtagtctttttgcacttgttcacaaggtttggggattaggatctttggaggaggccaagaggaagactttctacacatgtacatggttgtagttacctgaacttcagacccaagagctcttggctgcaaatattgccttcacagccaaaattccctgggtaattgccagtagctcctgctctgctgtgcagatattgtaaaacggtgagaaaggccctgaaatctgacctggggcctcttgggaaagctgctgtgaacacctccacgttaatgtcatccctcagccctctatgcctgtttctctagggactgagaagtgcatgatgcttttacttccttgctcatttcgaagtctgttccagacagttcctataaccagtgaggcctcccaaagtgctgggattacaggcgtgagccactgtgcccagcttcaacaatgacattttctaacacatggggaagggcacactgggctccacaggcactgtctttgtgcacaggccacttgcatcctgcctcctccatgaggcaatgtaaggggaactggaggcttcatgctgagtcccatcacttcctaagaaacctgctggcagagtgcctgcatgtccctcaccttattggtgtctcacagccactctggtcacagatgaagaagcaactcaagtggcagctggaccgtgacagcaccatgaggagctgagccttgtggggagagcactgtgtctggagtcccaggctgctgtgtgaccctgggcaatttgcaaaacctttctgagcctgtttcaaatgaaaatgatgcttcgtgggattgtcgtagtcaatgagggctgggcacagtggctcacacctgtaatctcagcactttgggaggccaaggagggcggatgacttgaggtgaggagttcaagaccagcctggccaacatggagaaaccctgtctctactaaaaacaaaacaaaacaaaacaaaaacaaaaatttgccggatgtggtggtgcatgcctgtaatctcagctactcgggaggctgacagagaattgcttgaactcaggaagcaaagattgcagtgagccaagattacgccaggacactccagtctgagtgacagagggagacgttgtctc

SEQ ID NO: 455197 - DNA, 5769 bp, Homo sapiens
aacccggtcagatggagtccaggccaggaatgagacaagtattcaggagcaatttgggagatgggcgtgtgcgccagagagacagaggagtgccaggcaacctgggtgctggcctgggtaactggaggacgatggatcttttgctgagctgatgggctcggtgggaggaggaggctgggtggggggcaaggtggtggatggagtctggtcatgtggggccagtggtgctggtgggtcctccaaggggagattcccagctagctggaagtcaaactctcgagcccaagagtttgagaccagcctgagcaacatagcaagaccctgtctctacaaaaaagctaagatattagccaggcctggtggcatacgcctagagtcctagctactcaagaggctgaggtgggaagactgcctgagcctgagaggttgaggctgccgtgagctgtgatggcaccaccgcactccagtctaggtgacagagagagaccctgtctcaaaaaaaaaaaaaaaaaaaagagagagagagacaccagtcactgggctggggccactggggcccaccctactccaatatgacctcaccaaatgaggccacgttcacaggtaccaggtgttgggagctgaacatatctttctgggagacacaacttaagctatcacagaaggggaggcctggctatgattatggctggagggctccatgtagtcgagaggagagtgtcccaacaatgaagagactcggtcatgtcaataggtgaaggtgtagagcttccagcagaggtggccagggtgaagctcagcggcaaagggggcaacagcgcagcaagttcctgaggaggcagaggaaggccagggctcgggggcaggggcagcctccgacagcctgagcaccagaaaaaggaggacaagccactggagggcagtttgtgagtggcaaggagtttgtgggtggcagggagttctcaatgggtggctaagcaagaaggcaggtagctgctgagaggggtggggggctgggatgggcctgaagggaagagaagagaggtgaagaaggccccaagagcgggggcggattagggacctagagaaggttgctaggcagtgctgggggccactgagtttggaaaggtggatttgagcggcaagagtctttgtggtcatgtggcggaatctagagcccccagcagcctaggagaaggagcagggaagtccagtcaatggaaacgtggcatttcttcccgccatatgtcaggaggtaagaaggcaggcaggtgaggctggtggtgagagcgtcatcgatagggcgtgcagcagggtccatggtggatagagaacgaggtgaaggcagagtggagccaggaggtcgtggtcttgaggcagtactgggttgaccctccctggcccaagaggttggagggggtggaggtttcagaggccaggggtgcagtggagactgcgggtaaaagcaaagggcagcagaggagggagcagccatgggggcagcactgcccacctcactcctctctcctccccacagcatcctgatcaggtttatctccaaccccatggccccctcctggtggggcttcctggtggctgggctgatgttcctgtgctccatgatgcagtcgctgatcttacaacactattaccactacatctttgtgactggggtgaagtttcgtactgggatcatgggtgtcatctacaggaaggtcagctggagcagggcccaggggaaaggctggccctgggcagcttgcaagaggctcgcagccaagtccacccactactgtctacctgcaggctctggttatcaccaactcagtcaaacgtgcgtccactgtgggggaaattgtcaacctcatgtcagtggatgcccagcgcttcatggaccttgcccccttcctcaatctgctgtggtcagcacccctgcagatcatcctggcgatctacttcctctggcagaacctaggtccctctgtcctggctggagtcgctttcatggtcttgctgattccactcaacggagctgtggccgtgaagatgcgcgccttccaggtaaagcaaatgaaattgaaggactcgcgcatcaagctgatgagtgagatcctgaacggcatcaaggtgctgaagctgtacgcctgggagcccagcttcctgaagcaggtggagggcatcaggcagggtgagctccagctgctgcgcacggcggcctacctccacaccacaaccaccttcacctggatgtgcagccccttcctggtgaggcttggcacagggctgggtccctgcctccagggctctgggtgcccaggcatggccagggctcattggactctaccctgacaccacctccacgctgctcaggtgaccctgatcaccctctgggtgtacgtgtacgtggacccaaacaatgtgctggacgccgagaaggcctttgtgtctgtgtccttgtttaatatcttaagacttcccctcaacatgctgccccagttaatcagcaacctgactcaggccagtgtgtctctgaaacggatccagcaattcctgagccaagaggaacttgacccccagagtgtggaaagaaagaccatctccccaggctatgccatcaccatacacagtggcaccttcacctgggcccaggacctgccccccactctgcacagcctagacatccaggtcccgaaaggggcactggtggccgtggtggggcctgtgggctgtgggaagtcctccctggtgtctgccctgctgggagagatggagaagctagaaggcaaagtgcacatgaagggctccgtggcctatgtgccccagcaggcatggatccagaactgcactcttcaggaagcctgtgccttgctagctgacctggagatgctgcctggtggggatcagacagagattggagagaagggcattaacctgtctgggggccagcggcagcgggtcagtctggctcgagctgtttacagtgatgccgatattttcttgctggatgacccactgtccgcggtggactctcatgtggccaagcacatctttgaccacgtcatcgggccagaaggcgtgctggcaggcaagacgcgagtgctggtgacgcacggcattagcttcctgccccagacagacttcatcattgtgctagctgatggacaggtgtctgagatgggcccgtacccagccctgctgcagcgcaacggctcctttgccaactttctctgcaactatgcccccgatgaggaccaagggcacctggaggacagctggaccgcgttggaaggtgcagaggataaggaggcactgctgattgaagacacactcagcaaccacacggatctgacagacaatgatccagtcacctatgtggtccagaagcagtttatgagacagctgagtgccctgtcctcagatggggagggacagggtcggcctgtaccccggaggcacctgggtccatcagagaaggtgcaggtgacagaggcgaaggcagatggggcactgacccaggaggagaaagcagccattggcactgtggagctcagtgtgttctgggattatgccaaggccgtggggctctgtaccacgctggccatctgtctcctgtatgtgggtcaaagtgcggctgccattggagccaatgtgtggctcagtgcctggacaaatgatgccatggcagacagtagacagaacaacacttccctgaggctgggcgtctatgctgctttaggaattctgcaagggttcttggtgatgctggcagccatggccatggcagcgggtggcatccaggctgcccgtgtgttgcaccaggcactgctgcacaacaagatacgctcgccacagtccttctttgacaccacaccatcaggccgcatcctgaactgcttctccaaggacatctatgtcgttgatgaggttctggcccctgtcatcctcatgctgctcaattccttcttcaacgccatctccactcttgtggtcatcatggccagcacgccgctcttcactgtggtcatcctgcccctggctgtgctctacaccttagtgcagcgcttctatgcagccacatcacggcaactgaagcggctggaatcagtcagccgctcacctatctactcccacttttcggagacagtgactggtgccagtgtcatccgggcctacaaccgcagccgggattttgagatcatcagtgatactaaggtggatgccaaccagagaagctgctacccctacatcatctccaaccggtggctgagcatcggagtggagttcgtggggaactgcgtggtgctctttgctgcactatttgccgtcatcgggaggagcagcctgaacccggggctggtgggcctttctgtgtcctactccttgcaggtgacatttgctctgaactggatgatacgaatgatgtcagatttggaatctaacatcgtggctgtggagagggtcaaggagtactccaagacagagacagaggcgccctgggtggtggaaggcagccgccctcccgaaggttggcccccacgtggggaggtggagttccggaattattctgtgcgctaccggccgggcctagacctggtgctgagagacctgagtctgcatgtgcacggtggcgagaaggtggggatcgtgggccgcactggggctggcaagtcttccatgaccctttgcctgttccgcatcctggaggcggcaaagggtgaaatccgcattgatggcctcaatgtggcagacatcggcctccatgacctgcgctctcagctgaccatcatcccgcaggaccccatcctgttctcggggaccctgcgcatgaacctggaccccttcggcagctactcagaggaggacatttggtgggctttggagctgtcccacctgcacacgtttgtgagctcccagccggcaggcctggacttccagtgctcagagggcggggagaatctcagcgtgggccagaggcagctcgtgtgcctggcccgagccctgctccgcaagagccgcatcctggttttagacgaggccacagctgccatcgacctggagactgacaacctcatccaggctaccatccgcacccagtttgatacctgcactgtcctgaccatcgcacaccggcttaacactatcatggactacaccagggtcctggtcctggacaaaggagtagtagctgaatttgattctccagccaacctcattgcagctagaggcatcttctacgggatggccagagatgctggacttgcctaaaatatattcctgagatttcctcctggcctttcctggttttcatcaggaaggaaatgacaccaaatatgtccgcagaatggacttgatagcaaacactgggggcaccttaagattttgcacctgtaaagtgccttacagggtaactgtgctgaatgctttagatgaggaaatgatccccaagtggtgaatgacacgcctaaggtcacagctagtttgagccagttagactagtccccggtctcccgattcccaactgagtgttatttgcacactgcactgttttcaaataacgattttatgaaatgacctctgtcctccctctgatttttcatattttctaaagtttcgtttctgttttttaataaaaagctttttcctcctggaacagaagacagctgctgggtcaggccacccctaggaactcagtcctgtactctggggtgctgcctgaatccattaaaaatgggagtactgatgaaataaaactacatggtcaacagtata

SEQ ID NO: 455198 - DNA, 5854 bp, Homo sapiens
aacccggtcagatggagtccaggccaggaatgagacaagtattcaggagcaatttgggagatgggcgtgtgcgccagagagacagaggagtgccaggcaacctgggtgctggcctgggtaactggaggacgatggatcttttgctgagctgatgggctcggtgggaggaggaggctgggtggggggcaaggtggtggatggagtctggtcatgtggggccagtggtgctggtgggtcctccaaggggagattcccagctagctggaagtcaaactctcgagcccaagagtttgagaccagcctgagcaacatagcaagaccctgtctctacaaaaaagctaagatattagccaggcctggtggcatacgcctagagtcctagctactcaagaggctgaggtgggaagactgcctgagcctgagaggttgaggctgccgtgagctgtgatggcaccaccgcactccagtctaggtgacagagagagaccctgtctcaaaaaaaaaaaaaaaaaaaagagagagagagacaccagtcactgggctggggccactggggcccaccctactccaatatgacctcaccaaatgaggccacgttcacaggtaccaggtgttgggagctgaacatatctttctgggagacacaacttaagctatcacagaaggggaggcctggctatgattatggctggagggctccatgtagtcgagaggagagtgtcccaacaatgaagagactcggtcatgtcaataggtgaaggtgtagagcttccagcagaggtggccagggtgaagctcagcggcaaagggggcaacagcgcagcaagttcctgaggaggcagaggaaggccagggctcgggggcaggggcagcctccgacagcctgagcaccagaaaaaggaggacaagccactggagggcagtttgtgagtggcaaggagtttgtgggtggcagggagttctcaatgggtggctaagcaagaaggcaggtagctgctgagaggggtggggggctgggatgggcctgaagggaagagaagagaggtgaagaaggccccaagagcgggggcggattagggacctagagaaggttgctaggcagtgctgggggccactgagtttggaaaggtggatttgagcggcaagagtctttgtggtcatgtggcggaatctagagcccccagcagcctaggagaaggagcagggaagtccagtcaatggaaacgtggcatttcttcccgccatatgtcaggaggtaagaaggcaggcaggtgaggctggtggtgagagcgtcatcgatagggcgtgcagcagggtccatggtggatagagaacgaggtgaaggcagagtggagccaggaggtcgtggtcttgaggcagtactgggttgaccctccctggcccaagaggttggagggggtggaggtttcagaggccaggggtgcagtggagactgcgggtaaaagcaaagggcagcagaggagggagcagccatgggggcagcactgcccacctcactcctctctcctccccacagcatcctgatcaggtttatctccaaccccatggccccctcctggtggggcttcctggtggctgggctgatgttcctgtgctccatgatgcagtcgctgatcttacaacactattaccactacatctttgtgactggggtgaagtttcgtactgggatcatgggtgtcatctacaggaaggtcagctggagcagggcccaggggaaaggctggccctgggcagcttgcaagaggctcgcagccaagtccacccactactgtctacctgcaggctctggttatcaccaactcagtcaaacgtgcgtccactgtgggggaaattgtcaacctcatgtcagtggatgcccagcgcttcatggaccttgcccccttcctcaatctgctgtggtcagcacccctgcagatcatcctggcgatctacttcctctggcagaacctaggtccctctgtcctggctggagtcgctttcatggtcttgctgattccactcaacggagctgtggccgtgaagatgcgcgccttccaggtaaagcaaatgaaattgaaggactcgcgcatcaagctgatgagtgagatcctgaacggcatcaaggtgctgaagctgtacgcctgggagcccagcttcctgaagcaggtggagggcatcaggcagggtgagctccagctgctgcgcacggcggcctacctccacaccacaaccaccttcacctggatgtgcagccccttcctggtgaggcttggcacagggctgggtccctgcctccagggctctgggtgcccaggcatggccagggctcattggactctaccctgacaccacctccacgctgctcaggtgaccctgatcaccctctgggtgtacgtgtacgtggacccaaacaatgtgctggacgccgagaaggcctttgtgtctgtgtccttgtttaatatcttaagacttcccctcaacatgctgccccagttaatcagcaacctgactcaggccagtgtgtctctgaaacggatccagcaattcctgagccaagaggaacttgacccccagagtgtggaaagaaagaccatctccccaggctatgccatcaccatacacagtggcaccttcacctgggcccaggacctgccccccactctgcacagcctagacatccaggtcccgaaaggggcactggtggccgtggtggggcctgtgggctgtgggaagtcctccctggtgtctgccctgctgggagagatggagaagctagaaggcaaagtgcacatgaagggctccgtggcctatgtgccccagcaggcatggatccagaactgcactcttcaggaaaacgtgcttttcggcaaagccctgaaccccaagcgctaccagcagactctggaggcctgtgccttgctagctgacctggagatgctgcctggtggggatcagacagagattggagagaagggcattaacctgtctgggggccagcggcagcgggtcagtctggctcgagctgtttacagtgatgccgatattttcttgctggatgacccactgtccgcggtggactctcatgtggccaagcacatctttgaccacgtcatcgggccagaaggcgtgctggcaggcaaggtgaggcctgccagaggctaagggggctaagacgcgagtgctggtgacgcacggcattagcttcctgccccagacagacttcatcattgtgctagctgatggacaggtgtctgagatgggcccgtacccagccctgctgcagcgcaacggctcctttgccaactttctctgcaactatgcccccgatgaggaccaagggcacctggaggacagctggaccgcgttggaaggtgcagaggataaggaggcactgctgattgaagacacactcagcaaccacacggatctgacagacaatgatccagtcacctatgtggtccagaagcagtttatgagacagctgagtgccctgtcctcagatggggagggacagggtcggcctgtaccccggaggcacctgggtccatcagagaaggtgcaggtgacagaggcgaaggcagatggggcactgacccaggaggagaaagcagccattggcactgtggagctcagtgtgttctgggattatgccaaggccgtggggctctgtaccacgctggccatctgtctcctgtatgtgggtcaaagtgcggctgccattggagccaatgtgtggctcagtgcctggacaaatgatgccatggcagacagtagacagaacaacacttccctgaggctgggcgtctatgctgctttaggaattctgcaagggttcttggtgatgctggcagccatggccatggcagcgggtggcatccaggctgcccgtgtgttgcaccaggcactgctgcacaacaagatacgctcgccacagtccttctttgacaccacaccatcaggccgcatcctgaactgcttctccaaggacatctatgtcgttgatgaggttctggcccctgtcatcctcatgctgctcaattccttcttcaacgccatctccactcttgtggtcatcatggccagcacgccgctcttcactgtggtcatcctgcccctggctgtgctctacaccttagtgcagcgcttctatgcagccacatcacggcaactgaagcggctggaatcagtcagccgctcacctatctactcccacttttcggagacagtgactggtgccagtgtcatccgggcctacaaccgcagccgggattttgagatcatcagtgatactaaggtggatgccaaccagagaagctgctacccctacatcatctccaaccggtggctgagcatcggagtggagttcgtggggaactgcgtggtgctctttgctgcactatttgccgtcatcgggaggagcagcctgaacccggggctggtgggcctttctgtgtcctactccttgcaggtgacatttgctctgaactggatgatacgaatgatgtcagatttggaatctaacatcgtggctgtggagagggtcaaggagtactccaagacagagacagaggcgccctgggtggtggaaggcagccgccctcccgaaggttggcccccacgtggggaggtggagttccggaattattctgtgcgctaccggccgggcctagacctggtgctgagagacctgagtctgcatgtgcacggtggcgagaaggtggggatcgtgggccgcactggggctggcaagtcttccatgaccctttgcctgttccgcatcctggaggcggcaaagggtgaaatccgcattgatggcctcaatgtggcagacatcggcctccatgacctgcgctctcagctgaccatcatcccgcaggaccccatcctgttctcggggaccctgcgcatgaacctggaccccttcggcagctactcagaggaggacatttggtgggctttggagctgtcccacctgcacacgtttgtgagctcccagccggcaggcctggacttccagtgctcagagggcggggagaatctcagcgtgggccagaggcagctcgtgtgcctggcccgagccctgctccgcaagagccgcatcctggttttagacgaggccacagctgccatcgacctggagactgacaacctcatccaggctaccatccgcacccagtttgatacctgcactgtcctgaccatcgcacaccggcttaacactatcatggactacaccagggtcctggtcctggacaaaggagtagtagctgaatttgattctccagccaacctcattgcagctagaggcatcttctacgggatggccagagatgctggacttgcctaaaatatattcctgagatttcctcctggcctttcctggttttcatcaggaaggaaatgacaccaaatatgtccgcagaatggacttgatagcaaacactgggggcaccttaagattttgcacctgtaaagtgccttacagggtaactgtgctgaatgctttagatgaggaaatgatccccaagtggtgaatgacacgcctaaggtcacagctagtttgagccagttagactagtccccggtctcccgattcccaactgagtgttatttgcacactgcactgttttcaaataacgattttatgaaatgacctctgtcctccctctgatttttcatattttctaaagtttcgtttctgttttttaataaaaagctttttcctcctggaacagaagacagctgctgggtcaggccacccctaggaactcagtcctgtactctggggtgctgcctgaatccattaaaaatgggagtactgatgaaataaaactacatggtcaacagtata

SEQ ID NO: 455199 - DNA, 5534 bp, Homo sapiens
aatccagaatgatagaaagaaaatgagcctgggagggatgaactgcagaggaccataaggtaacatgggagcagttttgcaggtgtatacaactgtcaaaactcactgattgtacactttaattgggtgcagtttttgttgcccttaaattatgcctcaattagagagaaagagagagaatataaggaaatgggggcagccatggcgtccttggagaattcacacttgggacgacaactgctcatttgtgtactctctcctcctcacctgtcttccactccacccctgtctctgatggaacatctctccagctaagccatcttcctcaaggcagcccaattctctgtggggctgccacagcactaaactgttctctgtgtccccaggactccaacctgtctgtgcacacagaaaacccggacctcactccctgcttccagaactccctgctggcctgggtgccctgcatctacctgtgggtcgccctgccctgctacttgctctacctgcggcaccattgtcgtggctacatcatcctctcccacctgtccaagctcaagatggtcctgggtgtcctgctgtggtgcgtctcctgggcggaccttttttactccttccatggcctggtccatggccgggcccctgcccctgttttctttgtcacccccttggtggtgggggtcaccatgctgctggccaccctgctgatacagtatgagcggctgcagggcgtacagtcttcgggggtcctcattatcttctggttcctgtgtgtggtctgcgccatcgtcccattccgctccaagatccttttagccaaggcagagggtgagatctcagaccccttccgcttcaccaccttctacatccactttgccctggtactctctgccctcatcttggcctgcttcagggagaaacctccatttttctccgcaaagaatgtcgaccctaacccctaccctgagaccagcgctggctttctctcccgcctgtttttctggtggttcacaaagatggccatctatggctaccggcatcccctggaggagaaggacctctggtccctaaaggaagaggacagatcccagatggtggtgcagcagctgctggaggcatggaggaagcaggaaaagcagacggcacgacacaaggcttcagcagcacctgggaaaaatgcctccggcgaggacgaggtgctgctgggtgcccggcccaggccccggaagccctccttcctgaaggccctgctggccaccttcggctccagcttcctcatcagtgcctgcttcaagcttatccaggacctgctctccttcatcaatccacagctgctcagcatcctgatcaggtttatctccaaccccatggccccctcctggtggggcttcctggtggctgggctgatgttcctgtgctccatgatgcagtcgctgatcttacaacactattaccactacatctttgtgactggggtgaagtttcgtactgggatcatgggtgtcatctacaggaaggctctggttatcaccaactcagtcaaacgtgcgtccactgtgggggaaattgtcaacctcatgtcagtggatgcccagcgcttcatggaccttgcccccttcctcaatctgctgtggtcagcacccctgcagatcatcctggcgatctacttcctctggcagaacctaggtccctctgtcctggctggagtcgctttcatggtcttgctgattccactcaacggagctgtggccgtgaagatgcgcgccttccaggtaaagcaaatgaaattgaaggactcgcgcatcaagctgatgagtgagatcctgaacggcatcaaggtgctgaagctgtacgcctgggagcccagcttcctgaagcaggtggagggcatcaggcagggtgagctccagctgctgcgcacggcggcctacctccacaccacaaccaccttcacctggatgtgcagccccttcctggtgaggcttggcacagggctgggtccctgcctccagggctctgggtgcccaggcatggccagggctcattggactctaccctgacaccacctccacgctgctcaggtgaccctgatcaccctctgggtgtacgtgtacgtggacccaaacaatgtgctggacgccgagaaggcctttgtgtctgtgtccttgtttaatatcttaagacttcccctcaacatgctgccccagttaatcagcaacctgactcaggccagtgtgtctctgaaacggatccagcaattcctgagccaagaggaacttgacccccagagtgtggaaagaaagaccatctccccaggctatgccatcaccatacacagtggcaccttcacctgggcccaggacctgccccccactctgcacagcctagacatccaggtcccgaaaggggcactggtggccgtggtggggcctgtgggctgtgggaagtcctccctggtgtctgccctgctgggagagatggagaagctagaaggcaaagtgcacatgaagggctccgtggcctatgtgccccagcaggcatggatccagaactgcactcttcaggaaaacgtgcttttcggcaaagccctgaaccccaagcgctaccagcagactctggaggcctgtgccttgctagctgacctggagatgctgcctggtggggatcagacagagattggagagaagggcattaacctgtctgggggccagcggcagcgggtcagtctggctcgagctgtttacagtgatgccgatattttcttgctggatgacccactgtccgcggtggactctcatgtggccaagcacatctttgaccacgtcatcgggccagaaggcgtgctggcaggcaagacgcgagtgctggtgacgcacggcattagcttcctgccccagacagacttcatcattgtgctagctgatggacaggtgtctgagatgggcccgtacccagccctgctgcagcgcaacggctcctttgccaactttctctgcaactatgcccccgatgaggaccaagggcacctggaggacagctggaccgcgttggaaggtgcagaggataaggaggcactgctgattgaagacacactcagcaaccacacggatctgacagacaatgatccagtcacctatgtggtccagaagcagtttatgagacagctgagtgccctgtcctcagatggggagggacagggtcggcctgtaccccggaggcacctgggtccatcagagaaggtgcaggtgacagaggcgaaggcagatggggcactgacccaggaggagaaagcagccattggcactgtggagctcagtgtgttctgggattatgccaaggccgtggggctctgtaccacgctggccatctgtctcctgtatgtgggtcaaagtgcggctgccattggagccaatgtgtggctcagtgcctggacaaatgatgccatggcagacagtagacagaacaacacttccctgaggctgggcgtctatgctgctttaggaattctgcaagggttcttggtgatgctggcagccatggccatggcagcgggtggcatccaggctgcccgtgtgttgcaccaggcactgctgcacaacaagatacgctcgccacagtccttctttgacaccacaccatcaggccgcatcctgaactgcttctccaaggacatctatgtcgttgatgaggttctggcccctgtcatcctcatgctgctcaattccttcttcaacgccatctccactcttgtggtcatcatggccagcacgccgctcttcactgtggtcatcctgcccctggctgtgctctacaccttagtgcagcgcttctatgcagccacatcacggcaactgaagcggctggaatcagtcagccgctcacctatctactcccacttttcggagacagtgactggtgccagtgtcatccgggcctacaaccgcagccgggattttgagatcatcagtgatactaaggtggatgccaaccagagaagctgctacccctacatcatctccaaccggtggctgagcatcggagtggagttcgtggggaactgcgtggtgctctttgctgcactatttgccgtcatcgggaggagcagcctgaacccggggctggtgggcctttctgtgtcctactccttgcaggtgacatttgctctgaactggatgatacgaatgatgtcagatttggaatctaacatcgtggctgtggagagggtcaaggagtactccaagacagagacagaggcgccctgggtggtggaaggcagccgccctcccgaaggttggcccccacgtggggaggtggagttccggaattattctgtgcgctaccggccgggcctagacctggtgctgagagacctgagtctgcatgtgcacggtggcgagaaggtggggatcgtgggccgcactggggctggcaagtcttccatgaccctttgcctgttccgcatcctggaggcggcaaagggtgaaatccgcattgatggcctcaatgtggcagacatcggcctccatgacctgcgctctcagctgaccatcatcccgcaggaccccatcctgttctcggggaccctgcgcatgaacctggaccccttcggcagctactcagaggaggacatttggtgggctttggagctgtcccacctgcacacgtttgtgagctcccagccggcaggcctggacttccagtgctcagagggcggggagaatctcagcgtgggccagaggcagctcgtgtgcctggcccgagccctgctccgcaagagccgcatcctggttttagacgaggccacagctgccatcgacctggagactgacaacctcatccaggctaccatccgcacccagtttgatacctgcactgtcctgaccatcgcacaccggcttaacactatcatggactacaccagggtcctggtcctggacaaaggagtagtagctgaatttgattctccagccaacctcattgcagctagaggcatcttctacgggatggccagagatgctggacttgcctaaaatatattcctgagatttcctcctggcctttcctggttttcatcaggaaggaaatgacaccaaatatgtccgcagaatggacttgatagcaaacactgggggcaccttaagattttgcacctgtaaagtgccttacagggtaactgtgctgaatgctttagatgaggaaatgatccccaagtggtgaatgacacgcctaaggtcacagctagtttgagccagttagactagtccccggtctcccgattcccaactgagtgttatttgcacactgcactgttttcaaataacgattttatgaaatgacctctgtcctccctctgatttttcatattttctaaagtttcgtttctgttttttaataaaaagctttttcctcctggaacagaagacagctgctgggtcaggccacccctaggaactcagtcctgtactctggggtgctgcctgaatccattaaaaatgggagtactgatgaaataaaactacatggtcaacagtata

SEQ ID NO: 455200 - DNA, 5440 bp, Homo sapiens
gagggggcaccagtgtaacacaggaatgagccaagatgccaccactgttggaccatcatgtgagggtagggggctgttccacagcacccacccaccaagtgcaatatctgacgtgggtgtcagtcagtgcctgtgtaatgaacacatgtatgcagacaagtgtgaagagttctggcttacctagaggtcccattagcatgttcccttcctttcttcccacctccctcagttcctggccttcctcttgatcttcagtggctgtgatgttgggctggtgggatggaacactgcaggccaacctagtgcctcccatttctccatctcagcgggaagcaggcaaggagagtagcaaagaacataggctgtgaacaacccacttactccccatgtgggctcgggcgggtcgctgaaacctttggagcctcatttccttaattgcagaaagggcgtcatgagctgtcctgcctgtaggctgatgtcccagttagacaaggtcatgtaggtaaggtgatggcaccacacctggcacaggtgccacacctggtcctcgctgaaccagagctcccttgtgatccttcctcatctctcagagtcctctgagtggggacctggaggcccccaggtgctgcctcctgccccagaggagactgatgccccaagggactccgcagggcaggggctgcaggcccaggcttttccagtgcttctgacgcccctccactctcccacccagggtgagatctcagaccccttccgcttcaccaccttctacatccactttgccctggtactctctgccctcatcttggcctgcttcagggagaaacctccatttttctccgcaaagaatgtcgaccctaacccctaccctgagaccagcgctggctttctctcccgcctgtttttctggtggttcacaaagatggccatctatggctaccggcatcccctggaggagaaggacctctggtccctaaaggaagaggacagatcccagatggtggtgcagcagctgctggaggcatggaggaagcaggaaaagcagacggcacgacacaaggcttcagcagcacctgggaaaaatgcctccggcgaggacgaggtgctgctgggtgcccggcccaggccccggaagccctccttcctgaaggccctgctggccaccttcggctccagcttcctcatcagtgcctgcttcaagcttatccaggacctgctctccttcatcaatccacagctgctcagcatcctgatcaggtttatctccaaccccatggccccctcctggtggggcttcctggtggctgggctgatgttcctgtgctccatgatgcagtcgctgatcttacaacactattaccactacatctttgtgactggggtgaagtttcgtactgggatcatgggtgtcatctacaggaaggctctggttatcaccaactcagtcaaacgtgcgtccactgtgggggaaattgtcaacctcatgtcagtggatgcccagcgcttcatggaccttgcccccttcctcaatctgctgtggtcagcacccctgcagatcatcctggcgatctacttcctctggcagaacctaggtccctctgtcctggctggagtcgctttcatggtcttgctgattccactcaacggagctgtggccgtgaagatgcgcgccttccaggtaaagcaaatgaaattgaaggactcgcgcatcaagctgatgagtgagatcctgaacggcatcaaggtgctgaagctgtacgcctgggagcccagcttcctgaagcaggtggagggcatcaggcagggtgagctccagctgctgcgcacggcggcctacctccacaccacaaccaccttcacctggatgtgcagccccttcctggtgaggcttggcacagggctgggtccctgcctccagggctctgggtgcccaggcatggccagggctcattggactctaccctgacaccacctccacgctgctcaggtgaccctgatcaccctctgggtgtacgtgtacgtggacccaaacaatgtgctggacgccgagaaggcctttgtgtctgtgtccttgtttaatatcttaagacttcccctcaacatgctgccccagttaatcagcaacctgactcaggccagtgtgtctctgaaacggatccagcaattcctgagccaagaggaacttgacccccagagtgtggaaagaaagaccatctccccaggctatgccatcaccatacacagtggcaccttcacctgggcccaggacctgccccccactctgcacagcctagacatccaggtcccgaaaggggcactggtggccgtggtggggcctgtgggctgtgggaagtcctccctggtgtctgccctgctgggagagatggagaagctagaaggcaaagtgcacatgaagggctccgtggcctatgtgccccagcaggcatggatccagaactgcactcttcaggaaaacgtgcttttcggcaaagccctgaaccccaagcgctaccagcagactctggaggcctgtgccttgctagctgacctggagatgctgcctggtggggatcagacagagattggagagaagggcattaacctgtctgggggccagcggcagcgggtcagtctggctcgagctgtttacagtgatgccgatattttcttgctggatgacccactgtccgcggtggactctcatgtggccaagcacatctttgaccacgtcatcgggccagaaggcgtgctggcaggcaagacgcgagtgctggtgacgcacggcattagcttcctgccccagacagacttcatcattgtgctagctgatggacaggtgtctgagatgggcccgtacccagccctgctgcagcgcaacggctcctttgccaactttctctgcaactatgcccccgatgaggaccaagggcacctggaggacagctggaccgcgttggaaggtgcagaggataaggaggcactgctgattgaagacacactcagcaaccacacggatctgacagacaatgatccagtcacctatgtggtccagaagcagtttatgagacagctgagtgccctgtcctcagatggggagggacagggtcggcctgtaccccggaggcacctgggtccatcagagaaggtgcaggtgacagaggcgaaggcagatggggcactgacccaggaggagaaagcagccattggcactgtggagctcagtgtgttctgggattatgccaaggccgtggggctctgtaccacgctggccatctgtctcctgtatgtgggtcaaagtgcggctgccattggagccaatgtgtggctcagtgcctggacaaatgatgccatggcagacagtagacagaacaacacttccctgaggctgggcgtctatgctgctttaggaattctgcaagggttcttggtgatgctggcagccatggccatggcagcgggtggcatccaggctgcccgtgtgttgcaccaggcactgctgcacaacaagatacgctcgccacagtccttctttgacaccacaccatcaggccgcatcctgaactgcttctccaaggacatctatgtcgttgatgaggttctggcccctgtcatcctcatgctgctcaattccttcttcaacgccatctccactcttgtggtcatcatggccagcacgccgctcttcactgtggtcatcctgcccctggctgtgctctacaccttagtgcagcgcttctatgcagccacatcacggcaactgaagcggctggaatcagtcagccgctcacctatctactcccacttttcggagacagtgactggtgccagtgtcatccgggcctacaaccgcagccgggattttgagatcatcagtgatactaaggtggatgccaaccagagaagctgctacccctacatcatctccaaccggtggctgagcatcggagtggagttcgtggggaactgcgtggtgctctttgctgcactatttgccgtcatcgggaggagcagcctgaacccggggctggtgggcctttctgtgtcctactccttgcaggtgacatttgctctgaactggatgatacgaatgatgtcagatttggaatctaacatcgtggctgtggagagggtcaaggagtactccaagacagagacagaggcgccctgggtggtggaaggcagccgccctcccgaaggttggcccccacgtggggaggtggagttccggaattattctgtgcgctaccggccgggcctagacctggtgctgagagacctgagtctgcatgtgcacggtggcgagaaggtggggatcgtgggccgcactggggctggcaagtcttccatgaccctttgcctgttccgcatcctggaggcggcaaagggtgaaatccgcattgatggcctcaatgtggcagacatcggcctccatgacctgcgctctcagctgaccatcatcccgcaggaccccatcctgttctcggggaccctgcgcatgaacctggaccccttcggcagctactcagaggaggacatttggtgggctttggagctgtcccacctgcacacgtttgtgagctcccagccggcaggcctggacttccagtgctcagagggcggggagaatctcagcgtgggccagaggcagctcgtgtgcctggcccgagccctgctccgcaagagccgcatcctggttttagacgaggccacagctgccatcgacctggagactgacaacctcatccaggctaccatccgcacccagtttgatacctgcactgtcctgaccatcgcacaccggcttaacactatcatggactacaccagggtcctggtcctggacaaaggagtagtagctgaatttgattctccagccaacctcattgcagctagaggcatcttctacgggatggccagagatgctggacttgcctaaaatatattcctgagatttcctcctggcctttcctggttttcatcaggaaggaaatgacaccaaatatgtccgcagaatggacttgatagcaaacactgggggcaccttaagattttgcacctgtaaagtgccttacagggtaactgtgctgaatgctttagatgaggaaatgatccccaagtggtgaatgacacgcctaaggtcacagctagtttgagccagttagactagtccccggtctcccgattcccaactgagtgttatttgcacactgcactgttttcaaataacgattttatgaaatgacctctgtcctccctctgatttttcatattttctaaagtttcgtttctgttttttaataaaaagctttttcctcctggaacagaagacagctgctgggtcaggccacccctaggaactcagtcctgtactctggggtgctgcctgaatccattaaaaatgggagtactgatgaaataaaactacatggtcaacagtata

SEQ ID NO: 455201 - DNA, 4820 bp, Homo sapiens
  misc_feature (3268)..(3268): n is a, c, g, or t
aacccggtcagatggagtccaggccaggaatgagacaagtattcaggagcaatttgggagatgggcgtgtgcgccagagagacagaggagtgccaggcaacctgggtgctggcctgggtaactggaggacgatggatcttttgctgagctgatgggctcggtgggaggaggaggctgggtggggggcaaggtggtggatggagtctggtcatgtggggccagtggtgctggtgggtcctccaaggggagattcccagctagctggaagtcaaactctcgagcccaagagtttgagaccagcctgagcaacatagcaagaccctgtctctacaaaaaagctaagatattagccaggcctggtggcatacgcctagagtcctagctactcaagaggctgaggtgggaagactgcctgagcctgagaggttgaggctgccgtgagctgtgatggcaccaccgcactccagtctaggtgacagagagagaccctgtctcaaaaaaaaaaaaaaaaaaaagagagagagagacaccagtcactgggctggggccactggggcccaccctactccaatatgacctcaccaaatgaggccacgttcacaggtaccaggtgttgggagctgaacatatctttctgggagacacaacttaagctatcacagaaggggaggcctggctatgattatggctggagggctccatgtagtcgagaggagagtgtcccaacaatgaagagactcggtcatgtcaataggtgaaggtgtagagcttccagcagaggtggccagggtgaagctcagcggcaaagggggcaacagcgcagcaagttcctgaggaggcagaggaaggccagggctcgggggcaggggcagcctccgacagcctgagcaccagaaaaaggaggacaagccactggagggcagtttgtgagtggcaaggagtttgtgggtggcagggagttctcaatgggtggctaagcaagaaggcaggtagctgctgagaggggtggggggctgggatgggcctgaagggaagagaagagaggtgaagaaggccccaagagcgggggcggattagggacctagagaaggttgctaggcagtgctgggggccactgagtttggaaaggtggatttgagcggcaagagtctttgtggtcatgtggcggaatctagagcccccagcagcctaggagaaggagcagggaagtccagtcaatggaaacgtggcatttcttcccgccatatgtcaggaggtaagaaggcaggcaggtgaggctggtggtgagagcgtcatcgatagggcgtgcagcagggtccatggtggatagagaacgaggtgaaggcagagtggagccaggaggtcgtggtcttgaggcagtactgggttgaccctccctggcccaagaggttggagggggtggaggtttcagaggccaggggtgcagtggagactgcgggtaaaagcaaagggcagcagaggagggagcagccatgggggcagcactgcccacctcactcctctctcctccccacagcatcctgatcaggtttatctccaaccccatggccccctcctggtggggcttcctggtggctgggctgatgttcctgtgctccatgatgcagtcgctgatcttacaacactattaccactacatctttgtgactggggtgaagtttcgtactgggatcatgggtgtcatctacaggaaggtcagctggagcagggcccaggggaaaggctggccctgggcagcttgcaagaggctcgcagccaagtccacccactactgtctacctgcaggctctggttatcaccaactcagtcaaacgtgcgtccactgtgggggaaattgtcaacctcatgtcagtggatgcccagcgcttcatggaccttgcccccttcctcaatctgctgtggtcagcacccctgcagatcatcctggcgatctacttcctctggcaggtgactctccaaccctgacctctgcctccttcctctgacatgctgcagaagtggcaagagaggattattctggaactgggagcatggcacatgcttgtagtcccagctgctcaggcggctgaggcaagaggatcacttgagcccaagagttctggctgcagtgcgccacgattgtgcctgcgaatagccaccacactccagcctgggcaacatagcaagaccttgtctctaaaaagaaacaaagaaaacagaaaaaaagaaggagggttattctgggttagcagaggggatatagaattgacacaagagctggctgggcacggtggctcacgcctgtaatcccagcattttgggagaccaaggcgggtggatcacgaggtcaggagttcgagaccagcccggccaggatggtgaaaccccatctctactaaaaatacaaaaattagccagacgtggtggcgggtgcctgtagtcacagctactcaggaggctgaggcaggagaatcgcttgaacccaggaggcagaggttgcagtgagccaagatcacgccactgcactccagcctgggtgacagagcgagactccatctcaagagagaaaaaaaaaaagtccagaggagttttcttgctttggggtgttgtagaaatgatcttggagcttagccccaaaggacaaacagaatttctcttgtctctgggcaagttgtaggctcatgtgacaggtcaggacagtgtagggctggcataccgctcgctcacgttcacatgcttgcagagaacgtacacagacgaggtgactgaagcctggtctgcaggtcaggcaggtcatcctgatgccagcttgtactgtcaaagagtcacctaactgcaaacggaatttttgtaaagcagatcacattgttaatacctcaggtggctcaaaccttgaacgcgttggcaaacaaaaaacaatccagaaaggtcaattttcacaaaggtcagtgtgcacatgaatctacttgttaaaatgtacattttgattcagtagacctaggatggggctcaggactctgcactttgatcaagactccttggtacgcaaagtgtggcccatgggccagttgcatcaccatcctctgggagcttgttagaaatgaagaatctcaggttccaagtcccacctcagactacagaatccggcgttgcattttaacaagattctctgggaagtcttatacatattaaagttggagaaacagaaaccaaggcgaggtggtccttggttaagtctgcactgtcactgcccaagggagtcattcgngattacagccccagctggcatgcctgtgggcttgatccaggcccacctgggtcatccatgggctaggatcccatggatgggcacatgatccaggagtctgaactcctcccaaagccattacggtggggaggggagatcgccatacgtataacccagtccctttggccaggtgacatttgctctgaactggatgatacgaatgatgtcagatttggaatctaacatcgtggctgtggagagggtcaaggagtactccaagacagagacagaggcgccctgggtggtggaaggcagccgccctcccgaaggttggcccccacgtggggaggtggagttccggaattattctgtgcgctaccggccgggcctagacctggtgctgagagacctgagtctgcatgtgcacggtggcgagaaggtggggatcgtgggccgcactggggctggcaagtcttccatgaccctttgcctgttccgcatcctggaggcggcaaagggtgaaatccgcattgatggcctcaatgtggcagacatcggcctccatgacctgcgctctcagctgaccatcatcccgcaggaccccatcctgttctcggggaccctgcgcatgaacctggaccccttcggcagctactcagaggaggacatttggtgggctttggagctgtcccacctgcacacgtttgtgagctcccagccggcaggcctggacttccagtgctcagagggcggggagaatctcagcgtgggccagaggcagctcgtgtgcctggcccgagccctgctccgcaagagccgcatcctggttttagacgaggccacagctgccatcgacctggagactgacaacctcatccaggctaccatccgcacccagtttgatacctgcactgtcctgaccatcgcacaccggcttaacactatcatggactacaccagggtcctggtcctggacaaaggagtagtagctgaatttgattctccagccaacctcattgcagctagaggcatcttctacgggatggccagagatgctggacttgcctaaaatatattcctgagatttcctcctggcctttcctggttttcatcaggaaggaaatgacaccaaatatgtccgcagaatggacttgatagcaaacactgggggcaccttaagattttgcacctgtaaagtgccttacagggtaactgtgctgaatgctttagatgaggaaatgatccccaagtggtgaatgacacgcctaaggtcacagctagtttgagccagttagactagtccccggtctcccgattcccaactgagtgttatttgcacactgcactgttttcaaataacgattttatgaaatgacctctgtcctccctctgatttttcatattttctaaagtttcgtttctgttttttaataaaaagctttttcctcctggaacagaagacagctgctgggtcaggccacccctaggaactcagtcctgtactctggggtgctgcctgaatccattaaaaatgggagtactgatgaaataaaactacatggtcaacagtata

SEQ ID NO: 455202 - DNA, 5769 bp, Homo sapiens
aacccggtcagatggagtccaggccaggaatgagacaagtattcaggagcaatttgggagatgggcgtgtgcgccagagagacagaggagtgccaggcaacctgggtgctggcctgggtaactggaggacgatggatcttttgctgagctgatgggctcggtgggaggaggaggctgggtggggggcaaggtggtggatggagtctggtcatgtggggccagtggtgctggtgggtcctccaaggggagattcccagctagctggaagtcaaactctcgagcccaagagtttgagaccagcctgagcaacatagcaagaccctgtctctacaaaaaagctaagatattagccaggcctggtggcatacgcctagagtcctagctactcaagaggctgaggtgggaagactgcctgagcctgagaggttgaggctgccgtgagctgtgatggcaccaccgcactccagtctaggtgacagagagagaccctgtctcaaaaaaaaaaaaaaaaaaaagagagagagagacaccagtcactgggctggggccactggggcccaccctactccaatatgacctcaccaaatgaggccacgttcacaggtaccaggtgttgggagctgaacatatctttctgggagacacaacttaagctatcacagaaggggaggcctggctatgattatggctggagggctccatgtagtcgagaggagagtgtcccaacaatgaagagactcggtcatgtcaataggtgaaggtgtagagcttccagcagaggtggccagggtgaagctcagcggcaaagggggcaacagcgcagcaagttcctgaggaggcagaggaaggccagggctcgggggcaggggcagcctccgacagcctgagcaccagaaaaaggaggacaagccactggagggcagtttgtgagtggcaaggagtttgtgggtggcagggagttctcaatgggtggctaagcaagaaggcaggtagctgctgagaggggtggggggctgggatgggcctgaagggaagagaagagaggtgaagaaggccccaagagcgggggcggattagggacctagagaaggttgctaggcagtgctgggggccactgagtttggaaaggtggatttgagcggcaagagtctttgtggtcatgtggcggaatctagagcccccagcagcctaggagaaggagcagggaagtccagtcaatggaaacgtggcatttcttcccgccatatgtcaggaggtaagaaggcaggcaggtgaggctggtggtgagagcgtcatcgatagggcgtgcagcagggtccatggtggatagagaacgaggtgaaggcagagtggagccaggaggtcgtggtcttgaggcagtactgggttgaccctccctggcccaagaggttggagggggtggaggtttcagaggccaggggtgcagtggagactgcgggtaaaagcaaagggcagcagaggagggagcagccatgggggcagcactgcccacctcactcctctctcctccccacagcatcctgatcaggtttatctccaaccccatggccccctcctggtggggcttcctggtggctgggctgatgttcctgtgctccatgatgcagtcgctgatcttacaacactattaccactacatctttgtgactggggtgaagtttcgtactgggatcatgggtgtcatctacaggaaggtcagctggagcagggcccaggggaaaggctggccctgggcagcttgcaagaggctcgcagccaagtccacccactactgtctacctgcaggctctggttatcaccaactcagtcaaacgtgcgtccactgtgggggaaattgtcaacctcatgtcagtggatgcccagcgcttcatggaccttgcccccttcctcaatctgctgtggtcagcacccctgcagatcatcctggcgatctacttcctctggcagaacctaggtccctctgtcctggctggagtcgctttcatggtcttgctgattccactcaacggagctgtggccgtgaagatgcgcgccttccaggtaaagcaaatgaaattgaaggactcgcgcatcaagctgatgagtgagatcctgaacggcatcaaggtgctgaagctgtacgcctgggagcccagcttcctgaagcaggtggagggcatcaggcagggtgagctccagctgctgcgcacggcggcctacctccacaccacaaccaccttcacctggatgtgcagccccttcctggtgaggcttggcacagggctgggtccctgcctccagggctctgggtgcccaggcatggccagggctcattggactctaccctgacaccacctccacgctgctcaggtgaccctgatcaccctctgggtgtacgtgtacgtggacccaaacaatgtgctggacgccgagaaggcctttgtgtctgtgtccttgtttaatatcttaagacttcccctcaacatgctgccccagttaatcagcaacctgactcaggccagtgtgtctctgaaacggatccagcaattcctgagccaagaggaacttgacccccagagtgtggaaagaaagaccatctccccaggctatgccatcaccatacacagtggcaccttcacctgggcccaggacctgccccccactctgcacagcctagacatccaggtcccgaaaggggcactggtggccgtggtggggcctgtgggctgtgggaagtcctccctggtgtctgccctgctgggagagatggagaagctagaaggcaaagtgcacatgaagggctccgtggcctatgtgccccagcaggcatggatccagaactgcactcttcaggaaaacgtgcttttcggcaaagccctgaaccccaagcgctaccagcagactctggaggcctgtgccttgctagctgacctggagatgctgcctggtggggatcagacagagattggagagaagggcattaacctgtctgggggccagcggcagcgggtcagtctggctcgagctgtttacagtgatgccgatattttcttgctggatgacccactgtccgcggtggactctcatgtggccaagcacatctttgaccacgtcatcgggccagaaggcgtgctggcaggcaagacgcgagtgctggtgacgcacggcattagcttcctgccccagacagacttcatcattgtgctagctgatggacaggtgtctgagatgggcccgtacccagccctgctgcagcgcaacggctcctttgccaactttctctgcaactatgcccccgatgaggaccaagggcacctggaggacagctggaccgcgttggaaggtgcagaggataaggaggcactgctgattgaagacacactcagcaaccacacggatctgacagacaatgatccagtcacctatgtggtccagaagcagtttatgagacagctgagtgccctgtcctcagatggggagggacagggtcggcctgtaccccggaggcacctgggtccatcagagaaggtgcaggtgacagaggcgaaggcagatggggcactgacccaggaggagaaagcagccattggcactgtggagctcagtgtgttctgggattatgccaaggccgtggggctctgtaccacgctggccatctgtctcctgtatgtgggtcaaagtgcggctgccattggagccaatgtgtggctcagtgcctggacaaatgatgccatggcagacagtagacagaacaacacttccctgaggctgggcgtctatgctgctttaggaattctgcaagggttcttggtgatgctggcagccatggccatggcagcgggtggcatccaggctgcccgtgtgttgcaccaggcactgctgcacaacaagatacgctcgccacagtccttctttgacaccacaccatcaggccgcatcctgaactgcttctccaaggacatctatgtcgttgatgaggttctggcccctgtcatcctcatgctgctcaattccttcttcaacgccatctccactcttgtggtcatcatggccagcacgccgctcttcactgtggtcatcctgcccctggctgtgctctacaccttagtgcagcgcttctatgcagccacatcacggcaactgaagcggctggaatcagtcagccgctcacctatctactcccacttttcggagacagtgactggtgccagtgtcatccgggcctacaaccgcagccgggattttgagatcatcagtgatactaaggtggatgccaaccagagaagctgctacccctacatcatctccaaccggtggctgagcatcggagtggagttcgtggggaactgcgtggtgctctttgctgcactatttgccgtcatcgggaggagcagcctgaacccggggctggtgggcctttctgtgtcctactccttgcaggtgacatttgctctgaactggatgatacgaatgatgtcagatttggaatctaacatcgtggctgtggagagggtcaaggagtactccaagacagagacagaggcgccctgggtggtggaaggcagccgccctcccgaaggttggcccccacgtggggaggtggagttccggaattattctgtgcgctaccggccgggcctagacctggtgctgagagacctgagtctgcatgtgcacggtggcgagaaggtggggatcgtgggccgcactggggctggcaagtcttccatgaccctttgcctgttccgcatcctggaggcggcaaagggtgaaatccgcattgatggcctcaatgtggcagacatcggcctccatgacctgcgctctcagctgaccatcatcccgcaggaccccatcctgttctcggggaccctgcgcatgaacctggaccccttcggcagctactcagaggaggacatttggtgggctttggagctgtcccacctgcacacgtttgtgagctcccagccggcaggcctggacttccagtgctcagagggcggggagaatctcagcgtgggccagaggcagctcgtgtgcctggcccgagccctgctccgcaagagccgcatcctggttttagacgaggccacagctgccatcgacctggagactgacaacctcatccaggctaccatccgcacccagtttgatacctgcactgtcctgaccatcgcacaccggcttaacactatcatggactacaccagggtcctggtcctggacaaaggagtagtagctgaatttgattctccagccaacctcattgcagctagaggcatcttctacgggatggccagagatgctggacttgcgaaatgacaccaaatatgtccgcagaatggacttgatagcaaacactgggggcaccttaagattttgcacctgtaaagtgccttacagggtaactgtgctgaatgctttagatgaggaaatgatccccaagtggtgaatgacacgcctaaggtcacagctagtttgagccagttagactagtccccggtctcccgattcccaactgagtgttatttgcacactgcactgttttcaaataacgattttatgaaatgacctctgtcctccctctgatttttcatattttctaaagtttcgtttctgttttttaataaaaagctttttcctcctggaacagaagacagctgctgggtcaggccacccctaggaactcagtcctgtactctggggtgctgcctgaatccattaaaaatgggagtactgatgaaataaaactacatggtcaacagtata

SEQ ID NO: 455203 - DNA, 5064 bp, Homo sapiens
aacccggtcagatggagtccaggccaggaatgagacaagtattcaggagcaatttgggagatgggcgtgtgcgccagagagacagaggagtgccaggcaacctgggtgctggcctgggtaactggaggacgatggatcttttgctgagctgatgggctcggtgggaggaggaggctgggtggggggcaaggtggtggatggagtctggtcatgtggggccagtggtgctggtgggtcctccaaggggagattcccagctagctggaagtcaaactctcgagcccaagagtttgagaccagcctgagcaacatagcaagaccctgtctctacaaaaaagctaagatattagccaggcctggtggcatacgcctagagtcctagctactcaagaggctgaggtgggaagactgcctgagcctgagaggttgaggctgccgtgagctgtgatggcaccaccgcactccagtctaggtgacagagagagaccctgtctcaaaaaaaaaaaaaaaaaaaagagagagagagacaccagtcactgggctggggccactggggcccaccctactccaatatgacctcaccaaatgaggccacgttcacaggtaccaggtgttgggagctgaacatatctttctgggagacacaacttaagctatcacagaaggggaggcctggctatgattatggctggagggctccatgtagtcgagaggagagtgtcccaacaatgaagagactcggtcatgtcaataggtgaaggtgtagagcttccagcagaggtggccagggtgaagctcagcggcaaagggggcaacagcgcagcaagttcctgaggaggcagaggaaggccagggctcgggggcaggggcagcctccgacagcctgagcaccagaaaaaggaggacaagccactggagggcagtttgtgagtggcaaggagtttgtgggtggcagggagttctcaatgggtggctaagcaagaaggcaggtagctgctgagaggggtggggggctgggatgggcctgaagggaagagaagagaggtgaagaaggccccaagagcgggggcggattagggacctagagaaggttgctaggcagtgctgggggccactgagtttggaaaggtggatttgagcggcaagagtctttgtggtcatgtggcggaatctagagcccccagcagcctaggagaaggagcagggaagtccagtcaatggaaacgtggcatttcttcccgccatatgtcaggaggtaagaaggcaggcaggtgaggctggtggtgagagcgtcatcgatagggcgtgcagcagggtccatggtggatagagaacgaggtgaaggcagagtggagccaggaggtcgtggtcttgaggcagtactgggttgaccctccctggcccaagaggttggagggggtggaggtttcagaggccaggggtgcagtggagactgcgggtaaaagcaaagggcagcagaggagggagcagccatgggggcagcactgcccacctcactcctctctcctccccacagcatcctgatcaggtttatctccaaccccatggccccctcctggtggggcttcctggtggctgggctgatgttcctgtgctccatgatgcagtcgctgatcttacaacactattaccactacatctttgtgactggggtgaagtttcgtactgggatcatgggtgtcatctacaggaaggtcagctggagcagggcccaggggaaaggctggccctgggcagcttgcaagaggctcgcagccaagtccacccactactgtctacctgcaggctctggttatcaccaactcagtcaaacgtgcgtccactgtgggggaaattgtcaacctcatgtcagtggatgcccagcgcttcatggaccttgcccccttcctcaatctgctgtggtcagcacccctgcagatcatcctggcgatctacttcctctggcagaacctaggtccctctgtcctggctggagtcgctttcatggtcttgctgattccactcaacggagctgtggccgtgaagatgcgcgccttccaggtaaagcaaatgaaattgaaggactcgcgcatcaagctgatgagtgagatcctgaacggcatcaaggtgctgaagctgtacgcctgggagcccagcttcctgaagcaggtggagggcatcaggcagggtgagctccagctgctgcgcacggcggcctacctccacaccacaaccaccttcacctggatgtgcagccccttcctggtgaggcttggcacagggctgggtccctgcctccagggctctgggtgcccaggcatggccagggctcattggactctaccctgacaccacctccacgctgctcaggtgaccctgatcaccctctgggtgtacgtgtacgtggacccaaacaatgtgctggacgccgagaaggcctttgtgtctgtgtccttgtttaatatcttaagacttcccctcaacatgctgccccagttaatcagcaacctgactcaggccagtgtgtctctgaaacggatccagcaattcctgagccaagaggaacttgacccccagagtgtggaaagaaagaccatctccccaggctatgccatcaccatacacagtggcaccttcacctgggcccaggacctgccccccactctgcacagcctagacatccaggtcccgaaaggggcactggtggccgtggtggggcctgtgggctgtgggaagtcctccctggtgtctgccctgctgggagagatggagaagctagaaggcaaagtgcacatgaagggctccgtggcctatgtgccccagcaggcatggatccagaactgcactcttcaggaaaacgtgcttttcggcaaagccctgaaccccaagcgctaccagcagactctggaggcctgtgccttgctagctgacctggagatgctgcctggtggggatcagacagagattggagagaagggcattaacctgtctgggggccagcggcagcgggtcagtctggctcgagctgtttacagtgatgccgatattttcttgctggatgacccactgtccgcggtggactctcatgtggccaagcacatctttgaccacgtcatcgggccagaaggcgtgctggcaggcaagacgcgagtgctggtgacgcacggcattagcttcctgccccagacagacttcatcattgtgctagctgatggacaggtgtctgagatgggcccgtacccagccctgctgcagcgcaacggctcctttgccaactttctctgcaactatgcccccgatgaggaccaagggcacctggaggacagctggaccgcgttggaaggtgcagaggataaggaggcactgctgattgaagacacactcagcaaccacacggatctgacagacaatgatccagtcacctatgtggtccagaagcagtttatgagacagctgagtgccctgtcctcagatggggagggacagggtcggcctgtaccccggaggcacctgggtccatcagagaaggtgcaggtgacagaggcgaaggcagatggggcactgacccaggaggagaaagcagccattggcactgtggagctcagtgtgttctgggattatgccaaggccgtggggctctgtaccacgctggccatctgtctcctgtatgtgggtcaaagtgcggctgccattggagccaatgtgtggctcagtgcctggacaaatgatgccatggcagacagtagacagaacaacacttccctgaggctgggcgtctatgctgctttaggaattctgcaagggttcttggtgatgctggcagccatggccatggcagcgggtggcatccaggctgcccgtgtgttgcaccaggcactgctgcacaacaagatacgctcgccacagtccttctttgacaccacaccatcaggccgcatcctgaactgcttctccaaggacatctatgtcgttgatgaggttctggcccctgtcatcctcatgctgctcaattccttcttcaacgccatctccactcttgtggtcatcatggccagcacgccgctcttcactgtggtcatcctgcccctggctgtgctctacaccttagtgcagcgcttctatgcagccacatcacggcaactgaagcggctggaatcagtcagccgctcacctatctactcccacttttcggagacagtgactggtgccagtgtcatccgggcctacaaccgcagccgggattttgagatcatcagtgatactaaggtggatgccaaccagagaagctgctacccctacatcatctccaaccggtcagaagccgcctccctcgctccctgctcctccaggaattcccagcaggctctctggtgttcagggtccttgtccctcctttcccctaagcagaaaactggccctgccctgcccctgccccatttcctcctcatctgatcccccataggtggctgagcatcggagtggagttcgtggggaactgcgtggtgctctttgctgcactatttgccgtcatcgggaggagcagcctgaacccggggctggtgggcctttctgtgtcctactccttgcaggtatgaagggcctggaccccagggcagggccaccactgggacagaaaccacacaggtgttccaggcatctcccgagtgcccctccctgctcagtatgggcaccagccacagggtctgttctcaaggactgtgagaaaaaaaaaaagaaaaaaatcattgagttgacaagtttataaccacacaccatggctggatgttcctactttccttccccaagaagcccatgttctcacattcagaaagaattctgttgaataatctctgtcctcaaaccccacatctctctcctgctcagccgtcgaccttgcctgacacctcacagttcaactggagagacccccatcagcaggagattgtgctgcaggctgagcaggtctttgtggctggagaaacaaaatgttttaaaagcccagaagagggactgggtgcagtggctcacacctaatcccagcactttgggaggcggaggtgggcg

SEQ ID NO: 455204 - DNA, 3926 bp, Homo sapiens
  misc_feature (3804)..(3804): n is a, c, g, or t
  misc_feature (3808)..(3808): n is a, c, g, or t
  misc_feature (3813)..(3814): n is a, c, g, or t
aacccggtcagatggagtccaggccaggaatgagacaagtattcaggagcaatttgggagatgggcgtgtgcgccagagagacagaggagtgccaggcaacctgggtgctggcctgggtaactggaggacgatggatcttttgctgagctgatgggctcggtgggaggaggaggctgggtggggggcaaggtggtggatggagtctggtcatgtggggccagtggtgctggtgggtcctccaaggggagattcccagctagctggaagtcaaactctcgagcccaagagtttgagaccagcctgagcaacatagcaagaccctgtctctacaaaaaagctaagatattagccaggcctggtggcatacgcctagagtcctagctactcaagaggctgaggtgggaagactgcctgagcctgagaggttgaggctgccgtgagctgtgatggcaccaccgcactccagtctaggtgacagagagagaccctgtctcaaaaaaaaaaaaaaaaaaaagagagagagagacaccagtcactgggctggggccactggggcccaccctactccaatatgacctcaccaaatgaggccacgttcacaggtaccaggtgttgggagctgaacatatctttctgggagacacaacttaagctatcacagaaggggaggcctggctatgattatggctggagggctccatgtagtcgagaggagagtgtcccaacaatgaagagactcggtcatgtcaataggtgaaggtgtagagcttccagcagaggtggccagggtgaagctcagcggcaaagggggcaacagcgcagcaagttcctgaggaggcagaggaaggccagggctcgggggcaggggcagcctccgacagcctgagcaccagaaaaaggaggacaagccactggagggcagtttgtgagtggcaaggagtttgtgggtggcagggagttctcaatgggtggctaagcaagaaggcaggtagctgctgagaggggtggggggctgggatgggcctgaagggaagagaagagaggtgaagaaggccccaagagcgggggcggattagggacctagagaaggttgctaggcagtgctgggggccactgagtttggaaaggtggatttgagcggcaagagtctttgtggtcatgtggcggaatctagagcccccagcagcctaggagaaggagcagggaagtccagtcaatggaaacgtggcatttcttcccgccatatgtcaggaggtaagaaggcaggcaggtgaggctggtggtgagagcgtcatcgatagggcgtgcagcagggtccatggtggatagagaacgaggtgaaggcagagtggagccaggaggtcgtggtcttgaggcagtactgggttgaccctccctggcccaagaggttggagggggtggaggtttcagaggccaggggtgcagtggagactgcgggtaaaagcaaagggcagcagaggagggagcagccatgggggcagcactgcccacctcactcctctctcctccccacagcatcctgatcaggtttatctccaaccccatggccccctcctggtggggcttcctggtggctgggctgatgttcctgtgctccatgatgcagtcgctgatcttacaacactattaccactacatctttgtgactggggtgaagtttcgtactgggatcatgggtgtcatctacaggaaggtcagctggagcagggcccaggggaaaggctggccctgggcagcttgcaagaggctcgcagccaagtccacccactactgtctacctgcaggctctggttatcaccaactcagtcaaacgtgcgtccactgtgggggaaattgtcaacctcatgtcagtggatgcccagcgcttcatggaccttgcccccttcctcaatctgctgtggtcagcacccctgcagatcatcctggcgatctacttcctctggcagaacctaggtccctctgtcctggctggagtcgctttcatggtcttgctgattccactcaacggagctgtggccgtgaagatgcgcgccttccaggtaaagcaaatgaaattgaaggactcgcgcatcaagctgatgagtgagatcctgaacggcatcaaggtgctgaagctgtacgcctgggagcccagcttcctgaagcaggtggagggcatcaggcagggtgagctccagctgctgcgcacggcggcctacctccacaccacaaccaccttcacctggatgtgcagccccttcctggtgaggcttggcacagggctgggtccctgcctccagggctctgggtgcccaggcatggccagggctcattggactctaccctgacaccacctccacgctgctcaggtgaccctgatcaccctctgggtgtacgtgtacgtggacccaaacaatgtgctggacgccgagaaggcctttgtgtctgtgtccttgtttaatatcttaagacttcccctcaacatgctgccccagttaatcagcaacctgactcaggccagtgtgtctctgaaacggatccagcaattcctgagccaagaggaacttgacccccagagtgtggaaagaaagaccatctccccaggctatgccatcaccatacacagtggcaccttcacctgggcccaggacctgccccccactctgcacagcctagacatccaggtcccgaaaggggcactggtggccgtggtggggcctgtgggctgtgggaagtcctccctggtgtctgccctgctgggagagatggagaagctagaaggcaaagtgcacatgaagggctccgtggcctatgtgccccagcaggcatggatccagaactgcactcttcaggaaaacgtgcttttcggcaaagccctgaaccccaagcgctaccagcagactctggaggcctgtgccttgctagctgacctggagatgctgcctggtggggatcagacagagattggagagaagggcattaacctgtctgggggccagcggcagcgggtcagtctggctcgagctgtttacagtgatgccgatattttcttgctggatgacccactgtccgcggtggactctcatgtggccaagcacatctttgaccacgtcatcgggccagaaggcgtgctggcaggcaaggtgaggcctgccagaggctaagggggctaagacgcgagtgctggtgacgcacggcattagcttcctgccccagacagacttcatcattgtgctagctgatggacaggtgtctgagatgggcccgtacccagccctgctgcagcgcaacggctcctttgccaactttctctgcaactatgcccccgatgaggaccaagggcacctggaggacagctggaccgcgttggaaggtgcagaggataaggaggcactgctgattgaagacacactcagcaaccacacggatctgacagacaatgatccagtcacctatgtggtccagaagcagtttatgagacagctgagtgccctgtcctcagatggggagggacagggtcggcctgtaccccggaggcacctgggtccatcagagaaggtgcaggtgacagaggcgaaggcagatggggcactgacccaggaggagaaagcagccattggcactgtggagctcagtgtgttctgggattatgccaaggccgtggggctctgtaccacgctggccatctgtctcctgtatgtgggtcaaagtgcggctgccattggagccaatgtgtggctcagtgcctggacaaatgatgccatggcagacagtagacagaacaacacttccctgaggggggntagnggtannatcgcaggtctgggatgtgcagcagcaagaggggatccagcgccgtgtgccggcggtgcaagaatcccactttgaacacacagggcaaggtccgaatatgaagggcgccgga

SEQ ID NO: 455205 - DNA, 423 bp, Homo sapiens
ggacagacgccacgtggacagacgccacgtggacagacgccacgtggacaacgccacggattcagaaccctgagtacaagggtgggtggaagccccggcagatcgacaacccagattacaagggcacttagatccacccagaaattgacatccccggtctcccgattcccaactgagtgttatttgcacactgcactgttttcaaataacgattttatgaaatgacctctgtcctccctctgatttttcatattttctaaagtttcgtttctgttttttaataaaaagctttttcctcctggaacagaagacagctgctgggtcaggccacccctaggaactcagtcctgtactctggggtgctgcctgaatccattaaaaatgggagtactgatgaaataaaactacatggtcaacagtata

SEQ ID NO: 455206 - DNA, 998 bp, Homo sapiens
gagggggcaccagtgtaacacaggaatgagccaagatgccaccactgttggaccatcatgtgagggtagggggctgttccacagcacccacccaccaagtgcaatatctgacgtgggtgtcagtcagtgcctgtgtaatgaacacatgtatgcagacaagtgtgaagagttctggcttacctagaggtcccattagcatgttcccttcctttcttcccacctccctcagttcctggccttcctcttgatcttcagtggctgtgatgttgggctggtgggatggaacactgcaggccaacctagtgcctcccatttctccatctcagcgggaagcaggcaaggagagtagcaaagaacataggctgtgaacaacccacttactccccatgtgggctcgggcgggtcgctgaaacctttggagcctcatttccttaattgcagaaagggcgtcatgagctgtcctgcctgtaggctgatgtcccagttagacaaggtcatgtaggtaaggtgatggcaccacacctggcacaggtgccacacctggtcctcgctgaaccagagctcccttgtgatccttcctcatctctcagagtcctctgagtggggacctggaggcccccaggtgctgcctcctgccccagaggagactgatgccccaagggactccgcagggcaggggctgcaggcccaggcttttccagtgcttctgacgcccctccactctcccacccagggtgagatctcagaccccttccgcttcaccaccttctacatccactttgccctggtactctctgccctcatcttggcctgcttcagggagaaacctccatttttctccgcaaagaatgtcgaccctaacccctaccctgagaccagcgctggctttctctcccgcctgtttttctggtggttcacaaagtgagttggctcttccaccagccaggccagagggaggggagggatggaaggtgagatggagaaaggggagcagggca

SEQ ID NO: 455207 - DNA, 219 bp, Homo sapiens
caccttctacatccactttgccctggtactctctgccctcatcttggcctgcttcagggagaaacctccatttttctccgcaaagaatgtcgaccctgtgagtttcccatggagggtgcgggggctccacagctgagtcctcagcccaactctgaccagcagcccccaacccctccagttcctttcaaagtgggagagaggtcatccccacaatctgta

SEQ ID NO: 455208 - DNA, 188 bp, Homo sapiens
tacctgtgggtcgccctgccctgctacttgctctacctgcggcaccattgtcgtggctacatcatcctctcccacctgtccaagctcaagatggtcagtggctcagggatctcctaccgatggggctgggccctggggattctgcttttattttttaatttaattaaattaattaattaattaattta

SEQ ID NO: 455209 - DNA, 433 bp, Homo sapiens
cccaagagctcttggctgcaaatattgccttcacagccaaaattccctgggtaattgccagtagctcctgctctgctgtgcagatattgtaaaacggtgagaaaggccctgaaatctgacctggggcctcttgggaaagctgctgtgaacacctccacgttaatgtcatccctcagccctctatgcctgtttctctagggactgagaagtgcatgatgcttttacttccttgctcatttcgaagtctgttccagacagttcctataaccagtgaggcctccaagtcattcattttcctcagtctagccaaagctgaatgtgtgagcacaaagaagccgagaggccacctcctgcccagagagaagccacccacactcccaggttggcagacaagatgtgaggggtgaattaaatttgttttcttgagcaagcc

SEQ ID NO: 455210 - DNA, 5347 bp, Homo sapiens
cgggtccgggcggagcgcggggtgcggagggcggaggcggctccggcgcccgctctgcccgccgctgggtccgaccgcgctcgccttccttgcagccgcgcctcggccccatggacgccctgtgcggttccggggagctcggctccaagttctgggactccaacctgtctgtgcacacagaaaacccggacctcactccctgcttccagaactccctgctggcctgggtgccctgcatctacctgtgggtcgccctgccctgctacttgctctacctgcggcaccattgtcgtggctacatcatcctctcccacctgtccaagctcaagatggtcctgggtgtcctgctgtggtgcgtctcctgggcggaccttttttactccttccatggcctggtccatggccgggcccctgcccctgttttctttgtcacccccttggtggtgggggtcaccatgctgctggccaccctgctgatacagtatgagcggctgcagggcgtacagtcttcgggggtcctcattatcttctggttcctgtgtgtggtctgcgccatcgtcccattccgctccaagatccttttagccaaggcagagggtgagatctcagaccccttccgcttcaccaccttctacatccactttgccctggtactctctgccctcatcttggcctgcttcagggagaaacctccatttttctccgcaaagaatgtcgaccctaacccctaccctgagaccagcgctggctttctctcccgcctgtttttctggtggttcacaaagatggccatctatggctaccggcatcccctggaggagaaggacctctggtccctaaaggaagaggacagatcccagatggtggtgcagcagctgctggaggcatggaggaagcaggaaaagcagacggcacgacacaaggcttcagcagcacctgggaaaaatgcctccggcgaggacgaggtgctgctgggtgcccggcccaggccccggaagccctccttcctgaaggccctgctggccaccttcggctccagcttcctcatcagtgcctgcttcaagcttatccaggacctgctctccttcatcaatccacagctgctcagcatcctgatcaggtttatctccaaccccatggccccctcctggtggggcttcctggtggctgggctgatgttcctgtgctccatgatgcagtcgctgatcttacaacactattaccactacatctttgtgactggggtgaagtttcgtactgggatcatgggtgtcatctacaggaaggctctggttatcaccaactcagtcaaacgtgcgtccactgtgggggaaattgtcaacctcatgtcagtggatgcccagcgcttcatggaccttgcccccttcctcaatctgctgtggtcagcacccctgcagatcatcctggcgatctacttcctctggcagaacctaggtccctctgtcctggctggagtcgctttcatggtcttgctgattccactcaacggagctgtggccgtgaagatgcgcgccttccaggtaaagcaaatgaaattgaaggactcgcgcatcaagctgatgagtgagatcctgaacggcatcaaggtgctgaagctgtacgcctgggagcccagcttcctgaagcaggtggagggcatcaggcagggtgagctccagctgctgcgcacggcggcctacctccacaccacaaccaccttcacctggatgtgcagccccttcctggtgaccctgatcaccctctgggtgtacgtgtacgtggacccaaacaatgtgctggacgccgagaaggcctttgtgtctgtgtccttgtttaatatcttaagacttcccctcaacatgctgccccagttaatcagcaacctgactcaggccagtgtgtctctgaaacggatccagcaattcctgagccaagaggaacttgacccccagagtgtggaaagaaagaccatctccccaggctatgccatcaccatacacagtggcaccttcacctgggcccaggacctgccccccactctgcacagcctagacatccaggtcccgaaaggggcactggtggccgtggtggggcctgtgggctgtgggaagtcctccctggtgtctgccctgctgggagagatggagaagctagaaggcaaagtgcacatgaagggctccgtggcctatgtgccccagcaggcatggatccagaactgcactcttcaggaaaacgtgcttttcggcaaagccctgaaccccaagcgctaccagcagactctggaggcctgtgccttgctagctgacctggagatgctgcctggtggggatcagacagagattggagagaagggcattaacctgtctgggggccagcggcagcgggtcagtctggctcgagctgtttacagtgatgccgatattttcttgctggatgacccactgtccgcggtggactctcatgtggccaagcacatctttgaccacgtcatcgggccagaaggcgtgctggcaggcaagacgcgagtgctggtgacgcacggcattagcttcctgccccagacagacttcatcattgtgctagctgatggacaggtgtctgagatgggcccgtacccagccctgctgcagcgcaacggctcctttgccaactttctctgcaactatgcccccgatgaggaccaagggcacctggaggacagctggaccgcgttggaaggtgcagaggataaggaggcactgctgattgaagacacactcagcaaccacacggatctgacagacaatgatccagtcacctatgtggtccagaagcagtttatgagacagctgagtgccctgtcctcagatggggagggacagggtcggcctgtaccccggaggcacctgggtccatcagagaaggtgcaggtgacagaggcgaaggcagatggggcactgacccaggaggagaaagcagccattggcactgtggagctcagtgtgttctgggattatgccaaggccgtggggctctgtaccacgctggccatctgtctcctgtatgtgggtcaaagtgcggctgccattggagccaatgtgtggctcagtgcctggacaaatgatgccatggcagacagtagacagaacaacacttccctgaggctgggcgtctatgctgctttaggaattctgcaagggttcttggtgatgctggcagccatggccatggcagcgggtggcatccaggctgcccgtgtgttgcaccaggcactgctgcacaacaagatacgctcgccacagtccttctttgacaccacaccatcaggccgcatcctgaactgcttctccaaggacatctatgtcgttgatgaggttctggcccctgtcatcctcatgctgctcaattccttcttcaacgccatctccactcttgtggtcatcatggccagcacgccgctcttcactgtggtcatcctgcccctggctgtgctctacaccttagtgcagcgcttctatgcagccacatcacggcaactgaagcggctggaatcagtcagccgctcacctatctactcccacttttcggagacagtgactggtgccagtgtcatccgggcctacaaccgcagccgggattttgagatcatcagtgatactaaggtggatgccaaccagagaagctgctacccctacatcatctccaaccggtcagaagccgcctccctcgctccctgctcctccaggaattcccagcaggctctctggtgttcagggtccttgtccctcctttcccctaagcagaaaactggccctgccctgcccctgccccatttcctcctcatctgatcccccataggtggctgagcatcggagtggagttcgtggggaactgcgtggtgctctttgctgcactatttgccgtcatcgggaggagcagcctgaacccggggctggtgggcctttctgtgtcctactccttgcaggtgacatttgctctgaactggatgatacgaatgatgtcagatttggaatctaacatcgtggctgtggagagggtcaaggagtactccaagacagagacagaggcgccctgggtggtggaaggcagccgccctcccgaaggttggcccccacgtggggaggtggagttccggaattattctgtgcgctaccggccgggcctagacctggtgctgagagacctgagtctgcatgtgcacggtggcgagaaggtggggatcgtgggccgcactggggctggcaagtcttccatgaccctttgcctgttccgcatcctggaggcggcaaagggtgaaatccgcattgatggcctcaatgtggcagacatcggcctccatgacctgcgctctcagctgaccatcatcccgcaggaccccatcctgttctcggggaccctgcgcatgaacctggaccccttcggcagctactcagaggaggacatttggtgggctttggagctgtcccacctgcacacgtttgtgagctcccagccggcaggcctggacttccagtgctcagagggcggggagaatctcagcgtgggccagaggcagctcgtgtgcctggcccgagccctgctccgcaagagccgcatcctggttttagacgaggccacagctgccatcgacctggagactgacaacctcatccaggctaccatccgcacccagtttgatacctgcactgtcctgaccatcgcacaccggcttaacactatcatggactacaccagggtcctggtcctggacaaaggagtagtagctgaatttgattctccagccaacctcattgcagctagaggcatcttctacgggatggccagagatgctggacttgcctaaaatatattcctgagatttcctcctggcctttcctggttttcatcaggaaggaaatgacaccaaatatgtccgcagaatggacttgatagcaaacactgggggcaccttaagattttgcacctgtaaagtgccttacagggtaactgtgctgaatgctttagatgaggaaatgatccccaagtggtgaatgacacgcctaaggtcacagctagtttgagccagttagactagtccccggtctcccgattcccaactgagtgttatttgcacactgcactgttttcaaataacgattttatgaaatgacctctgtcctccctctgatttttcatattttctaaagtttcgtttctgttttttaataaaaagctttttcctcctggaacagaagacagctgctgggtcaggccacccctaggaactcagtcctgtactctggggtgctgcctgaatccattaaaaatgggagtactgatgaaataaaactacatggtcaacagtata

SEQ ID NO: 455211 - DNA, 656 bp, Homo sapiens
ggcctatggctcctcatagggcctaagctgcctccctctgaggccacgttgtatccccaggaccccatcctgttctcggggaccctgcgcatgaacctggaccccttcggcagctactcagaggaggacatttggtgggctttggagctgtcccacctgcacacgtttgtgagctcccagccggcaggcctggacttccagtgctcagagggcggggagaatctcaggtaaacactgggagtgcagaggtcaggaactgcaaccctccctgggaaaccctggcgggtgctgggaaacctgacaccaatgacacagagatgaggccagcccggatgtgcacagggctgtcctttcgtattgagcatattccgtgtgccaggcatggtgtactgccccgccgactcctcacacaagccccagcggtggtccatgatcccacttcaccggtcagggaactgaggctcagagatggtaaagggcttgacctaagttgcacagctgggagaaggcaggtctgggatttgaaccagctctgggagattccttatgtcctcagccactgggctatgcactggaggggccagtagtcacctcttactgagtctaaaggttggagatacctatacctgtgctagctgtgtgatttggggctagtt

SEQ ID NO: 455212 - DNA, 423 bp, Homo sapiens
ctatctgtttggccaaccaccatcttttgcttcctgcccatctacacatttcaagttaacaggcctctgtttgcctgttgggttctctctgtagactttggtaatctgtccctatgtgtcatctatccaccggtgcctcctcagaacctaggtccctctgtcctggctggagtcgctttcatggtcttgctgattccactcaacggagctgtggccgtgaagatgcgcgccttccaggtaggtgctgtcagaggtgcatcctcctgcctgcagcacccggccggctgcctgggggaaggtgtccactaaccttggggcctcccaactaccttgcttcctgagtatggatggctactagcatgcactccgccagcatcactccgcagcatcactcgccgccatgcactccgccaccatctccgg

SEQ ID NO: 455213 - DNA, 5823 bp, Homo sapiens
aacccggtcagatggagtccaggccaggaatgagacaagtattcaggagcaatttgggagatgggcgtgtgcgccagagagacagaggagtgccaggcaacctgggtgctggcctgggtaactggaggacgatggatcttttgctgagctgatgggctcggtgggaggaggaggctgggtggggggcaaggtggtggatggagtctggtcatgtggggccagtggtgctggtgggtcctccaaggggagattcccagctagctggaagtcaaactctcgagcccaagagtttgagaccagcctgagcaacatagcaagaccctgtctctacaaaaaagctaagatattagccaggcctggtggcatacgcctagagtcctagctactcaagaggctgaggtgggaagactgcctgagcctgagaggttgaggctgccgtgagctgtgatggcaccaccgcactccagtctaggtgacagagagagaccctgtctcaaaaaaaaaaaaaaaaaaaagagagagagagacaccagtcactgggctggggccactggggcccaccctactccaatatgacctcaccaaatgaggccacgttcacaggtaccaggtgttgggagctgaacatatctttctgggagacacaacttaagctatcacagaaggggaggcctggctatgattatggctggagggctccatgtagtcgagaggagagtgtcccaacaatgaagagactcggtcatgtcaataggtgaaggtgtagagcttccagcagaggtggccagggtgaagctcagcggcaaagggggcaacagcgcagcaagttcctgaggaggcagaggaaggccagggctcgggggcaggggcagcctccgacagcctgagcaccagaaaaaggaggacaagccactggagggcagtttgtgagtggcaaggagtttgtgggtggcagggagttctcaatgggtggctaagcaagaaggcaggtagctgctgagaggggtggggggctgggatgggcctgaagggaagagaagagaggtgaagaaggccccaagagcgggggcggattagggacctagagaaggttgctaggcagtgctgggggccactgagtttggaaaggtggatttgagcggcaagagtctttgtggtcatgtggcggaatctagagcccccagcagcctaggagaaggagcagggaagtccagtcaatggaaacgtggcatttcttcccgccatatgtcaggaggtaagaaggcaggcaggtgaggctggtggtgagagcgtcatcgatagggcgtgcagcagggtccatggtggatagagaacgaggtgaaggcagagtggagccaggaggtcgtggtcttgaggcagtactgggttgaccctccctggcccaagaggttggagggggtggaggtttcagaggccaggggtgcagtggagactgcgggtaaaagcaaagggcagcagaggagggagcagccatgggggcagcactgcccacctcactcctctctcctccccacagcatcctgatcaggtttatctccaaccccatggccccctcctggtggggcttcctggtggctgggctgatgttcctgtgctccatgatgcagtcgctgatcttacaacactattaccactacatctttgtgactggggtgaagtttcgtactgggatcatgggtgtcatctacaggaaggtcagctggagcagggcccaggggaaaggctggccctgggcagcttgcaagaggctcgcagccaagtccacccactactgtctacctgcaggctctggttatcaccaactcagtcaaacgtgcgtccactgtgggggaaattgtcaacctcatgtcagtggatgcccagcgcttcatggaccttgcccccttcctcaatctgctgtggtcagcacccctgcagatcatcctggcgatctacttcctctggcagaacctaggtccctctgtcctggctggagtcgctttcatggtcttgctgattccactcaacggagctgtggccgtgaagatgcgcgccttccaggtaaagcaaatgaaattgaaggactcgcgcatcaagctgatgagtgagatcctgaacggcatcaaggtgctgaagctgtacgcctgggagcccagcttcctgaagcaggtggagggcatcaggcagggtgagctccagctgctgcgcacggcggcctacctccacaccacaaccaccttcacctggatgtgcagccccttcctggtgaggcttggcacagggctgggtccctgcctccagggctctgggtgcccaggcatggccagggctcattggactctaccctgacaccacctccacgctgctcaggtgaccctgatcaccctctgggtgtacgtgtacgtggacccaaacaatgtgctggacgccgagaaggcctttgtgtctgtgtccttgtttaatatcttaagacttcccctcaacatgctgccccagttaatcagcaacctgactcaggccagtgtgtctctgaaacggatccagcaattcctgagccaagaggaacttgacccccagagtgtggaaagaaagaccatctccccaggctatgccatcaccatacacagtggcaccttcacctgggcccaggacctgccccccactctgcacagcctagacatccaggtcccgaaaggggcactggtggccgtggtggggcctgtgggctgtgggaagtcctccctggtgtctgccctgctgggagagatggagaagctagaaggcaaagtgcacatgaagggctccgtggcctatgtgccccagcaggcatggatccagaactgcactcttcaggaaaacgtgcttttcggcaaagccctgaaccccaagcgctaccagcagactctggaggcctgtgccttgctagctgacctggagatgctgcctggtggggatcagacagagattggagagaagggcattaacctgtctgggggccagcggcagcgggtcagtctggctcgagctgtttacagtgatgccgatattttcttgctggatgacccactgtccgcggtggactctcatgtggccaagcacatctttgaccacgtcatcgggccagaaggcgtgctggcaggcaagacgcgagtgctggtgacgcacggcattagcttcctgccccagacagacttcatcattgtgctagctgatggacaggtgtctgagatgggcccgtacccagccctgctgcagcgcaacggctcctttgccaactttctctgcaactatgcccccgatgaggaccaagggcacctggaggacagctggaccgcgttggaaggtgcagaggataaggaggcactgctgattgaagacacactcagcaaccacacggatctgacagacaatgatccagtcacctatgtggtccagaagcagtttatgagacagctgagtgccctgtcctcagatggggagggacagggtcggcctgtaccccggaggcacctgggtccatcagagaaggtgcaggtgacagaggcgaaggcagatggggcactgacccaggaggagaaagcagccattggcactgtggagctcagtgtgttctgggattatgccaaggccgtggggctctgtaccacgctggccatctgtctcctgtatgtgggtcaaagtgcggctgccattggagccaatgtgtggctcagtgcctggacaaatgatgccatggcagacagtagacagaacaacacttccctgaggctgggcgtctatgctgctttaggaattctgcaagggttcttggtgatgctggcagccatggccatggcagcgggtggcatccaggctgcccgtgtgttgcaccaggcactgctgcacaacaagatacgctcgccacagtccttctttgacaccacaccatcaggccgcatcctgaactgcttctccaaggacatctatgtcgttgatgaggttctggcccctgtcatcctcatgctgctcaattccttcttcaacgccatctccactcttgtggtcatcatggccagcacgccgctcttcactgtggtcatcctgcccctggctgtgctctacaccttagtgcagcgcttctatgcagccacatcacggcaactgaagcggctggaatcagtcagccgctcacctatctactcccacttttcggagacagtgactggtgccagtgtcatccgggcctacaaccgcagccgggattttgagatcatcagtgatactaaggtggatgccaaccagagaagctgctacccctacatcatctccaaccggtggctgagcatcggagtggagttcgtggggaactgcgtggtgctctttgctgcactatttgccgtcatcgggaggagcagcctgaacccggggctggtgggcctttctgtgtcctactccttgcaggtgacatttgctctgaactggatgatacgaatgatgtcagatttggaatctaacatcgtggctgtggagagggtcaaggagtactccaagacagagacagaggcgccctgggtggtggaaggcagccgccctcccgaaggttggcccccacgtggggaggtggagttccggaattattctgtgcgctaccggccgggcctagacctggtgctgagagacctgagtctgcatgtgcacggtggcgagaaggtggggatcgtgggccgcactggggctggcaagtcttccatgaccctttgcctgttccgcatcctggaggcggcaaagggtgaaatccgcattgatggcctcaatgtggcagacatcggcctccatgacctgcgctctcagctgaccatcatcccgcaggaccccatcctgttctcggggaccctgcgcatgaacctggaccccttcggcagctactcagaggaggacatttggtgggctttggagctgtcccacctgcacacgtttgtgagctcccagccggcaggcctggacttccagtgctcagagggcggggagaatctcagcgtgggccagaggcagctcgtgtgcctggcccgagccctgctccgcaagagccgcatcctggttttagacgaggccacagctgccatcgacctggagactgacaacctcatccaggctaccatccgcacccagtttgatacctgcactgtcctgaccatcgcacaccggcttaacactatcatggactacaccagggtcctggtcctggacaaaggagtagtagctgaatttgattctccagccaacctcattgcagctagaggcatcttctacgggatggccagagatgctggacttgcctaaaatatattcctgagatttcctcctggcctttcctggttttcatcaggaaggaaatgacaccaaatatgtccgcagaatggacttgatagcaaacactgggggcaccttaagattttgcacctgtaaagtgccttacagggtaactgtgctgaatgctttagatgaggaaatgatccccaagtggtgaatgacacgcctaaggtcacagctagtttgagccagttagactagtccccggtctcccgattcccaactgagtgttatttgcacactgcactgttttcaaataacgattttatgaaatgacctctgtcctccctctgatttttcatattttctaaagtttcgtttctgttttttaataaaaagctttttcctcctggaacagaagacagctgctgggtcaggccacccctaggaactcagtcctgtactctggggtgctgcctgaatccattaaaaatgggagtactgatgaaataaaactacatggtcaacagtata

SEQ ID NO: 455214 - DNA, 5936 bp, Homo sapiens
cacaaagcctgggtgcctgtcccggccacacactgctgggtgtccttgaacctgttgccaaagtgggtgtagtttctcttttgtacactgggcctaacagtgcccctcctatatacccctggaagttgttctgagacaacatccagataacaactaggtaagtgcagtaataaaatgcgggagaaacattaggggcctttattttcctcacttaactggctgccagggaaaagcaaggaaaggtcagaggctggggtgccccagagaggccccatgtagatgaggctctggctgggcccagagaaatgggatgtacactccggcccagagacctgaagatctgggttcagggcagctttgggacaggctatctggatggcaactaactggagtacctgatcaggcctagaggtgtgtcctgtgacccagtgtccaggcctgggccagcatgtcagagactcagcaagagtatgtgggtccttggctcacattgtttgagcaactactgaatactgaataggactactgaatactgaatactgaataggacaagatgtacatggtacaacttctgcccacctgggccttcaatgaaatgcccccaggcagcatgtccctgactgcatgcttcacagagcagggataggcctgcccaacgtgccactgtatctgcagaacccagcccactgcctgactcaccaaggccctcaccaaacattgtcaaggccaagagtgacgctccagggaaggggatctctctaggaggaagggtgctcaagatgaagaaggactccaacctgtctgtgcacacagaaaacccggacctcactccctgcttccagaactccctgctggcctgggtgccctgcatctacctgtgggtcgccctgccctgctacttgctctacctgcggcaccattgtcgtggctacatcatcctctcccacctgtccaagctcaagatggtcctgggtgtcctgctgtggtgcgtctcctgggcggaccttttttactccttccatggcctggtccatggccgggcccctgcccctgttttctttgtcacccccttggtggtgggggtcaccatgctgctggccaccctgctgatacagtatgagcggctgcagggcgtacagtcttcgggggtcctcattatcttctggttcctgtgtgtggtctgcgccatcgtcccattccgctccaagatccttttagccaaggcagagggtgagatctcagaccccttccgcttcaccaccttctacatccactttgccctggtactctctgccctcatcttggcctgcttcagggagaaacctccatttttctccgcaaagaatgtcgaccctaacccctaccctgagaccagcgctggctttctctcccgcctgtttttctggtggttcacaaagatggccatctatggctaccggcatcccctggaggagaaggacctctggtccctaaaggaagaggacagatcccagatggtggtgcagcagctgctggaggcatggaggaagcaggaaaagcagacggcacgacacaaggcttcagcagcacctgggaaaaatgcctccggcgaggacgaggtgctgctgggtgcccggcccaggccccggaagccctccttcctgaaggccctgctggccaccttcggctccagcttcctcatcagtgcctgcttcaagcttatccaggacctgctctccttcatcaatccacagctgctcagcatcctgatcaggtttatctccaaccccatggccccctcctggtggggcttcctggtggctgggctgatgttcctgtgctccatgatgcagtcgctgatcttacaacactattaccactacatctttgtgactggggtgaagtttcgtactgggatcatgggtgtcatctacaggaaggctctggttatcaccaactcagtcaaacgtgcgtccactgtgggggaaattgtcaacctcatgtcagtggatgcccagcgcttcatggaccttgcccccttcctcaatctgctgtggtcagcacccctgcagatcatcctggcgatctacttcctctggcagaacctaggtccctctgtcctggctggagtcgctttcatggtcttgctgattccactcaacggagctgtggccgtgaagatgcgcgccttccaggtaaagcaaatgaaattgaaggactcgcgcatcaagctgatgagtgagatcctgaacggcatcaaggtgctgaagctgtacgcctgggagcccagcttcctgaagcaggtggagggcatcaggcagggtgagctccagctgctgcgcacggcggcctacctccacaccacaaccaccttcacctggatgtgcagccccttcctggtgaggcttggcacagggctgggtccctgcctccagggctctgggtgcccaggcatggccagggctcattggactctaccctgacaccacctccacgctgctcaggtgaccctgatcaccctctgggtgtacgtgtacgtggacccaaacaatgtgctggacgccgagaaggcctttgtgtctgtgtccttgtttaatatcttaagacttcccctcaacatgctgccccagttaatcagcaacctgactcaggccagtgtgtctctgaaacggatccagcaattcctgagccaagaggaacttgacccccagagtgtggaaagaaagaccatctccccaggctatgccatcaccatacacagtggcaccttcacctgggcccaggacctgccccccactctgcacagcctagacatccaggtcccgaaaggggcactggtggccgtggtggggcctgtgggctgtgggaagtcctccctggtgtctgccctgctgggagagatggagaagctagaaggcaaagtgcacatgaagggctccgtggcctatgtgccccagcaggcatggatccagaactgcactcttcaggaaaacgtgcttttcggcaaagccctgaaccccaagcgctaccagcagactctggaggcctgtgccttgctagctgacctggagatgctgcctggtggggatcagacagagattggagagaagggcattaacctgtctgggggccagcggcagcgggtcagtctggctcgagctgtttacagtgatgccgatattttcttgctggatgacccactgtccgcggtggactctcatgtggccaagcacatctttgaccacgtcatcgggccagaaggcgtgctggcaggcaagacgcgagtgctggtgacgcacggcattagcttcctgccccagacagacttcatcattgtgctagctgatggacaggtgtctgagatgggcccgtacccagccctgctgcagcgcaacggctcctttgccaactttctctgcaactatgcccccgatgaggaccaagggcacctggaggacagctggaccgcgttggaaggtgcagaggataaggaggcactgctgattgaagacacactcagcaaccacacggatctgacagacaatgatccagtcacctatgtggtccagaagcagtttatgagacagctgagtgccctgtcctcagatggggagggacagggtcggcctgtaccccggaggcacctgggtccatcagagaaggtgcaggtgacagaggcgaaggcagatggggcactgacccaggaggagaaagcagccattggcactgtggagctcagtgtgttctgggattatgccaaggccgtggggctctgtaccacgctggccatctgtctcctgtatgtgggtcaaagtgcggctgccattggagccaatgtgtggctcagtgcctggacaaatgatgccatggcagacagtagacagaacaacacttccctgaggctgggcgtctatgctgctttaggaattctgcaagggttcttggtgatgctggcagccatggccatggcagcgggtggcatccaggctgcccgtgtgttgcaccaggcactgctgcacaacaagatacgctcgccacagtccttctttgacaccacaccatcaggccgcatcctgaactgcttctccaaggacatctatgtcgttgatgaggttctggcccctgtcatcctcatgctgctcaattccttcttcaacgccatctccactcttgtggtcatcatggccagcacgccgctcttcactgtggtcatcctgcccctggctgtgctctacaccttagtgcagcgcttctatgcagccacatcacggcaactgaagcggctggaatcagtcagccgctcacctatctactcccacttttcggagacagtgactggtgccagtgtcatccgggcctacaaccgcagccgggattttgagatcatcagtgatactaaggtggatgccaaccagagaagctgctacccctacatcatctccaaccggtggctgagcatcggagtggagttcgtggggaactgcgtggtgctctttgctgcactatttgccgtcatcgggaggagcagcctgaacccggggctggtgggcctttctgtgtcctactccttgcaggtgacatttgctctgaactggatgatacgaatgatgtcagatttggaatctaacatcgtggctgtggagagggtcaaggagtactccaagacagagacagaggcgccctgggtggtggaaggcagccgccctcccgaaggttggcccccacgtggggaggtggagttccggaattattctgtgcgctaccggccgggcctagacctggtgctgagagacctgagtctgcatgtgcacggtggcgagaaggtggggatcgtgggccgcactggggctggcaagtcttccatgaccctttgcctgttccgcatcctggaggcggcaaagggtgaaatccgcattgatggcctcaatgtggcagacatcggcctccatgacctgcgctctcagctgaccatcatcccgcaggaccccatcctgttctcggggaccctgcgcatgaacctggaccccttcggcagctactcagaggaggacatttggtgggctttggagctgtcccacctgcacacgtttgtgagctcccagccggcaggcctggacttccagtgctcagagggcggggagaatctcagcgtgggccagaggcagctcgtgtgcctggcccgagccctgctccgcaagagccgcatcctggttttagacgaggccacagctgccatcgacctggagactgacaacctcatccaggctaccatccgcacccagtttgatacctgcactgtcctgaccatcgcacaccggcttaacactatcatggactacaccagggtcctggtcctggacaaaggagtagtagctgaatttgattctccagccaacctcattgcagctagaggcatcttctacgggatggccagagatgctggacttgcctaaaatatattcctgagatttcctcctggcctttcctggttttcatcaggaaggaaatgacaccaaatatgtccgcagaatggacttgatagcaaacactgggggcaccttaagattttgcacctgtaaagtgccttacagggtaactgtgctgaatgctttagatgaggaaatgatccccaagtggtgaatgacacgcctaaggtcacagctagtttgagccagttagactagtccccggtctcccgattcccaactgagtgttatttgcacactgcactgttttcaaataacgattttatgaaatgacctctgtcctccctctgatttttcatattttctaaagtttcgtttctgttttttaataaaaagctttttcctcctggaacagaagacagctgctgggtcaggccacccctaggaactcagtcctgtactctggggtgctgcctgaatccattaaaaatgggagtactgatgaaataaaactacatggtcaacagtata

SEQ ID NO: 455215 - DNA, 5416 bp, Homo sapiens
cgggtccgggcggagcgcggggtgcggagggcggaggcggctccggcgcccgctctgcccgccgctgggtccgaccgcgctcgccttccttgcagccgcgcctcggccccatggacgccctgtgcggttccggggagctcggctccaagttctggaacccagcccactgcctgactcaccaaggccctcaccaaacattgtcaaggccaagagtgacgctccagggaaggggatctctctaggaggaagggtgctcaagatgaagaaggactccaacctgtctgtgcacacagaaaacccggacctcactccctgcttccagaactccctgctggcctgggtgccctgcatctacctgtgggtcgccctgccctgctacttgctctacctgcggcaccattgtcgtggctacatcatcctctcccacctgtccaagctcaagatggtcctgggtgtcctgctgtggtgcgtctcctgggcggaccttttttactccttccatggcctggtccatggccgggcccctgcccctgttttctttgtcacccccttggtggtgggggtcaccatgctgctggccaccctgctgatacagtatgagcggctgcagggcgtacagtcttcgggggtcctcattatcttctggttcctgtgtgtggtctgcgccatcgtcccattccgctccaagatccttttagccaaggcagagggtgagatctcagaccccttccgcttcaccaccttctacatccactttgccctggtactctctgccctcatcttggcctgcttcagggagaaacctccatttttctccgcaaagaatgtcgaccctaacccctaccctgagaccagcgctggctttctctcccgcctgtttttctggtggttcacaaagatggccatctatggctaccggcatcccctggaggagaaggacctctggtccctaaaggaagaggacagatcccagatggtggtgcagcagctgctggaggcatggaggaagcaggaaaagcagacggcacgacacaaggcttcagcagcacctgggaaaaatgcctccggcgaggacgaggtgctgctgggtgcccggcccaggccccggaagccctccttcctgaaggccctgctggccaccttcggctccagcttcctcatcagtgcctgcttcaagcttatccaggacctgctctccttcatcaatccacagctgctcagcatcctgatcaggtttatctccaaccccatggccccctcctggtggggcttcctggtggctgggctgatgttcctgtgctccatgatgcagtcgctgatcttacaacactattaccactacatctttgtgactggggtgaagtttcgtactgggatcatgggtgtcatctacaggaaggctctggttatcaccaactcagtcaaacgtgcgtccactgtgggggaaattgtcaacctcatgtcagtggatgcccagcgcttcatggaccttgcccccttcctcaatctgctgtggtcagcacccctgcagatcatcctggcgatctacttcctctggcagaacctaggtccctctgtcctggctggagtcgctttcatggtcttgctgattccactcaacggagctgtggccgtgaagatgcgcgccttccaggtaaagcaaatgaaattgaaggactcgcgcatcaagctgatgagtgagatcctgaacggcatcaaggtgctgaagctgtacgcctgggagcccagcttcctgaagcaggtggagggcatcaggcagggtgagctccagctgctgcgcacggcggcctacctccacaccacaaccaccttcacctggatgtgcagccccttcctggtgaggcttggcacagggctgggtccctgcctccagggctctgggtgcccaggcatggccagggctcattggactctaccctgacaccacctccacgctgctcaggtgaccctgatcaccctctgggtgtacgtgtacgtggacccaaacaatgtgctggacgccgagaaggcctttgtgtctgtgtccttgtttaatatcttaagacttcccctcaacatgctgccccagttaatcagcaacctgactcaggccagtgtgtctctgaaacggatccagcaattcctgagccaagaggaacttgacccccagagtgtggaaagaaagaccatctccccaggctatgccatcaccatacacagtggcaccttcacctgggcccaggacctgccccccactctgcacagcctagacatccaggtcccgaaaggggcactggtggccgtggtggggcctgtgggctgtgggaagtcctccctggtgtctgccctgctgggagagatggagaagctagaaggcaaagtgcacatgaagggctccgtggcctatgtgccccagcaggcatggatccagaactgcactcttcaggaaaacgtgcttttcggcaaagccctgaaccccaagcgctaccagcagactctggaggcctgtgccttgctagctgacctggagatgctgcctggtggggatcagacagagattggagagaagggcattaacctgtctgggggccagcggcagcgggtcagtctggctcgagctgtttacagtgatgccgatattttcttgctggatgacccactgtccgcggtggactctcatgtggccaagcacatctttgaccacgtcatcgggccagaaggcgtgctggcaggcaagacgcgagtgctggtgacgcacggcattagcttcctgccccagacagacttcatcattgtgctagctgatggacaggtgtctgagatgggcccgtacccagccctgctgcagcgcaacggctcctttgccaactttctctgcaactatgcccccgatgaggaccaagggcacctggaggacagctggaccgcgttggaaggtgcagaggataaggaggcactgctgattgaagacacactcagcaaccacacggatctgacagacaatgatccagtcacctatgtggtccagaagcagtttatgagacagctgagtgccctgtcctcagatggggagggacagggtcggcctgtaccccggaggcacctgggtccatcagagaaggtgcaggtgacagaggcgaaggcagatggggcactgacccaggaggagaaagcagccattggcactgtggagctcagtgtgttctgggattatgccaaggccgtggggctctgtaccacgctggccatctgtctcctgtatgtgggtcaaagtgcggctgccattggagccaatgtgtggctcagtgcctggacaaatgatgccatggcagacagtagacagaacaacacttccctgaggctgggcgtctatgctgctttaggaattctgcaagggttcttggtgatgctggcagccatggccatggcagcgggtggcatccaggctgcccgtgtgttgcaccaggcactgctgcacaacaagatacgctcgccacagtccttctttgacaccacaccatcaggccgcatcctgaactgcttctccaaggacatctatgtcgttgatgaggttctggcccctgtcatcctcatgctgctcaattccttcttcaacgccatctccactcttgtggtcatcatggccagcacgccgctcttcactgtggtcatcctgcccctggctgtgctctacaccttagtgcagcgcttctatgcagccacatcacggcaactgaagcggctggaatcagtcagccgctcacctatctactcccacttttcggagacagtgactggtgccagtgtcatccgggcctacaaccgcagccgggattttgagatcatcagtgatactaaggtggatgccaaccagagaagctgctacccctacatcatctccaaccggtggctgagcatcggagtggagttcgtggggaactgcgtggtgctctttgctgcactatttgccgtcatcgggaggagcagcctgaacccggggctggtgggcctttctgtgtcctactccttgcaggtgacatttgctctgaactggatgatacgaatgatgtcagatttggaatctaacatcgtggctgtggagagggtcaaggagtactccaagacagagacagaggcgccctgggtggtggaaggcagccgccctcccgaaggttggcccccacgtggggaggtggagttccggaattattctgtgcgctaccggccgggcctagacctggtgctgagagacctgagtctgcatgtgcacggtggcgagaaggtggggatcgtgggccgcactggggctggcaagtcttccatgaccctttgcctgttccgcatcctggaggcggcaaagggtgaaatccgcattgatggcctcaatgtggcagacatcggcctccatgacctgcgctctcagctgaccatcatcccgcaggaccccatcctgttctcggggaccctgcgcatgaacctggaccccttcggcagctactcagaggaggacatttggtgggctttggagctgtcccacctgcacacgtttgtgagctcccagccggcaggcctggacttccagtgctcagagggcggggagaatctcagcgtgggccagaggcagctcgtgtgcctggcccgagccctgctccgcaagagccgcatcctggttttagacgaggccacagctgccatcgacctggagactgacaacctcatccaggctaccatccgcacccagtttgatacctgcactgtcctgaccatcgcacaccggcttaacactatcatggactacaccagggtcctggtcctggacaaaggagtagtagctgaatttgattctccagccaacctcattgcagctagaggcatcttctacgggatggccagagatgctggacttgcctaaaatatattcctgagatttcctcctggcctttcctggttttcatcaggaaggaaatgacaccaaatatgtccgcagaatggacttgatagcaaacactgggggcaccttaagattttgcacctgtaaagtgccttacagggtaactgtgctgaatgctttagatgaggaaatgatccccaagtggtgaatgacacgcctaaggtcacagctagtttgagccagttagactagtccccggtctcccgattcccaactgagtgttatttgcacactgcactgttttcaaataacgattttatgaaatgacctctgtcctccctctgatttttcatattttctaaagtttcgtttctgttttttaataaaaagctttttcctcctggaacagaagacagctgctgggtcaggccacccctaggaactcagtcctgtactctggggtgctgcctgaatccattaaaaatgggagtactgatgaaataaaactacatggtcaacagtata

SEQ ID NO: 455216 - DNA, 2724 bp, Homo sapiens
gccaccacgcctggctaatttttgtatttttagtacagacatggtttcaccatgttggccaggatggtctcgatctcttgacctcgtgatctgcctgcctcggcctcccaaagtgctgggattacaggtgtgagccaccttgcccgatctcagagcctgttttccatctgttgaaagcataggagggcccaggcccagcttgtgtggcaaggctgcttcatggataaatagtttgcgttggaaggtgcagaggataaggaggcactgctgattgaagacacactcagcaaccacacggatctgacagacaatgatccagtcacctatgtggtccagaagcagtttatgagacagctgagtgccctgtcctcagatggggagggacagggtcggcctgtaccccggaggcacctgggtccatcagagaaggtgcaggtgacagaggcgaaggcagatggggcactgacccaggaggagaaagcagccattggcactgtggagctcagtgtgttctgggattatgccaaggccgtggggctctgtaccacgctggccatctgtctcctgtatgtgggtcaaagtgcggctgccattggagccaatgtgtggctcagtgcctggacaaatgatgccatggcagacagtagacagaacaacacttccctgaggctgggcgtctatgctgctttaggaattctgcaagggttcttggtgatgctggcagccatggccatggcagcgggtggcatccaggctgcccgtgtgttgcaccaggcactgctgcacaacaagatacgctcgccacagtccttctttgacaccacaccatcaggccgcatcctgaactgcttctccaaggacatctatgtcgttgatgaggttctggcccctgtcatcctcatgctgctcaattccttcttcaacgccatctccactcttgtggtcatcatggccagcacgccgctcttcactgtggtcatcctgcccctggctgtgctctacaccttagtgcagcgcttctatgcagccacatcacggcaactgaagcggctggaatcagtcagccgctcacctatctactcccacttttcggagacagtgactggtgccagtgtcatccgggcctacaaccgcagccgggattttgagatcatcagtgatactaaggtggatgccaaccagagaagctgctacccctacatcatctccaaccggtggctgagcatcggagtggagttcgtggggaactgcgtggtgctctttgctgcactatttgccgtcatcgggaggagcagcctgaacccggggctggtgggcctttctgtgtcctactccttgcaggtgacatttgctctgaactggatgatacgaatgatgtcagatttggaatctaacatcgtggctgtggagagggtcaaggagtactccaagacagagacagaggcgccctgggtggtggaaggcagccgccctcccgaaggttggcccccacgtggggaggtggagttccggaattattctgtgcgctaccggccgggcctagacctggtgctgagagacctgagtctgcatgtgcacggtggcgagaaggtggggatcgtgggccgcactggggctggcaagtcttccatgaccctttgcctgttccgcatcctggaggcggcaaagggtgaaatccgcattgatggcctcaatgtggcagacatcggcctccatgacctgcgctctcagctgaccatcatcccgcaggaccccatcctgttctcggggaccctgcgcatgaacctggaccccttcggcagctactcagaggaggacatttggtgggctttggagctgtcccacctgcacacgtttgtgagctcccagccggcaggcctggacttccagtgctcagagggcggggagaatctcagcgtgggccagaggcagctcgtgtgcctggcccgagccctgctccgcaagagccgcatcctggttttagacgaggccacagctgccatcgacctggagactgacaacctcatccaggctaccatccgcacccagtttgatacctgcactgtcctgaccatcgcacaccggcttaacactatcatggactacaccagggtcctggtcctggacaaaggagtagtagctgaatttgattctccagccaacctcattgcagctagaggcatcttctacgggatggccagagatgctggacttgcctaaaatatattcctgagatttcctcctggcctttcctggttttcatcaggaaggaaatgacaccaaatatgtccgcagaatggacttgatagcaaacactgggggcaccttaagattttgcacctgtaaagtgccttacagggtaactgtgctgaatgctttagatgaggaaatgatccccaagtggtgaatgacacgcctaaggtcacagctagtttgagccagttagactagtccccggtctcccgattcccaactgagtgttatttgcacactgcactgttttcaaataacgattttatgaaatgacctctgtcctccctctgatttttcatattttctaaagtttcgtttctgttttttaataaaaagctttttcctcctggaacagaagacagctgctgggtcaggccacccctaggaactcagtcctgtactctggggtgctgcctgaatccattaaaaatgggagtactgatgaaataaaactacatggtcaacagtata

SEQ ID NO: 455217 - DNA, 4300 bp, Homo sapiens
  misc_feature (2748)..(2748): n is a, c, g, or t
cgggtccgggcggagcgcggggtgcggagggcggaggcggctccggcgcccgctctgcccgccgctgggtccgaccgcgctcgccttccttgcagccgcgcctcggccccatggacgccctgtgcggttccggggagctcggctccaagttctgggactccaacctgtctgtgcacacagaaaacccggacctcactccctgcttccagaactccctgctggcctgggtgccctgcatctacctgtgggtcgccctgccctgctacttgctctacctgcggcaccattgtcgtggctacatcatcctctcccacctgtccaagctcaagatggtcctgggtgtcctgctgtggtgcgtctcctgggcggaccttttttactccttccatggcctggtccatggccgggcccctgcccctgttttctttgtcacccccttggtggtgggggtcaccatgctgctggccaccctgctgatacagtatgagcggctgcagggcgtacagtcttcgggggtcctcattatcttctggttcctgtgtgtggtctgcgccatcgtcccattccgctccaagatccttttagccaaggcagagggtgagatctcagaccccttccgcttcaccaccttctacatccactttgccctggtactctctgccctcatcttggcctgcttcagggagaaacctccatttttctccgcaaagaatgtcgaccctaacccctaccctgagaccagcgctggctttctctcccgcctgtttttctggtggttcacaaagatggccatctatggctaccggcatcccctggaggagaaggacctctggtccctaaaggaagaggacagatcccagatggtggtgcagcagctgctggaggcatggaggaagcaggaaaagcagacggcacgacacaaggcttcagcagcacctgggaaaaatgcctccggcgaggacgaggtgctgctgggtgcccggcccaggccccggaagccctccttcctgaaggccctgctggccaccttcggctccagcttcctcatcagtgcctgcttcaagcttatccaggacctgctctccttcatcaatccacagctgctcagcatcctgatcaggtttatctccaaccccatggccccctcctggtggggcttcctggtggctgggctgatgttcctgtgctccatgatgcagtcgctgatcttacaacactattaccactacatctttgtgactggggtgaagtttcgtactgggatcatgggtgtcatctacaggaaggctctggttatcaccaactcagtcaaacgtgcgtccactgtgggggaaattgtcaacctcatgtcagtggatgcccagcgcttcatggaccttgcccccttcctcaatctgctgtggtcagcacccctgcagatcatcctggcgatctacttcctctggcaggtgactctccaaccctgacctctgcctccttcctctgacatgctgcagaagtggcaagagaggattattctggaactgggagcatggcacatgcttgtagtcccagctgctcaggcggctgaggcaagaggatcacttgagcccaagagttctggctgcagtgcgccacgattgtgcctgcgaatagccaccacactccagcctgggcaacatagcaagaccttgtctctaaaaagaaacaaagaaaacagaaaaaaagaaggagggttattctgggttagcagaggggatatagaattgacacaagagctggctgggcacggtggctcacgcctgtaatcccagcattttgggagaccaaggcgggtggatcacgaggtcaggagttcgagaccagcccggccaggatggtgaaaccccatctctactaaaaatacaaaaattagccagacgtggtggcgggtgcctgtagtcacagctactcaggaggctgaggcaggagaatcgcttgaacccaggaggcagaggttgcagtgagccaagatcacgccactgcactccagcctgggtgacagagcgagactccatctcaagagagaaaaaaaaaaagtccagaggagttttcttgctttggggtgttgtagaaatgatcttggagcttagccccaaaggacaaacagaatttctcttgtctctgggcaagttgtaggctcatgtgacaggtcaggacagtgtagggctggcataccgctcgctcacgttcacatgcttgcagagaacgtacacagacgaggtgactgaagcctggtctgcaggtcaggcaggtcatcctgatgccagcttgtactgtcaaagagtcacctaactgcaaacggaatttttgtaaagcagatcacattgttaatacctcaggtggctcaaaccttgaacgcgttggcaaacaaaaaacaatccagaaaggtcaattttcacaaaggtcagtgtgcacatgaatctacttgttaaaatgtacattttgattcagtagacctaggatggggctcaggactctgcactttgatcaagactccttggtacgcaaagtgtggcccatgggccagttgcatcaccatcctctgggagcttgttagaaatgaagaatctcaggttccaagtcccacctcagactacagaatccggcgttgcattttaacaagattctctgggaagtcttatacatattaaagttggagaaacagaaaccaaggcgaggtggtccttggttaagtctgcactgtcactgcccaagggagtcattcgngattacagccccagctggcatgcctgtgggcttgatccaggcccacctgggtcatccatgggctaggatcccatggatgggcacatgatccaggagtctgaactcctcccaaagccattacggtggggaggggagatcgccatacgtataacccagtccctttggccaggtgacatttgctctgaactggatgatacgaatgatgtcagatttggaatctaacatcgtggctgtggagagggtcaaggagtactccaagacagagacagaggcgccctgggtggtggaaggcagccgccctcccgaaggttggcccccacgtggggaggtggagttccggaattattctgtgcgctaccggccgggcctagacctggtgctgagagacctgagtctgcatgtgcacggtggcgagaaggtggggatcgtgggccgcactggggctggcaagtcttccatgaccctttgcctgttccgcatcctggaggcggcaaagggtgaaatccgcattgatggcctcaatgtggcagacatcggcctccatgacctgcgctctcagctgaccatcatcccgcaggaccccatcctgttctcggggaccctgcgcatgaacctggaccccttcggcagctactcagaggaggacatttggtgggctttggagctgtcccacctgcacacgtttgtgagctcccagccggcaggcctggacttccagtgctcagagggcggggagaatctcagcgtgggccagaggcagctcgtgtgcctggcccgagccctgctccgcaagagccgcatcctggttttagacgaggccacagctgccatcgacctggagactgacaacctcatccaggctaccatccgcacccagtttgatacctgcactgtcctgaccatcgcacaccggcttaacactatcatggactacaccagggtcctggtcctggacaaaggagtagtagctgaatttgattctccagccaacctcattgcagctagaggcatcttctacgggatggccagagatgctggacttgcctaaaatatattcctgagatttcctcctggcctttcctggttttcatcaggaaggaaatgacaccaaatatgtccgcagaatggacttgatagcaaacactgggggcaccttaagattttgcacctgtaaagtgccttacagggtaactgtgctgaatgctttagatgaggaaatgatccccaagtggtgaatgacacgcctaaggtcacagctagtttgagccagttagactagtccccggtctcccgattcccaactgagtgttatttgcacactgcactgttttcaaataacgattttatgaaatgacctctgtcctccctctgatttttcatattttctaaagtttcgtttctgttttttaataaaaagctttttcctcctggaacagaagacagctgctgggtcaggccacccctaggaactcagtcctgtactctggggtgctgcctgaatccattaaaaatgggagtactgatgaaataaaactacatggtcaacagtata

SEQ ID NO: 455218 - DNA, 5158 bp, Homo sapiens
aacccggtcagatggagtccaggccaggaatgagacaagtattcaggagcaatttgggagatgggcgtgtgcgccagagagacagaggagtgccaggcaacctgggtgctggcctgggtaactggaggacgatggatcttttgctgagctgatgggctcggtgggaggaggaggctgggtggggggcaaggtggtggatggagtctggtcatgtggggccagtggtgctggtgggtcctccaaggggagattcccagctagctggaagtcaaactctcgagcccaagagtttgagaccagcctgagcaacatagcaagaccctgtctctacaaaaaagctaagatattagccaggcctggtggcatacgcctagagtcctagctactcaagaggctgaggtgggaagactgcctgagcctgagaggttgaggctgccgtgagctgtgatggcaccaccgcactccagtctaggtgacagagagagaccctgtctcaaaaaaaaaaaaaaaaaaaagagagagagagacaccagtcactgggctggggccactggggcccaccctactccaatatgacctcaccaaatgaggccacgttcacaggtaccaggtgttgggagctgaacatatctttctgggagacacaacttaagctatcacagaaggggaggcctggctatgattatggctggagggctccatgtagtcgagaggagagtgtcccaacaatgaagagactcggtcatgtcaataggtgaaggtgtagagcttccagcagaggtggccagggtgaagctcagcggcaaagggggcaacagcgcagcaagttcctgaggaggcagaggaaggccagggctcgggggcaggggcagcctccgacagcctgagcaccagaaaaaggaggacaagccactggagggcagtttgtgagtggcaaggagtttgtgggtggcagggagttctcaatgggtggctaagcaagaaggcaggtagctgctgagaggggtggggggctgggatgggcctgaagggaagagaagagaggtgaagaaggccccaagagcgggggcggattagggacctagagaaggttgctaggcagtgctgggggccactgagtttggaaaggtggatttgagcggcaagagtctttgtggtcatgtggcggaatctagagcccccagcagcctaggagaaggagcagggaagtccagtcaatggaaacgtggcatttcttcccgccatatgtcaggaggtaagaaggcaggcaggtgaggctggtggtgagagcgtcatcgatagggcgtgcagcagggtccatggtggatagagaacgaggtgaaggcagagtggagccaggaggtcgtggtcttgaggcagtactgggttgaccctccctggcccaagaggttggagggggtggaggtttcagaggccaggggtgcagtggagactgcgggtaaaagcaaagggcagcagaggagggagcagccatgggggcagcactgcccacctcactcctctctcctccccacagcatcctgatcaggtttatctccaaccccatggccccctcctggtggggcttcctggtggctgggctgatgttcctgtgctccatgatgcagtcgctgatcttacaacactattaccactacatctttgtgactggggtgaagtttcgtactgggatcatgggtgtcatctacaggaaggtcagctggagcagggcccaggggaaaggctggccctgggcagcttgcaagaggctcgcagccaagtccacccactactgtctacctgcaggctctggttatcaccaactcagtcaaacgtgcgtccactgtgggggaaattgtcaacctcatgtcagtggatgcccagcgcttcatggaccttgcccccttcctcaatctgctgtggtcagcacccctgcagatcatcctggcgatctacttcctctggcagaacctaggtccctctgtcctggctggagtcgctttcatggtcttgctgattccactcaacggagctgtggccgtgaagatgcgcgccttccaggtaaagcaaatgaaattgaaggactcgcgcatcaagctgatgagtgagatcctgaacggcatcaaggtgctgaagctgtacgcctgggagcccagcttcctgaagcaggtggagggcatcaggcagggtgagctccagctgctgcgcacggcggcctacctccacaccacaaccaccttcacctggatgtgcagccccttcctggtgaggcttggcacagggctgggtccctgcctccagggctctgggtgcccaggcatggccagggctcattggactctaccctgacaccacctccacgctgctcaggtgaccctgatcaccctctgggtgtacgtgtacgtggacccaaacaatgtgctggacgccgagaaggcctttgtgtctgtgtccttgtttaatatcttaagacttcccctcaacatgctgccccagttaatcagcaacctgactcaggccagtgtgtctctgaaacggatccagcaattcctgagccaagaggaacttgacccccagagtgtggaaagaaagaccatctccccaggctatgccatcaccatacacagtggcaccttcacctgggcccaggacctgccccccactctgcacagcctagacatccaggtcccgaaaggggcactggtggccgtggtggggcctgtgggctgtgggaagtcctccctggtgtctgccctgctgggagagatggagaagctagaaggcaaagtgcacatgaagggctccgtggcctatgtgccccagcaggcatggatccagaactgcactcttcaggaaaacgtgcttttcggcaaagccctgaaccccaagcgctaccagcagactctggaggcctgtgccttgctagctgacctggagatgctgcctggtggggatcagacagagattggagagaagggcattaacctgtctgggggccagcggcagcgggtcagtctggctcgagctgtttacagtgatgccgatattttcttgctggatgacccactgtccgcggtggactctcatgtggccaagcacatctttgaccacgtcatcgggccagaaggcgtgctggcaggcaagacgcgagtgctggtgacgcacggcattagcttcctgccccagacagacttcatcattgtgctagctgatggacaggtgtctgagatgggcccgtacccagccctgctgcagcgcaacggctcctttgccaactttctctgcaactatgcccccgatgaggaccaagggcacctggaggacagctggaccgcgttggaaggtgcagaggataaggaggcactgctgattgaagacacactcagcaaccacacggatctgacagacaatgatccagtcacctatgtggtccagaagcagtttatgagacagctgagtgccctgtcctcagatggggagggacagggtcggcctgtaccccggaggcacctgggtccatcagagaaggtgcaggtgacagaggcgaaggcagatggggcactgacccaggaggagaaagcagccattggcactgtggagctcagtgtgttctgggattatgccaaggccgtggggctctgtaccacgctggccatctgtctcctgtatgtgggtcaaagtgcggctgccattggagccaatgtgtggctcagtgcctggacaaatgatgccatggcagacagtagacagaacaacacttccctgaggctgggcgtctatgctgctttaggaattctgcaagggttcttggtgatgctggcagccatggccatggcagcgggtggcatccaggctgcccgtgtgttgcaccaggcactgctgcacaacaagatacgctcgccacagtccttctttgacaccacaccatcaggccgcatcctgaactgcttctccaaggacatctatgtcgttgatgaggttctggcccctgtcatcctcatgctgctcaattccttcttcaacgccatctccactcttgtggtcatcatggccagcacgccgctcttcactgtggtcatcctgcccctggctgtgctctacaccttagtgcagcgcttctatgcagccacatcacggcaactgaagcggctggaatcagtcagccgctcacctatctactcccacttttcggagacagtgactggtgccagtgtcatccgggcctacaaccgcagccgggattttgagatcatcagtgatactaaggtggatgccaaccagagaagctgctacccctacatcatctccaaccggtggctgagcatcggagtggagttcgtggggaactgcgtggtgctctttgctgcactatttgccgtcatcgggaggagcagcctgaacccggggctggtgggcctttctgtgtcctactccttgcaggtgacatttgctctgaactggatgatacgaatgatgtcagatttggaatctaacatcgtggctgtggagagggtcaaggagtactccaagacagagacagaggcgccctgggtggtggaaggcagccgccctcccgaaggttggcccccacgtggggaggtggagttccggaattattctgtgcgctaccggccgggcctagacctggtgctgagagacctgagtctgcatgtgcacggtggcgagaaggtggggatcgtgggccgcactggggctggcaagtcttccatgaccctttgcctgttccgcatcctggaggcggcaaagggtgaaatccgcattgatggcctcaatgtggcagacatcggcctccatgacctgcgctctcagctgaccatcatcccgcaggaccccatcctgttctcggggaccctgcgcatgaacctggaccccttcggcagctactcagaggaggacatttggtgggctttggagctgtcccacctgcacacgtttgtgagctcccagccggcaggcctggacttccagtgctcagagggcggggagaatctcagcgtgggccagaggcagctcgtgtgcctggcccgagccctgctccgcaagagccgcatcctggttttagacgaggccacagctgccatcgacctggagactgacaacctcatccaggctaccattcggatgttggagcggttcc

SEQ ID NO: 455219 - DNA, 879 bp, Homo sapiens
atgagctcggtacctgataaaggttgtggcaggctggacttccagtgctcagagggcggggagaatctcagcgtgggccagaggcagctcgtgtgcctggcccgagccctgctccgcaagagccgcatcctggttttagacgaggccacagctgccatcgacctggagactgacaacctcatccaggctaccatccgcacccagtttgatacctgcactgtcctgaccatcgcacaccggcttaacactatcatggactacaccagggtcctggtcctggacaaaggagtagtagctgaatttgattctccagccaacctcattgcagctagaggcatcttctacgggatggccagagatgctggacttgcctaaaatatattcctgagatttcctcctggcctttcctggttttcatcaggaaggaaatgacaccaaatatgtccgcagaatggacttgatagcaaacactgggggcaccttaagattttgcacctgtaaagtgccttacagggtaactgtgctgaatgctttagatgaggaaatgatccccaagtggtgaatgacacgcctaaggtcacagctagtttgagccagttagactagtccccggtctcccgattcccaactgagtgttatttgcacactgcactgttttcaaataacgattttatgaaatgacctctgtcctccctctgatttttcatattttctaaagtttcgtttctgttttttaataaaaagctttttcctcctggaacagaagacagctgctgggtcaggccacccctaggaactcagtcctgtactctggggtgctgcctgaatccattaaaaatgggagtactgatgaaataaaactacatggtcaacagtata

SEQ ID NO: 455220 - DNA, 528 bp, Homo sapiens
cagtccagcctgggcaacacagtgaggcaccatctctaaaataaataatactagcaataataataagaagaagaaaaagaagtagtaggagaagaaacccagggcaggggacagaggatgctgcctggggaggccggtgcagtggcactgagggtggagatggatcttgtcaggcagaggacacagggaggcaggggctgtgcattccaggccaaggcacagcacaggcccagcaaggagttgtgagaaggaatggtgggcagcgtggaatggctgcaatggatgagaatggatggaaggtaggaccctgtgagcaggaggtcaggggagggagcaggtgtgccactgacactctttctgcctgcacaggtaaagcaaatgaaattgaaggactcgcgcatcaagctgatgagtgagatcctgaacggcatcaaggtgctgaagctgtacgcctgggagcccagcttcctgaagcaggtggagggcatcaggcagggtgagctccagctgctgcgcacggcggcctac

SEQ ID NO: 455221 - DNA, 1690 bp, Homo sapiens
ctcggccctccgagggtgtggagcgcccgggaaacgggaccccaagaatccaactgctcccaccctgcgcggccaggagcggggctggcgatactggggacactgtccaatccgggcagggggcgaggccgggggaccgggcgggcctggggagcaggcacgtgtggagggcggacccgccgggggtcgaggcctgcctctccgagagctcctggcgcggccgtcccggcccggggccccaggtgcgcttcccctagagagggattttccggtctcgtgggcagaggaacaaccaggaacttgggctcagtctccaccccacagtggggcggatccgtcccggataagacccgctgtctggccctgagtagggtgtgacctccgcagccgcagaggaggagcgcagcccggcctcgaagaacttctgcttgggtggctgaactctgatcttgacctagagtcatggccatggcaaccaaaggaggtactgtcaaagctgcttcaggattcaatgccatggaagatgcccagaccctgaggaaggccatgaaagggctcggcaccgatgaagacgccattattagcgtccttgcctaccgcaacaccgcccagcgccaggagatcaggacagcctacaagagcaccatcggcagggacttgatagacgacctgaagtcagaactgagtggcaacttcgagcaggtgattgtggggatgatgacgcccacggtgctgtatgacgtgcaagagctgcgaagggccatgaagggagccggcactgatgagggctgcctaattgagatcctggcctcccggacccctgaggagatccggcgcataagccaaacctaccagcagcaatatggacggagccttgaagatgacattcgctctgacacatcgttcatgttccagcgagtgctggtgtctctgtcagctggtgggagggatgaaggaaattatctggacgatgctctcgtgagacaggatgcccaggacctgtatgaggctggagagaagaaatgggggacagatgaggtgaaatttctaactgttctctgttcccggaaccgaaatcacctgttgcatgtgtttgatgaatacaaaaggatatcacagaaggatattgaacagagtattaaatctgaaacatctggtagctttgaagatgctctgctggctatagtaaagtgcatgaggaacaaatctgcatattttgctgaaaagctctataaatcgatgaagggcttgggcaccgatgataacaccctcatcagagtgatggtttctcgagcagaaattgacatgttggatatccgggcacacttcaagagactctatggaaagtctctgtactcgttcatcaagggtgacacatctggagactacaggaaagtactgcttgttctctgtggaggagatgattaaaataaaaatcccagaaggacaggaggattctcaacactttgaatttttttaacttcatttttctacactgctattatcattatctcagaatgcttatttccaattaaaacgcctacagctgcctcctagaatatagactgtctgtattattattcacctataattagtcattatgatgctttaaagctgtacttgcatttcaaagcttataagatataaatggagattttaaagtagaaataaatatgtattccatgttttt

SEQ ID NO: 455222 - DNA, 1022 bp, Homo sapiens
  misc_feature (940)..(941): n is a, c, g, or t
  misc_feature (950)..(950): n is a, c, g, or t
  misc_feature (954)..(954): n is a, c, g, or t
ctcggccctccgagggtgtggagcgcccgggaaacgggaccccaagaatccaactgctcccaccctgcgcggccaggagcggggctggcgatactggggacactgtccaatccgggcagggggcgaggccgggggaccgggcgggcctggggagcaggcacgtgtggagggcggacccgccgggggtcgaggcctgcctctccgagagctcctggcgcggccgtcccggcccggggccccaggtgcgcttcccctagagagggattttccggtctcgtgggcagaggaacaaccaggaacttgggctcagtctccaccccacagtggggcggatccgtcccggataagacccgctgtctggccctgagtagggtgtgacctccgcagccgcagaggaggagcgcagcccggcctcgaagaacttctgcttgggtggctgaactctgatcttgacctagagtcatggccatggcaaccaaaggaggtactgtcaaagctgcttcaggattcaatgccatggaagatgcccagaccctgaggaaggccatgaaagggctcggcaccgatgaagacgccattattagcgtccttgcctaccgcaacaccgcccagcgccaggagatcaggacagcctacaagagcaccatcggcagggacttgatagacgacctgaagtcagaactgagtggcaacttcgagcaggtgattgtggggatgatgacgcccacggtgctgtatgacgtgcaagagctgcgaagggccatgaagggagccggcactgatgagggctgcctaattgagatcctggcctcccggacccctgaggagatccggcgcataagccaaacctaccagcagcaatatggacggagccttgaagatgacattcgctctgacacatcgttcatgttccagcgagtgctggtgtctctgtcagctnngggagggangaangaagtatctcgccattgcttcagtgagcacgatcccatgatccttatctcaatagcgcagagaatatt

SEQ ID NO: 455223 - DNA, 581 bp, Homo sapiens
tggaaacagggtgggaggataaactggaattctatgttgggagcagtttacacttatttatttgggagcagtagatgacgtgatgatgacaacgatgatgggagtgatgtgactggagctgcactttcagaagagtaatgtaatagtgacgtgtaggatgaacagtggagaggaactggaggctggacgaccaggtaggaagctacctggaaaattccagctggaaaataaagcaggactgagctaggtggggcagggttgcctgaaaagggaagctggagacttcagacatttcacatcacttcccaattgcatctttatccccggcctccttcctgagcttgagactctcatttcacattgctttttagatgtttcattacagatattctactatacccttaatgaactgaaccagaactcattttcccttcaaaccagctcttcttccggacttgcctgtttctgttaatattgctgttgttcctcctacacctaaagaagcagaaccctggaaatcatctccaatttccactttgctcttgtctccaatatttacttagtaacgcctgcctgtgtct

SEQ ID NO: 455224 - DNA, 2328 bp, Homo sapiens
ctcggccctccgagggtgtggagcgcccgggaaacgggaccccaagaatccaactgctcccaccctgcgcggccaggagcggggctggcgatactggggacactgtccaatccgggcagggggcgaggccgggggaccgggcgggcctggggagcaggcacgtgtggagggcggacccgccgggggtcgaggcctgcctctccgagagctcctggcgcggccgtcccggcccggggccccaggtgcgcttcccctagagagggattttccggtctcgtgggcagaggaacaaccaggaacttgggctcagtctccaccccacagtggggcggatccgtcccggataagacccgctgtctggccctgagtagggtgtgacctccgcagccgcagaggaggagcgcagcccggcctcgaagaacttctgcttgggtggctgaactctgatcttgacctagagtcatggccatggcaaccaaaggaggtactgtcaaagctgcttcaggattcaatgccatggaagatgcccagaccctgaggaaggccatgaaagggctcggcaccgatgaagacgccattattagcgtccttgcctaccgcaacaccgcccagcgccaggagatcaggacagcctacaagagcaccatcggcagggacttgatagacgacctgaagtcagaactgagtggcaacttcgagcaggtgattgtggggatgatgacgcccacggtgctgtatgacgtgcaagagctgcgaagggccatgaagggagccggcactgatgagggctgcctaattgagatcctggcctcccggacccctgaggagatccggcgcataagccaaacctaccagcagcaatatggacggagccttgaagatgacattcgctctgacacatcgttcatgttccagcgagtgctggtgtctctgtcagctggtgggagggatgaaggaaattatctggacgatgctctcgtgagacaggatgcccaggacctgtatgaggctggagagaagaaatgggggacagatgaggtgaaatttctaactgttctctgttcccggaaccgaaatcacctgttgcatgtgtttgatgaatacaaaaggatatcacagaaggatattgaacagagtattaaatctgaaacatctggtagctttgaagatgctctgctggctatagtaaagtgcatgaggaacaaatctgcatattttgctgaaaagctctataaatcgatgaagggcttgggcaccgatgataacaccctcatcagagtgatggtttctcgagcagaaattgacatgttggatatccgggcacacttcaagagactctatggaaagtctctgtactcgttcatcaagggtgacacatctggagactacaggaaagtactgcttgttctctgtggaggagatgattaaaataaaaatcccagaaggacaggaggattctcaacactttgaatttttttaacttcatttttctacactgctattatcattatctcagaatgcttatttccaattaaaacgcctacagctgcctcctagaatatagactgtctgtattattattcacctataattagtcattatgatgctttaaagctgtacttgcatttcaaagcttataagatataaatggagattttaaagtagaaataaatatgtattccatgtttttaaaagattactttctactttgtgtttcacagacattgaatatattaaattattccatattttcttttcagtgaaaaattttttaaatggaagactgttctaaaatcacttttttccctaatccaatttttagagtggctagtagtttcttcatttgaaattgtaagcatccggtcagtaagaatgcccatccagttttctatatttcatagtcaaagccttgaaagcatctacaaatctctttttttaggttttgtccatagcatcagttgatccttactaagtttttcatgggagacttccttcatcacatcttatgttgaaatcactttctgtagtcaaagtatacctctggttaccaaacataaatgctgaacattccatattattatagttaatgtcttaatccagcttgcaagtgaatggaaaaaaaaataagcttcaaactaggtattctgggaatgatgtaatgctctgaatttagtatgatataaagaaaacttttttgtgctaaaaatactttttaaaatcaattttgttgattgtagtaatttctatttgcactgtgcctttcaactccagaaacattctgaagatgtacttggatttaattaaaaagttcactttgtaaaaaaaaaa

SEQ ID NO: 455225 - DNA, 1988 bp, Homo sapiens
ggccagagtacagagggaccggaagaacttctgcttgggtggctgaactctgatcttgacctagagtcatggccatggcaaccaaaggaggtactgtcaaagctgcttcaggattcaatgccatggaagatgcccagaccctgaggaaggccatgaaagggctcggcaccgatgaagacgccattattagcgtccttgcctaccgcaacaccgcccagcgccaggagatcaggacagcctacaagagcaccatcggcagggacttgatagacgacctgaagtcagaactgagtggcaacttcgagcaggtgattgtggggatgatgacgcccacggtgctgtatgacgtgcaagagctgcgaagggccatgaagggagccggcactgatgagggctgcctaattgagatcctggcctcccggacccctgaggagatccggcgcataagccaaacctaccagcagcaatatggacggagccttgaagatgacattcgctctgacacatcgttcatgttccagcgagtgctggtgtctctgtcagctggtgggagggatgaaggaaattatctggacgatgctctcgtgagacaggatgcccaggacctgtatgaggctggagagaagaaatgggggacagatgaggtgaaatttctaactgttctctgttcccggaaccgaaatcacctgttgcatgtgtttgatgaatacaaaaggatatcacagaaggatattgaacagagtattaaatctgaaacatctggtagctttgaagatgctctgctggctatagtaaagtgcatgaggaacaaatctgcatattttgctgaaaagctctataaatcgatgaagggcttgggcaccgatgataacaccctcatcagagtgatggtttctcgagcagaaattgacatgttggatatccgggcacacttcaagagactctatggaaagtctctgtactcgttcatcaagggtgacacatctggagactacaggaaagtactgcttgttctctgtggaggagatgattaaaataaaaatcccagaaggacaggaggattctcaacactttgaatttttttaacttcatttttctacactgctattatcattatctcagaatgcttatttccaattaaaacgcctacagctgcctcctagaatatagactgtctgtattattattcacctataattagtcattatgatgctttaaagctgtacttgcatttcaaagcttataagatataaatggagattttaaagtagaaataaatatgtattccatgtttttaaaagattactttctactttgtgtttcacagacattgaatatattaaattattccatattttcttttcagtgaaaaattttttaaatggaagactgttctaaaatcacttttttccctaatccaatttttagagtggctagtagtttcttcatttgaaattgtaagcatccggtcagtaagaatgcccatccagttttctatatttcatagtcaaagccttgaaagcatctacaaatctctttttttaggttttgtccatagcatcagttgatccttactaagtttttcatgggagacttccttcatcacatcttatgttgaaatcactttctgtagtcaaagtataccaaaaccaatttatctgaactaaattctaaagtatggttatacaaaccatatacatctggttaccaaacataaatgctgaacattccatattattatagttaatgtcttaatccagcttgcaagtgaatggaaaaaaaaataagcttcaaactaggtattctgggaatgatgtaatgctctgaatttagtatgatataaagaaaacttttttgtgctaaaaatactttttaaaatcaattttgttgattgtagtaatttctatttgcactgtgcctttcaactccagaaacattctgaagatgtacttggatttaattaaaaagttcactttgtaaaaaaaaaa

SEQ ID NO: 455226 - DNA, 2505 bp, Homo sapiens
ctcggccctccgagggtgtggagcgcccgggaaacgggaccccaagaatccaactgctcccaccctgcgcggccaggagcggggctggcgatactggggacactgtccaatccgggcagggggcgaggccgggggaccgggcgggcctggggagcaggcacgtgtggagggcggacccgccgggggtcgaggcctgcctctccgagagctcctggcgcggccgtcccggcccggggccccaggtgcgcttcccctagagagggattttccggtctcgtgggcagaggaacaaccaggaacttgggctcagtctccaccccacagtggggcggatccgtcccggataagacccgctgtctggccctgagtagggtgtgacctccgcagccgcagaggaggagcgcagcccggcctcgaagaacttctgcttgggtggctgaactctgatcttgacctagagtcatggccatggcaaccaaaggaggtactgtcaaagctgcttcaggattcaatgccatggaagatgcccagaccctgaggaaggccatgaaagggctcgcacaaacaacgaggaaacagaagattcaccaaacatttatgaacagccagctgttataaagacaagggaccaatctgaaaaatcagaataaagtctccttgttaaagctgctgcaagaaacaggcaccgatgaagacgccattattagcgtccttgcctaccgcaacaccgcccagcgccaggagatcaggacagcctacaagagcaccatcggcagggacttgatagacgacctgaagtcagaactgagtggcaacttcgagcaggtgattgtggggatgatgacgcccacggtgctgtatgacgtgcaagagctgcgaagggccatgaagggagccggcactgatgagggctgcctaattgagatcctggcctcccggacccctgaggagatccggcgcataagccaaacctaccagcagcaatatggacggagccttgaagatgacattcgctctgacacatcgttcatgttccagcgagtgctggtgtctctgtcagctggtgggagggatgaaggaaattatctggacgatgctctcgtgagacaggatgcccaggacctgtatgaggctggagagaagaaatgggggacagatgaggtgaaatttctaactgttctctgttcccggaaccgaaatcacctgttgcatgtgtttgatgaatacaaaaggatatcacagaaggatattgaacagagtattaaatctgaaacatctggtagctttgaagatgctctgctggctatagtaaagtgcatgaggaacaaatctgcatattttgctgaaaagctctataaatcgatgaagggcttgggcaccgatgataacaccctcatcagagtgatggtttctcgagcagaaattgacatgttggatatccgggcacacttcaagagactctatggaaagtctctgtactcgttcatcaagggtgacacatctggagactacaggaaagtactgcttgttctctgtggaggagatgattaaaataaaaatcccagaaggacaggaggattctcaacactttgaatttttttaacttcatttttctacactgctattatcattatctcagaatgcttatttccaattaaaacgcctacagctgcctcctagaatatagactgtctgtattattattcacctataattagtcattatgatgctttaaagctgtacttgcatttcaaagcttataagatataaatggagattttaaagtagaaataaatatgtattccatgtttttaaaagattactttctactttgtgtttcacagacattgaatatattaaattattccatattttcttttcagtgaaaaattttttaaatggaagactgttctaaaatcacttttttccctaatccaatttttagagtggctagtagtttcttcatttgaaattgtaagcatccggtcagtaagaatgcccatccagttttctatatttcatagtcaaagccttgaaagcatctacaaatctctttttttaggttttgtccatagcatcagttgatccttactaagtttttcatgggagacttccttcatcacatcttatgttgaaatcactttctgtagtcaaagtataccaaaaccaatttatctgaactaaattctaaagtatggttatacaaaccatatacatctggttaccaaacataaatgctgaacattccatattattatagttaatgtcttaatccagcttgcaagtgaatggaaaaaaaaataagcttcaaactaggtattctgggaatgatgtaatgctctgaatttagtatgatataaagaaaacttttttgtgctaaaaatactttttaaaatcaattttgttgattgtagtaatttctatttgcactgtgcctttcaactccagaaacattctgaagatgtacttggatttaattaaaaagttcactttgtaaaaaaaaaa

SEQ ID NO: 455227 - DNA, 2326 bp, Homo sapiens
ctcggccctccgagggtgtggagcgcccgggaaacgggaccccaagaatccaactgctcccaccctgcgcggccaggagcggggctggcgatactggggacactgtccaatccgggcagggggcgaggccgggggaccgggcgggcctggggagcaggcacgtgtggagggcggacccgccgggggtcgaggcctgcctctccgagagctcctggcgcggccgtcccggcccggggccccaggtgcgcttcccctagagagggattttccggtctcgtgggcagaggaacaaccaggaacttgggctcagtctccaccccacagtggggcggatccgtcccggataagacccgctgtctggccctgagtagggtgtgacctccgcagccgcagaggaggagcgcagcccggcctcgaagaacttctgcttgggtggctgaactctgatcttgacctagagtcatggccatggcaaccaaaggaggtactgtcaaagctgcttcaggattcaatgccatggaagatgcccagaccctgaggaaggccatgaaagggctcggcaccgatgaagacgccattattagcgtccttgcctaccgcaacaccgcccagcgccaggagatcaggacagcctacaagagcaccatcggcagggacttgatagacgacctgaagtcagaactgagtggcaacttcgagcaggtgattgtggggatgatgacgcccacggtgctgtatgacgtgcaagagctgcgaagggccatgaagggagccggcactgatgagggctgcctaattgagatcctggcctcccggacccctgaggagatccggcgcataagccaaacctaccagcagcaatatggacggagccttgaagatgacattcgctctgacacatcgttcatgttccagcgagtgctggtgtctctgtcagctggtgggagggatgaaggaaattatctggacgatgctctcgtgagacaggatgcccaggacctgtatgaggctggagagaagaaatgggggacagatgaggtgaaatttctaactgttctctgttcccggaaccgaaatcacctgttgcatgtgtttgatgaatacaaaaggatatcacagaaggatattgaacagagtattaaatctgaaacatctggtagctttgaagatgctctgctggctatagtaaagtgcatgaggaacaaatctgcatattttgctgaaaagctctataaatcgatgaagggcttgggcaccgatgataacaccctcatcagagtgatggtttctcgagcagaaattgacatgttggatatccgggcacacttcaagagactctatggaaagtctctgtactcgttcatcaagggtgacacatctggagactacaggaaagtactgcttgttctctgtggaggagatgatttcatttttctacactgctattatcattatctcagaatgcttatttccaattaaaacgcctacagctgcctcctagaatatagactgtctgtattattattcacctataattagtcattatgatgctttaaagctgtacttgcatttcaaagcttataagatataaatggagattttaaagtagaaataaatatgtattccatgtttttaaaagattactttctactttgtgtttcacagacattgaatatattaaattattccatattttcttttcagtgaaaaattttttaaatggaagactgttctaaaatcacttttttccctaatccaatttttagagtggctagtagtttcttcatttgaaattgtaagcatccggtcagtaagaatgcccatccagttttctatatttcatagtcaaagccttgaaagcatctacaaatctctttttttaggttttgtccatagcatcagttgatccttactaagtttttcatgggagacttccttcatcacatcttatgttgaaatcactttctgtagtcaaagtataccaaaaccaatttatctgaactaaattctaaagtatggttatacaaaccatatacatctggttaccaaacataaatgctgaacattccatattattatagttaatgtcttaatccagcttgcaagtgaatggaaaaaaaaataagcttcaaactaggtattctgggaatgatgtaatgctctgaatttagtatgatataaagaaaacttttttgtgctaaaaatactttttaaaatcaattttgttgattgtagtaatttctatttgcactgtgcctttcaactccagaaacattctgaagatgtacttggatttaattaaaaagttcactttgtaaaaaaaaaa

SEQ ID NO: 455228 - DNA, 1696 bp, Homo sapiens
ctcgtgccgattcggcacgattgtggggatgatgacgcccacggtgctgtatgacgtgcaagagctgcgaagggccatgaagggagccggcactgatgagggctgcctaattgagatcctggcctcccggacccctgaggagatccggcgcataagccaaacctaccagcagcaatatggacggagccttgaagatgacattcgctctgacacatcgttcatgttccagcgagtgctggtgtctctgtcagctggtgggagggatgaaggaaattatctggacgatgctctcgtgagacaggatgcccaggacctgtatgaggctggagagaagaaatgggggacagatgaggtgaaatttctaactgttctctgttcccggaaccgaaatcacctgttgcatgtgtttgatgaatacaaaaggatatcacagaaggatattgaacagagtattaaatctgaaacatctggtagctttgaagatgctctgctggctatagtaaagtgcatgaggaacaaatctgcatattttgctgaaaagctctataaatcgatgaagggcttgggcaccgatgataacaccctcatcagagtgatggtttctcgagcagaaattgacatgttggatatccgggcacacttcaagagactctatggaaagtctctgtactcgttcatcaagggtgacacatctggagactacaggaaagtactgcttgttctctgtggaggagatgattaaaataaaaatcccagaaggacaggaggattctcaacactttgaatttttttaacttcatttttctacactgctattatcattatctcagaatgcttatttccaattaaaacgcctacagctgcctcctagaatatagactgtctgtattattattcacctataattagtcattatgatgctttaaagctgtacttgcatttcaaagcttataagatataaatggagattttaaagtagaaataaatatgtattccatgtttttaaaagattactttctactttgtgtttcacagacattgaatatattaaattattccatattttcttttcagtgaaaaattttttaaatggaagactgttctaaaatcacttttttccctaatccaatttttagagtggctagtagtttcttcatttgaaattgtaagcatccggtcagtaagaatgcccatccagttttctatatttcatagtcaaagccttgaaagcatctacaaatctctttttttaggttttgtccatagcatcagttgatccttactaagtttttcatgggagacttccttcatcacatcttatgttgaaatcactttctgtagtcaaagtataccaaaaccaatttatctgaactaaattctaaagtatggttatacaaaccatatacatctggttaccaaacataaatgctgaacattccatattattatagttaatgtcttaatccagcttgcaagtgaatggaaaaaaaaataagcttcaaactaggtattctgggaatgatgtaatgctctgaatttagtatgatataaagaaaacttttttgtgctaaaaatactttttaaaatcaattttgttgattgtagtaatttctatttgcactgtgcctttcaactccagaaacattctgaagatgtacttggatttaattaaaaagttcactttgtaaaaaaaaaa

SEQ ID NO: 455229 - DNA, 2687 bp, Homo sapiens
ctcggccctccgagggtgtggagcgcccgggaaacgggaccccaagaatccaactgctcccaccctgcgcggccaggagcggggctggcgatactggggacactgtccaatccgggcagggggcgaggccgggggaccgggcgggcctggggagcaggcacgtgtggagggcggacccgccgggggtcgaggcctgcctctccgagagctcctggcgcggccgtcccggcccggggccccaggtgcgcttcccctagagagggattttccggtctcgtgggcagaggaacaaccaggaacttgggctcagtctccaccccacagtggggcggatccgtcccggataagacccgctgtctggccctgagtagggtgtgacctccgcagccgcagaggaggagcgcagcccggcctcgaagaacttctgcttgggtggctgaactctgatcttgacctagagtcatggccatggcaaccaaaggaggtactgtcaaagctgcttcaggattcaatgccatggaagatgcccagaccctgaggaaggccatgaaagggctcggcaccgatgaagacgccattattagcgtccttgcctaccgcaacaccgcccagcgccaggagatcaggacagcctacaagagcaccatcggcagggacttgatagacgacctgaagtcagaactgagtggcaacttcgagcaggtgattgtggggatgatgacgcccacggtgctgtatgacgtgcaagagctgcgaagggccatgaagggagccggcactgatgagggctgcctaattgagatcctggcctcccggacccctgaggagatccggcgcataagccaaacctaccagcagcaatatggacggagccttgaagatgacattcgctctgacacatcgttcatgttccagcgagtgctggtgtctctgtcagctggtgggagggatgaaggaaattatctggacgatgctctcgtgagacaggatgcccaggacctgtatgaggctggagagaagaaatgggggacagatgaggtgaaatttctaactgttctctgttcccggaaccgaaatcacctgttgcatgtgtttgatgaatacaaaaggatatcacagaaggatattgaacagagtattaaatctgaaacatctggtagctttgaagatgctctgctggctatagtaaagtgcatgaggaacaaatctgcatattttgctgaaaagctctataaatcgatgaagggcttgggcaccgatgataacaccctcatcagagtgatggtttctcgagcagaaattgacatgttggatatccgggcacacttcaagagactctatggaaagtctctgtactcgttcatcaagggtgacacatctggagactacaggaaagtactgcttgttctctgtggaggagatgattaaaataaaaatcccagaaggacaggaggattctcaacactttgaatttttttaacttcatttttctacactgctattatcattatctcagaatgcttatttccaattaaaacgcctacagctgcctcctagaatataaaaaaaaaaaaaaaaaaaaaaaaggggggcgcacggccaaccaaagatacccccacaaggggccaaagaataaagcggaaacccaggcaacgaggagaacacagcggcggcccacacaaacgacgcagacgcatcattcaaacagaaaagagcacaggggcagagagctaaccaccacacgccgacgcaacacgggcgaacaacacgtgccacacccggcagcaactctctcgacacacacggaaccccccacacgcaccgagcacgacccggacacaccatcccgcgagcaccaacaccaccccaaacagcacacaccacacaccgaccccacacaggcaaccaaacacaaccaccacaaacgcgcacaaccacgccgcacaaacgcccacgcctgcacacaaacgacccgccgcgcctacgcaccaagctcgaggcaccaccagcagaccatatcgacaacacagccaaaacactgactccacaccacccgcgaccacccaccggacatacaacacacatacccaccacacacaccgcacgcaacaacaccaccaccgaccacaccctgaagagaacaaacaagcacgcacgcggcgaggatagacacgaggaagacgcaacacaacacaaagaaccgacaaaaaaggggcacacaagacagacaaacaagcacagaaacaagcgaagggggcgacaagacaaggcacatgccgcgaagacaaacacatgagagcgaatacacacgagaggaagaagcacaggtagagcaacaagaccagagacaagacgcaagaagccagcacaacacagacgagtgacacgatacaaaccacgagcaagtacgacacaaaaggacgagagcaggcaacgaccaggaatggtaaggacggacagcgaaacaaccaaccagaggctcagcagagatcaaggacgaaacgagcagcaacgacgaagaccaaagacgagcactcaagatgagagtagagagagagaagtgagaaccagcagacaggacagcacgaaacgagaggacacaacacacaaacgcacagacaaagagagccgacactaaacgggatccgcagagcgacgacgacagcatcgacacgaagaaaggacga

SEQ ID NO: 455230 - DNA, 1722 bp, Homo sapiens
cttagaggatcccaatctctcgagcgagaggaggaggagccggctcgaagaattctgttgggtggtgactctgttcttgactagagtcatggcatggcaaccaaaggaggtactgtcaaagctgcttcaggattcaatgccatggaagatgcccagaccctgaggaaggccatgaaagggctcggcaccgatgaagacgccattattagcgtccttgcctaccgcaacaccgcccagcgccaggagatcaggacagcctacaagagcaccatcggcaggggtgggagggatgaaggaaattatctggacgatgctctcgtgagacaggatgcccaggacctgtatgaggctggagagaagaaatgggggacagatgaggtgaaatttctaactgttctctgttcccggaaccgaaatcacctgttgcatgtgtttgatgaatacaaaaggatatcacagaaggatattgaacagagtattaaatctgaaacatctggtagctttgaagatgctctgctggctatagtaaagtgcatgaggaacaaatctgcatattttgctgaaaagctctataaatcgatgaagggcttgggcaccgatgataacaccctcatcagagtgatggtttctcgagcagaaattgacatgttggatatccgggcacacttcaagagactctatggaaagtctctgtactcgttcatcaagggtgacacatctggagactacaggaaagtactgcttgttctctgtggaggagatgattaaaataaaaatcccagaaggacaggaggattctcaacactttgaatttttttaacttcatttttctacactgctattatcattatctcagaatgcttatttccaattaaaacgcctacagctgcctcctagaatatagactgtctgtattattattcacctataattagtcattatgatgctttaaagctgtacttgcatttcaaagcttataagatataaatggagattttaaagtagaaataaatatgtattccatgtttttaaaagattactttctactttgtgtttcacagacattgaatatattaaattattccatattttcttttcagtgaaaaattttttaaatggaagactgttctaaaatcacttttttccctaatccaatttttagagtggctagtagtttcttcatttgaaattgtaagcatccggtcagtaagaatgcccatccagttttctatatttcatagtcaaagccttgaaagcatctacaaatctctttttttaggttttgtccatagcatcagttgatccttactaagtttttcatgggagacttccttcatcacatcttatgttgaaatcactttctgtagtcaaagtataccaaaaccaatttatctgaactaaattctaaagtatggttatacaaaccatatacatctggttaccaaacataaatgctgaacattccatattattatagttaatgtcttaatccagcttgcaagtgaatggaaaaaaaaataagcttcaaactaggtattctgggaatgatgtaatgctctgaatttagtatgatataaagaaaacttttttgtgctaaaaatactttttaaaatcaattttgttgattgtagtaatttctatttgcactgtgcctttcaactccagaaacattctgaagatgtacttggatttaattaaaaagttcactttgtaaaaaaaaaa

SEQ ID NO: 455231 - DNA, 1635 bp, Homo sapiens
  misc_feature (101)..(101): n is a, c, g, or t
aaagagatcctgggaccataacgcaaggctacgcagggagcaagtatgggtaaggtggacctatgagaatcgatgacatgtctgtctcttagagcaagatncgttgtgcatagtgtaccaaggtggagttgcgtaggtcgtcatcctagattaagaatagagtggggcaggggagtgaacggaagatgttatctgggaacagcattgctacgtactggtggaggtatctaggaatggtccactagagatgacctgtatgaggctggagagaagaaatgggggacagatgaggtgaaatttctaactgttctctgttcccggaaccgaaatcacctgttgcatgtgtttgatgaatacaaaaggatatcacagaaggatattgaacagagtattaaatctgaaacatctggtagctttgaagatgctctgctggctatagtaaagtgcatgaggaacaaatctgcatattttgctgaaaagctctataaatcgatgaagggcttgggcaccgatgataacaccctcatcagagtgatggtttctcgagcagaaattgacatgttggatatccgggcacacttcaagagactctatggaaagtctctgtactcgttcatcaagggtgacacatctggagactacaggaaagtactgcttgttctctgtggaggagatgattaaaataaaaatcccagaaggacaggaggattctcaacactttgaatttttttaacttcatttttctacactgctattatcattatctcagaatgcttatttccaattaaaacgcctacagctgcctcctagaatatagactgtctgtattattattcacctataattagtcattatgatgctttaaagctgtacttgcatttcaaagcttataagatataaatggagattttaaagtagaaataaatatgtattccatgtttttaaaagattactttctactttgtgtttcacagacattgaatatattaaattattccatattttcttttcagtgaaaaattttttaaatggaagactgttctaaaatcacttttttccctaatccaatttttagagtggctagtagtttcttcatttgaaattgtaagcatccggtcagtaagaatgcccatccagttttctatatttcatagtcaaagccttgaaagcatctacaaatctctttttttaggttttgtccatagcatcagttgatccttactaagtttttcatgggagacttccttcatcacatcttatgttgaaatcactttctgtagtcaaagtataccaaaaccaatttatctgaactaaattctaaagtatggttatacaaaccatatacatctggttaccaaacataaatgctgaacattccatattattatagttaatgtcttaatccagcttgcaagtgaatggaaaaaaaaataagcttcaaactaggtattctgggaatgatgtaatgctctgaatttagtatgatataaagaaaacttttttgtgctaaaaatactttttaaaatcaattttgttgattgtagtaatttctatttgcactgtgcctttcaactccagaaacattctgaagatgtacttggatttaattaaaaagttcactttgtaaaaaaaaaa

SEQ ID NO: 455232 - DNA, 1358 bp, Homo sapiens
gtgaccacaggacataatacttttttttttttttttttgagatagagtctcgctctgttgcccaggctggagtgcagtggcgtgatctcgtctcactgcaacctccgcctcctgggttcaagcaattctcctgtagctttgaagatgctctgctggctatagtaaagtgcatgaggaacaaatctgcatattttgctgaaaagctctataaatcgatgaagggcttgggcaccgatgataacaccctcatcagagtgatggtttctcgagcagaaattgacatgttggatatccgggcacacttcaagagactctatggaaagtctctgtactcgttcatcaagggtgacacatctggagactacaggaaagtactgcttgttctctgtggaggagatgattaaaataaaaatcccagaaggacaggaggattctcaacactttgaatttttttaacttcatttttctacactgctattatcattatctcagaatgcttatttccaattaaaacgcctacagctgcctcctagaatatagactgtctgtattattattcacctataattagtcattatgatgctttaaagctgtacttgcatttcaaagcttataagatataaatggagattttaaagtagaaataaatatgtattccatgtttttaaaagattactttctactttgtgtttcacagacattgaatatattaaattattccatattttcttttcagtgaaaaattttttaaatggaagactgttctaaaatcacttttttccctaatccaatttttagagtggctagtagtttcttcatttgaaattgtaagcatccggtcagtaagaatgcccatccagttttctatatttcatagtcaaagccttgaaagcatctacaaatctctttttttaggttttgtccatagcatcagttgatccttactaagtttttcatgggagacttccttcatcacatcttatgttgaaatcactttctgtagtcaaagtataccaaaaccaatttatctgaactaaattctaaagtatggttatacaaaccatatacatctggttaccaaacataaatgctgaacattccatattattatagttaatgtcttaatccagcttgcaagtgaatggaaaaaaaaataagcttcaaactaggtattctgggaatgatgtaatgctctgaatttagtatgatataaagaaaacttttttgtgctaaaaatactttttaaaatcaattttgttgattgtagtaatttctatttgcactgtgcctttcaactccagaaacattctgaagatgtacttggatttaattaaaaagttcactttgtaaaaaaaaaa

SEQ ID NO: 455233 - DNA, 1111 bp, Homo sapiens
ctcggccctccgagggtgtggagcgcccgggaaacgggaccccaagaatccaactgctcccaccctgcgcggccaggagcggggctggcgatactggggacactgtccaatccgggcagggggcgaggccgggggaccgggcgggcctggggagcaggcacgtgtggagggcggacccgccgggggtcgaggcctgcctctccgagagctcctggcgcggccgtcccggcccggggccccaggtgcgcttcccctagagagggattttccggtctcgtgggcagaggaacaaccaggaacttgggctcagtctccaccccacagtggggcggatccgtcccggataagacccgctgtctggccctgagtagggtgtgacctccgcagccgcagaggaggagcgcagcccggcctcgaagaacttctgcttgggtggctgaactctgatcttgacctagagtcatggccatggcaaccaaaggaggtactgtcaaagctgcttcaggattcaatgccatggaagatgcccagaccctgaggaaggccatgaaagggctcggcaccgatgaagacgccattattagcgtccttgcctaccgcaacaccgcccagcgccaggagatcaggacagcctacaagagcaccatcggcagggacttgatagacgacctgaagtcagaactgagtggcaacttcgagcaggtgattgtggggatgatgacgcccacggtgctgtatgacgtgcaagagctgcgaagggccatgaagggagccggcactgatgagggctgcctaattgagatcctggcctcccggacccctgaggagatccggcgcataagccaaacctaccagcagcaatatggacggagccttgaagatgacattcgctctgacacatcgttcatgttccagcgagtgctggtgtctctgtcagctggtgggagggatgaaggaaattatctggacgatgctctcgtgagacaggatgcccaggacctgtatgaggctggagagaagaaatgggggacagatgaggtgaaatttctaactgttctctgttcccggaaccgaaatcacctgttgcatgtgcttccgggggatcctctag

SEQ ID NO: 455234 - DNA, 1038 bp, Homo sapiens
  misc_feature (1020)..(1020): n is a, c, g, or t
ctcggccctccgagggtgtggagcgcccgggaaacgggaccccaagaatccaactgctcccaccctgcgcggccaggagcggggctggcgatactggggacactgtccaatccgggcagggggcgaggccgggggaccgggcgggcctggggagcaggcacgtgtggagggcggacccgccgggggtcgaggcctgcctctccgagagctcctggcgcggccgtcccggcccggggccccaggtgcgcttcccctagagagggattttccggtctcgtgggcagaggaacaaccaggaacttgggctcagtctccaccccacagtggggcggatccgtcccggataagacccgctgtctggccctgagtagggtgtgacctccgcagccgcagaggaggagcgcagcccggcctcgaagaacttctgcttgggtggctgaactctgatcttgacctagagtcatggccatggcaaccaaaggaggtactgtcaaagctgcttcaggattcaatgccatggaagatgcccagaccctgaggaaggccatgaaagggctcggcaccgatgaagacgccattattagcgtccttgcctaccgcaacaccgcccagcgccaggagatcaggacagcctacaagagcaccatcggcagggacttgatagacgacctgaagtcagaactgagtggcaacttcgagcaggtgattgtggggatgatgacgcccacggtgctgtatgacgtgcaagagctgcgaagggccatgaagggagccggcactgatgagggctgcctaattgagatcctggcctcccggacccctgaggagatccggcgcataagccaaacctaccagcagcaatatggacggagccttgaagatgacattcgctctgacacatcgttcatgttccagcgagtgctggtgtctctgtcagctggtgggagggatgaaggaaattatctggacgatgctctcgtgagacaggatgcccagacctgtatgagctgcgagagattnggatcctctaggtaccca

SEQ ID NO: 455235 - DNA, 1370 bp, Homo sapiens
ctcggccctccgagggtgtggagcgcccgggaaacgggaccccaagaatccaactgctcccaccctgcgcggccaggagcggggctggcgatactggggacactgtccaatccgggcagggggcgaggccgggggaccgggcgggcctggggagcaggcacgtgtggagggcggacccgccgggggtcgaggcctgcctctccgagagctcctggcgcggccgtcccggcccggggccccaggtgcgcttcccctagagagggattttccggtctcgtgggcagaggaacaaccaggaacttgggctcagtctccaccccacagtggggcggatccgtcccggataagacccgctgtctggccctgagtagggtgtgacctccgcagccgcagaggaggagcgcagcccggcctcgaagaacttctgcttgggtggctgaactctgatcttgacctagagtcatggccatggcaaccaaaggaggtactgtcaaagctgcttcaggattcaatgccatggaagatgcccagaccctgaggaaggccatgaaagggctcggcaccgatgaagacgccattattagcgtccttgcctaccgcaacaccgcccagcgccaggagatcaggacagcctacaagagcaccatcggcagggacttgatagacgacctgaagtcagaactgagtggcaacttcgagcaggtgattgtggggatgatgacgcccacggtgctgtatgacgtgcaagagctgcgaagggccatgaagggagccggcactgatgagggctgcctaattgagatcctggcctcccggacccctgaggagatccggcgcataagccaaacctaccagcagcgtacgtgacatccgcagtggccctggctgaggtttcgctgtgattagagaatgagggtagcagcgggttgttgtttgctgattagacttttcacagaacgctgagcatgagggatcctcggtgccaagctctgcttcgagggagatccctgtttagccaaatggcggtctgttggctccttaagatttctcagaatatggacggagccttgaagatgacattcgctctgacacatcgttcatgttccagcgagtgctggtgtctctgtcagcttgtgagtgactgcttctgatggggggcgggttttatcgaaatgtccactctatcccctttgccagcctttctcatcctttcagcccctgacatgtggatattccccaggtagtgttctcagacccctctgttcctttatcttatttctccttcagagactctggctaatcctgcctgcccattttttctactttaatttgatatttacaagtacctaacacctgccaggtccccctgt

SEQ ID NO: 455236 - DNA, 1639 bp, Homo sapiens
ctcggccctccgagggtgtggagcgcccgggaaacgggaccccaagaatccaactgctcccaccctgcgcggccaggagcggggctggcgatactggggacactgtccaatccgggcagggggcgaggccgggggaccgggcgggcctggggagcaggcacgtgtggagggcggacccgccgggggtcgaggcctgcctctccgagagctcctggcgcggccgtcccggcccggggccccaggtgcgcttcccctagagagggattttccggtctcgtgggcagaggaacaaccaggaacttgggctcagtctccaccccacagtggggcggatccgtcccggataagacccgctgtctggccctgagtagggtgtgacctccgcagccgcagaggaggagcgcagcccggcctcgaagaacttctgcttgggtggctgaactctgatcttgacctagagtcatggccatggcaaccaaaggaggtactgtcaaagctgcttcaggattcaatgccatggaagatgcccagaccctgaggaaggccatgaaagggctcggcaccgatgaagacgccattattagcgtccttgcctaccgcaacaccgcccagcgccaggagatcaggacagcctacaagagcaccatcggcagggacttgatagacgacctgaagtcagaactgagtggcaacttcgagcaggtgattgtggggatgatgacgcccacggtgctgtatgacgtgcaagagctgcgaagggccatgaagggagccggcactgatgagggctgcctaattgagatcctggcctcccggacccctgaggagatccggcgcataagccaaacctaccagcagcgtacgtgacatccgcagtggccctggctgaggtttcgctgtgattagagaatgagggtagcagcgggttgttgtttgctgattagacttttcacagaacgctgagcatgagggatcctcggtgccaagctctgcttcgagggagatccctgtttagccaaatggcggtctgttggctccttaagatttctcagaatatggacggagccttgaagatgacattcgctctgacacatcgttcatgttccagcgagtgctggtgtctctgtcagctatgacgtgatgatgacaacgatgatgggagtgatgtgactggagctgcactttcagaagagtaatgtaatagtgacgtgtaggatgaacagtggagaggaactggaggctggacgaccaggtaggaagctacctggaaaattccagctggaaaataaagcaggactgagctaggtggggcagggttgcctgaaaagggaagctggagacttcagacatttcacatcacttcccaattgcatctttatccccggcctccttcctgagcttgagactctcatttcacattgctttttagatgtttcattacagatattctactatacccttaatgaactgaaccagaactcattttcccttcaaaccagctcttcttccggacttgcctgtttctgttaatattgctgttgttcctcctacacctaaagaagcagaaccctggaaatcatctccaatttccactttgctcttgtctccaatatttacttagtaacgcctgcctgtgtct

SEQ ID NO: 455237 - DNA, 434 bp, Homo sapiens
atttaaagctaagaaaaatccagccaagcttgaaaaagttggcttagatgactttgaactgtgtgtttcattttaaaatctatttatctaactttgcttccctatcgaacagggtgacacatctggagactacaggaaagtactgcttgttctctgtggaggagatgattaaaataaaaatcccagaaggacaggaggattctcaacactttgaatttttttaacttcatttttctacactgctattatcattatctcagaatgcttatttccaattaaaacgcctacagctgcctcctagaatatagactgtctgtattattattcacctataattagtcattatgatgctttaaagctgtacttgcatttcaaagcttataagatataaatggagattttaaagtagaaataaatatgtattccatgttttt

SEQ ID NO: 455238 - DNA, 392 bp, Homo sapiens
tgaggcaggagaattgcatgaacccaggaggcagaggttgcagtgagctgagatggtgccactgcactccagactccatccagcctgggcaacagaatgagactccatctcaaaagaaacaaaacaaaaacaggaatatcgtgtgacaggataagctgatcttgaccattttaccagagtttagtttttgaaaaactgtgtgtggggtgaaaaaacctcatgataagctgcttccataagcaggctggtcttgaggggacagattgctctggagtgtgacagggcattgggcaagactcttaattctgaagtagctaatttcactctcttgctagaatatggacggagccttgaagatgacattcgctctgacacatcgttcatgttccagc

SEQ ID NO: 455239 - DNA, 2382 bp, Homo sapiens
ctcggccctccgagggtgtggagcgcccgggaaacgggaccccaagaatccaactgctcccaccctgcgcggccaggagcggggctggcgatactggggacactgtccaatccgggcagggggcgaggccgggggaccgggcgggcctggggagcaggcacgtgtggagggcggacccgccgggggtcgaggcctgcctctccgagagctcctggcgcggccgtcccggcccggggccccaggtgcgcttcccctagagagggattttccggtctcgtgggcagaggaacaaccaggaacttgggctcagtctccaccccacagtggggcggatccgtcccggataagacccgctgtctggccctgagtagggtgtgacctccgcagccgcagaggaggagcgcagcccggcctcgaagaacttctgcttgggtggctgaactctgatcttgacctagagtcatggccatggcaaccaaaggaggtactgtcaaagctgcttcaggattcaatgccatggaagatgcccagaccctgaggaaggccatgaaagggctcggcaccgatgaagacgccattattagcgtccttgcctaccgcaacaccgcccagcgccaggagatcaggacagcctacaagagcaccatcggcagggacttgatagacgacctgaagtcagaactgagtggcaacttcgagcaggtgattgtggggatgatgacgcccacggtgctgtatgacgtgcaagagctgcgaagggccatgaagggagccggcactgatgagggctgcctaattgagatcctggcctcccggacccctgaggagatccggcgcataagccaaacctaccagcagcaatatggacggagccttgaagatgacattcgctctgacacatcgttcatgttccagcgagtgctggtgtctctgtcagctggtgggagggatgaaggaaattatctggacgatgctctcgtgagacaggatgcccaggacctgtatgaggctggagagaagaaatgggggacagatgaggtgaaatttctaactgttctctgttcccggaaccgaaatcacctgttgcatgtgtttgatgaatacaaaaggatatcacagaaggatattgaacagagtattaaatctgaaacatctggtagctttgaagatgctctgctggctatagtaaagtgcatgaggaacaaatctgcatattttgctgaaaagctctataaatcgatgaagggcttgggcaccgatgataacaccctcatcagagtgatggtttctcgagcagaaattgacatgttggatatccgggcacacttcaagagactctatggaaagtctctgtactcgttcatcaagggtgacacatctggagactacaggaaagtactgcttgttctctgtggaggagatgattaaaataaaaatcccagaaggacaggaggattctcaacactttgaatttttttaacttcatttttctacactgctattatcattatctcagaatgcttatttccaattaaaacgcctacagctgcctcctagaatatagactgtctgtattattattcacctataattagtcattatgatgctttaaagctgtacttgcatttcaaagcttataagatataaatggagattttaaagtagaaataaatatgtattccatgtttttaaaagattactttctactttgtgtttcacagacattgaatatattaaattattccatattttcttttcagtgaaaaattttttaaatggaagactgttctaaaatcacttttttccctaatccaatttttagagtggctagtagtttcttcatttgaaattgtaagcatccggtcagtaagaatgcccatccagttttctatatttcatagtcaaagccttgaaagcatctacaaatctctttttttaggttttgtccatagcatcagttgatccttactaagtttttcatgggagacttccttcatcacatcttatgttgaaatcactttctgtagtcaaagtataccaaaaccaatttatctgaactaaattctaaagtatggttatacaaaccatatacatctggttaccaaacataaatgctgaacattccatattattatagttaatgtcttaatccagcttgcaagtgaatggaaaaaaaaataagcttcaaactaggtattctgggaatgatgtaatgctctgaatttagtatgatataaagaaaacttttttgtgctaaaaatactttttaaaatcaattttgttgattgtagtaatttctatttgcactgtgcctttcaactccagaaacattctgaagatgtacttggatttaattaaaaagttcactttgtaaaaaaaaaa

SEQ ID NO: 455240 - DNA, 826 bp, Homo sapiens
  misc_feature (729)..(729): n is a, c, g, or t
  misc_feature (739)..(739): n is a, c, g, or t
  misc_feature (748)..(748): n is a, c, g, or t
catacgctagtagaggccgggagtaaatcggacgaggcgcagcccggctctaagaacttctgcttgggtggctgaactctgatcttgacctagagtcatggccatggcaaccaaaggaggtactgtcaaagctgcttcaggattcaatgccatggaagatgcccagaccctgaggaaggccatgaaagggctcggcaccgatgaagacgccattattagcgtccttgcctaccgcaacaccgcccagcgccaggagatcaggacagcctacaagagcaccatcggcagggacttgatagacgacctgaagtcagaactgagtggcaacttcgagcaggtgattgtggggatgatgacgcccacggtgctgtatgacgtgcaagagctgcgaagggccatgaagggagccggcactgatgagggctgcctaattgagatcctggcctcccggacccctgaggagatccggcgcataagccaaacctaccagcagcaatatggacggagccttgaagatgacattcgctctgacacatcgttcatgttccagcgagtgctggtgtctctgtcagctggtgggagggatgaaggaaattatctggacgatgctctcgtgagacaggatgcccaggacctgtatgaggctggagagaagaaatgggggacagatgaggtgaaatttctaactgttctctgttcccggaaccgaaatcacctgttgcatgtgtngatgaatacnaaaggatancacgttcgcgagggataacacgttcgcgagagatacaccctcgcgagggatacacgtcgccgagggattacacgttcg

SEQ ID NO: 455241 - DNA, 2038 bp, Homo sapiens
gtggatgctgaggtactctagaggattccaaatcctctcgcagccgcagaggaggagcgcagcccggcctcgaagaacttctgcttgggtggctgaactctgatcttgacctagagtcatggccatggcaaccaaaggaggtactgtcaaagctgcttcaggattcaatgccatggaagatgcccagaccctgaggaaggccatgaaagggctcggcaccgatgaagacgccattattagcgtccttgcctaccgcaacaccgcccagcgccaggagatcaggacagcctacaagagcaccatcggcagggacttgatagacgacctgaagtcagaactgagtggcaacttcgagcaggtgattgtggggatgatgacgcccacggtgctgtatgacgtgcaagagctgcgaagggccatgaagggagccggcactgatgagggctgcctaattgagatcctggcctcccggacccctgaggagatccggcgcataagccaaacctaccagcagcaatatggacggagccttgaagatgacattcgctctgacacatcgttcatgttccagcgagtgctggtgtctctgtcagctggtgggagggatgaaggaaattatctggacgatgctctcgtgagacaggatgcccaggacctgtatgaggctggagagaagaaatgggggacagatgaggtgaaatttctaactgttctctgttcccggaaccgaaatcacctgttgcatgtgtttgatgaatacaaaaggatatcacagaaggatattgaacagagtattaaatctgaaacatctggtagctttgaagatgctctgctggctatagtaaagtgcatgaggaacaaatctgcatattttgctgaaaagctctataaatcgatgaagggcttgggcaccgatgataacaccctcatcagagtgatggtttctcgagcagaaattgacatgttggatatccgggcacacttcaagagactctatggaaagtctctgtactcgttcatcaagggtgacacatctggagactacaggaaagtactgcttgttctctgtggaggagatgattaaaataaaaatcccagaaggacaggaggattctcaacactttgaatttttttaacttcatttttctacactgctattatcattatctcagaatgcttatttccaattaaaacgcctacagctgcctcctagaatatagactgtctgtattattattcacctataattagtcattatgatgctttaaagctgtacttgcatttcaaagcttataagatataaatggagattttaaagtagaaataaatatgtattccatgtttttaaaagattactttctactttgtgtttcacagacattgaatatattaaattattccatattttcttttcagtgaaaaattttttaaatggaagactgttctaaaatcacttttttccctaatccaatttttagagtggctagtagtttcttcatttgaaattgtaagcatccggtcagtaagaatgcccatccagttttctatatttcatagtcaaagccttgaaagcatctacaaatctctttttttaggttttgtccatagcatcagttgatccttactaagtttttcatgggagacttccttcatcacatcttatgttgaaatcactttctgtagtcaaagtataccaaaaccaatttatctgaactaaattctaaagtatggttatacaaaccatatacatctggttaccaaacataaatgctgaacattccatattattatagttaatgtcttaatccagcttgcaagtgaatggaaaaaaaaataagcttcaaactaggtattctgggaatgatgtaatgctctgaatttagtatgatataaagaaaacttttttgtgctaaaaatactttttaaaatcaattttgttgattgtagtaatttctatttgcactgtgcctttcaactccagaaacattctgaagatgtacttggatttaattaaaaagttcactttgtaaaaaaaaaa

SEQ ID NO: 455242 - DNA, 2104 bp, Homo sapiens
tcaaagggggaacctcttctgatctgctgtaacattcagttcagaatctgtgtccagcttgagtacaagtattggtacttaacctaacaaaacaataggaatcctttctgtagtgtgtatctccaaacagaagaacagaagaacttctgcttgggtggctgaactctgatcttgacctagagtcatggccatggcaaccaaaggaggtactgtcaaagctgcttcaggattcaatgccatggaagatgcccagaccctgaggaaggccatgaaagggctcggcaccgatgaagacgccattattagcgtccttgcctaccgcaacaccgcccagcgccaggagatcaggacagcctacaagagcaccatcggcagggacttgatagacgacctgaagtcagaactgagtggcaacttcgagcaggtgattgtggggatgatgacgcccacggtgctgtatgacgtgcaagagctgcgaagggccatgaagggagccggcactgatgagggctgcctaattgagatcctggcctcccggacccctgaggagatccggcgcataagccaaacctaccagcagcaatatggacggagccttgaagatgacattcgctctgacacatcgttcatgttccagcgagtgctggtgtctctgtcagctggtgggagggatgaaggaaattatctggacgatgctctcgtgagacaggatgcccaggacctgtatgaggctggagagaagaaatgggggacagatgaggtgaaatttctaactgttctctgttcccggaaccgaaatcacctgttgcatgtgtttgatgaatacaaaaggatatcacagaaggatattgaacagagtattaaatctgaaacatctggtagctttgaagatgctctgctggctatagtaaagtgcatgaggaacaaatctgcatattttgctgaaaagctctataaatcgatgaagggcttgggcaccgatgataacaccctcatcagagtgatggtttctcgagcagaaattgacatgttggatatccgggcacacttcaagagactctatggaaagtctctgtactcgttcatcaagggtgacacatctggagactacaggaaagtactgcttgttctctgtggaggagatgattaaaataaaaatcccagaaggacaggaggattctcaacactttgaatttttttaacttcatttttctacactgctattatcattatctcagaatgcttatttccaattaaaacgcctacagctgcctcctagaatatagactgtctgtattattattcacctataattagtcattatgatgctttaaagctgtacttgcatttcaaagcttataagatataaatggagattttaaagtagaaataaatatgtattccatgtttttaaaagattactttctactttgtgtttcacagacattgaatatattaaattattccatattttcttttcagtgaaaaattttttaaatggaagactgttctaaaatcacttttttccctaatccaatttttagagtggctagtagtttcttcatttgaaattgtaagcatccggtcagtaagaatgcccatccagttttctatatttcatagtcaaagccttgaaagcatctacaaatctctttttttaggttttgtccatagcatcagttgatccttactaagtttttcatgggagacttccttcatcacatcttatgttgaaatcactttctgtagtcaaagtataccaaaaccaatttatctgaactaaattctaaagtatggttatacaaaccatatacatctggttaccaaacataaatgctgaacattccatattattatagttaatgtcttaatccagcttgcaagtgaatggaaaaaaaaataagcttcaaactaggtattctgggaatgatgtaatgctctgaatttagtatgatataaagaaaacttttttgtgctaaaaatactttttaaaatcaattttgttgattgtagtaatttctatttgcactgtgcctttcaactccagaaacattctgaagatgtacttggatttaattaaaaagttcactttgtaaaaaaaaaa

SEQ ID NO: 455243 - DNA, 2329 bp, Homo sapiens
ctcggccctccgagggtgtggagcgcccgggaaacgggaccccaagaatccaactgctcccaccctgcgcggccaggagcggggctggcgatactggggacactgtccaatccgggcagggggcgaggccgggggaccgggcgggcctggggagcaggcacgtgtggagggcggacccgccgggggtcgaggcctgcctctccgagagctcctggcgcggccgtcccggcccggggccccaggtgcgcttcccctagagagggattttccggtctcgtgggcagaggaacaaccaggaacttgggctcagtctccaccccacagtggggcggatccgtcccggataagacccgctgtctggccctgagtagggtgtgacctccgcagccgcagaggaggagcgcagcccggcctcgaagaacttctgcttgggtggctgaactctgatcttgacctagagtcatggccatggcaaccaaaggaggtactgtcaaagctgcttcaggattcaatgccatggaagatgcccagaccctgaggaaggccatgaaagggctcggcaccgatgaagacgccattattagcgtccttgcctaccgcaacaccgcccagcgccaggagatcaggacagcctacaagagcaccatcggcagggacttgatagacgacctgaagtcagaactgagtggcaacttcgagcaggtgattgtggggatgatgacgcccacggtgctgtatgacgtgcaagagctgcgaagggccatgaagggagccggcactgatgagggctgcctaattgagatcctggcctcccggacccctgaggagatccggcgcataagccaaacctaccagcagcaatatggacggagccttgaagatgacattcgctctgacacatcgttcatgttccagcgagtgctggtgtctctgtcagctggtgggagggatgaaggaaattatctggacgatgctctcgtgagacaggatgcccaggacctgtatgaggctggagagaagaaatgggggacagatgaggtgaaatttctaactgttctctgttcccggaaccgaaatcacctgttgcatgtgtttgatgaatacaaaaggatatcacagaaggatattgaacagagtattaaatctgaaacatctggtagctttgaagatgctctgctggctatagtaaagtgcatgaggaacaaatctgcatattttgctgaaaagctctataaatcgatgaagggcttgggcaccgatgataacaccctcatcagagtgatggtttctcgagcagaaattgacatgttggatatccgggcacacttcaagagactctatggaaagtctctgtactcgttcatcaagggtgacacatctggagactacaggaaagtactgcttgttctctgtggaggagatgattaaaataaaaatcccagaaggacaggaggattctcaacactttgaatttttttaacttcatttttctacactgctattatcattatctcagaatgcttatttccaatctataattagtcattatgatgctttaaagctgtacttgcatttcaaagcttataagatataaatggagattttaaagtagaaataaatatgtattccatgtttttaaaagattactttctactttgtgtttcacagacattgaatatattaaattattccatattttcttttcagtgaaaaattttttaaatggaagactgttctaaaatcacttttttccctaatccaatttttagagtggctagtagtttcttcatttgaaattgtaagcatccggtcagtaagaatgcccatccagttttctatatttcatagtcaaagccttgaaagcatctacaaatctctttttttaggttttgtccatagcatcagttgatccttactaagtttttcatgggagacttccttcatcacatcttatgttgaaatcactttctgtagtcaaagtataccaaaaccaatttatctgaactaaattctaaagtatggttatacaaaccatatacatctggttaccaaacataaatgctgaacattccatattattatagttaatgtcttaatccagcttgcaagtgaatggaaaaaaaaataagcttcaaactaggtattctgggaatgatgtaatgctctgaatttagtatgatataaagaaaacttttttgtgctaaaaatactttttaaaatcaattttgttgattgtagtaatttctatttgcactgtgcctttcaactccagaaacattctgaagatgtacttggatttaattaaaaagttcactttgtaaaaaaaaaa

SEQ ID NO: 455244 - DNA, 2320 bp, Homo sapiens
ctcggccctccgagggtgtggagcgcccgggaaacgggaccccaagaatccaactgctcccaccctgcgcggccaggagcggggctggcgatactggggacactgtccaatccgggcagggggcgaggccgggggaccgggcgggcctggggagcaggcacgtgtggagggcggacccgccgggggtcgaggcctgcctctccgagagctcctggcgcggccgtcccggcccggggccccaggtgcgcttcccctagagagggattttccggtctcgtgggcagaggaacaaccaggaacttgggctcagtctccaccccacagtggggcggatccgtcccggataagacccgctgtctggccctgagtagggtgtgacctccgcagccgcagaggaggagcgcagcccggcctcgaagaacttctgcttgggtggctgaactctgatcttgacctagagtcatggccatggcaaccaaaggaggtactgtcaaagctgcttcaggattcaatgccatggaagatgcccagaccctgaggaaggccatgaaagggctcggcaccgatgaagacgccattattagcgtccttgcctaccgcaacaccgcccagcgccaggagatcaggacagcctacaagagcaccatcggcagggacttgatagacgacctgaagtcagaactgagtggcaacttcgagcaggtgaggagccggcactgatgagggctgcctaattgagatcctggcctcccggacccctgaggagatccggcgcataagccaaacctaccagcagcaatatggacggagccttgaagatgacattcgctctgacacatcgttcatgttccagcgagtgctggtgtctctgtcagctggtgggagggatgaaggaaattatctggacgatgctctcgtgagacaggatgcccaggacctgtatgaggctggagagaagaaatgggggacagatgaggtgaaatttctaactgttctctgttcccggaaccgaaatcacctgttgcatgtgtttgatgaatacaaaaggatatcacagaaggatattgaacagagtattaaatctgaaacatctggtagctttgaagatgctctgctggctatagtaaagtgcatgaggaacaaatctgcatattttgctgaaaagctctataaatcgatgaagggcttgggcaccgatgataacaccctcatcagagtgatggtttctcgagcagaaattgacatgttggatatccgggcacacttcaagagactctatggaaagtctctgtactcgttcatcaagggtgacacatctggagactacaggaaagtactgcttgttctctgtggaggagatgattaaaataaaaatcccagaaggacaggaggattctcaacactttgaatttttttaacttcatttttctacactgctattatcattatctcagaatgcttatttccaattaaaacgcctacagctgcctcctagaatatagactgtctgtattattattcacctataattagtcattatgatgctttaaagctgtacttgcatttcaaagcttataagatataaatggagattttaaagtagaaataaatatgtattccatgtttttaaaagattactttctactttgtgtttcacagacattgaatatattaaattattccatattttcttttcagtgaaaaattttttaaatggaagactgttctaaaatcacttttttccctaatccaatttttagagtggctagtagtttcttcatttgaaattgtaagcatccggtcagtaagaatgcccatccagttttctatatttcatagtcaaagccttgaaagcatctacaaatctctttttttaggttttgtccatagcatcagttgatccttactaagtttttcatgggagacttccttcatcacatcttatgttgaaatcactttctgtagtcaaagtataccaaaaccaatttatctgaactaaattctaaagtatggttatacaaaccatatacatctggttaccaaacataaatgctgaacattccatattattatagttaatgtcttaatccagcttgcaagtgaatggaaaaaaaaataagcttcaaactaggtattctgggaatgatgtaatgctctgaatttagtatgatataaagaaaacttttttgtgctaaaaatactttttaaaatcaattttgttgattgtagtaatttctatttgcactgtgcctttcaactccagaaacattctgaagatgtacttggatttaattaaaaagttcactttgtaaaaaaaaaa

SEQ ID NO: 455245 - DNA, 2097 bp, Homo sapiens
ctcggccctccgagggtgtggagcgcccgggaaacgggaccccaagaatccaactgctcccaccctgcgcggccaggagcggggctggcgatactggggacactgtccaatccgggcagggggcgaggccgggggaccgggcgggcctggggagcaggcacgtgtggagggcggacccgccgggggtcgaggcctgcctctccgagagctcctggcgcggccgtcccggcccggggccccaggtgcgcttcccctagagagggattttccggtctcgtgggcagaggaacaaccaggaacttgggctcagtctccaccccacagtggggcggatccgtcccggataagacccgctgtctggccctgagtagggtgtgacctccgcagccgcagaggaggagcgcagcccggcctcgaagaacttctgcttgggtggctgaactctgatcttgacctagagtcatggccatggcaaccaaaggaggtactgtcaaagctgcttcaggattcaatgccatggaagatgcccagaccctgaggaaggccatgaaagggctcggcaccgatgaagacgccattattagcgtccttgcctaccgcaacaccgcccagcgccaggagatcaggacagcctacaagagcaccatcggcaggggtgggagggatgaaggaaattatctggacgatgctctcgtgagacaggatgcccaggacctgtatgaggctggagagaagaaatgggggacagatgaggtgaaatttctaactgttctctgttcccggaaccgaaatcacctgttgcatgtgtttgatgaatacaaaaggatatcacagaaggatattgaacagagtattaaatctgaaacatctggtagctttgaagatgctctgctggctatagtaaagtgcatgaggaacaaatctgcatattttgctgaaaagctctataaatcgatgaagggcttgggcaccgatgataacaccctcatcagagtgatggtttctcgagcagaaattgacatgttggatatccgggcacacttcaagagactctatggaaagtctctgtactcgttcatcaagggtgacacatctggagactacaggaaagtactgcttgttctctgtggaggagatgattaaaataaaaatcccagaaggacaggaggattctcaacactttgaatttttttaacttcatttttctacactgctattatcattatctcagaatgcttatttccaattaaaacgcctacagctgcctcctagaatatagactgtctgtattattattcacctataattagtcattatgatgctttaaagctgtacttgcatttcaaagcttataagatataaatggagattttaaagtagaaataaatatgtattccatgtttttaaaagattactttctactttgtgtttcacagacattgaatatattaaattattccatattttcttttcagtgaaaaattttttaaatggaagactgttctaaaatcacttttttccctaatccaatttttagagtggctagtagtttcttcatttgaaattgtaagcatccggtcagtaagaatgcccatccagttttctatatttcatagtcaaagccttgaaagcatctacaaatctctttttttaggttttgtccatagcatcagttgatccttactaagtttttcatgggagacttccttcatcacatcttatgttgaaatcactttctgtagtcaaagtataccaaaaccaatttatctgaactaaattctaaagtatggttatacaaaccatatacatctggttaccaaacataaatgctgaacattccatattattatagttaatgtcttaatccagcttgcaagtgaatggaaaaaaaaataagcttcaaactaggtattctgggaatgatgtaatgctctgaatttagtatgatataaagaaaacttttttgtgctaaaaatactttttaaaatcaattttgttgattgtagtaatttctatttgcactgtgcctttcaactccagaaacattctgaagatgtacttggatttaattaaaaagttcactttgtaaaaaaaaaa

SEQ ID NO: 455246 - DNA, 1956 bp, Homo sapiens
aagattcaaggtcttgctatgtttcccaggccagctcttcacaggtgccatcttagctcactgccttgaactcctggcctcaagacatcctcccacctcagcctcgagtagctggaactacatgcacatcccgacccccttttggcagaggttgatcaatgtagatttgccagttaggaaggcatgagtcagctgggaagacacaggagagtggggtggtgggggaggccaggagatagtggagggagctgtccttgggaagcttctcctgctattggcagaggcactcatgcaacgttaggggccacactgaggctcagccctctaggcacacatcagagccattgtaataatgcgagcgcatttagaggacgtctgtcctccctccctgggtctgaagctccaattcttgtggtattttgtctcattactctagacctgctatcttaatggtgtccccagatcttcatgtatactctcgaattattttttatttgtttttctcatcctcagggtgggagggatgaaggaaattatctggacgatgctctcgtgagacaggatgcccaggacctgtatgaggctggagagaagaaatgggggacagatgaggtgaaatttctaactgttctctgttcccggaaccgaaatcacctgttgcatgtgtttgatgaatacaaaaggatatcacagaaggatattgaacagagtattaaatctgaaacatctggtagctttgaagatgctctgctggctatagtaaagtgcatgaggaacaaatctgcatattttgctgaaaagctctataaatcgatgaagggcttgggcaccgatgataacaccctcatcagagtgatggtttctcgagcagaaattgacatgttggatatccgggcacacttcaagagactctatggaaagtctctgtactcgttcatcaagggtgacacatctggagactacaggaaagtactgcttgttctctgtggaggagatgattaaaataaaaatcccagaaggacaggaggattctcaacactttgaatttttttaacttcatttttctacactgctattatcattatctcagaatgcttatttccaattaaaacgcctacagctgcctcctagaatatagactgtctgtattattattcacctataattagtcattatgatgctttaaagctgtacttgcatttcaaagcttataagatataaatggagattttaaagtagaaataaatatgtattccatgtttttaaaagattactttctactttgtgtttcacagacattgaatatattaaattattccatattttcttttcagtgaaaaattttttaaatggaagactgttctaaaatcacttttttccctaatccaatttttagagtggctagtagtttcttcatttgaaattgtaagcatccggtcagtaagaatgcccatccagttttctatatttcatagtcaaagccttgaaagcatctacaaatctctttttttaggttttgtccatagcatcagttgatccttactaagtttttcatgggagacttccttcatcacatcttatgttgaaatcactttctgtagtcaaagtataccaaaaccaatttatctgaactaaattctaaagtatggttatacaaaccatatacatctggttaccaaacataaatgctgaacattccatattattatagttaatgtcttaatccagcttgcaagtgaatggaaaaaaaaataagcttcaaactaggtattctgggaatgatgtaatgctctgaatttagtatgatataaagaaaacttttttgtgctaaaaatactttttaaaatcaattttgttgattgtagtaatttctatttgcactgtgcctttcaactccagaaacattctgaagatgtacttggatttaattaaaaagttcactttgtaaaaaaaaaa

SEQ ID NO: 455247 - DNA, 1567 bp, Homo sapiens
ctcggccctccgagggtgtggagcgcccgggaaacgggaccccaagaatccaactgctcccaccctgcgcggccaggagcggggctggcgatactggggacactgtccaatccgggcagggggcgaggccgggggaccgggcgggcctggggagcaggcacgtgtggagggcggacccgccgggggtcgaggcctgcctctccgagagctcctggcgcggccgtcccggcccggggccccaggtgcgcttcccctagagagggattttccggtctcgtgggcagaggaacaaccaggaacttgggctcagtctccaccccacagtggggcggatccgtcccggataagacccgctgtctggccctgagtagggtgtgacctccgcagccgcagaggaggagcgcagcccggcctcgaagaacttctgcttgggtggctgaactctgatcttgacctagagtcatggccatggcaaccaaaggaggtactgtcaaagctgcttcaggattcaatgccatggaagatgcccagaccctgaggaaggccatgaaagggctcggcaccgatgaagacgccattattagcgtccttgcctaccgcaacaccgcccagcgccaggagatcaggacagcctacaagagcaccatcggcagggacttgatagacgacctgaagtcagaactgagtggcaacttcgagcaggtgattgtggggatgatgacgcccacggtgctgtatgacgtgcaagagctgcgaagggccatgaagggagccggcactgatgagggctgcctaattgagatcctggcctcccggacccctgaggagatccggcgcataagccaaacctaccagcagcaatatggacggagccttgaagatgacattcgctctgacacatcgttcatgttccagcgagtgctggtgtctctgtcagctggtgggagggatgaaggaaattatctggacgatgctctcgtgagacaggatgcccaggacctgtatgaggctggagagaagaaatgggggacagatgaggtgaaatttctaactgttctctgttcccggaaccgaaatcacctgttgcatgtgtttgatgaatacaaaaggatatcacagaaggatattgaacagagtattaaatctgaaacatctggtagctttgaagatgctctgctggctatagtaaagtgcatgaggaacaaatctgcatattttgctgaaaagctctataaatcgatgaagggtgacacatctggagactacaggaaagtactgcttgttctctgtggaggagatgattaaaataaaaatcccagaaggacaggaggattctcaacactttgaatttttttaacttcatttttctacactgctattatcattatctcagaatgcttatttccaattaaaacgcctacagctgcctcctagaatatagactgtctgtattattattcacctataattagtcattatgatgctttaaagctgtacttgcatttcaaagcttataagatataaatggagattttaaagtagaaataaatatgtattccatgttttt

SEQ ID NO: 455248 - DNA, 1191 bp, Homo sapiens
  misc_feature (1094)..(1094): n is a, c, g, or t
  misc_feature (1104)..(1104): n is a, c, g, or t
  misc_feature (1113)..(1113): n is a, c, g, or t
ctcggccctccgagggtgtggagcgcccgggaaacgggaccccaagaatccaactgctcccaccctgcgcggccaggagcggggctggcgatactggggacactgtccaatccgggcagggggcgaggccgggggaccgggcgggcctggggagcaggcacgtgtggagggcggacccgccgggggtcgaggcctgcctctccgagagctcctggcgcggccgtcccggcccggggccccaggtgcgcttcccctagagagggattttccggtctcgtgggcagaggaacaaccaggaacttgggctcagtctccaccccacagtggggcggatccgtcccggataagacccgctgtctggccctgagtagggtgtgacctccgcagccgcagaggaggagcgcagcccggcctcgaagaacttctgcttgggtggctgaactctgatcttgacctagagtcatggccatggcaaccaaaggaggtactgtcaaagctgcttcaggattcaatgccatggaagatgcccagaccctgaggaaggccatgaaagggctcggcaccgatgaagacgccattattagcgtccttgcctaccgcaacaccgcccagcgccaggagatcaggacagcctacaagagcaccatcggcagggacttgatagacgacctgaagtcagaactgagtggcaacttcgagcaggtgattgtggggatgatgacgcccacggtgctgtatgacgtgcaagagctgcgaagggccatgaagggagccggcactgatgagggctgcctaattgagatcctggcctcccggacccctgaggagatccggcgcataagccaaacctaccagcagcaatatggacggagccttgaagatgacattcgctctgacacatcgttcatgttccagcgagtgctggtgtctctgtcagctggtgggagggatgaaggaaattatctggacgatgctctcgtgagacaggatgcccaggacctgtatgaggctggagagaagaaatgggggacagatgaggtgaaatttctaactgttctctgttcccggaaccgaaatcacctgttgcatgtgtngatgaatacnaaaggatancacgttcgcgagggataacacgttcgcgagagatacaccctcgcgagggatacacgtcgccgagggattacacgttcg

SEQ ID NO: 455249 - DNA, 1018 bp, Homo sapiens
ctcggccctccgagggtgtggagcgcccgggaaacgggaccccaagaatccaactgctcccaccctgcgcggccaggagcggggctggcgatactggggacactgtccaatccgggcagggggcgaggccgggggaccgggcgggcctggggagcaggcacgtgtggagggcggacccgccgggggtcgaggcctgcctctccgagagctcctggcgcggccgtcccggcccggggccccaggtgcgcttcccctagagagggattttccggtctcgtgggcagaggaacaaccaggaacttgggctcagtctccaccccacagtggggcggatccgtcccggataagacccgctgtctggccctgagtagggtgtgacctccgcagccgcagaggaggagcgcagcccggcctcgaagaacttctgcttgggtggctgaactctgatcttgacctagagtcatggccatggcaaccaaaggaggtactgtcaaagctgcttcaggattcaatgccatggaagatgcccagaccctgaggaaggccatgaaagggctcggcaccgatgaagacgccattattagcgtccttgcctaccgcaacaccgcccagcgccaggagatcaggacagcctacaagagcaccatcggcagggacttgatagacgacctgaagtcagaactgagtggcaacttcgagcaggtgattgtggggatgatgacgcccacggtgctgtatgacgtgcaagagctgcgaagggccatgaagggagccggcactgatgagggctgcctaattgagatcctggcctcccggacccctgaggagatccggcgcataagccaaacctaccagcagcaatatggacggagccttgaagatgacattcgctctgacacatcgttcatgttccagcgagtgctggtgtctctgtcagcttctgatgggagggaccgaatggaaatcatctgcccgatgctctcactgtatcaccacgatgtaacacgacccccaagtg

SEQ ID NO: 455250 - DNA, 921 bp, Homo sapiens
ctcggccctccgagggtgtggagcgcccgggaaacgggaccccaagaatccaactgctcccaccctgcgcggccaggagcggggctggcgatactggggacactgtccaatccgggcagggggcgaggccgggggaccgggcgggcctggggagcaggcacgtgtggagggcggacccgccgggggtcgaggcctgcctctccgagagctcctggcgcggccgtcccggcccggggccccaggtgcgcttcccctagagagggattttccggtctcgtgggcagaggaacaaccaggaacttgggctcagtctccaccccacagtggggcggatccgtcccggataagacccgctgtctggccctgagtagggtgtgacctccgcagccgcagaggaggagcgcagcccggcctcgaagaacttctgcttgggtggctgaactctgatcttgacctagagtcatggccatggcaaccaaaggaggtactgtcaaagctgcttcaggattcaatgccatggaagatgcccagaccctgaggaaggccatgaaagggctcgcacaaacaacgaggaaacagaagattcaccaaacatttatgaacagccagctgttataaagacaagggaccaatctgaaaaatcagaataaagtctccttgttaaagctgctgcaagaaacaggcaagcaaaacttagaacatttttaatttgtaatttttgcttaaagttttggtaagatgttgtatcatggtaatttgtcagcagttctaaaagggaaccatttgtgttttgaaacaattcaaacttgtctgttaattcaccaatttggcattttgcagagtttaaattggctgttactgcattcactgtgttttaaaatctggaactatgttttgcacttctaagccatctttcctgaa

SEQ ID NO: 455251 - DNA, 2701 bp, Homo sapiens
gccctttcctggcggctgggtctttaacaccgcccagcgcacatgtcgggggaggcctggcagctgcagctgggagcgcacagacggctgccccgcctgagcgaggcgggcgccgccgcgatgctgcgaggcggacggcgcgggcagcttggctggcacagctgggctgcggggccgggcagcctgctggcttggctgatactggcatctgcgggcgccgcaccctgccccgatgcctgctgcccccacggctcctcgggactgcgatgcacccgggatggggccctggatagcctccaccacctgcccggcgcagagaacctgactgagctctacatcgagaaccagcagcatctgcagcatctggagctccgtgatctgaggggcctgggggagctgagaaacctcaccatcgtgaagagtggtctccgtttcgtggcgccagatgccttccatttcactcctcggctcagtcgcctgaatctctccttcaacgctctggagtctctctcctggaaaactgtgcagggcctctccttacaggaactggtcctgtcggggaaccctctgcactgttcttgtgccctgcgctggctacagcgctgggaggaggagggactgggcggagtgcctgaacagaagctgcagtgtcatgggcaagggcccctggcccacatgcccaatgccagctgtggtgtgcccacgctgaaggtccaggtgcccaatgcctcggtggatgtgggggacgacgtgctgctgcggtgccaggtggaggggcggggcctggagcaggccggctggatcctcacagagctggagcagtcagccacggtgatgaaatctgggggtctgccatccctggggctgaccctggccaatgtcaccagtgacctcaacaggaagaacgtgacgtgctgggcagagaacgatgtgggccgggcagaggtctctgttcaggtcaacgtctccttcccggccagtgtgcagctgcacacggcggtggagatgcaccactggtgcatccccttctctgtggatgggcagccggcaccgtctctgcgctggctcttcaatggctccgtgctcaatgagaccagcttcatcttcactgagttcctggagccggcagccaatgagaccgtgcggcacgggtgtctgcgcctcaaccagcccacccacgtcaacaacggcaactacacgctgctggctgccaaccccttcggccaggcctccgcctccatcatggctgccttcatggacaaccctttcgagttcaaccccgaggaccccatccctgacactaacagcacatctggagacccggtggagaagaaggacgaaacaccttttggggtctcggtggctgtgggcctggccgtctttgcctgcctcttcctttctacgctgctccttgtgctcaacaaatgtggacggagaaacaagtttgggatcaaccgcccggctgtgctggctccagaggatgggctggccatgtccctgcatttcatgacattgggtggcagctccctgtcccccaccgagggcaaaggctctgggctccaaggccacatcatcgagaacccacaatacttcagtgatgcctgtgttcaccacatcaagcgccgggacatcgtgctcaagtgggagctgggggagggcgcctttgggaaggtcttccttgctgagtgccacaacctcctgcctgagcaggacaagatgctggtggctgtcaaggcactgaaggaggcgtccgagagtgctcggcaggacttccaacgtgaggctgagctgctcaccatgctgcagcaccagcacatcgtgcgcttcttcggcgtctgcaccgagggccgccccctgctcatggtctttgagtatatgcggcacggggacctcaaccgcttcctccgatcccatggacctgatgccaagctgctggctggtggggaggatgtggctccaggccccctgggtctggggcagctgctggccgtggctagccaggtcgctgcggggatggtgtacctggcgggtctgcattttgtgcaccgggacctggccacacgcaactgtctagtgggccagggactggtggtcaagattggtgattttggcatgagcagggatatctacagcaccgactattaccgtgtgggaggccgcaccatgctgcccattcgctggatgccgcccgagagcatcctgtaccgtaagttcaccaccgagagcgacgtgtggagcttcggcgtggtgctctgggagatcttcacctacggcaagcagccctggtaccagctctccaacacggaggcaatcgactgcatcacgcagggacgtgagttggagcggccacgtgcctgcccaccagaggtctacgccatcatgcggggctgctggcagcgggagccccagcaacgccacagcatcaaggatgtgcacgcccggctgcaagccctggcccaggcacctcctgtctacctggatgtcctgggctagggggccggcccaggggctgggagtggttagccggaatactggggcctgccctcagcatcccccatagctcccagcagccccagggtgatctcgaagtatctaattcgccctcagcatgtgggaagggacaggtgggggctgggagtagaggatgttcctgcttctctaggcaaggtcccgtcatagcaattatatttattatcccttg

SEQ ID NO: 455252 - DNA, 1732 bp, Homo sapiens
ctggccccaccgacatggcggcggtgttgcagcaagtcctggagcgcacggagctgaacaagctgcccaagtctgtccagaacaaacttgaaaagttccttgctgatcggcaatccgagatcgatggcctgaaggggcggcatgagaaatttaaggtggagagcgaacaacagtattttgaaatagaaaagaggttgtcccacagtcaggagagacttgtgaatgaaacccgagagtgtcaaagcttgcggcttgagctagagaaactcaacaatcaactgaaggcactaactgagaaaaacaaagaacttgaaattgctcaggatcgcaatattgccattcagagccaatttacaagaacaaaggaagaattagaagctgagaaaagagacttaattagaaccaatgagagactatctcaagaacttgaatacttaacagaggatgttaaacgtctgaatgaaaaacttaaagaaagcaatacaacaaagggtgaacttcagttaaaattggatgaacttcaagcttctgatgtttctgttaagtatcgagaaaaacgcttggagcaagaaaaggaattgctctgggctccaaggccacatcatcgagaacccacaatacttcagtgatgcctgtgttcaccacatcaagcgccgggacatcgtgctcaagtgggagctgggggagggcgcctttgggaaggtcttccttgctgagtgccacaacctcctgcctgagcaggacaagatgctggtggctgtcaaggcactgaaggaggcgtccgagagtgctcggcaggacttccaacgtgaggctgagctgctcaccatgctgcagcaccagcacatcgtgcgcttcttcggcgtctgcaccgagggccgccccctgctcatggtctttgagtatatgcggcacggggacctcaaccgcttcctccgatcccatggacctgatgccaagctgctggctggtggggaggatgtggctccaggccccctgggtctggggcagctgctggccgtggctagccaggtcgctgcggggatggtgtacctggcgggtctgcattttgtgcaccgggacctggccacacgcaactgtctagtgggccagggactggtggtcaagattggtgattttggcatgagcagggatatctacagcaccgactattaccgtgtgggaggccgcaccatgctgcccattcgctggatgccgcccgagagcatcctgtaccgtaagttcaccaccgagagcgacgtgtggagcttcggcgtggtgctctgggagatcttcacctacggcaagcagccctggtaccagctctccaacacggaggcaatcgactgcatcacgcagggacgtgagttggagcggccacgtgcctgcccaccagaggtctacgccatcatgcggggctgctggcagcgggagccccagcaacgccacagcatcaaggatgtgcacgcccggctgcaagccctggcccaggcacctcctgtctacctggatgtcctgggctagggggccggcccaggggctgggagtggttagccggaatactggggcctgccctcagcatcccccatagctcccagcagccccagggtgatctcgaagtatctaattcgccctcagcatgtgggaagggacaggtgggggctgggagtagaggatgttcctgcttctctaggcaaggtcccgtcatagcaattatatttattatcccttg

SEQ ID NO: 455253 - DNA, 1558 bp, Homo sapiens
tttcctttctctctcctcccgccgcccaagatgccgaaaggaaagaaggccaagggaaagaaggtggctccggccccagctgtcgtgaagaagcaggaggctaagaaagtggtgaatcccctgtttgagaaaaggcctaagaattttggcattgacactaacagcacatctggagacccggtggagaagaaggacgaaacaccttttggggtctcggtggctgtgggcctggccgtctttgcctgcctcttcctttctacgctgctccttgtgctcaacaaatgtggacggagaaacaagtttgggatcaaccgcccggctgtgctggctccagaggatgggctggccatgtccctgcatttcatgacattgggtggcagctccctgtcccccaccgagggcaaaggctctgggctccaaggccacatcatcgagaacccacaatacttcagtgatgcctgtgttcaccacatcaagcgccgggacatcgtgctcaagtgggagctgggggagggcgcctttgggaaggtcttccttgctgagtgccacaacctcctgcctgagcaggacaagatgctggtggctgtcaaggcactgaaggaggcgtccgagagtgctcggcaggacttccaacgtgaggctgagctgctcaccatgctgcagcaccagcacatcgtgcgcttcttcggcgtctgcaccgagggccgccccctgctcatggtctttgagtatatgcggcacggggacctcaaccgcttcctccgatcccatggacctgatgccaagctgctggctggtggggaggatgtggctccaggccccctgggtctggggcagctgctggccgtggctagccaggtcgctgcggggatggtgtacctggcgggtctgcattttgtgcaccgggacctggccacacgcaactgtctagtgggccagggactggtggtcaagattggtgattttggcatgagcagggatatctacagcaccgactattaccgtgtgggaggccgcaccatgctgcccattcgctggatgccgcccgagagcatcctgtaccgtaagttcaccaccgagagcgacgtgtggagcttcggcgtggtgctctgggagatcttcacctacggcaagcagccctggtaccagctctccaacacggaggcaatcgactgcatcacgcagggacgtgagttggagcggccacgtgcctgcccaccagaggtctacgccatcatgcggggctgctggcagcgggagccccagcaacgccacagcatcaaggatgtgcacgcccggctgcaagccctggcccaggcacctcctgtctacctggatgtcctgggctagggggccggcccaggggctgggagtggttagccggaatactggggcctgccctcagcatcccccatagctcccagcagccccagggtgatctcgaagtatctaattcgccctcagcatgtgggaagggacaggtgggggctgggagtagaggatgttcctgcttctctaggcaaggtcccgtcatagcaattatatttattatcccttg

SEQ ID NO: 455254 - DNA, 2000 bp, Homo sapiens
aacatcctggagtccaccatgaacggacagttggatctaagtgggaagctaatcgtcaaagctcaacttggggaggatattcggcgaattcctattcataatgaagatattacttatgatgaattagtgctaatgatgcaacgagttttcagaggaaaacttctgagtaatgatgaagtaacaataaagtataaagatgaagatggagatcttataacaatttttgatagttctgacctttcctttgcaattcagtgcagtaggatactgaaactgacattatttgttaatggccagccaagaccccttgaatcaagtcaggtgaaatatctccgtcgagaactgatagaacttcgaaataaagtgaatcgtttattggatagcttggaaccacctggagaaccaggaccttccaccaatattcctgaaaatgatactgtggatggtagggaagaaaagtctgcttctgattcttctggaaaacagtctactcaggttatggcagcaagtatgtctgcttttgatcctttaaaaaaccaagatgaaatcaataaaaatgttatgtcagcgtttggcttaacagatgatcaggtttcacactaacagcacatctggagacccggtggagaagaaggacgaaacaccttttggggtctcggtggctgtgggcctggccgtctttgcctgcctcttcctttctacgctgctccttgtgctcaacaaatgtggacggagaaacaagtttgggatcaaccgcccggctgtgctggctccagaggatgggctggccatgtccctgcatttcatgacattgggtggcagctccctgtcccccaccgagggcaaaggctctgggctccaaggccacatcatcgagaacccacaatacttcagtgatgcctgtgttcaccacatcaagcgccgggacatcgtgctcaagtgggagctgggggagggcgcctttgggaaggtcttccttgctgagtgccacaacctcctgcctgagcaggacaagatgctggtggctgtcaaggcactgaaggaggcgtccgagagtgctcggcaggacttccaacgtgaggctgagctgctcaccatgctgcagcaccagcacatcgtgcgcttcttcggcgtctgcaccgagggccgccccctgctcatggtctttgagtatatgcggcacggggacctcaaccgcttcctccgatcccatggacctgatgccaagctgctggctggtggggaggatgtggctccaggccccctgggtctggggcagctgctggccgtggctagccaggtcgctgcggggatggtgtacctggcgggtctgcattttgtgcaccgggacctggccacacgcaactgtctagtgggccagggactggtggtcaagattggtgattttggcatgagcagggatatctacagcaccgactattaccgtgtgggaggccgcaccatgctgcccattcgctggatgccgcccgagagcatcctgtaccgtaagttcaccaccgagagcgacgtgtggagcttcggcgtggtgctctgggagatcttcacctacggcaagcagccctggtaccagctctccaacacggaggcaatcgactgcatcacgcagggacgtgagttggagcggccacgtgcctgcccaccagaggtctacgccatcatgcggggctgctggcagcgggagccccagcaacgccacagcatcaaggatgtgcacgcccggctgcaagccctggcccaggcacctcctgtctacctggatgtcctgggctagggggccggcccaggggctgggagtggttagccggaatactggggcctgccctcagcatcccccatagctcccagcagccccagggtgatctcgaagtatctaattcgccctcagcatgtgggaagggacaggtgggggctgggagtagaggatgttcctgcttctctaggcaaggtcccgtcatagcaattatatttattatcccttg

SEQ ID NO: 455255 - DNA, 439 bp, Homo sapiens
gtggtgtaagggggctggggaagagacctacctgcctgagggagagggcactgagcaagcactgaaaaggcctggggaatgggcactggcaaaggctgggggaaactgcctggggtgacatcgcctgggctccaggtcattgaggagggtgggggaaggagcagccccgcagtagagttctggggccactcccagctctaacaccccttggccctcgggcgtcctgggtggccaggtgtgcccacgctgaaggtccaggtgcccaatgcctcggtggatgtgggggacgacgtgctgctgcggtgccaggtggaggggcggggcctggagcaggccggctggatcctcacagagctggagcagtcagccacggtgatggtgagaagaccttcgctggcagcccccaagaggtccaggcagagcacaggggacaaagatg

SEQ ID NO: 455256 - DNA, 571 bp, Homo sapiens
ccagctgttccattagcccaaaaaattgagatatggatgtcgttccttatctctagctcttctagtcatcttttcttgatttattatgctaacctttgttttaagccacattccctcttactatgtccttacacagttgagagggaagtcgtggagatgctataccagagagtgggtgtgagaggggtgggaaaatgaattgaggaccagtgccaacatgcatttctgcctcctccctcccgggcccttgtcctgactgcagtgcacttctgcatcctatctgagattgtgaaaatggccaagggtgtgatactggctgagaggagctggctcattgagggcagggccacagggtgagtctgcactggaagggagttgatagcctcttgctcttctgtccccagctcttggagcagtcggagtggcagccaacaaacgtggatgggaaggggtacctactcaatgaacctggagtccagcccacctctgtctatggagactttagctgtaaggaggagccagaaattgacagcccagggggtaagaaggccctggatccttatcttatggc

SEQ ID NO: 455257 - DNA, 757 bp, Homo sapiens
ggactgcccctggtggactcctccaatgactcgtaagtaacattctttaaattatatatgcttggattttgtcatgcacctccctggaccccgtgtgtgtcgtcgtgtgtgtgtgtcagagagacagagagacagagaaagggcagggggatctggtgggctggaactggaactgcagggtgagtgtggctgactgccagccaacctctctgctttccccatccacagctacaacagatgaggatgaggaagggaaattacctgaggacatcatgaaggtaaagccccttcctacctgggcactcttgaagtgaccgtttctcagtgaggagagagaaccagtgaagcttccaaatcagaggatgggtagctgctgttgtcacctggctgcttgcattgtcccacaagtgccacattcacgtggcttgactggtgggaaagccaccatgggaagggaaggcaggtgggaggcctggcctctgacaggccgtcctgaagcaagccttggggcatcagacagctctgtgagtcaggcactatcagcgatgggtccctggcctgcatcctctgccccaacatgccccagccctgctagttcgggaaatgcacatcaggcttcaataatcagcctttaggatccgttaatatgatgatggctttatagaaaaagttagcaaattatcctccaggtttttttttctgcttcagttttgaaagtgaatatagtttttgcagccgggggcagtggctcatgcct

SEQ ID NO: 455258 - DNA, 2129 bp, Homo sapiens
  misc_feature (30)..(30): n is a, c, g, or t
agaacaatgacgtgctgaggttagcgaggnccgcggcgtggtttaaatttcggcgacggaggctgaggccttagtcgaggcaagacgtgcgcccgagccccgccgaagcgaggccacccggagccgtgcccagtccacgccggccgtgcccggcggccttaagaacccggcaacctctgccttcttccctcttccacttggagtcgcgctccgcgcgccctcactgcagcccctgcgtcgccgggaccctcgcgcgcgaccgccgaatcgctcctgcagcagagccaacatgcccatcactcggatgcgcatgagaccctggctagagatgcagattaattccaaccaaatcccggggctcatctggattaataaagaggagatgatcttccagatcccatggaagcatgctgccaagcatggctgggacatcaacaaggatgcctgtttgttccggagctgggccattcacacaggccgatacaaagcaggggaaaaggagccagatcccaagacgtggaaggccaactttcgctgtgccatgaactccctgccagatatcgaggaggtgaaagaccagagcaggaacaagggcagctcagctgtgcgagtgtaccggatgcttccacctctcaccaagaaccagagaaaagaaagaaagtcgaagtccagccgagatgctaagagcaaggccaagaggaagtcatgtggggattccagccctgataccttctctgatggactcagcagctccactctgcctgatgaccacagcagctacacagttccaggctacatgcaggacttggaggtggagcaggccctgactccagcactgtcgccatgtgctgtcagcagcactctccccgactggcacatcccagtggaagttgtgccggacagcaccagtgatctgtacaacttccaggtgtcacccatgccctccacctctgaagctacaacagatgaggatgaggaagggaaattacctgaggacatcatgaagctcttggagcagtcggagtggcagccaacaaacgtggatgggaaggggtacctactcaatgaacctggagtccagcccacctctgtctatggagactttagctgtaaggaggagccagaaattgacagcccagggggggatattgggctgagtctacagcgtgtcttcacagatctgaagaacatggatgccacctggctggacagcctgctgaccccagtccggttgccctccatccaggccattccctgtgcaccgtagcagggcccctgggcccctcttattcctctaggcaagcaggacctggcatcatggtggatatggtgcagagaagctggacttctgtgggcccctcaacagccaagtgtgaccccactgccaagtggggatggggcctccctccttgggtcattgacctctcagggcctggcaggccagtgtctgggtttttcttgtggtgtaaagctggccctgcctcctgggaagatgaggttctgagaccagtgtatcaggtcagggacttggacaggagtcagtgtctggctttttcctctgagcccagctgcctggagagggtctcgctgtcactggctggctcctaggggaacagaccagtgaccccagaaaagcataacaccaatcccagggctggctctgcactaagagaaaattgcactaaatgaatctcgttcccaaagaactacccccttttcagctgagccctggggactgttccaaagccagtgaaatgtgaaggaaagtggggtccttcggggcgatgctccctcagcctcagaggagctctaccctgctccctgctttggctgaggggcttgggaaaaaaacttggcactttttcgtgtggatcttgccacatttctgatcagaggtgtacactaacatttcccccgagctcttggcctttgcatttatttatacagtgccttgctcggcgcccaccaccccctcaagccccagcagccctcaacaggcccagggagggaagtgtgagcgccttggtatgacttaaaattggaaatgtcatctaaccattaagtcatgtgtgaacacataggacgtgtgtaaatatgtacatttgtctttttataaaaagtaaattgtt

SEQ ID NO: 455259 - DNA, 2531 bp, Homo sapiens
  misc_feature (30)..(30): n is a, c, g, or t
agaacaatgacgtgctgaggttagcgaggnccgcggcgtggtttaaatttcggcgacggaggctgaggccttagtcgaggcaagacgtgcgcccgagccccgccgaagcgaggccacccggagccgtgcccagtccacgccggccgtgcccggcggccttaagaacccggcaacctctgccttcttccctcttccacttggagtcgcgctccgcgcgccctcactgcagcccctgcgtcgccgggaccctcgcgcgcgaccgccgaatcgctcctgcagcagagccaacatgcccatcactcggatgcgcatgagaccctggctagagatgcagattaattccaaccaaatcccggggctcatctggattaataaagaggagatgatcttccagatcccatggaagcatgctgccaagcatggctgggacatcaacaaggatgcctgtttgttccggagctgggccattcacacaggccgatacaaagcaggggaaaaggagccagatcccaagacgtggaaggccaactttcgctgtgccatgaactccctgccagatatcgaggaggtgaaagaccagagcaggaacaagggcagctcagctgtgcgagtgtaccggatgcttccacctctcaccaagaaccagagaaaagaaagaaagtcgaagtccagccgagatgctaagagcaaggccaagaggaagtcatgtggggattccagccctgataccttctctgatggactcagcagctccactctgcctgatgaccacagcagctacacagttccaggctacatgcaggacttggaggtggagcaggccctgactccagcactgtcgccatgtgctgtcagcagcactctccccgactggcacatcccagtggaagttgtgccggacagcaccagtgatctgtacaacttccaggtgtcacccatgccctccacctctgaagctacaacagatgaggatgaggaagggaaattacctgaggacatcatgaagctcttggagcagtcggagtggcagccaacaaacgtggatgggaaggggtacctactcaatgaacctggagtccagcccacctctgtctatggagactttagctgtaaggaggagccagaaattgacagcccagggggggatattgggctgagtctacagcgtgtcttcacagatctgaagaacatggatgccacctggctggacagcctgctgaccccagtccggttgccctccatccaggccattccctgtgcaccgtagcagggcccctgggcccctcttattcctctaggcaagcaggacctggcatcatggtggatatggtgcagagaagctggacttctgtgggcccctcaacagccaagtgtgaccccactgccaagtggggatggggcctccctccttgggtcattgacctctcagggcctggcaggccagtgtctgggtttttcttgtggtgtaaagctggccctgcctcctgggaagatgaggttctgagaccagtgtatcaggtcagggacttggacaggagtcagtgtctggctttttcctctgagcccagctgcctggagagggtctcgctgtcactggctggctcctaggggaacagaccagtgaccccagaaaagcataacaccaatcccagggctggctctgcactaagagaaaattgcactaaatgaatctcgttcccaaagaactacccccttttcagctgagccctggggactgttccaaagccagtgaaatgtgaaggaaagtggggtccttcggggcgatgctccctcagcctcagaggagctctaccctgctccctgctttggctgaggggcttgggaaaaaaacttggcactttttcgtgtggatcttgccacatttctgatcagaggtgtacactaacatttcccccgagctcttggcctttgcatttatttatacagtgccttgctcggcgcccaccaccccctcaagccccagcagccctcaacaggcccagggagggaagtgtgagcgccttggtatgacttaaaattggaaatgtcatctaaccattaagtcatgtgtgaacacataggacgtgtgtaaatatgtacatttgtctttttataaaaagtaaattgtttataaggggtgtggcctttttagagagaaatttaacttgtagatgattttactttttatggaaacactgatggacttattattggcatcccgcctgaacttgactttggggtgaacagggacatgcatctgttataaaatcctttcggacaggcgcggtggctcacacctgtaatcccagcactttgggaggccgagatgggtggatcacctgaggtcaggagtttgagaccagcctggtgaaactccatttctactaaaaatgcaaaaattagctgggcgtggttgcgggtgcttgtaatcccagctactcaggaggctgaggcaagagaatcgcttgaacctgggaggtggaggttgcagtgagccgagaacatgccattgcactccagcccgggcacca

SEQ ID NO: 455260 - DNA, 2007 bp, Homo sapiens
agagcagttttattccagcgcagctcccctccgcactgagtgtagtacctagcagctggctgaggtgaggggagggtaactaagtgacctcgggtggggcaggtcactgcccaggtactgttcaacagattccagactggagcctctgtgttctctttacagccaacatgcccatcactcggatgcgcatgagaccctggctagagatgcagattaattccaaccaaatcccggggctcatctggattaataaagaggagatgatcttccagatcccatggaagcatgctgccaagcatggctgggacatcaacaaggatgcctgtttgttccggagctgggccattcacacaggccgatacaaagcaggggaaaaggagccagatcccaagacgtggaaggccaactttcgctgtgccatgaactccctgccagatatcgaggaggtgaaagaccagagcaggaacaagggcagctcagctgtgcgagtgtaccggatgcttccacctctcaccaagaaccagagaaaagaaagaaagtcgaagtccagccgagatgctaagagcaaggccaagaggaagtcatgtggggattccagccctgataccttctctgatggactcagcagctccactctgcctgatgaccacagcagctacacagttccaggctacatgcaggacttggaggtggagcaggccctgactccagcactgtcgccatgtgctgtcagcagcactctccccgactggcacatcccagtggaagttgtgccggacagcaccagtgatctgtacaacttccaggtgtcacccatgccctccacctctgaagctacaacagatgaggatgaggaagggaaattacctgaggacatcatgaagctcttggagcagtcggagtggcagccaacaaacgtggatgggaaggggtacctactcaatgaacctggagtccagcccacctctgtctatggagactttagctgtaaggaggagccagaaattgacagcccagggggggatattgggctgagtctacagcgtgtcttcacagatctgaagaacatggatgccacctggctggacagcctgctgaccccagtccggttgccctccatccaggccattccctgtgcaccgtagcagggcccctgggcccctcttattcctctaggcaagcaggacctggcatcatggtggatatggtgcagagaagctggacttctgtgggcccctcaacagccaagtgtgaccccactgccaagtggggatggggcctccctccttgggtcattgacctctcagggcctggcaggccagtgtctgggtttttcttgtggtgtaaagctggccctgcctcctgggaagatgaggttctgagaccagtgtatcaggtcagggacttggacaggagtcagtgtctggctttttcctctgagcccagctgcctggagagggtctcgctgtcactggctggctcctaggggaacagaccagtgaccccagaaaagcataacaccaatcccagggctggctctgcactaagagaaaattgcactaaatgaatctcgttcccaaagaactacccccttttcagctgagccctggggactgttccaaagccagtgaaatgtgaaggaaagtggggtccttcggggcgatgctccctcagcctcagaggagctctaccctgctccctgctttggctgaggggcttgggaaaaaaacttggcactttttcgtgtggatcttgccacatttctgatcagaggtgtacactaacatttcccccgagctcttggcctttgcatttatttatacagtgccttgctcggcgcccaccaccccctcaagccccagcagccctcaacaggcccagggagggaagtgtgagcgccttggtatgacttaaaattggaaatgtcatctaaccattaagtcatgtgtgaacacataggacgtgtgtaaatatgtacatttgtctttttataaaaagtaaattgtt

SEQ ID NO: 455261 - DNA, 2148 bp, Homo sapiens
  misc_feature (148)..(148): n is a, c, g, or t
  misc_feature (170)..(170): n is a, c, g, or t
  misc_feature (219)..(219): n is a, c, g, or t
ccatatgctaggtgggctgggttaatcggccgaggccttagtcgaggcaagacgtgcgcccgagccccgccgaagcgaggccacccggagccgtgcccagtccacgccggccgtgcccggcggccttaagaacccggacatagccccnttccttgggcccccttttttcntttttcccccttccttttccccaaccggtccggggggaaggtcggcgcntcccggccgggcgggcccttcaactgcagcccctgcgtcgccgggaccctcgcgcgcgaccgccgaatcgctcctgcagcagagccaacatgcccatcactcggatgcgcatgagaccctggctagagatgcagattaattccaaccaaatcccggggctcatctggattaataaagaggagatgatcttccagatcccatggaagcatgctgccaagcatggctgggacatcaacaaggatgcctgtttgttccggagctgggccattcacacaggccgatacaaagcaggggaaaaggagccagatcccaagacgtggaaggccaactttcgctgtgccatgaactccctgccagatatcgaggaggtgaaagaccagagcaggaacaagggcagctcagctgtgcgagtgtaccggatgcttccacctctcaccaagaaccagagaaaagaaagaaagtcgaagtccagccgagatgctaagagcaaggccaagaggaagtcatgtggggattccagccctgataccttctctgatggactcagcagctccactctgcctgatgaccacagcagctacacagttccaggctacatgcaggacttggaggtggagcaggccctgactccagcactgtcgccatgtgctgtcagcagcactctccccgactggcacatcccagtggaagttgtgccggacagcaccagtgatctgtacaacttccaggtgtcacccatgccctccacctctgaagctacaacagatgaggatgaggaagggaaattacctgaggacatcatgaagctcttggagcagtcggagtggcagccaacaaacgtggatgggaaggggtacctactcaatgaacctggagtccagcccacctctgtctatggagactttagctgtaaggaggagccagaaattgacagcccagggggggatattgggctgagtctacagcgtgtcttcacagatctgaagaacatggatgccacctggctggacagcctgctgaccccagtccggttgccctccatccaggccattccctgtgcaccgtagcagggcccctgggcccctcttattcctctaggcaagcaggacctggcatcatggtggatatggtgcagagaagctggacttctgtgggcccctcaacagccaagtgtgaccccactgccaagtggggatggggcctccctccttgggtcattgacctctcagggcctggcaggccagtgtctgggtttttcttgtggtgtaaagctggccctgcctcctgggaagatgaggttctgagaccagtgtatcaggtcagggacttggacaggagtcagtgtctggctttttcctctgagcccagctgcctggagagggtctcgctgtcactggctggctcctaggggaacagaccagtgaccccagaaaagcataacaccaatcccagggctggctctgcactaagagaaaattgcactaaatgaatctcgttcccaaagaactacccccttttcagctgagccctggggactgttccaaagccagtgaaatgtgaaggaaagtggggtccttcggggcgatgctccctcagcctcagaggagctctaccctgctccctgctttggctgaggggcttgggaaaaaaacttggcactttttcgtgtggatcttgccacatttctgatcagaggtgtacactaacatttcccccgagctcttggcctttgcatttatttatacagtgccttgctcggcgcccaccaccccctcaagccccagcagccctcaacaggcccagggagggaagtgtgagcgccttggtatgacttaaaattggaaatgtcatctaaccattaagtcatgtgtgaacacataggacgtgtgtaaatatgtacatttgtctttttataaaaagtaaattgtt

SEQ ID NO: 455262 - DNA, 2015 bp, Homo sapiens
ccatatgctaggtgggctgggttaatcggccgaggccttagtcgaggcaagacgtgcgcccgagccccgccgaagcgaggccacccggagccgtgcccagtccacgccggccgtgcccggcggccttaagaacccggcaacctctgccttcttccctcttccacttggagtcgcgctccgcgcgccctcactgcagcccctgcgtcgccgggaccctcgcgcgcgaccgccgaatcgctcctgcagcagagccaacatgcccatcactcggatgcgcatgagaccctggctagagatgcagattaattccaaccaaatcccggggctcatctggattaataaagaggagatgatcttccagatcccatggaagcatgctgccaagcatggctgggacatcaacaaggatgcctgtttgttccggagctgggccattcacacagatatcgaggaggtgaaagaccagagcaggaacaagggcagctcagctgtgcgagtgtaccggatgcttccacctctcaccaagaaccagagaaaagaaagaaagtcgaagtccagccgagatgctaagagcaaggccaagaggaagtcatgtggggattccagccctgataccttctctgatggactcagcagctccactctgcctgatgaccacagcagctacacagttccaggctacatgcaggacttggaggtggagcaggccctgactccagcactgtcgccatgtgctgtcagcagcactctccccgactggcacatcccagtggaagttgtgccggacagcaccagtgatctgtacaacttccaggtgtcacccatgccctccacctctgaagctacaacagatgaggatgaggaagggaaattacctgaggacatcatgaagctcttggagcagtcggagtggcagccaacaaacgtggatgggaaggggtacctactcaatgaacctggagtccagcccacctctgtctatggagactttagctgtaaggaggagccagaaattgacagcccagggggggatattgggctgagtctacagcgtgtcttcacagatctgaagaacatggatgccacctggctggacagcctgctgaccccagtccggttgccctccatccaggccattccctgtgcaccgtagcagggcccctgggcccctcttattcctctaggcaagcaggacctggcatcatggtggatatggtgcagagaagctggacttctgtgggcccctcaacagccaagtgtgaccccactgccaagtggggatggggcctccctccttgggtcattgacctctcagggcctggcaggccagtgtctgggtttttcttgtggtgtaaagctggccctgcctcctgggaagatgaggttctgagaccagtgtatcaggtcagggacttggacaggagtcagtgtctggctttttcctctgagcccagctgcctggagagggtctcgctgtcactggctggctcctaggggaacagaccagtgaccccagaaaagcataacaccaatcccagggctggctctgcactaagagaaaattgcactaaatgaatctcgttcccaaagaactacccccttttcagctgagccctggggactgttccaaagccagtgaaatgtgaaggaaagtggggtccttcggggcgatgctccctcagcctcagaggagctctaccctgctccctgctttggctgaggggcttgggaaaaaaacttggcactttttcgtgtggatcttgccacatttctgatcagaggtgtacactaacatttcccccgagctcttggcctttgcatttatttatacagtgccttgctcggcgcccaccaccccctcaagccccagcagccctcaacaggcccagggagggaagtgtgagcgccttggtatgacttaaaattggaaatgtcatctaaccattaagtcatgtgtgaacacataggacgtgtgtaaatatgtacatttgtctttttataaaaagtaaattgtt

SEQ ID NO: 455263 - DNA, 1943 bp, Homo sapiens
  misc_feature (30)..(30): n is a, c, g, or t
agaacaatgacgtgctgaggttagcgaggnccgcggcgtggtttaaatttcggcgacggaggctgaggccttagtcgaggcaagacgtgcgcccgagccccgccgaagcgaggccacccggagccgtgcccagtccacgccggccgtgcccggcggccttaagaacccggcaacctctgccttcttccctcttccacttggagtcgcgctccgcgcgccctcactgcagcccctgcgtcgccgggaccctcgcgcgcgaccgccgaatcgctcctgcagcagagccaacatgcccatcactcggatgcgcatgagaccctggctagagatgcagattaattccaaccaaatcccggggctcatctggattaataaagaggagatgatcttccagatcccatggaagcatgctgccaagcatggctgggacatcaacaaggatgcctgtttgttccggagctgggccattcacacaggccgatacaaagcaggggaaaaggagccagatcccaagacgtggaaggccaactttcgctgtgccatgaactccctgccagatatcgaggaggtgaaagaccagagcaggaacaagggcagctcagctgtgcgagtgtaccggatgcttccacctctcaccaagaaccagagaaaagaaagaaagtcgaagtccagccgagatgctaagagcaaggccaagaggaagtcatgtggggattccagccctgataccttctctgatggactcagcagctccactctgcctgatgaccacagcagctacacagttccaggctacatgcaggacttggaggtggagcaggccctgactccagcactgtcgccatgtgctgtcagcagcactctccccgactggcacatcccagtggaagttgtgccggacagcaccagtgatctgtacaacttccaggtgtcacccatgccctccacctctgaaggggatattgggctgagtctacagcgtgtcttcacagatctgaagaacatggatgccacctggctggacagcctgctgaccccagtccggttgccctccatccaggccattccctgtgcaccgtagcagggcccctgggcccctcttattcctctaggcaagcaggacctggcatcatggtggatatggtgcagagaagctggacttctgtgggcccctcaacagccaagtgtgaccccactgccaagtggggatggggcctccctccttgggtcattgacctctcagggcctggcaggccagtgtctgggtttttcttgtggtgtaaagctggccctgcctcctgggaagatgaggttctgagaccagtgtatcaggtcagggacttggacaggagtcagtgtctggctttttcctctgagcccagctgcctggagagggtctcgctgtcactggctggctcctaggggaacagaccagtgaccccagaaaagcataacaccaatcccagggctggctctgcactaagagaaaattgcactaaatgaatctcgttcccaaagaactacccccttttcagctgagccctggggactgttccaaagccagtgaaatgtgaaggaaagtggggtccttcggggcgatgctccctcagcctcagaggagctctaccctgctccctgctttggctgaggggcttgggaaaaaaacttggcactttttcgtgtggatcttgccacatttctgatcagaggtgtacactaacatttcccccgagctcttggcctttgcatttatttatacagtgccttgctcggcgcccaccaccccctcaagccccagcagccctcaacaggcccagggagggaagtgtgagcgccttggtatgacttaaaattggaaatgtcatctaaccattaagtcatgtgtgaacacataggacgtgtgtaaatatgtacatttgtctttttataaaaagtaaattgtt

SEQ ID NO: 455264 - DNA, 1527 bp, Homo sapiens
ccagctgttccattagcccaaaaaattgagatatggatgtcgttccttatctctagctcttctagtcatcttttcttgatttattatgctaacctttgttttaagccacattccctcttactatgtccttacacagttgagagggaagtcgtggagatgctataccagagagtgggtgtgagaggggtgggaaaatgaattgaggaccagtgccaacatgcatttctgcctcctccctcccgggcccttgtcctgactgcagtgcacttctgcatcctatctgagattgtgaaaatggccaagggtgtgatactggctgagaggagctggctcattgagggcagggccacagggtgagtctgcactggaagggagttgatagcctcttgctcttctgtccccagctcttggagcagtcggagtggcagccaacaaacgtggatgggaaggggtacctactcaatgaacctggagtccagcccacctctgtctatggagactttagctgtaaggaggagccagaaattgacagcccagggggggatattgggctgagtctacagcgtgtcttcacagatctgaagaacatggatgccacctggctggacagcctgctgaccccagtccggttgccctccatccaggccattccctgtgcaccgtagcagggcccctgggcccctcttattcctctaggcaagcaggacctggcatcatggtggatatggtgcagagaagctggacttctgtgggcccctcaacagccaagtgtgaccccactgccaagtggggatggggcctccctccttgggtcattgacctctcagggcctggcaggccagtgtctgggtttttcttgtggtgtaaagctggccctgcctcctgggaagatgaggttctgagaccagtgtatcaggtcagggacttggacaggagtcagtgtctggctttttcctctgagcccagctgcctggagagggtctcgctgtcactggctggctcctaggggaacagaccagtgaccccagaaaagcataacaccaatcccagggctggctctgcactaagagaaaattgcactaaatgaatctcgttcccaaagaactacccccttttcagctgagccctggggactgttccaaagccagtgaaatgtgaaggaaagtggggtccttcggggcgatgctccctcagcctcagaggagctctaccctgctccctgctttggctgaggggcttgggaaaaaaacttggcactttttcgtgtggatcttgccacatttctgatcagaggtgtacactaacatttcccccgagctcttggcctttgcatttatttatacagtgccttgctcggcgcccaccaccccctcaagccccagcagccctcaacaggcccagggagggaagtgtgagcgccttggtatgacttaaaattggaaatgtcatctaaccattaagtcatgtgtgaacacataggacgtgtgtaaatatgtacatttgtctttttataaaaagtaaattgtt

SEQ ID NO: 455265 - DNA, 1135 bp, Homo sapiens
  misc_feature (30)..(30): n is a, c, g, or t
agaacaatgacgtgctgaggttagcgaggnccgcggcgtggtttaaatttcggcgacggaggctgaggccttagtcgaggcaagacgtgcgcccgagccccgccgaagcgaggccacccggagccgtgcccagtccacgccggccgtgcccggcggccttaagaacccggcaacctctgccttcttccctcttccacttggagtcgcgctccgcgcgccctcactgcagcccctgcgtcgccgggaccctcgcgcgcgaccgccgaatcgctcctgcagcagagccaacatgcccatcactcggatgcgcatgagaccctggctagagatgcagattaattccaaccaaatcccggggctcatctggattaataaagaggagatgatcttccagatcccatggaagcatgctgccaagcatggctgggacatcaacaaggatgcctgtttgttccggagctgggccattcacacaggccgatacaaagcaggggaaaaggagccagatcccaagacgtggaaggccaactttcgctgtgccatgaactccctgccagatatcgaggaggtgaaagaccagagcaggaacaagggcagctcagctgtgcgagtgtaccggatgcttccacctctcaccaagaaccagagaaaagaaagaaagtcgaagtccagccgagatgctaagagcaaggccaagaggaagtcatgtggggattccagccctgataccttctctgatggactcagcagctccactctgcctgatgaccacagcagctacacagttccaggctacatgcaggacttggaggtggagcaggccctgactccagcactgtcgccatgtgctgtcagcagcactctccccgactggcacatcccagtggaagttgtgccggacagcaccagtgatctgtacaacttccaggtgtcacccatgccctccacctctgaagtcaactttgaagtacaccgatgaggacgacggaagggcaacctggggaatcataaaccaggaaacacagagcagaaacacgggtcggcagggggaccacaagacacgagccaccacactcgcacgaacacagaaaggaaccaatcaaccgaggagaagaaggagaggaaaaaaaaacgc

SEQ ID NO: 455266 - DNA, 987 bp, Homo sapiens
  misc_feature (30)..(30): n is a, c, g, or t
agaacaatgacgtgctgaggttagcgaggnccgcggcgtggtttaaatttcggcgacggaggctgaggccttagtcgaggcaagacgtgcgcccgagccccgccgaagcgaggccacccggagccgtgcccagtccacgccggccgtgcccggcggccttaagaacccggcaacctctgccttcttccctcttccacttggagtcgcgctccgcgcgccctcactgcagcccctgcgtcgccgggaccctcgcgcgcgaccgccgaatcgctcctgcagcagagccaacatgcccatcactcggatgcgcatgagaccctggctagagatgcagattaattccaaccaaatcccggggctcatctggattaataaagaggagatgatcttccagatcccatggaagcatgctgccaagcatggctgggacatcaacaaggatgcctgtttgttccggagctgggccattcacacaggccgatacaaagcaggggaaaaggagccagatcccaagacgtggaaggccaactttcgctgtgccatgaactccctgccagatatcgaggaggtgaaagaccagagcaggaacaagggcagctcagctgtgcgagtgtaccggatgcttccacctctcaccaagaaccagagaaaagaaagaaagtcgaagtccagccgagatgctaagagcaaggccaagaggaagtcatgtggggattccagccctgataccttctctgatggactcagcagctccactctgcctgatgaccacagcagctacacagttccaggctacatgcaggacttggaggtggagcaggccctgactccagcactgtcgccatgtgctgtcagcagcactctccccgactggcacatcccagtggaagttgtgccggacagcaccagtgatctgtacaacttccaggtgtcacccatgccctccacctctgaagcaccgatgccgctgcgcggggcatcccgggg

SEQ ID NO: 455267 - DNA, 1183 bp, Homo sapiens
cggtaaagcatctggggtactgacacattgtgaattagctacggctgccatgccttaaggtttgcctgaagctgagtggatgtttactgctgtgctgggaagagcagaggccatgtctatggccttcaggggtagggggaagcacacctgatgccaccgtcccctaccctcatacaaccttcttcacatcttctaggggatattgggctgagtctacagcgtgtcttcacagatctgaagaacatggatgccacctggctggacagcctgctgaccccagtccggttgccctccatccaggccattccctgtgcaccgtagcagggcccctgggcccctcttattcctctaggcaagcaggacctggcatcatggtggatatggtgcagagaagctggacttctgtgggcccctcaacagccaagtgtgaccccactgccaagtggggatggggcctccctccttgggtcattgacctctcagggcctggcaggccagtgtctgggtttttcttgtggtgtaaagctggccctgcctcctgggaagatgaggttctgagaccagtgtatcaggtcagggacttggacaggagtcagtgtctggctttttcctctgagcccagctgcctggagagggtctcgctgtcactggctggctcctaggggaacagaccagtgaccccagaaaagcataacaccaatcccagggctggctctgcactaagagaaaattgcactaaatgaatctcgttcccaaagaactacccccttttcagctgagccctggggactgttccaaagccagtgaaatgtgaaggaaagtggggtccttcggggcgatgctccctcagcctcagaggagctctaccctgctccctgctttggctgaggggcttgggaaaaaaacttggcactttttcgtgtggatcttgccacatttctgatcagaggtgtacactaacatttcccccgagctcttggcctttgcatttatttatacagtgccttgctcggcgcccaccaccccctcaagccccagcagccctcaacaggcccagggagggaagtgtgagcgccttggtatgacttaaaattggaaatgtcatctaaccattaagtcatgtgtgaacacataggacgtgtgtaaatatgtacatttgtctttttataaaaagtaaattgtt

SEQ ID NO: 455268 - DNA, 491 bp, Homo sapiens
tcagcagctccactctgcctgatgaccacagcagctacacagttccaggctacatgcaggacttggaggtggagcaggccctgactccaggtgagctggtccaggtctggcaggagaccccacaggtcagtgggatgactctttctcttggaggcatggtgctggcacatggtggcccattagtgcaggctgcagggttggtcggagggcgctcgatgtcttgcaaactaagaaagcacacaaccttgacctgtggcttctgctgttccccagcactgtcgccatgtgctgtcagcagcactctccccgactggcacatcccagtggaagttgtgccggacagcaccagtgatctgtacaacttccaggtgtcacccatgccctccacctctgaagaggttggtgctcctggggcctggcctgcctgcttgactgtctgggtcctgtgaagggcttcctgagagagaaaagatgatcagaactccacctgg

SEQ ID NO: 455269 - DNA, 2096 bp, Homo sapiens
ccatatgctaggtgggctgggttaatcggccgaggccttagtcgaggcaagacgtgcgcccgagccccgccgaagcgaggccacccggagccgtgcccagtccacgccggccgtgcccggcggccttaagaacccggcaacctctgccttcttccctcttccacttggagtcgcgctccgcgcgccctcactgcagcccctgcgtcgccgggaccctcgcgcgcgaccgccgaatcgctcctgcagcagagccaacatgcccatcactcggatgcgcatgagaccctggctagagatgcagattaattccaaccaaatcccggggctcatctggattaataaagaggagatgatcttccagatcccatggaagcatgctgccaagcatggctgggacatcaacaaggatgcctgtttgttccggagctgggccattcacacaggccgatacaaagcaggggaaaaggagccagatcccaagacgtggaaggccaactttcgctgtgccatgaactccctgccagatatcgaggaggtgaaagaccagagcaggaacaagggcagctcagctgtgcgagtgtaccggatgcttccacctctcaccaagaaccagagaaaagaaagaaagtcgaagtccagccgagatgctaagagcaaggccaagaggaagtcatgtggggattccagccctgataccttctctgatggactcagcagctccactctgcctgatgaccacagcagctacacagttccaggctacatgcaggacttggaggtggagcaggccctgactccagcactgtcgccatgtgctgtcagcagcactctccccgactggcacatcccagtggaagttgtgccggacagcaccagtgatctgtacaacttccaggtgtcacccatgccctccacctctgaagctacaacagatgaggatgaggaagggaaattacctgaggacatcatgaagctcttggagcagtcggagtggcagccaacaaacgtggatgggaaggggtacctactcaatgaacctggagtccagcccacctctgtctatggagactttagctgtaaggaggagccagaaattgacagcccagggggggatattgggctgagtctacagcgtgtcttcacagatctgaagaacatggatgccacctggctggacagcctgctgaccccagtccggttgccctccatccaggccattccctgtgcaccgtagcagggcccctgggcccctcttattcctctaggcaagcaggacctggcatcatggtggatatggtgcagagaagctggacttctgtgggcccctcaacagccaagtgtgaccccactgccaagtggggatggggcctccctccttgggtcattgacctctcagggcctggcaggccagtgtctgggtttttcttgtggtgtaaagctggccctgcctcctgggaagatgaggttctgagaccagtgtatcaggtcagggacttggacaggagtcagtgtctggctttttcctctgagcccagctgcctggagagggtctcgctgtcactggctggctcctaggggaacagaccagtgaccccagaaaagcataacaccaatcccagggctggctctgcactaagagaaaattgcactaaatgaatctcgttcccaaagaactacccccttttcagctgagccctggggactgttccaaagccagtgaaatgtgaaggaaagtggggtccttcggggcgatgctccctcagcctcagaggagctctaccctgctccctgctttggctgaggggcttgggaaaaaaacttggcactttttcgtgtggatcttgccacatttctgatcagaggtgtacactaacatttcccccgagctcttggcctttgcatttatttatacagtgccttgctcggcgcccaccaccccctcaagccccagcagccctcaacaggcccagggagggaagtgtgagcgccttggtatgacttaaaattggaaatgtcatctaaccattaagtcatgtgtgaacacataggacgtgtgtaaatatgtacatttgtctttttataaaaagtaaattgtt

SEQ ID NO: 455270 - DNA, 2019 bp, Homo sapiens
  misc_feature (30)..(30): n is a, c, g, or t
agaacaatgacgtgctgaggttagcgaggnccgcggcgtggtttaaatttcggcgacggaggctgaggccttagtcgaggcaagacgtgcgcccgagccccgccgaagcgaggccacccggagccgtgcccagtccacgccggccgtgcccggcggccttaagaacccggcaacctctgccttcttccctcttccacttggagtcgcgctccgcgcgccctcactgcagcccctgcgtcgccgggaccctcgcgcgcgaccgccgaatcgctcctgcagcagagccaacatgcccatcactcggatgcgcatgagaccctggctagagatgcagattaattccaaccaaatcccggggctcatctggattaataaagaggagatgatcttccagatcccatggaagcatgctgccaagcatggctgggacatcaacaaggatgcctgtttgttccggagctgggccattcacacaggccgatacaaagcaggggaaaaggagccagatcccaagacgtggaaggccaactttcgctgtgccatgaactccctgccagatatcgaggaggtgaaagaccagagcaggaacaagggcagctcagctgtgcgagtgtaccggatgcttccacctctcaccaagaaccagagaaaagaaagaaagtcgaagtccagccgagatgctaagagcaaggccaagaggaagtcatgtggggattccagccctgataccttctctgatggactcagcagctccactctgcctgatgaccacagcagctacacagttccaggctacatgcaggacttggaggtggagcaggccctgactccagcactgtcgccatgtgctgtcagcagcactctccccgactggcacatcccagtggaagttgtgccggacagcaccagtgatctgtacaacttccaggtgtcacccatgccctccacctctgaagctacaacagatgaggatgaggaagggaaattacctgaggacatcatgaagctcttggagcagtcggagtggcagccaacaaacgtggatgggaaggggtacctactcaatgaacctggagtccagcccacctctgtctatggagactttagctgtaaggaggagccagaaattgacagcccagggggggatattgggctgagtctacagcgtgtcttcacagatctgaagaacatggatgccacctggctggacagcctgctgaccccagtccggttgccctccatccaggccattccctgtgcaccgtagcagggcccctgggcccctcttattcctctaggcaagcaggacctggcatcatggtggatatggtgcagagaagctggacttctgtgggcccctcaacagccaagtgtgaccccactgccaagtggggatggggcctccctccttgggtcattgacctctcagggcctggcaggccagtgtctgggtttttcttgtggtgtaaagctggccctgcctcctgggaagatgaggttctgagaccagtgtatcaggtcagggacttggacaggagtcagtgtctggctttttcctctgagcccagctgcctggagagggtctcgctgtcactggctggctcctaggggaacagaccagtgaccccagaaaagcataacaccaatcccagggctggctctgcactaagagaaaattgcactaaatgaatctcgttcccaaagaactacccccttttcagctgagccctggggactgttccaaagccagtgaaatgtgaaggaaagtggggtccttcggggcgatgctccctcagcctcagaggagctctaccctgctccctgctttggctgaggggcttgggaaaaaaacttggcactttttcgtgtggatcttgccacatttctgatcagaggtgtacactaacatttcccccgagttggcttggtttcatcagggtgcgggcacaaccttaacaagctaagcggggggtgcccggtataaagagtttacacattgacaaggggatacttgaaaca

SEQ ID NO: 455271 - DNA, 1904 bp, Homo sapiens
ccatatgctaggtgggctgggttaatcggccgaggccttagtcgaggcaagacgtgcgcccgagccccgccgaagcgaggccacccggagccgtgcccagtccacgccggccgtgcccggcggccttaagaacccggcaacctctgccttcttccctcttccacttggagtcgcgctccgcgcgccctcactgcagcccctgcgtcgccgggaccctcgcgcgcgaccgccgaatcgctcctgcagcagaggccgatacaaagcaggggaaaaggagccagatcccaagacgtggaaggccaactttcgctgtgccatgaactccctgccagatatcgaggaggtgaaagaccagagcaggaacaagggcagctcagctgtgcgagtgtaccggatgcttccacctctcaccaagaaccagagaaaagaaagaaagtcgaagtccagccgagatgctaagagcaaggccaagaggaagtcatgtggggattccagccctgataccttctctgatggactcagcagctccactctgcctgatgaccacagcagctacacagttccaggctacatgcaggacttggaggtggagcaggccctgactccagcactgtcgccatgtgctgtcagcagcactctccccgactggcacatcccagtggaagttgtgccggacagcaccagtgatctgtacaacttccaggtgtcacccatgccctccacctctgaagctacaacagatgaggatgaggaagggaaattacctgaggacatcatgaagctcttggagcagtcggagtggcagccaacaaacgtggatgggaaggggtacctactcaatgaacctggagtccagcccacctctgtctatggagactttagctgtaaggaggagccagaaattgacagcccagggggggatattgggctgagtctacagcgtgtcttcacagatctgaagaacatggatgccacctggctggacagcctgctgaccccagtccggttgccctccatccaggccattccctgtgcaccgtagcagggcccctgggcccctcttattcctctaggcaagcaggacctggcatcatggtggatatggtgcagagaagctggacttctgtgggcccctcaacagccaagtgtgaccccactgccaagtggggatggggcctccctccttgggtcattgacctctcagggcctggcaggccagtgtctgggtttttcttgtggtgtaaagctggccctgcctcctgggaagatgaggttctgagaccagtgtatcaggtcagggacttggacaggagtcagtgtctggctttttcctctgagcccagctgcctggagagggtctcgctgtcactggctggctcctaggggaacagaccagtgaccccagaaaagcataacaccaatcccagggctggctctgcactaagagaaaattgcactaaatgaatctcgttcccaaagaactacccccttttcagctgagccctggggactgttccaaagccagtgaaatgtgaaggaaagtggggtccttcggggcgatgctccctcagcctcagaggagctctaccctgctccctgctttggctgaggggcttgggaaaaaaacttggcactttttcgtgtggatcttgccacatttctgatcagaggtgtacactaacatttcccccgagctcttggcctttgcatttatttatacagtgccttgctcggcgcccaccaccccctcaagccccagcagccctcaacaggcccagggagggaagtgtgagcgccttggtatgacttaaaattggaaatgtcatctaaccattaagtcatgtgtgaacacataggacgtgtgtaaatatgtacatttgtctttttataaaaagtaaattgtt

SEQ ID NO: 455272 - DNA, 1973 bp, Homo sapiens
ccatatgctaggtgggctgggttaatcggccgaggccttagtcgaggcaagacgtgcgcccgagccccgccgaagcgaggccacccggagccgtgcccagtccacgccggccgtgcccggcggccttaagaacccggcaacctctgccttcttccctcttccacttggagtcgcgctccgcgcgccctcactgcagcccctgcgtcgccgggaccctcgcgcgcgaccgccgaatcgctcctgcagcagagccaacatgcccatcactcggatgcgcatgagaccctggctagagatgcagattaattccaaccaaatcccggggctcatctggattaataaagaggagatgatcttccagatcccatggaagcatgctgccaagcatggctgggacatcaacaaggatgcctgtttgttccggagctgggccattcacacaggccgatacaaagcaggggaaaaggagccagatcccaagacgtggaaggccaactttcgctgtgccatgaactccctgccagatatcgaggaggtgaaagaccagagcaggaacaagggcagctcagctgtgcgagtgtaccggatgcttccacctctcaccaagaaccagagaaaagaaagaaagtcgaagtccagccgagatgctaagagcaaggccaagaggaagtcatgtggggattccagccctgataccttctctgatggactcagcagctccactctgcctgatgaccacagcagctacacagttccaggctacatgcaggacttggaggtggagcaggccctgactccagctacaacagatgaggatgaggaagggaaattacctgaggacatcatgaagctcttggagcagtcggagtggcagccaacaaacgtggatgggaaggggtacctactcaatgaacctggagtccagcccacctctgtctatggagactttagctgtaaggaggagccagaaattgacagcccagggggggatattgggctgagtctacagcgtgtcttcacagatctgaagaacatggatgccacctggctggacagcctgctgaccccagtccggttgccctccatccaggccattccctgtgcaccgtagcagggcccctgggcccctcttattcctctaggcaagcaggacctggcatcatggtggatatggtgcagagaagctggacttctgtgggcccctcaacagccaagtgtgaccccactgccaagtggggatggggcctccctccttgggtcattgacctctcagggcctggcaggccagtgtctgggtttttcttgtggtgtaaagctggccctgcctcctgggaagatgaggttctgagaccagtgtatcaggtcagggacttggacaggagtcagtgtctggctttttcctctgagcccagctgcctggagagggtctcgctgtcactggctggctcctaggggaacagaccagtgaccccagaaaagcataacaccaatcccagggctggctctgcactaagagaaaattgcactaaatgaatctcgttcccaaagaactacccccttttcagctgagccctggggactgttccaaagccagtgaaatgtgaaggaaagtggggtccttcggggcgatgctccctcagcctcagaggagctctaccctgctccctgctttggctgaggggcttgggaaaaaaacttggcactttttcgtgtggatcttgccacatttctgatcagaggtgtacactaacatttcccccgagctcttggcctttgcatttatttatacagtgccttgctcggcgcccaccaccccctcaagccccagcagccctcaacaggcccagggagggaagtgtgagcgccttggtatgacttaaaattggaaatgtcatctaaccattaagtcatgtgtgaacacataggacgtgtgtaaatatgtacatttgtctttttataaaaagtaaattgtt

SEQ ID NO: 455273 - DNA, 1904 bp, Homo sapiens
  misc_feature (30)..(30): n is a, c, g, or t
agaacaatgacgtgctgaggttagcgaggnccgcggcgtggtttaaatttcggcgacggaggctgaggccttagtcgaggcaagacgtgcgcccgagccccgccgaagcgaggccacccggagccgtgcccagtccacgccggccgtgcccggcggccttaagaacccggcaacctctgccttcttccctcttccacttggagtcgcgctccgcgcgccctcactgcagcccctgcgtcgccgggaccctcgcgcgcgaccgccgaatcgctcctgcagcagagccaacatgcccatcactcggatgcgcatgagaccctggctagagatgcagattaattccaaccaaatcccggggctcatctggattaataaagaggagatgatcttccagatcccatggaagcatgctgccaagcatggctgggacatcaacaaggatgcctgtttgttccggagctgggccattcacacaggccgatacaaagcaggggaaaaggagccagatcccaagacgtggaaggccaactttcgctgtgccatgaactccctgccagatatcgaggaggtgaaagaccagagcaggaacaagggcagctcagctgtgcgagtgtaccggatgcttccacctctcaccaagaaccagagaaaagaaagaaagtcgaagtccagccgagatgctaagagcaaggccaagaggaagtcatgtggggattccagccctgataccttctctgatggactcagcagctccactctgcctgatgaccacagcagctacacagttccaggctacatgcaggacttggaggtggagcaggccctgactccagcactgtcgccatgtgctgtcagcagcactctccccgactggcacatcccagtggaagttgtgccggacagcaccagtgatctgtacaacttccaggtgtcacccatgccctccacctctgaagctacaacagatgaggatgaggaagggaaattacctgaggacatcatgaagctcttggagcagtcggagtggcagccaacaaacgtggatgggaaggggtacctactcaatgaacctggagtccagcccacctctgtctatggagactttagctgtaaggaggagccagaaattgacagcccagggggggatattgggctgagtctacagcgtgtcttcacagatctgaagaacatggatgccacctggctggacagcctgctgaccccagtccggttgccctccatccaggccattccctgtgcaccgtagcagggcccctgggcccctcttattcctcttggcctttgcatttatttatacagtgccttgctcggcgcccaccaccccctcaagccccagcagccctcaacaggcccagggagggaagtgtgagcgccttggtatgacttaaaattggaaatgtcatctaaccattaagtcatgtgtgaacacataggacgtgtgtaaatatgtacatttgtctttttataaaaagtaaattgtttataaggggtgtggcctttttagagagaaatttaacttgtagatgattttactttttatggaaacactgatggacttattattggcatcccgcctgaacttgactttggggtgaacagggacatgcatctgttataaaatcctttcggacaggcgcggtggctcacacctgtaatcccagcactttgggaggccgagatgggtggatcacctgaggtcaggagtttgagaccagcctggtgaaactccatttctactaaaaatgcaaaaattagctgggcgtggttgcgggtgcttgtaatcccagctactcaggaggctgaggcaagagaatcgcttgaacctgggaggtggaggttgcagtgagccgagaacatgccattgcactccagcccgggcacca

SEQ ID NO: 455274 - DNA, 1485 bp, Homo sapiens
  misc_feature (30)..(30): n is a, c, g, or t
agaacaatgacgtgctgaggttagcgaggnccgcggcgtggtttaaatttcggcgacggaggctgaggccttagtcgaggcaagacgtgcgcccgagccccgccgaagcgaggccacccggagccgtgcccagtccacgccggccgtgcccggcggccttaagaacccggcaacctctgccttcttccctcttccacttggagtcgcgctccgcgcgccctcactgcagcccctgcgtcgccgggaccctcgcgcgcgaccgccgaatcgctcctgcagcagagccaacatgcccatcactcggatgcgcatgagaccctggctagagatgcagattaattccaaccaaatcccggggctcatctggattaataaagaggagatgatcttccagatcccatggaagcatgctgccaagcatggctgggacatcaacaaggatgcctgtttgttccggagctgggccattcacacaggccgatacaaagcaggggaaaaggagccagatcccaagacgtggaaggccaactttcgctgtgccatgaactccctgccagatatcgaggaggtgaaagaccagagcaggaacaagggcagctcagctgtgcgagtgtaccggatgcttccacctctcaccaagaaccagagaaaagaaagaaagtcgaagtccagccgagatgctaagagcaaggccaagaggaagtcatgtggggattccagccctgataccttctctgatggactcagcagctccactctgcctgatgaccacagcagctacacagttccaggctacatgcaggacttggaggtggagcaggccctgactccagcactgtcgccatgtgctgtcagcagcactctccccgactggcacatcccagtggaagttgtgccggacagcaccagtgatctgtacaacttccaggtgtcacccatgccctccacctctgaagctacaacagatgaggatgaggaagggaaattacctgaggacatcatgaaggtaaagccccttcctacctgggcactcttgaagtgaccgtttctcagtgaggagagagaaccagtgaagcttccaaatcagaggatgggtagctgctgttgtcacctggctgcttgcattgtcccacaagtgccacattcacgtggcttgactggtgggaaagccaccatgggaagggaaggcaggtgggaggcctggcctctgacaggccgtcctgaagcaagccttggggcatcagacagctctgtgagtcaggcactatcagcgatgggtccctggcctgcatcctctgccccaacatgccccagccctgctagttcgggaaatgcacatcaggcttcaataatcagcctttaggatccgttaatatgatgatggctttatagaaaaagttagcaaattatcctccaggtttttttttctgcttcagttttgaaagtgaatatagtttttgcagccgggggcagtggctcatgcct

SEQ ID NO: 455275 - DNA, 861 bp, Homo sapiens
aaaaaaaaaaaaaaaaaaaaaaaaaaaaatatatatatatatatatatatatatatatgtctgatcaagtgtagggtggcaccatcacatctgctcaatcatctagaagagtttcctattaagaggaaatgattttcccagtagaattgtaggctctctcttcctgttgacttagcttcatttggaaagtgtcaagaagagaacataaatgcagctcatgtgacctgtgatctcatacttattcctaatctcaatgagacagcacagatgcactgtttattgtgtggcaagtctcttgccaattgaagaacgaaggcagctgctgaagggagggttcctctatctgttttcctaaaacacatctgagtgtttgagtatctttcatgattagaagaattaaatcagaccaaacttcaccaaaatttggatttgctcttgttctctttttctacatcattctttaaggtttttttttgtatttttaggaaaaaaaaagatactcatgtttggctactgcttgggtgaaacattatgccttggaaaccttcctactcttttgtggcttggaagaagaaaattggaaaagtgcttatgtcaaatgatatcatctgctgtataaccactaacatgtcttctaatattttgaagataaatgccttgttagtttgcccttggatttggggctttctaccactatataaacagaaatgaaggttaagttgggctttttgttagcttttcaatgctttggtaggatctttcagtaatgataatggctgccgtttttgtttgttggtttgtttgtttgttttagagatggagtctcgcgcttgttgcccaggctggagtgcagtgttgcaa

SEQ ID NO: 455276 - DNA, 822 bp, Homo sapiens
gggtttcaccatgttggccaggctggtctcgaactcctgacctcaggtgatccacctgccttcgcctcctaaagtgctgggattccaggcatgagccactgtgcccagccaatgtatttacttttaatctttttctatgtttaggtatgtatttgctgtaataaggactggttatactgcttgataacattgtcactcaaacatatatcaagagcaattttatgccatttaagtttttttagcttttcatgttgaatgcatgcgtagaattcccagtgtatttgatcagtcctctgttgattgaaacgtaggatgtttttcccttttatcaataatactggaatgaacatacaaatgaatcagtctttgagcacttccttgaatgtttccttaaaatagattcctaagagtagaattcctgttcagagttttaagcttttattgtattaaattactttctagaaaagaatgtaccagtttatattctcagcagtaatgtgtgagaatatccgtttgcctttccagcactggatgaaaacaaaaattggtctatgtgatagctacttctgaccccctgcccaaggaacagaaaataaatggtatctcagtgttttaatattttttattaggctttctgtgaagaattggaatcaatgatacaggagcaatttaagaaggggaagaaccccacaggcctattggcattacagcagattgcagattttatgaccacgaatgcaatgagagagaaagggagatatgtccaaataaagatagggcaggcgcagtggcttccacctgtaacttccagcactttgggag

SEQ ID NO: 455277 - DNA, 627 bp, Homo sapiens
tgtttgtcttttctccccatgcttgcctttttaaacaactgggagttgtttgtttttctttatattcttccatcttttggtttggaaatgacatactcttaatattcttttagtgattacccttgaaattttgctatgcatatttaacgaagtctaaaactaatattctgtcgccctcctagatacagcaaaggcatgaaagttctttaattccaattattcaactctcaagttacatgctgctgttgttcagtgttttagtccagactttttttttttctttttaaagagacacagtcttgctctgacactcagactggagtgcacaagtttttttcttttcttttttttgagacaggttctcactctgttgcccaggctggagtgcagtggcgcgatcacagctcactgcagccttgacctcctgagctttagtgatcctcccacttcagcccccaagtagctgggactacaggcacatgccgccatgaccagctattttttgtatttttttgttgaaacagggttttgccatgttgtgtaggctagtctcaaactctgggactcgagatctgcatgcctgtagtcccagctactcggaaattatttcacacaagttctttttta

SEQ ID NO: 455278 - DNA, 5734 bp, Homo sapiens
  misc_feature (53)..(53): n is a, c, g, or t
cttccccaactctcgctccctcgtatataccgggttatcctcattaccatggncttctgcttgctgaactaggaactggtcggcttcagacaacgtctgggcctagaagccccgttcttattctccggaaccatgggctcgtgtcagttggagagagcgttgaggaggccttctattacatccataaccttgtggttgcctgtgagatccaggttcgaactctggccagtgcaggaggaccagacaacttagtcctgctgaatcctgagaagtacaaagccaagtcccgttccccagggtctccggtaggggaaggcactggatcgcctcccaagtggcagattggtgagcaggaatttgaagccctcatgcggatgctcgataatctgggctacagaactggctacccttatcgataccctgctctgagagagaagtctaaaaaatacagcgatgtggaggttcctgctagtgtcacaggttactcctttgctagtgacggtgattcgggcacttgctccccactcagacacagttttcagaagcagcagcgggagaagacaagatggctgaactctggccggggcgacgaagcttccgaggaagggcagaatggaagcagtcccaagtcgaagactaaggtgtggacgaacattacacacgatcacgtgaaacccttgctgcagtctctctcgtccggtgtctgcgtgccaagctgtattaccaactgcttggtctgtgcctaccttactgttcatagttagatgacgtagagcaagttgggtagctggggcttcggaggctttgggaatccagcctttctgacccaggtgtaaagcgaaccttccttattcactttcttgtagtctgaacctaagtccactgaatgcattactaaaattcggataatactatctgcttgaaactgcttaagatgtaatgtaactccgcagtagttccagtatatctccgtatatagcaaaaatatacaataatttacatgtattaacctacaaataggagctcttcttatttaattcaaattatattcagggactcttaatacttcatgcacaaaaagacacttcagtcctaaacctgtattttagtgttgtgaactccagtggtttcaagtcactaaagtttcttaagtcttcagtgttttcttaagcagttttcccttgtggctccctggcgtgttctctgctgactcttgtcccctgcccttagtgttattcccctgctttctatcccaaagcctccgaatgcacacccccagctgccctctgcatggactgttgcatgtgagtagacggccatagtggcgagtcaccttctgactcctgttgggtgcggcatgacccaagtgcagcgcaggccatctgcaggcaccagcgacagacgctgcaaggggtgcttcgtttcagcgttaatgccgctcaagttatcgtttgtcctgagaggtgctcccatgtcgtggtgctgagacctcctctgaagatgggtctttattcctcctgtaacctacctctaacagtccacccagctctgctttaaactgtatgtagaagaggcccatttccagaagcccctggaatggaggagacaggggctgaagcagactcatctgtgcatgactagttcattaggagttcagttgaaattagattagatgctcctaaaaccatgggcaaccaaatacataaagtggggctttcttttccccttgtaacagtgttttactttatagatttatttaaagaaaaaaagttttatcttccccaggtggtcctggtgttttcctgacgcagttggtgagaagcctccgtgctcctgagcggccgcgtcacctgggcagggaccctgtgtggccatggggctctgagcatgggagtgcgtctctcctcttctttcctgccctccttgtcttctttccccccttcttcctgtctccccttttctttcatttgtttattttttacttgtttcacttgttaaaggaagtgggcgttataaaacaaaaaaaaaaaaccccaaaacacctttctgcggctgatgtgaagcacagtgctgaattgccatgaggaagttttccaaagcgtttaggcagcagcgcgagctttatttaccattagcttgcaaaacaactaagtcactttaggcctagtagtcaatgtgtacatccaaggggaggccttgctccgcatttatatttgtttcttactgttctggagtgacagagtccatgcagtgctcccaggttggtatcttttcatttataatgattgctgttactttttcaaatgtgttcaagtttctgaggttgctgtttgaaatgctttgactaaaaattatttttaataaaacgctggagttgtttttatctgagaagataaccatcagtgagtacccagagctccatgcccattccacactctcctcgcagtggctcagcatttgctggttttgttgctttttttaaagtcgtatggtttatggctatcttattgcctctcgaaagtattctgaaaggcataacatttgctctcgaagatgggcttgttttaatgttcagtgcctactcatgccttagaatttgattaaaaatctcagatttgattggagatccaaaaaaaaattatgggtggaaggctcagcatgctgacgagatgcactgatactaaaacagcctttaaatattaaggactcatgaagcgcttcaagtttgtttgggatatttttgtagcactcaaaaatattaagttatataaaatattcgacatcaccaaactcttcttccaggtagctaccgtgtaagtgtccatacagtaatgttcttgggttgaaagttacgcagacagtgcattctgatgctgtcatttactttaatgcaaaactttggtgatgcccactcttgcctcacggtgcaggctcctccctaaccctgggtagcagcatcacattgcttttcatgaccctgtcatctcatgcttccagttggctttggtgttggatgattttcagagcagtgaaccaatggtctctgaggggcctcccctgctggtcccagggttatggggctcagctctgtcgtcagcctaccttatgacccagattcagctgggctttccagatggtggttttccatcagtcatgactttgacttccagcattaactggtctttatgtggctgcatcctgctcccatggcgactctgctgagtgacccagattagatgtggtcattggttcagtcctctctgtgatgttcagtgcatgaccagatgtgagataaactgaatagattggatgctatgtcacttattgttgtcataattctgacttttcaactgttcttgatattacagtggactaaagaggatggacatagaacttccacctctgctgtccctaacctgtttgttccattgaacactaacccaaaagaggtccaggagatgaggaacaagatccgagagcagaatttacaggacattaagacggctggccctcagtcccaggttttgtgtggtgtagtgatggacaggagcctcgtccagggagagctggtgacggcctccaaggccatcattgaaaaggagtaccagccccacgtcattgtgagcaccacgggccccaaccccttcaccacactcacagaccgtgagctggaggagtaccgcagggaggtggagaggaagcagaagggctctgaagagaatctggacgaggctagagaacagaaagaaaagagtcctccagaccagcctgcggtcccccacccgcctcccagcactcccatcaagctggaggaagaccttgtgccggagccgactactggagatgacagtgatgctgccacctttaagccaactctccccgatctgtcccctgatgaaccttcagaagcactcggcttcccaatgttagagaaggaggaggaagcccatagacccccaagccccactgaggcccctactgaggccagccccgagccagccccagacccagccccggtggctgaagaggctgccccctcagctgtcgaggagggggccgccgcggaccctggcagcgatgggtctccaggcaagtccccgtccaaaaagaagaagaagttccgtaccccgtcctttctgaagaagagcaagaagaagagtgactcctgaaagccctgcgctaacactgtcctgtccggagcgaccctggctctgccagcgtccccggccacgtctgtgctctgtccttgtgtaatggaatgcaaaaaagccaagccctccgcctagaggtcccctcacgtgaccagccccgtgtagccccgggctgacccagtgtgtgctcagcagccccaccccaccctgccccttgtcctctcagagcctcagcttctgggggagacatgctctccccacaggggggaggcactaagtcatggtcctggctggaaggtactgaaggcttctgcagctttggctgcacgtcaccctcctgagcctcacctttcctgccgtccctcctgttgtgaaatcaccacattctgtctctgcttggcttcccctccaccctaaagtctcaggtgacggactcagactcctggcttcatgtggcattctctctgctcagtgatctcacttaaatctatatacaaagccttggtcccgtgaaaacactcgtgtgcccaccagcggccttgaagaggcaggtctgggccagatgctgggcaggaaaccccagcggcagatgggcctgtgtgcacccaacgtgatgctatgcatgtctgaccgacgatccctcgaccagaatcagattcaggagctcagtttctttttcacttgggtctctggattcctgtcatagggaaggtatatcaggaggggaagaggcctttctagaattttctttgagcaggtttacaatttagcttacatttttcgactgtgaacgtgaataggctgctttttgctttcttctttccagaccccacagtagagcacttttcacttatttgggggaggcttcaggggactgttctcaccttaactcagccagaaagatgccctagttgtgatcaaaggtaactcgaggtggagggtagccctggggcccctcgacatcaccgtcattgatggagcctgaaccgtgtgctcctcggcagatgctgttgttgttacttccctccaagaggctggaaaagggctcagagctgctgagcaggaaccggagggtgacccatttcaggaggtgccggtaccagcctgactaggtacaggcaagcttgtgtgggcccaacaggcccttggtagagctggtgccagatgtgggctcagatcctgggcatgatgggccgagccacctcggatcccactgattggccagccgagcgagaaccaggctgctgcatggcactgaccgccgcttccagcttcctctgagccgcagggcctgctacgcgggcaagcgtgctgcctctcttctgtgtcgttttgttgccaaggcagaatgaaaagtccttaaccgtggactcttcctttatcccctcctttaccccacatatgcaatgacttttaattttcacttttgtagtttaatcctttgtattacaacatgaaatatagttgcatatatggacaccgacttgggaggacaggtcctgaatgtcctttctccagtgtaacatgttttactcacaaataaaattctttcagcaagttccttgtctaaatctgggaaacag

SEQ ID NO: 455279 - DNA, 6595 bp, Homo sapiens
  misc_feature (53)..(53): n is a, c, g, or t
cttccccaactctcgctccctcgtatataccgggttatcctcattaccatggncttctgcttgctgaactaggaactggtcggcttcagacaacgtctgggcctagaagccccgttcttattctccggaaccatgggctcgtgtcagttggagagagcgttgaggaggccttctattacatccataaccttgtggttgcctgtgagatccaggttcgaactctggccagtgcaggaggaccagacaacttagtcctgctgaatcctgagaagtacaaagccaagtcccgttccccagggtctccggtaggggaaggcactggatcgcctcccaagtggcagattggtgagcaggaatttgaagccctcatgcggatgctcgataatctgggctacagaactggctacccttatcgataccctgctctgagagagaagtctaaaaaatacagcgatgtggaggttcctgctagtgtcacaggttactcctttgctagtgacggtgattcgggcacttgctccccactcagacacagttttcagaagcagcagcgggagaagacaagatggctgaactctggccggggcgacgaagcttccgaggaagggcagaatggaagcagtcccaagtcgaagactaaggtgtggacgaacattacacacgatcacgtgaaacccttgctgcagtctctctcgtccggtgtctgcgtgccaagctgtattaccaactgcttggtctgtgcctaccttactgttcatagttagatgacgtagagcaagttgggtagctggggcttcggaggctttgggaatccagcctttctgacccaggtgtaaagcgaaccttccttattcactttcttgtagtctgaacctaagtccactgaatgcattactaaaattcggataatactatctgcttgaaactgcttaagatgtaatgtaactccgcagtagttccagtatatctccgtatatagcaaaaatatacaataatttacatgtattaacctacaaataggagctcttcttatttaattcaaattatattcagggactcttaatacttcatgcacaaaaagacacttcagtcctaaacctgtattttagtgttgtgaactccagtggtttcaagtcactaaagtttcttaagtcttcagtgttttcttaagcagttttcccttgtggctccctggcgtgttctctgctgactcttgtcccctgcccttagtgttattcccctgctttctatcccaaagcctccgaatgcacacccccagctgccctctgcatggactgttgcatgtgagtagacggccatagtggcgagtcaccttctgactcctgttgggtgcggcatgacccaagtgcagcgcaggccatctgcaggcaccagcgacagacgctgcaaggggtgcttcgtttcagcgttaatgccgctcaagttatcgtttgtcctgagaggtgctcccatgtcgtggtgctgagacctcctctgaagatgggtctttattcctcctgtaacctacctctaacagtccacccagctctgctttaaactgtatgtagaagaggcccatttccagaagcccctggaatggaggagacaggggctgaagcagactcatctgtgcatgactagttcattaggagttcagttgaaattagattagatgctcctaaaaccatgggcaaccaaatacataaagtggggctttcttttccccttgtaacagtgttttactttatagatttatttaaagaaaaaaagttttatcttccccaggtggtcctggtgttttcctgacgcagttggtgagaagcctccgtgctcctgagcggccgcgtcacctgggcagggaccctgtgtggccatggggctctgagcatgggagtgcgtctctcctcttctttcctgccctccttgtcttctttccccccttcttcctgtctccccttttctttcatttgtttattttttacttgtttcacttgttaaaggaagtgggcgttataaaacaaaaaaaaaaaaccccaaaacacctttctgcggctgatgtgaagcacagtgctgaattgccatgaggaagttttccaaagcgtttaggcagcagcgcgagctttatttaccattagcttgcaaaacaactaagtcactttaggcctagtagtcaatgtgtacatccaaggggaggccttgctccgcatttatatttgtttcttactgttctggagtgacagagtccatgcagtgctcccaggttggtatcttttcatttataatgattgctgttactttttcaaatgtgttcaagtttctgaggttgctgtttgaaatgctttgactaaaaattatttttaataaaacgctggagttgtttttatctgagaagataaccatcagtgagtacccagagctccatgcccattccacactctcctcgcagtggctcagcatttgctggttttgttgctttttttaaagtcgtatggtttatggctatcttattgcctctcgaaagtattctgaaaggcataacatttgctctcgaagatgggcttgttttaatgttcagtgcctactcatgccttagaatttgattaaaaatctcagatttgattggagatccaaaaaaaaattatgggtggaaggctcagcatgctgacgagatgcactgatactaaaacagcctttaaatattaaggactcatgaagcgcttcaagtttgtttgggatatttttgtagcactcaaaaatattaagttatataaaatattcgacatcaccaaactcttcttccaggtagctaccgtgtaagtgtccatacagtaatgttcttgggttgaaagttacgcagacagtgcattctgatgctgtcatttactttaatgcaaaactttggtgatgcccactcttgcctcacggtgcaggctcctccctaaccctgggtagcagcatcacattgcttttcatgaccctgtcatctcatgcttccagttggctttggtgttggatgattttcagagcagtgaaccaatggtctctgaggggcctcccctgctggtcccagggttatggggctcagctctgtcgtcagcctaccttatgacccagattcagctgggctttccagatggtggttttccatcagtcatgactttgacttccagcattaactggtctttatgtggctgcatcctgctcccatggcgactctgctgagtgacccagattagatgtggtcattggttcagtcctctctgtgatgttcagtgcatgaccagatgtgagataaactgaatagattggatgctatgtcacttattgttgtcataattctgacttttcaactgttcttgatattacagtggactaaagaggatggacatagaacttccacctctgctgtccctaacctgtttgttccattgaacactaacccaaaagaggtccaggagatgaggaacaagatccgagagcagaatttacaggacattaagacggctggccctcagtcccaggttttgtgtggtgtagtgatggacaggagcctcgtccaggtgagagcccagagtgtctctgactttagtgggtggtggctgtgtgaccgcctgctccaaagttattctgaaattgagagagtgactttatgaggtaagtattctaggcaaccagttacctttgttaaaaccttcatgatgagaaacggttcaggcacttttcgttgagttctagaaggagcgagcatgctgagggctgtgtccacccctctggtcatgccccttgtaatgcatgcatatgtgagggtggcacatacaccaccagctttggggctcagattcggcccgggttcagcagcgttctgtgtaaggcgctaggagagggtgggtttagggactcttgttctggtacatattgctgtctgcaacaaagtgctgcttgggttgcagaggggtgggtgcctgtaagtgtggtgcacatttacacacatttctacaaaatgactctaccttgtggcacattgaagataattgtgtaagtagttatctctgaaaactaatatgccacctaatgctttaacacctgactctgcaggggtagacgattgttggatttgtccagccgtggtcctggtttcgtgttcagtgtctgcacgtcctgccatcatcactgccacacttactgttgacagctgtccctgctgcatgctcttagccagctccatcctgtgctctcagctgatatttcacaggctgggcctggtgtgctctggtgactcagtttactgtttcaggatgcacctctctctgactgtacggaaactatcgaagggctcgagcttacagagcagacctttagtcccgctaaatctctctcttttagaaagggagagctggtgacggcctccaaggccatcattgaaaaggagtaccagccccacgtcattgtgagcaccacgggccccaaccccttcaccacactcacagaccgtgagctggaggagtaccgcagggaggtggagaggaagcagaagggctctgaagagaatctggacgaggctagagaacagaaagaaaagagtcctccagaccagcctgcggtcccccacccgcctcccagcactcccatcaagctggaggaaggagacggatgcgctagagagtacctgttaccctaaccttgtgccggagccgactactggagatgacagtgatgctgccacctttaagccaactctccccgatctgtcccctgatgaaccttcagaagcactcggcttcccaatgttagagaaggaggaggaagcccatagacccccaagccccactgaggcccctactgaggccagccccgagccagccccagacccagccccggtggctgaagaggctgccccctcagctgtcgaggagggggccgccgcggaccctggcagcgatgggtctccaggcaagtccccgtccaaaaagaagaagaagttccgtaccccgtcctttctgaagaagagcaagaagaagagtgactcctgaaagccctgcgctaacactgtcctgtccggagcgaccctggctctgccagcgtccccggccacgtctgtgctctgtccttgtgtaatggaatgcaaaaaagccaagccctccgcctagaggtcccctcacgtgaccagccccgtgtagccccgggctgacccagtgtgtgctcagcagccccaccccaccctgccccttgtcctctcagagcctcagcttctgggggagacatgctctccccacaggggggaggcactaagtcatggtcctggctggaaggtactgaaggcttctgcagctttggctgcacgtcaccctcctgagcctcacctttcctgccgtccctcctgttgtgaaatcaccacattctgtctctgcttggcttcccctccaccctaaagtctcaggtgacggactcagactcctggcttcatgtggcattctctctgctcagtgatctcacttaaatctatatacaaagccttggtcccgtgaaaacactcgtgtgcccaccagcggccttgaagaggcaggtctgggccagatgctgggcaggaaaccccagcggcagatgggcctgtgtgcacccaacgtgatgctatgcatgtctgaccgacgatccctcgaccagaatcagattcaggagctcagtttctttttcacttgggtctctggattcctgtcatagggaaggtatatcaggaggggaagaggcctttctagaattttctttgagcaggtttacaatttagcttacatttttcgactgtgaacgtgaataggctgctttttgctttcttctttccagaccccacagtagagcacttttcacttatttgggggaggcttcaggggactgttctcaccttaactcagccagaaagatgccctagttgtgatcaaaggtaactcgaggtggagggtagccctggggcccctcgacatcaccgtcattgatggagcctgaaccgtgtgctcctcggcagatgctgttgttgttacttccctccaagaggctggaaaagggctcagagctgctgagcaggaaccggagggtgacccatttcaggaggtgccggtaccagcctgactaggtacaggcaagcttgtgtgggcccaacaggcccttggtagagctggtgccagatgtgggctcagatcctgggcatgatgggccgagccacctcggatcccactgattggccagccgagcgagaaccaggctgctgcatggcactgaccgccgcttccagcttcctctgagccgcagggcctgctacgcgggcaagcgtgctgcctctcttctgtgtcgttttgttgccaaggcagaatgaaaagtccttaaccgtggactcttcctttatcccctcctttaccccacatatgcaatgacttttaattttcacttttgtagtttaatcctttgtattacaacatgaaatatagttgcatatatggacaccgacttgggaggacaggtcctgaatgtcctttctccagtgtaacatgttttactcacaaataaaattctttcagcaagttccttgtctaaatctgggaaacag

SEQ ID NO: 455280 - DNA, 7791 bp, Homo sapiens
  misc_feature (53)..(53): n is a, c, g, or t
cttccccaactctcgctccctcgtatataccgggttatcctcattaccatggncttctgcttgctgaactaggaactggtcggcttcagacaacgtctgggcctagaagccccgttcttattctccggaaccatgggctcgtgtcagttggagagagcgttgaggaggccttctattacatccataaccttgtggttgcctgtgagatccaggttcgaactctggccagtgcaggaggaccagacaacttagtcctgctgaatcctgagaagtacaaagccaagtcccgttccccagggtctccggtaggggaaggcactggatcgcctcccaagtggcagattggtgagcaggaatttgaagccctcatgcggatgctcgataatctgggctacagaactggctacccttatcgataccctgctctgagagagaagtctaaaaaatacagcgatgtggaggttcctgctagtgtcacaggttactcctttgctagtgacggtgattcgggcacttgctccccactcagacacagttttcagaagcagcagcgggagaagacaagatggctgaactctggccggggcgacgaagcttccgaggaagggcagaatggaagcagtcccaagtcgaagactaaggtgtggacgaacattacacacgatcacgtgaaacccttgctgcagtctctctcgtccggtgtctgcgtgccaagctgtattaccaactgcttggtctgtgcctaccttactgttcatagttagatgacgtagagcaagttgggtagctggggcttcggaggctttgggaatccagcctttctgacccaggtgtaaagcgaaccttccttattcactttcttgtagtctgaacctaagtccactgaatgcattactaaaattcggataatactatctgcttgaaactgcttaagatgtaatgtaactccgcagtagttccagtatatctccgtatatagcaaaaatatacaataatttacatgtattaacctacaaataggagctcttcttatttaattcaaattatattcagggactcttaatacttcatgcacaaaaagacacttcagtcctaaacctgtattttagtgttgtgaactccagtggtttcaagtcactaaagtttcttaagtcttcagtgttttcttaagcagttttcccttgtggctccctggcgtgttctctgctgactcttgtcccctgcccttagtgttattcccctgctttctatcccaaagcctccgaatgcacacccccagctgccctctgcatggactgttgcatgtgagtagacggccatagtggcgagtcaccttctgactcctgttgggtgcggcatgacccaagtgcagcgcaggccatctgcaggcaccagcgacagacgctgcaaggggtgcttcgtttcagcgttaatgccgctcaagttatcgtttgtcctgagaggtgctcccatgtcgtggtgctgagacctcctctgaagatgggtctttattcctcctgtaacctacctctaacagtccacccagctctgctttaaactgtatgtagaagaggcccatttccagaagcccctggaatggaggagacaggggctgaagcagactcatctgtgcatgactagttcattaggagttcagttgaaattagattagatgctcctaaaaccatgggcaaccaaatacataaagtggggctttcttttccccttgtaacagtgttttactttatagatttatttaaagaaaaaaagttttatcttccccaggtggtcctggtgttttcctgacgcagttggtgagaagcctccgtgctcctgagcggccgcgtcacctgggcagggaccctgtgtggccatggggctctgagcatgggagtgcgtctctcctcttctttcctgccctccttgtcttctttccccccttcttcctgtctccccttttctttcatttgtttattttttacttgtttcacttgttaaaggaagtgggcgttataaaacaaaaaaaaaaaaccccaaaacacctttctgcggctgatgtgaagcacagtgctgaattgccatgaggaagttttccaaagcgtttaggcagcagcgcgagctttatttaccattagcttgcaaaacaactaagtcactttaggcctagtagtcaatgtgtacatccaaggggaggccttgctccgcatttatatttgtttcttactgttctggagtgacagagtccatgcagtgctcccaggttggtatcttttcatttataatgattgctgttactttttcaaatgtgttcaagtttctgaggttgctgtttgaaatgctttgactaaaaattatttttaataaaacgctggagttgtttttatctgagaagataaccatcagtgagtacccagagctccatgcccattccacactctcctcgcagtggctcagcatttgctggttttgttgctttttttaaagtcgtatggtttatggctatcttattgcctctcgaaagtattctgaaaggcataacatttgctctcgaagatgggcttgttttaatgttcagtgcctactcatgccttagaatttgattaaaaatctcagatttgattggagatccaaaaaaaaattatgggtggaaggctcagcatgctgacgagatgcactgatactaaaacagcctttaaatattaaggactcatgaagcgcttcaagtttgtttgggatatttttgtagcactcaaaaatattaagttatataaaatattcgacatcaccaaactcttcttccaggtagctaccgtgtaagtgtccatacagtaatgttcttgggttgaaagttacgcagacagtgcattctgatgctgtcatttactttaatgcaaaactttggtgatgcccactcttgcctcacggtgcaggctcctccctaaccctgggtagcagcatcacattgcttttcatgaccctgtcatctcatgcttccagttggctttggtgttggatgattttcagagcagtgaaccaatggtctctgaggggcctcccctgctggtcccagggttatggggctcagctctgtcgtcagcctaccttatgacccagattcagctgggctttccagatggtggttttccatcagtcatgactttgacttccagcattaactggtctttatgtggctgcatcctgctcccatggcgactctgctgagtgacccagattagatgtggtcattggttcagtcctctctgtgatgttcagtgcatgaccagatgtgagataaactgaatagattggatgctatgtcacttattgttgtcataattctgacttttcaactgttcttgatattacagtggactaaagaggatggacatagaacttccacctctgctgtccctaacctgtttgttccattgaacactaacccaaaagaggtccaggagatgaggaacaagatccgagagcagaatttacaggacattaagacggctggccctcagtcccaggttttgtgtggtgtagtgatggacaggagcctcgtccagggagagctggtgacggcctccaaggccatcattgaaaaggagtaccagccccacgtcattgtgagcaccacgggccccaaccccttcaccacactcacagaccgtgagctggaggagtaccgcagggaggtggagaggaagcagaagggctctgaagagaatctggacgaggctagagaacagaaagaaaagagtcctccagaccagcctgcggtcccccacccgcctcccagcactcccatcaagctggaggaaggtgagctctgggtggcagcggccgccactgtgggagggtgcacggctcgtgcgcgctgtggcggaatgtggcgggagtcgtgttaacagcaacacggaagtgtgtgcttgcatcagcgccaggacgtgacacctttctcctcctatattgcttctgtcctgggtaactccaggcaaaacagatttgtatgtgagctgtgaccaggtaggaaggccggcctcgggggtcggaacccaccatggttgctggtgtccacgttgcccattgctcgcacactcctcgtgctgtgttgtcatgcagatgccaccttcggaggtgccctccgctgtgtgagccacacgccggctgcctctcagccaccgtgtgtctgtggtgtgtgatcccgggtgtctgtccctcggtctcgtacatccatgtctctcgtgaagcccgtggccctgcctttcttcttctgtaacctgatggctgtgactgaatgcatagattctctccttgtgcttttttctccctgtggctgcgtcacaagcaggagacggatgcgctagagagtacctgttaccctagtaagtaccgcgctgcctccgctctccaccggtgccctgcgctttgcctcattctcctgcttctttgttgtttattaagttttgttttctgtttatttaaaataaaaacagaagccccccttttttgtacccagtcccttggaggccttcctggaagtggttcagtcacctgagtgctgtgctgccttcagcggcagcgggtacctccacgcacctaggtgccatggagcactctgggcctcaggagttcctacctccagcctttgagggtctctttggattgcttggtgggagggttttgccacactggatcagatgtaagtgcagcctcggttcagacagggtggggttctgccacctgccgtgtggggtcagattgccttggacctttgctgaagctggtccaaaggaggtgggcagaggagcggatattggaccctcgtaaagcagtgtgatgttcactcagatgatggcagctctccagagcgagtgccctggggcagcctccgtcctagcatcagccacaccatgcccagcagagcgggccccatctcctcagggggagcggcgcctgtgtgcccatagccctttcccggttctcatgaagcgtggcctggaatcagcctggggcagctggcagggtgggggtgcttccagcttcccaaaggtaaagcactgagagtttggggcctgggcctcctgtgctgctcctaaccactcagctgactcccctggccctgatgtgtggcttgatttttaaacactaaacagcttgtggtgcctaacctgtcagttgctggtaactttgtaggccgtttacgaatggacagagcgggtgcccgggtaagtgcaaggaaggcgcccccaggctgtgtcctcagggccgctgtgctccttcacagatggccactcctgatgctgggtggagtttttgcccccactccttgccttacaggccatctctttccttttaattaacttccagcctaaacggctttgttcttttggatgttgacgtcacacaacgtgctgtgggagttatgcacgattttctactggctgttttgggggagaccaggtgttgtagacccaaatttagacttaatttcagtactactagtacatgcccttagggtgacagggcagacttctcgtcacataatgaaagcgggacgtcgctcctttagtcgtcctcagcttgtgctgcagtctgtctttccggcggggggaccaggcctgggacggagctggtgttgtcagcacactgcccaccagaaggagctaaaaactaccccgagactgagtctgtattttatgatattagctccatccagccgtacagtagagtagaccatattttaagtttcttgtcttggtaaaaatctgtagagtaaaataaaatggcagtttcgtgtgtggggctcccccatctcaagctgccctttgagatctgggcaggaacccttaatcccatctctcacctcacccactagaaccttgtgccggagccgactactggagatgacagtgatgctgccacctttaagccaactctccccgatctgtcccctgatgaaccttcagaagcactcggcttcccaatgttagagaaggaggaggaagcccatagacccccaagccccactgaggcccctactgaggccagccccgagccagccccagacccagccccggtggctgaagaggctgccccctcagctgtcgaggagggggccgccgcggaccctggcagcgatgggtctccaggcaagtccccgtccaaaaagaagaagaagttccgtaccccgtcctttctgaagaagagcaagaagaagagtgactcctgaaagccctgcgctaacactgtcctgtccggagcgaccctggctctgccagcgtccccggccacgtctgtgctctgtccttgtgtaatggaatgcaaaaaagccaagccctccgcctagaggtcccctcacgtgaccagccccgtgtagccccgggctgacccagtgtgtgctcagcagccccaccccaccctgccccttgtcctctcagagcctcagcttctgggggagacatgctctccccacaggggggaggcactaagtcatggtcctggctggaaggtactgaaggcttctgcagctttggctgcacgtcaccctcctgagcctcacctttcctgccgtccctcctgttgtgaaatcaccacattctgtctctgcttggcttcccctccaccctaaagtctcaggtgacggactcagactcctggcttcatgtggcattctctctgctcagtgatctcacttaaatctatatacaaagccttggtcccgtgaaaacactcgtgtgcccaccagcggccttgaagaggcaggtctgggccagatgctgggcaggaaaccccagcggcagatgggcctgtgtgcacccaacgtgatgctatgcatgtctgaccgacgatccctcgaccagaatcagattcaggagctcagtttctttttcacttgggtctctggattcctgtcatagggaaggtatatcaggaggggaagaggcctttctagaattttctttgagcaggtttacaatttagcttacatttttcgactgtgaacgtgaataggctgctttttgctttcttctttccagaccccacagtagagcacttttcacttatttgggggaggcttcaggggactgttctcaccttaactcagccagaaagatgccctagttgtgatcaaaggtaactcgaggtggagggtagccctggggcccctcgacatcaccgtcattgatggagcctgaaccgtgtgctcctcggcagatgctgttgttgttacttccctccaagaggctggaaaagggctcagagctgctgagcaggaaccggagggtgacccatttcaggaggtgccggtaccagcctgactaggtacaggcaagcttgtgtgggcccaacaggcccttggtagagctggtgccagatgtgggctcagatcctgggcatgatgggccgagccacctcggatcccactgattggccagccgagcgagaaccaggctgctgcatggcactgaccgccgcttccagcttcctctgagccgcagggcctgctacgcgggcaagcgtgctgcctctcttctgtgtcgttttgttgccaaggcagaatgaaaagtccttaaccgtggactcttcctttatcccctcctttaccccacatatgcaatgacttttaattttcacttttgtagtttaatcctttgtattacaacatgaaatatagttgcatatatggacaccgacttgggaggacaggtcctgaatgtcctttctccagtgtaacatgttttactcacaaataaaattctttcagcaagttccttgtctaaatctgggaaacag

SEQ ID NO: 455281 - DNA, 5768 bp, Homo sapiens
  misc_feature (53)..(53): n is a, c, g, or t
cttccccaactctcgctccctcgtatataccgggttatcctcattaccatggncttctgcttgctgaactaggaactggtcggcttcagacaacgtctgggcctagaagccccgttcttattctccggaaccatgggctcgtgtcagttggagagagcgttgaggaggccttctattacatccataaccttgtggttgcctgtgagatccaggttcgaactctggccagtgcaggaggaccagacaacttagtcctgctgaatcctgagaagtacaaagccaagtcccgttccccagggtctccggtaggggaaggcactggatcgcctcccaagtggcagattggtgagcaggaatttgaagccctcatgcggatgctcgataatctgggctacagaactggctacccttatcgataccctgctctgagagagaagtctaaaaaatacagcgatgtggaggttcctgctagtgtcacaggttactcctttgctagtgacggtgattcgggcacttgctccccactcagacacagttttcagaagcagcagcgggagaagacaagatggctgaactctggccggggcgacgaagcttccgaggaagggcagaatggaagcagtcccaagtcgaagactaaggtgtggacgaacattacacacgatcacgtgaaacccttgctgcagtctctctcgtccggtgtctgcgtgccaagctgtattaccaactgcttggtctgtgcctaccttactgttcatagttagatgacgtagagcaagttgggtagctggggcttcggaggctttgggaatccagcctttctgacccaggtgtaaagcgaaccttccttattcactttcttgtagtctgaacctaagtccactgaatgcattactaaaattcggataatactatctgcttgaaactgcttaagatgtaatgtaactccgcagtagttccagtatatctccgtatatagcaaaaatatacaataatttacatgtattaacctacaaataggagctcttcttatttaattcaaattatattcagggactcttaatacttcatgcacaaaaagacacttcagtcctaaacctgtattttagtgttgtgaactccagtggtttcaagtcactaaagtttcttaagtcttcagtgttttcttaagcagttttcccttgtggctccctggcgtgttctctgctgactcttgtcccctgcccttagtgttattcccctgctttctatcccaaagcctccgaatgcacacccccagctgccctctgcatggactgttgcatgtgagtagacggccatagtggcgagtcaccttctgactcctgttgggtgcggcatgacccaagtgcagcgcaggccatctgcaggcaccagcgacagacgctgcaaggggtgcttcgtttcagcgttaatgccgctcaagttatcgtttgtcctgagaggtgctcccatgtcgtggtgctgagacctcctctgaagatgggtctttattcctcctgtaacctacctctaacagtccacccagctctgctttaaactgtatgtagaagaggcccatttccagaagcccctggaatggaggagacaggggctgaagcagactcatctgtgcatgactagttcattaggagttcagttgaaattagattagatgctcctaaaaccatgggcaaccaaatacataaagtggggctttcttttccccttgtaacagtgttttactttatagatttatttaaagaaaaaaagttttatcttccccaggtggtcctggtgttttcctgacgcagttggtgagaagcctccgtgctcctgagcggccgcgtcacctgggcagggaccctgtgtggccatggggctctgagcatgggagtgcgtctctcctcttctttcctgccctccttgtcttctttccccccttcttcctgtctccccttttctttcatttgtttattttttacttgtttcacttgttaaaggaagtgggcgttataaaacaaaaaaaaaaaaccccaaaacacctttctgcggctgatgtgaagcacagtgctgaattgccatgaggaagttttccaaagcgtttaggcagcagcgcgagctttatttaccattagcttgcaaaacaactaagtcactttaggcctagtagtcaatgtgtacatccaaggggaggccttgctccgcatttatatttgtttcttactgttctggagtgacagagtccatgcagtgctcccaggttggtatcttttcatttataatgattgctgttactttttcaaatgtgttcaagtttctgaggttgctgtttgaaatgctttgactaaaaattatttttaataaaacgctggagttgtttttatctgagaagataaccatcagtgagtacccagagctccatgcccattccacactctcctcgcagtggctcagcatttgctggttttgttgctttttttaaagtcgtatggtttatggctatcttattgcctctcgaaagtattctgaaaggcataacatttgctctcgaagatgggcttgttttaatgttcagtgcctactcatgccttagaatttgattaaaaatctcagatttgattggagatccaaaaaaaaattatgggtggaaggctcagcatgctgacgagatgcactgatactaaaacagcctttaaatattaaggactcatgaagcgcttcaagtttgtttgggatatttttgtagcactcaaaaatattaagttatataaaatattcgacatcaccaaactcttcttccaggtagctaccgtgtaagtgtccatacagtaatgttcttgggttgaaagttacgcagacagtgcattctgatgctgtcatttactttaatgcaaaactttggtgatgcccactcttgcctcacggtgcaggctcctccctaaccctgggtagcagcatcacattgcttttcatgaccctgtcatctcatgcttccagttggctttggtgttggatgattttcagagcagtgaaccaatggtctctgaggggcctcccctgctggtcccagggttatggggctcagctctgtcgtcagcctaccttatgacccagattcagctgggctttccagatggtggttttccatcagtcatgactttgacttccagcattaactggtctttatgtggctgcatcctgctcccatggcgactctgctgagtgacccagattagatgtggtcattggttcagtcctctctgtgatgttcagtgcatgaccagatgtgagataaactgaatagattggatgctatgtcacttattgttgtcataattctgacttttcaactgttcttgatattacagtggactaaagaggatggacatagaacttccacctctgctgtccctaacctgtttgttccattgaacactaacccaaaagaggtccaggagatgaggaacaagatccgagagcagaatttacaggacattaagacggctggccctcagtcccaggttttgtgtggtgtagtgatggacaggagcctcgtccagggagagctggtgacggcctccaaggccatcattgaaaaggagtaccagccccacgtcattgtgagcaccacgggccccaaccccttcaccacactcacagaccgtgagctggaggagtaccgcagggaggtggagaggaagcagaagggctctgaagagaatctggacgaggctagagaacagaaagaaaagagtcctccagaccagcctgcggtcccccacccgcctcccagcactcccatcaagctggaggaaggagacggatgcgctagagagtacctgttaccctaaccttgtgccggagccgactactggagatgacagtgatgctgccacctttaagccaactctccccgatctgtcccctgatgaaccttcagaagcactcggcttcccaatgttagagaaggaggaggaagcccatagacccccaagccccactgaggcccctactgaggccagccccgagccagccccagacccagccccggtggctgaagaggctgccccctcagctgtcgaggagggggccgccgcggaccctggcagcgatgggtctccaggcaagtccccgtccaaaaagaagaagaagttccgtaccccgtcctttctgaagaagagcaagaagaagagtgactcctgaaagccctgcgctaacactgtcctgtccggagcgaccctggctctgccagcgtccccggccacgtctgtgctctgtccttgtgtaatggaatgcaaaaaagccaagccctccgcctagaggtcccctcacgtgaccagccccgtgtagccccgggctgacccagtgtgtgctcagcagccccaccccaccctgccccttgtcctctcagagcctcagcttctgggggagacatgctctccccacaggggggaggcactaagtcatggtcctggctggaaggtactgaaggcttctgcagctttggctgcacgtcaccctcctgagcctcacctttcctgccgtccctcctgttgtgaaatcaccacattctgtctctgcttggcttcccctccaccctaaagtctcaggtgacggactcagactcctggcttcatgtggcattctctctgctcagtgatctcacttaaatctatatacaaagccttggtcccgtgaaaacactcgtgtgcccaccagcggccttgaagaggcaggtctgggccagatgctgggcaggaaaccccagcggcagatgggcctgtgtgcacccaacgtgatgctatgcatgtctgaccgacgatccctcgaccagaatcagattcaggagctcagtttctttttcacttgggtctctggattcctgtcatagggaaggtatatcaggaggggaagaggcctttctagaattttctttgagcaggtttacaatttagcttacatttttcgactgtgaacgtgaataggctgctttttgctttcttctttccagaccccacagtagagcacttttcacttatttgggggaggcttcaggggactgttctcaccttaactcagccagaaagatgccctagttgtgatcaaaggtaactcgaggtggagggtagccctggggcccctcgacatcaccgtcattgatggagcctgaaccgtgtgctcctcggcagatgctgttgttgttacttccctccaagaggctggaaaagggctcagagctgctgagcaggaaccggagggtgacccatttcaggaggtgccggtaccagcctgactaggtacaggcaagcttgtgtgggcccaacaggcccttggtagagctggtgccagatgtgggctcagatcctgggcatgatgggccgagccacctcggatcccactgattggccagccgagcgagaaccaggctgctgcatggcactgaccgccgcttccagcttcctctgagccgcagggcctgctacgcgggcaagcgtgctgcctctcttctgtgtcgttttgttgccaaggcagaatgaaaagtccttaaccgtggactcttcctttatcccctcctttaccccacatatgcaatgacttttaattttcacttttgtagtttaatcctttgtattacaacatgaaatatagttgcatatatggacaccgacttgggaggacaggtcctgaatgtcctttctccagtgtaacatgttttactcacaaataaaattctttcagcaagttccttgtctaaatctgggaaacag

SEQ ID NO: 455282 - DNA, 5984 bp, Homo sapiens
  misc_feature (53)..(53): n is a, c, g, or t
cttccccaactctcgctccctcgtatataccgggttatcctcattaccatggncttctgcttgctgaactaggaactggtcggcttcagacaacgtctgggcctagaagccccgttcttattctccggaaccatgggctcgtgtcagttggagagagcgttgaggaggccttctattacatccataaccttgtggttgcctgtgagatccaggttcgaactctggccagtgcaggaggaccagacaacttagtcctgctgaatcctgagaagtacaaagccaagtcccgttccccagggtctccggtaggggaaggcactggatcgcctcccaagtggcagattggtgagcaggaatttgaagccctcatgcggatgctcgataatctgggctacagaactggctacccttatcgataccctgctctgagagagaagtctaaaaaatacagcgatgtggaggttcctgctagtgtcacaggttactcctttgctagtgacggtgattcgggcacttgctccccactcagacacagttttcagaagcagcagcgggagaagacaagatggctgaactctggccggggcgacgaagcttccgaggaagggcagaatggaagcagtcccaagtcgaagactaaggtgtggacgaacattacacacgatcacgtgaaacccttgctgcagtctctctcgtccggtgtctgcgtgccaagctgtattaccaactgcttgtggactaaagaggatggacatagaacttccacctctgctgtccctaacctgtttgttccattgaacactaacccaaaagaggtccaggagatgaggaacaagatccgagagcagaatttacaggacattaagacggctggccctcagtcccaggttttgtgtggtgtagtgatggacaggagcctcgtccaggtgagagcccagagtgtctctgactttagtgggtggtggctgtgtgaccgcctgctccaaagttattctgaaattgagagagtgactttatgaggtaagtattctaggcaaccagttacctttgttaaaaccttcatgatgagaaacggttcaggcacttttcgttgagttctagaaggagcgagcatgctgagggctgtgtccacccctctggtcatgccccttgtaatgcatgcatatgtgagggtggcacatacaccaccagctttggggctcagattcggcccgggttcagcagcgttctgtgtaaggcgctaggagagggtgggtttagggactcttgttctggtacatattgctgtctgcaacaaagtgctgcttgggttgcagaggggtgggtgcctgtaagtgtggtgcacatttacacacatttctacaaaatgactctaccttgtggcacattgaagataattgtgtaagtagttatctctgaaaactaatatgccacctaatgctttaacacctgactctgcaggggtagacgattgttggatttgtccagccgtggtcctggtttcgtgttcagtgtctgcacgtcctgccatcatcactgccacacttactgttgacagctgtccctgctgcatgctcttagccagctccatcctgtgctctcagctgatatttcacaggctgggcctggtgtgctctggtgactcagtttactgtttcaggatgcacctctctctgactgtacggaaactatcgaagggctcgagcttacagagcagacctttagtcccgctaaatctctctcttttagaaagggagagctggtgacggcctccaaggccatcattgaaaaggagtaccagccccacgtcattgtgagcaccacgggccccaaccccttcaccacactcacagaccgtgagctggaggagtaccgcagggaggtggagaggaagcagaagggctctgaagagaatctggacgaggctagagaacagaaagaaaagagtcctccagaccagcctgcggtcccccacccgcctcccagcactcccatcaagctggaggaaggtgagctctgggtggcagcggccgccactgtgggagggtgcacggctcgtgcgcgctgtggcggaatgtggcgggagtcgtgttaacagcaacacggaagtgtgtgcttgcatcagcgccaggacgtgacacctttctcctcctatattgcttctgtcctgggtaactccaggcaaaacagatttgtatgtgagctgtgaccaggtaggaaggccggcctcgggggtcggaacccaccatggttgctggtgtccacgttgcccattgctcgcacactcctcgtgctgtgttgtcatgcagatgccaccttcggaggtgccctccgctgtgtgagccacacgccggctgcctctcagccaccgtgtgtctgtggtgtgtgatcccgggtgtctgtccctcggtctcgtacatccatgtctctcgtgaagcccgtggccctgcctttcttcttctgtaacctgatggctgtgactgaatgcatagattctctccttgtgcttttttctccctgtggctgcgtcacaagcaggagacggatgcgctagagagtacctgttaccctagtaagtaccgcgctgcctccgctctccaccggtgccctgcgctttgcctcattctcctgcttctttgttgtttattaagttttgttttctgtttatttaaaataaaaacagaagccccccttttttgtacccagtcccttggaggccttcctggaagtggttcagtcacctgagtgctgtgctgccttcagcggcagcgggtacctccacgcacctaggtgccatggagcactctgggcctcaggagttcctacctccagcctttgagggtctctttggattgcttggtgggagggttttgccacactggatcagatgtaagtgcagcctcggttcagacagggtggggttctgccacctgccgtgtggggtcagattgccttggacctttgctgaagctggtccaaaggaggtgggcagaggagcggatattggaccctcgtaaagcagtgtgatgttcactcagatgatggcagctctccagagcgagtgccctggggcagcctccgtcctagcatcagccacaccatgcccagcagagcgggccccatctcctcagggggagcggcgcctgtgtgcccatagccctttcccggttctcatgaagcgtggcctggaatcagcctggggcagctggcagggtgggggtgcttccagcttcccaaaggtaaagcactgagagtttggggcctgggcctcctgtgctgctcctaaccactcagctgactcccctggccctgatgtgtggcttgatttttaaacactaaacagcttgtggtgcctaacctgtcagttgctggtaactttgtaggccgtttacgaatggacagagcgggtgcccgggtaagtgcaaggaaggcgcccccaggctgtgtcctcagggccgctgtgctccttcacagatggccactcctgatgctgggtggagtttttgcccccactccttgccttacaggccatctctttccttttaattaacttccagcctaaacggctttgttcttttggatgttgacgtcacacaacgtgctgtgggagttatgcacgattttctactggctgttttgggggagaccaggtgttgtagacccaaatttagacttaatttcagtactactagtacatgcccttagggtgacagggcagacttctcgtcacataatgaaagcgggacgtcgctcctttagtcgtcctcagcttgtgctgcagtctgtctttccggcggggggaccaggcctgggacggagctggtgttgtcagcacactgcccaccagaaggagctaaaaactaccccgagactgagtctgtattttatgatattagctccatccagccgtacagtagagtagaccatattttaagtttcttgtcttggtaaaaatctgtagagtaaaataaaatggcagtttcgtgtgtggggctcccccatctcaagctgccctttgagatctgggcaggaacccttaatcccatctctcacctcacccactagaaccttgtgccggagccgactactggagatgacagtgatgctgccacctttaagccaactctccccgatctgtcccctgatgaaccttcagaagcactcggcttcccaatgttagagaaggaggaggaagcccatagacccccaagccccactgaggcccctactgaggccagccccgagccagccccagacccagccccggtggctgaagaggctgccccctcagctgtcgaggagggggccgccgcggaccctggcagcgatgggtctccaggcaagtccccgtccaaaaagaagaagaagttccgtaccccgtcctttctgaagaagagcaagaagaagagtgactcctgaaagccctgcgctaacactgtcctgtccggagcgaccctggctctgccagcgtccccggccacgtctgtgctctgtccttgtgtaatggaatgcaaaaaagccaagccctccgcctagaggtcccctcacgtgaccagccccgtgtagccccgggctgacccagtgtgtgctcagcagccccaccccaccctgccccttgtcctctcagagcctcagcttctgggggagacatgctctccccacaggggggaggcactaagtcatggtcctggctggaaggtactgaaggcttctgcagctttggctgcacgtcaccctcctgagcctcacctttcctgccgtccctcctgttgtgaaatcaccacattctgtctctgcttggcttcccctccaccctaaagtctcaggtgacggactcagactcctggcttcatgtggcattctctctgctcagtgatctcacttaaatctatatacaaagccttggtcccgtgaaaacactcgtgtgcccaccagcggccttgaagaggcaggtctgggccagatgctgggcaggaaaccccagcggcagatgggcctgtgtgcacccaacgtgatgctatgcatgtctgaccgacgatccctcgaccagaatcagattcaggagctcagtttctttttcacttgggtctctggattcctgtcatagggaaggtatatcaggaggggaagaggcctttctagaattttctttgagcaggtttacaatttagcttacatttttcgactgtgaacgtgaataggctgctttttgctttcttctttccagaccccacagtagagcacttttcacttatttgggggaggcttcaggggactgttctcaccttaactcagccagaaagatgccctagttgtgatcaaaggtaactcgaggtggagggtagccctggggcccctcgacatcaccgtcattgatggagcctgaaccgtgtgctcctcggcagatgctgttgttgttacttccctccaagaggctggaaaagggctcagagctgctgagcaggaaccggagggtgacccatttcaggaggtgccggtaccagcctgactaggtacaggcaagcttgtgtgggcccaacaggcccttggtagagctggtgccagatgtgggctcagatcctgggcatgatgggccgagccacctcggatcccactgattggccagccgagcgagaaccaggctgctgcatggcactgaccgccgcttccagcttcctctgagccgcagggcctgctacgcgggcaagcgtgctgcctctcttctgtgtcgttttgttgccaaggcagaatgaaaagtccttaaccgtggactcttcctttatcccctcctttaccccacatatgcaatgacttttaattttcacttttgtagtttaatcctttgtattacaacatgaaatatagttgcatatatggacaccgacttgggaggacaggtcctgaatgtcctttctccagtgtaacatgttttactcacaaataaaattctttcagcaagttccttgtctaaatctgggaaacag

SEQ ID NO: 455283 - DNA, 5959 bp, Homo sapiens
  misc_feature (53)..(53): n is a, c, g, or t
cttccccaactctcgctccctcgtatataccgggttatcctcattaccatggncttctgcttgctgaactaggaactggtcggcttcagacaacgtctgggcctagaagccccgttcttattctccggaaccatgggctcgtgtcagttggagagagcgttgaggaggccttctattacatccataaccttgtggttgcctgtgagatccaggttcgaactctggccagtgcaggaggaccagacaacttagtcctgctgaatcctgagaagtacaaagccaagtcccgttccccagggtctccggtaggggaaggcactggatcgcctcccaagtggcagattggtgagcaggaatttgaagccctcatgcggatgctcgataatctgggctacagaactggctacccttatcgataccctgctctgagagagaagtctaaaaaatacagcgatgtggaggttcctgctagtgtcacaggttactcctttgctagtgacggtgattcgggcacttgctccccactcagacacagttttcagaagcagcagcgggagaagacaagatggctgaactctggccggggcgacgaagcttccgaggaagggcagaatggaagcagtcccaagtcgaagactaaggtgtggacgaacattacacacgatcacgtgaaacccttgctgcagtctctctcgtccggtgtctgcgtgccaagctgtattaccaactgcttggtctgtgcctaccttactgttcatagttagatgacgtagagcaagttgggtagctggggcttcggaggctttgggaatccagcctttctgacccaggtgtaaagcgaaccttccttattcactttcttgtagtctgaacctaagtccactgaatgcattactaaaattcggataatactatctgcttgaaactgcttaagatgtaatgtaactccgcagtagttccagtatatctccgtatatagcaaaaatatacaataatttacatgtattaacctacaaataggagctcttcttatttaattcaaattatattcagggactcttaatacttcatgcacaaaaagacacttcagtcctaaacctgtattttagtgttgtgaactccagtggtttcaagtcactaaagtttcttaagtcttcagtgttttcttaagcagttttcccttgtggctccctggcgtgttctctgctgactcttgtcccctgcccttagtgttattcccctgctttctatcccaaagcctccgaatgcacacccccagctgccctctgcatggactgttgcatgtgagtagacggccatagtggcgagtcaccttctgactcctgttgggtgcggcatgacccaagtgcagcgcaggccatctgcaggcaccagcgacagacgctgcaaggggtgcttcgtttcagcgttaatgccgctcaagttatcgtttgtcctgagaggtgctcccatgtcgtggtgctgagacctcctctgaagatgggtctttattcctcctgtaacctacctctaacagtccacccagctctgctttaaactgtatgtagaagaggcccatttccagaagcccctggaatggaggagacaggggctgaagcagactcatctgtgcatgactagttcattaggagttcagttgaaattagattagatgctcctaaaaccatgggcaaccaaatacataaagtggggctttcttttccccttgtaacagtgttttactttatagatttatttaaagaaaaaaagttttatcttccccaggtggtcctggtgttttcctgacgcagttggtgagaagcctccgtgctcctgagcggccgcgtcacctgggcagggaccctgtgtggccatggggctctgagcatgggagtgcgtctctcctcttctttcctgccctccttgtcttctttccccccttcttcctgtctccccttttctttcatttgtttattttttacttgtttcacttgttaaaggaagtgggcgttataaaacaaaaaaaaaaaaccccaaaacacctttctgcggctgatgtgaagcacagtgctgaattgccatgaggaagttttccaaagcgtttaggcagcagcgcgagctttatttaccattagcttgcaaaacaactaagtcactttaggcctagtagtcaatgtgtacatccaaggggaggccttgctccgcatttatatttgtttcttactgttctggagtgacagagtccatgcagtgctcccaggttggtatcttttcatttataatgattgctgttactttttcaaatgtgttcaagtttctgaggttgctgtttgaaatgctttgactaaaaattatttttaataaaacgctggagttgtttttatctgagaagataaccatcagtgagtacccagagctccatgcccattccacactctcctcgcagtggctcagcatttgctggttttgttgctttttttaaagtcgtatggtttatggctatcttattgcctctcgaaagtattctgaaaggcataacatttgctctcgaagatgggcttgttttaatgttcagtgcctactcatgccttagaatttgattaaaaatctcagatttgattggagatccaaaaaaaaattatgggtggaaggctcagcatgctgacgagatgcactgatactaaaacagcctttaaatattaaggactcatgaagcgcttcaagtttgtttgggatatttttgtagcactcaaaaatattaagttatataaaatattcgacatcaccaaactcttcttccaggtagctaccgtgtaagtgtccatacagtaatgttcttgggttgaaagttacgcagacagtgcattctgatgctgtcatttactttaatgcaaaactttggtgatgcccactcttgcctcacggtgcaggctcctccctaaccctgggtagcagcatcacattgcttttcatgaccctgtcatctcatgcttccagttggctttggtgttggatgattttcagagcagtgaaccaatggtctctgaggggcctcccctgctggtcccagggttatggggctcagctctgtcgtcagcctaccttatgacccagattcagctgggctttccagatggtggttttccatcagtcatgactttgacttccagcattaactggtctttatgtggctgcatcctgctcccatggcgactctgctgagtgacccagattagatgtggtcattggttcagtcctctctgtgatgttcagtgcatgaccagatgtgagataaactgaatagattggatgctatgtcacttattgttgtcataattctgacttttcaactgttcttgatattacagtggactaaagaggatggacatagaacttccacctctgctgtccctaacctgtttgttccattgaacactaacccaaaagaggtccaggagatgaggaacaagatccgagagcagaatttacaggacattaagacggctggccctcagtcccaggttttgtgtggtgtagtgatggacaggagcctcgtccaggtgagagcccagagtgtctctgactttagtgggtggtggctgtgtgaccgcctgctccaaagttattctgaaattgagagagtgactttatgaggtaagtattctaggcaaccagttacctttgttaaaaccttcatgatgagaaacggttcaggcacttttcgttgagttctagaaggagcgagcatgctgagggctgtgtccacccctctggtcatgccccttgtaatgcatgcatatgtgagggtggcacatacaccaccagctttggggctcagattcggcccgggttcagcagcgttctgtgtaaggcgctaggagagggtgggtttagggactcttgttctggtacatattgctgtctgcaacaaagtgctgcttgggttgcagaggggtgggtgcctgtaagtgtggtgcacatttacacacatttctacaaaatgactctaccttgtggcacattgaagataattgtgtaagtagttatctctgaaaactaatatgccacctaatgctttaacacctgactctgcaggggtagacgattgttggatttgtccagccgtggtcctggtttcgtgttcagtgtctgcacgtcctgccatcatcactgccacacttactgttgacagctgtccctgctgcatgctcttagccagctccatcctgtgctctcagctgatatttcacaggctgggcctggtgtgctctggtgactcagtttactgtttcaggatgcacctctctctgactgtacggaaactatcgaagggctcgagcttacagagcagacctttagtcccgctaaatctctctcttttagaaagggagagctggtgacggcctccaaggccatcattgaaaaggagtaccagccccacgtcattgtgagcaccacgggccccaaccccttcaccacactcacagaccgtgagctggaggagtaccgcagggaggtggagaggaagcagaagggctctgaagagaatctggacgaggctagagaacagaaagaaaagagtcctccagaccagcctgcggtcccccacccgcctcccagcactcccatcaagctggaggaaggagacggatgcgctagagagtacctgttaccctaaccttgtgccggagccgactactggagatgacagtgatgctgccacctttaagccaactctccccgatctgtcccctgatgaaccttcagaagcactcggttcccctccaccctaaagtctcaggtgacggactcagactcctggcttcatgtggcattctctctgctcagtgatctcacttaaatctatatacaaagccttggtcccgtgaaaacactcgtgtgcccaccagcggccttgaagaggcaggtctgggccagatgctgggcaggaaaccccagcggcagatgggcctgtgtgcacccaacgtgatgctatgcatgtctgaccgacgatccctcgaccagaatcagattcaggagctcagtttctttttcacttgggtctctggattcctgtcatagggaaggtatatcaggaggggaagaggcctttctagaattttctttgagcaggtttacaatttagcttacatttttcgactgtgaacgtgaataggctgctttttgctttcttctttccagaccccacagtagagcacttttcacttatttgggggaggcttcaggggactgttctcaccttaactcagccagaaagatgccctagttgtgatcaaaggtaactcgaggtggagggtagccctggggcccctcgacatcaccgtcattgatggagcctgaaccgtgtgctcctcggcagatgctgttgttgttacttccctccaagaggctggaaaagggctcagagctgctgagcaggaaccggagggtgacccatttcaggaggtgccggtaccagcctgactaggtacaggcaagcttgtgtgggcccaacaggcccttggtagagctggtgccagatgtgggctcagatcctgggcatgatgggccgagccacctcggatcccactgattggccagccgagcgagaaccaggctgctgcatggcactgaccgccgcttccagcttcctctgagccgcagggcctgctacgcgggcaagcgtgctgcctctcttctgtgtcgttttgttgccaaggcagaatgaaaagtccttaaccgtggactcttcctttatcccctcctttaccccacatatgcaatgacttttaattttcacttttgtagtttaatcctttgtattacaacatgaaatatagttgcatatatggacaccgacttgggaggacaggtcctgaatgtcctttctccagtgtaacatgttttactcacaaataaaattctttcagcaagttccttgtctaaatctgggaaacag

SEQ ID NO: 455284 - DNA, 5681 bp, Homo sapiens
  misc_feature (53)..(53): n is a, c, g, or t
cttccccaactctcgctccctcgtatataccgggttatcctcattaccatggncttctgcttgctgaactaggaactggtcggcttcagacaacgtctgggcctagaagccccgttcttattctccggaaccatgggctcgtgtcagttggagagagcgttgaggaggccttctattacatccataaccttgtggttgcctgtgagatccaggttcgaactctggccagtgcaggaggaccagacaacttagtcctgctgaatcctgagaagtacaaagccaagtcccgttccccagggtctccggtaggggaaggcactggatcgcctcccaagtggcagattggtgagcaggaatttgaagccctcatgcggatgctcgataatctgggctacagaactggctacccttatcgataccctgctctgagagagaagtctaaaaaatacagcgatgtggaggttcctgctagtgtcacaggttactcctttgctagtgacggtgattcgggcacttgctccccactcagacacagttttcagaagcagcagcgggagaagacaagatggctgaactctggccggggcgacgaagcttccgaggaagggcagaatggaagcagtcccaagtcgaagactaaggtgtggacgaacattacacacgatcacgtgaaacccttgctgcagtctctctcgtccggtgtctgcgtgccaagctgtattaccaactgcttggtctgtgcctaccttactgttcatagttagatgacgtagagcaagttgggtagctggggcttcggaggctttgggaatccagcctttctgacccaggtgtaaagcgaaccttccttattcactttcttgtagtctgaacctaagtccactgaatgcattactaaaattcggataatactatctgcttgaaactgcttaagatgtaatgtaactccgcagtagttccagtatatctccgtatatagcaaaaatatacaataatttacatgtattaacctacaaataggagctcttcttatttaattcaaattatattcagggactcttaatacttcatgcacaaaaagacacttcagtcctaaacctgtattttagtgttgtgaactccagtggtttcaagtcactaaagtttcttaagtcttcagtgttttcttaagcagttttcccttgtggctccctggcgtgttctctgctgactcttgtcccctgcccttagtgttattcccctgctttctatcccaaagcctccgaatgcacacccccagctgccctctgcatggactgttgcatgtgagtagacggccatagtggcgagtcaccttctgactcctgttgggtgcggcatgacccaagtgcagcgcaggccatctgcaggcaccagcgacagacgctgcaaggggtgcttcgtttcagcgttaatgccgctcaagttatcgtttgtcctgagaggtgctcccatgtcgtggtgctgagacctcctctgaagatgggtctttattcctcctgtaacctacctctaacagtccacccagctctgctttaaactgtatgtagaagaggcccatttccagaagcccctggaatggaggagacaggggctgaagcagactcatctgtgcatgactagttcattaggagttcagttgaaattagattagatgctcctaaaaccatgggcaaccaaatacataaagtggggctttcttttccccttgtaacagtgttttactttatagatttatttaaagaaaaaaagttttatcttccccaggtggtcctggtgttttcctgacgcagttggtgagaagcctccgtgctcctgagcggccgcgtcacctgggcagggaccctgtgtggccatggggctctgagcatgggagtgcgtctctcctcttctttcctgccctccttgtcttctttccccccttcttcctgtctccccttttctttcatttgtttattttttacttgtttcacttgttaaaggaagtgggcgttataaaacaaaaaaaaaaaaccccaaaacacctttctgcggctgatgtgaagcacagtgctgaattgccatgaggaagttttccaaagcgtttaggcagcagcgcgagctttatttaccattagcttgcaaaacaactaagtcactttaggcctagtagtcaatgtgtacatccaaggggaggccttgctccgcatttatatttgtttcttactgttctggagtgacagagtccatgcagtgctcccaggttggtatcttttcatttataatgattgctgttactttttcaaatgtgttcaagtttctgaggttgctgtttgaaatgctttgactaaaaattatttttaataaaacgctggagttgtttttatctgagaagataaccatcagtgagtacccagagctccatgcccattccacactctcctcgcagtggctcagcatttgctggttttgttgctttttttaaagtcgtatggtttatggctatcttattgcctctcgaaagtattctgaaaggcataacatttgctctcgaagatgggcttgttttaatgttcagtgcctactcatgccttagaatttgattaaaaatctcagatttgattggagatccaaaaaaaaattatgggtggaaggctcagcatgctgacgagatgcactgatactaaaacagcctttaaatattaaggactcatgaagcgcttcaagtttgtttgggatatttttgtagcactcaaaaatattaagttatataaaatattcgacatcaccaaactcttcttccaggtagctaccgtgtaagtgtccatacagtaatgttcttgggttgaaagttacgcagacagtgcattctgatgctgtcatttactttaatgcaaaactttggtgatgcccactcttgcctcacggtgcaggctcctccctaaccctgggtagcagcatcacattgcttttcatgaccctgtcatctcatgcttccagttggctttggtgttggatgattttcagagcagtgaaccaatggtctctgaggggcctcccctgctggtcccagggttatggggctcagctctgtcgtcagcctaccttatgacccagattcagctgggctttccagatggtggttttccatcagtcatgactttgacttccagcattaactggtctttatgtggctgcatcctgctcccatggcgactctgctgagtgacccagattagatgtggtcattggttcagtcctctctgtgatgttcagtgcatgaccagatgtgagataaactgaatagattggatgctatgtcacttattgttgtcataattctgacttttcaactgttcttgatattacagtggactaaagaggatggacatagaacttccacctctgctgtccctaacctgtttgttccattgaacactaacccaaaagaggtccaggagatgaggaacaagatccgagagcagaatttacaggacattaagacggctggccctcagtcccaggttttgtgtggtgtagtgatggacaggagcctcgtccagggagagctggtgacggcctccaaggccatcattgaaaaggagtaccagccccacgtcattgtgagcaccacgggccccaaccccttcaccacactcacagaccgtgagctggaggagtaccgcagggaggtggagaggaagcagaagggctctgaagagaatctggacgaggctagagaacagaaagaaaagagtcctccagaccagcctgcggtcccccacccgcctcccagcactcccatcaagctggaggaagaccttgtgccggagccgactactggagatgacagtgatgctgccacctttaagccaactctccccgatctgtcccctgatgaaccttcagaagcactcggcttcccaatgttagagaaggaggaggaagcccatagacccccaagccccactgaggcccctactgaggccagccccgagccagccccagacccagccccggtggctgaagaggctgccccctcagctgtcgaggagggggccgccgcggaccctggcagcgatgggtctccaggcaagtccccgtccaaaaagaagaagaagttccgtaccccgtcctttctgaagaagagcaagaagaagagtgactcctgaaagccctgcgctaacactgtcctgtccggagcgaccctggctctgccagcgtccccggccacgtctgtgctctgtccttgtgtaatggaatgcaaaaaagccaagccctccgcctagaggtcccctcacgtgaccagccccgtgtagccccgggctgacccagtgtgtgctcagcagccccaccccaccctgccccttgtcctctcagagcctcagcttctgggggagacatgctctccccacaggggggaggcactaagtcatggtcctggctggaaggtactgaaggcttctgcagctttggctgcacgtcaccctcctgagcctcacctttcctgccgtccctcctgttgtgaaatcaccacattctgtctctgcttggcttcccctccaccctaaagtctcaggtgacggactcagactcctggcttcatgtggcattctctctgctcagtgatctcacttaaatctatatacaaagccttggtcccgtgaaaacactcgtgtgcccaccagcggccttgaagaggcaggtctgggccagatgctgggcaggaaaccccagcggcagatgggcctgtgtgcacccaacgtgatgctatgcatgtctgaccgacgatccctcgaccagaatcagattcaggagctcagtttctttttcacttgggtctctggattcctgtcatagggaaggtatatcaggaggggaagaggcctttctagaattttctttgagcaggtttacaatttagcttacatttttcgactgtgaacgtgaataggctgctttttgctttcttctttccagaccccacagtagagcacttttcacttatttgggggaggcttcaggggactgttctcaccttaactcagccagaaagatgccctagttgtgatcaaaggtaactcgaggtggagggtagccctggggcccctcgacatcaccgtcattgatggagcctgaaccgtgtgctcctcggcagatgctgttgttgttacttccctccaagaggctggtgccggtaccagcctgactaggtacaggcaagcttgtgtgggcccaacaggcccttggtagagctggtgccagatgtgggctcagatcctgggcatgatgggccgagccacctcggatcccactgattggccagccgagcgagaaccaggctgctgcatggcactgaccgccgcttccagcttcctctgagccgcagggcctgctacgcgggcaagcgtgctgcctctcttctgtgtcgttttgttgccaaggcagaatgaaaagtccttaaccgtggactcttcctttatcccctcctttaccccacatatgcaatgacttttaattttcacttttgtagtttaatcctttgtattacaacatgaaatatagttgcatatatggacaccgacttgggaggacaggtcctgaatgtcctttctccagtgtaacatgttttactcacaaataaaattctttcagcaagttccttgtctaaatctgggaaacag

SEQ ID NO: 455285 - DNA, 5705 bp, Homo sapiens
  misc_feature (53)..(53): n is a, c, g, or t
cttccccaactctcgctccctcgtatataccgggttatcctcattaccatggncttctgcttgctgaactaggaactggtcggcttcagacaacgtctgggcctagaagccccgttcttattctccggaaccatgggctcgtgtcagttggagagagcgttgaggaggccttctattacatccataaccttgtggttgcctgtgagatccaggttcgaactctggccagtgcaggaggaccagacaacttagtcctgctgaatcctgagaagtacaaagccaagtcccgttccccagggtctccggtaggggaaggcactggatcgcctcccaagtggcagattggtgagcaggaatttgaagccctcatgcggatgctcgataatctgggctacagaactggctacccttatcgataccctgctctgagagagaagtctaaaaaatacagcgatgtggaggttcctgctagtgtcacaggttactcctttgctagtgacggtgattcgggcacttgctccccactcagacacagttttcagaagcagcagcgggagaagacaagatggctgaactctggccggggcgacgaagcttccgaggaagggcagaatggaagcagtcccaagtcgaagactaaggtgtggacgaacattacacacgatcacgtgaaacccttgctgcagtctctctcgtccggtgtctgcgtgccaagctgtattaccaactgcttggtctgtgcctaccttactgttcatagttagatgacgtagagcaagttgggtagctggggcttcggaggctttgggaatccagcctttctgacccaggtgtaaagcgaaccttccttattcactttcttgtagtctgaacctaagtccactgaatgcattactaaaattcggataatactatctgcttgaaactgcttaagatgtaatgtaactccgcagtagttccagtatatctccgtatatagcaaaaatatacaataatttacatgtattaacctacaaataggagctcttcttatttaattcaaattatattcagggactcttaatacttcatgcacaaaaagacacttcagtcctaaacctgtattttagtgttgtgaactccagtggtttcaagtcactaaagtttcttaagtcttcagtgttttcttaagcagttttcccttgtggctccctggcgtgttctctgctgactcttgtcccctgcccttagtgttattcccctgctttctatcccaaagcctccgaatgcacacccccagctgccctctgcatggactgttgcatgtgagtagacggccatagtggcgagtcaccttctgactcctgttgggtgcggcatgacccaagtgcagcgcaggccatctgcaggcaccagcgacagacgctgcaaggggtgcttcgtttcagcgttaatgccgctcaagttatcgtttgtcctgagaggtgctcccatgtcgtggtgctgagacctcctctgaagatgggtctttattcctcctgtaacctacctctaacagtccacccagctctgctttaaactgtatgtagaagaggcccatttccagaagcccctggaatggaggagacaggggctgaagcagactcatctgtgcatgactagttcattaggagttcagttgaaattagattagatgctcctaaaaccatgggcaaccaaatacataaagtggggctttcttttccccttgtaacagtgttttactttatagatttatttaaagaaaaaaagttttatcttccccaggtggtcctggtgttttcctgacgcagttggtgagaagcctccgtgctcctgagcggccgcgtcacctgggcagggaccctgtgtggccatggggctctgagcatgggagtgcgtctctcctcttctttcctgccctccttgtcttctttccccccttcttcctgtctccccttttctttcatttgtttattttttacttgtttcacttgttaaaggaagtgggcgttataaaacaaaaaaaaaaaaccccaaaacacctttctgcggctgatgtgaagcacagtgctgaattgccatgaggaagttttccaaagcgtttaggcagcagcgcgagctttatttaccattagcttgcaaaacaactaagtcactttaggcctagtagtcaatgtgtacatccaaggggaggccttgctccgcatttatatttgtttcttactgttctggagtgacagagtccatgcagtgctcccaggttggtatcttttcatttataatgattgctgttactttttcaaatgtgttcaagtttctgaggttgctgtttgaaatgctttgactaaaaattatttttaataaaacgctggagttgtttttatctgagaagataaccatcagtgagtacccagagctccatgcccattccacactctcctcgcagtggctcagcatttgctggttttgttgctttttttaaagtcgtatggtttatggctatcttattgcctctcgaaagtattctgaaaggcataacatttgctctcgaagatgggcttgttttaatgttcagtgcctactcatgccttagaatttgattaaaaatctcagatttgattggagatccaaaaaaaaattatgggtggaaggctcagcatgctgacgagatgcactgatactaaaacagcctttaaatattaaggactcatgaagcgcttcaagtttgtttgggatatttttgtagcactcaaaaatattaagttatataaaatattcgacatcaccaaactcttcttccaggtagctaccgtgtaagtgtccatacagtaatgttcttgggttgaaagttacgcagacagtgcattctgatgctgtcatttactttaatgcaaaactttggtgatgcccactcttgcctcacggtgcaggctcctccctaaccctgggtagcagcatcacattgcttttcatgaccctgtcatctcatgcttccagttggctttggtgttggatgattttcagagcagtgaaccaatggtctctgaggggcctcccctgctggtcccagggttatggggctcagctctgtcgtcagcctaccttatgacccagattcagctgggctttccagatggtggttttccatcagtcatgactttgacttccagcattaactggtctttatgtggctgcatcctgctcccatggcgactctgctgagtgacccagattagatgtggtcattggttcagtcctctctgtgatgttcagtgcatgaccagatgtgagataaactgaatagattggatgctatgtcacttattgttgtcataattctgacttttcaactgttcttgatattacagtggactaaagaggatggacatagaacttccacctctgctgtccctaacctgtttgttccattgaacactaacccaaaagaggtccaggagatgaggaacaagatccgagagcagaatttacaggacattaagacggctggccctcagtcccaggttttgtgtggtgtagtgatggacaggagcctcgtccagggagagctggtgacggcctccaaggccatcattgaaaaggagtaccagccccacgtcattgtgagcaccacgggccccaaccccttcaccacactcacagaccgtgagctggaggagtaccgcagggaggtggagaggaagcagaagggctctgaagagaatctggacgaggctagagaacagaaagaaaagagtcctccagaccagcctgcggtcccccacccgcctcccagcactcccatcaagctggaggaagaccttgtgccggagccgactactggagatgacagtgatgctgccacctttaagccaactctccccgatctgtcccctgatgaaccttcagaagcactcggcttcccaatgttagagaaggaggaggaagcccatagacccccaagccccactgaggcccctactgaggccagccccgagccagccccagacccagccccggtggctgaagaggctgccccctcagctgtcgaggagggggccgccgcggaccctggcagcgatgggtctccaggcaagtccccgtccaaaaagaagaagaagttccgtaccccgtcctttctgaagaagagcaagaagaagagtgactcctgaaagccctgcgctaacactgtcctgtccggagcgaccctggctctgccagcgtccccggccacgtctgtgctctgtccttgtgtaatggaatgcaaaaaagccaagccctccgcctagaggtcccctcacgtgaccagccccgtgtagccccgggctgacccagtgtgtgctcagcagccccaccccaccctgccccttgtcctctcagagcctcagcttctgggggagacatgctctccccacaggggggaggcactaagtcatggtcctggctggaaggtactgaaggcttctgcagctttggctgcacgtcaccctcctgagcctcacctttcctgccgtccctcctgttgtgaaatcaccacattctgtctctgcttggcttcccctccaccctaaagtctcaggtgacggactcagactcctggcttcatgtggcattctctctgctcagtgatctcacttaaatctatatacaaagccttggtcccgtgaaaacactcgtgtgcccaccagcggccttgaagaggcaggtctgggccagatgctgggcaggaaaccccagcggcagatgggcctgtgtgcacccaacgtgatgctatgcatgtctgaccgacgatccctcgaccagaatcagattcaggagctcagtttctttttcacttgggtctctggattcctgtcatagggaaggtatatcaggaggggaagaggcctttctagaattttctttgagcaggtttacaatttagcttacatttttcgactgtgaacgtgaataggctgctttttgctttcttctttccagaccccacagtagagcacttttcacttatttgggggaggcttcaggggactgttctcaccttaactcagccagaaagatgccctagttgtgatcaaaggtaactcgaggtggagggtagccctggggcccctcgacatcaccgtcattgatggagcctgaaccgtgtgctcctcggcagatgctgttgttgttacttccctccaagaggctggaaaagggctcagagctgctgagcaggaaccggagggtgacccatttcaggaggtgccggtaccagcctgactaggtacaggcaagcttgtgtgggcccaacaggcccttggtagagctggtgccagatgtgggctcagatcctgggcatgatgggccgagccacctcggatcccactgattggccagccgagcgagaaccaggctgctgcatggcactgaccgccgcttccagcttcctctgagccgcagggcctgctacgcgggcaagcgtgctgcctctcttctgtgtcgttttgttgccaaggcagaatgaaaagtccttaaccgtggactcttcctttatcccctcctttaccccacatatgcaatgacttttaattttcacttttgtagtttaatcctttgtattacaacatgaaatatagttgcatatatcacctcaaactttcctcctccttggctttaatgaggtttgacagagtcagcggccctctccaataataaatataagagtt

SEQ ID NO: 455286 - DNA, 5176 bp, Homo sapiens
  misc_feature (53)..(53): n is a, c, g, or t
cttccccaactctcgctccctcgtatataccgggttatcctcattaccatggncttctgcttgctgaactaggaactggtcggcttcagacaacgtctgggcctagaagccccgttcttattctccggaaccatgggctcgtgtcagttggagagagcgttgaggaggccttctattacatccataaccttgtggttgcctgtgagatccaggttcgaactctggccagtgcaggaggaccagacaacttagtcctgctgaatcctgagaagtacaaagccaagtcccgttccccagggtctccggtaggggaaggcactggatcgcctcccaagtggcagattggtgagcaggaatttgaagccctcatgcggatgctcgataatctgggctacagaactggctacccttatcgataccctgctctgagagagaagtctaaaaaatacagcgatgtggaggttcctgctagtgtcacaggttactcctttgctagtgacggtgattcgggcacttgctccccactcagacacagttttcagaagcagcagcgggagaagacaagatggctgaactctggccggggcgacgaagcttccgaggaagggcagaatggaagcagtcccaagtcgaagactaaggtgtggacgaacattacacacgatcacgtgaaacccttgctgcagtctctctcgtccggtgtctgcgtgccaagctgtattaccaactgcttggtctgtgcctaccttactgttcatagttagatgacgtagagcaagttgggtagctggggcttcggaggctttgggaatccagcctttctgacccaggtgtaaagcgaaccttccttattcactttcttgtagtctgaacctaagtccactgaatgcattactaaaattcggataatactatctgcttgaaactgcttaagatgtaatgtaactccgcagtagttccagtatatctccgtatatagcaaaaatatacaataatttacatgtattaacctacaaataggagctcttcttatttaattcaaattatattcagggactcttaatacttcatgcacaaaaagacacttcagtcctaaacctgtattttagtgttgtgaactccagtggtttcaagtcactaaagtttcttaagtcttcagtgttttcttaagcagttttcccttgtggctccctggcgtgttctctgctgactcttgtcccctgcccttagtgttattcccctgctttctatcccaaagcctccgaatgcacacccccagctgccctctgcatggactgttgcatgtgagtagacggccatagtggcgagtcaccttctgactcctgttgggtgcggcatgacccaagtgcagcgcaggccatctgcaggcaccagcgacagacgctgcaaggggtgcttcgtttcagcgttaatgccgctcaagttatcgtttgtcctgagaggtgctcccatgtcgtggtgctgagacctcctctgaagatgggtctttattcctcctgtaacctacctctaacagtccacccagctctgctttaaactgtatgtagaagaggcccatttccagaagcccctggaatggaggagacaggggctgaagcagactcatctgtgcatgactagttcattaggagttcagttgaaattagattagatgctcctaaaaccatgggcaaccaaatacataaagtggggctttcttttccccttgtaacagtgttttactttatagatttatttaaagaaaaaaagttttatcttccccaggtggtcctggtgttttcctgacgcagttggtgagaagcctccgtgctcctgagcggccgcgtcacctgggcagggaccctgtgtggccatggggctctgagcatgggagtgcgtctctcctcttctttcctgccctccttgtcttctttccccccttcttcctgtctccccttttctttcatttgtttattttttacttgtttcacttgttaaaggaagtgggcgttataaaacaaaaaaaaaaaaccccaaaacacctttctgcggctgatgtgaagcacagtgctgaattgccatgaggaagttttccaaagcgtttaggcagcagcgcgagctttatttaccattagcttgcaaaacaactaagtcactttaggcctagtagtcaatgtgtacatccaaggggaggccttgctccgcatttatatttgtttcttactgttctggagtgacagagtccatgcagtgctcccaggttggtatcttttcatttataatgattgctgttactttttcaaatgtgttcaagtttctgaggttgctgtttgaaatgctttgactaaaaattatttttaataaaacgctggagttgtttttatctgagaagataaccatcagtgagtacccagagctccatgcccattccacactctcctcgcagtggctcagcatttgctggttttgttgctttttttaaagtcgtatggtttatggctatcttattgcctctcgaaagtattctgaaaggcataacatttgctctcgaagatgggcttgttttaatgttcagtgcctactcatgccttagaatttgattaaaaatctcagatttgattggagatccaaaaaaaaattatgggtggaaggctcagcatgctgacgagatgcactgatactaaaacagcctttaaatattaaggactcatgaagcgcttcaagtttgtttgggatatttttgtagcactcaaaaatattaagttatataaaatattcgacatcaccaaactcttcttccaggtagctaccgtgtaagtgtccatacagtaatgttcttgggttgaaagttacgcagacagtgcattctgatgctgtcatttactttaatgcaaaactttggtgatgcccactcttgcctcacggtgcaggctcctccctaaccctgggtagcagcatcacattgcttttcatgaccctgtcatctcatgcttccagttggctttggtgttggatgattttcagagcagtgaaccaatggtctctgaggggcctcccctgctggtcccagggttatggggctcagctctgtcgtcagcctaccttatgacccagattcagctgggctttccagatggtggttttccatcagtcatgactttgacttccagcattaactggtctttatgtggctgcatcctgctcccatggcgactctgctgagtgacccagattagatgtggtcattggttcagtcctctctgtgatgttcagtgcatgaccagatgtgagataaactgaatagattggatgctatgtcacttattgttgtcataattctgacttttcaactgttcttgatattacagtggactaaagaggatggacatagaacttccacctctgctgtccctaacctgtttgttccattgaacactaacccaaaagaggtccaggagatgaggaacaagatccgagagcagaatttacaggacattaagacggctggccctcagtcccaggttttgtgtggtgtagtgatggacaggagcctcgtccagggagagctggtgacggcctccaaggccatcattgaaaaggagtaccagccccacgtcattgtgagcaccacgggccccaaccccttcaccacactcacagaccgtgagctggaggagtaccgcagggaggtggagaggaagcagaagggctctgaagagaatctggacgaggctagagaacagaaagaaaagagtcctccagaccagcctgcggtcccccacccgcctcccagcactcccatcaagctggaggaagaccttgtgccggagccgactactggagatgacagtgatgctgccacctttaagccaactctccccgatctgtcccctgatgaaccttcagaagcactcggcttcccaatgttagagaaggaggaggaagcccatagacccccaagccccactgaggcccctactgaggccagccccgagccagccccagacccagccccggtggctgaagaggctgccccctcagctgtcgaggagggggccgccgcggaccctggcagcgatgggtctccaggcaagtccccgtccaaaaagaagaagaagttccgtaccccgtcctttctgaagaagagcaagaagaagagtgactcctgaaagccctgcgctaacactgtcctgtccggagcgaccctggctctgccagcgtccccggccacgtctgtgctctgtccttgtgtaatggaatgcaaaaaagccaagccctccgcctagaggtcccctcacgtgaccagccccgtgtagccccgggctgacccagtgtgtgctcagcagccccaccccaccctgccccttgtcctctcagagcctcagcttctgggggagacatgctctccccacaggggggaggcactaagtcatggtcctggctggaaggtactgaaggcttctgcagctttggctgcacgtcaccctcctgagcctcacctttcctgccgtccctcctgttgtgaaatcaccacattctgtctctgcttggcttcccctccaccctaaagtctcaggtgacggactcagactcctggcttcatgtggcattctctctgctcagtgatctcacttaaatctatatacaaagccttggtcccgtgaaaacactcgtgtgcccaccagcggccttgaagaggcaggtctgggccagatgctgggcaggaaaccccagcggcagatgggcctgtgtgcacccaacgtgatgctatgcatgtctgaccgacgatccctcgaccagaatcagattcaggagctcagtttctttttcacttgggtctctggattcctgtcatagggaaggtatatcaggaggggaagaggcctttctagaattttctttgagcaggtttacaatttagcttacatttttcgactgtgaacgtgaataggctgctttttgctttcttctttccagaccccacaaccccacatatgcaatgacttttaattttcacttttgtagtttaatcctttgtattacaacatgaaatatagttgcatatatggacaccgacttgggaggacaggtcctgaatgtcctttctccagtgtaacatgttttactcacaaataaaattctttcagcaagttccttgtctaaatctgggaaacag

SEQ ID NO: 455287 - DNA, 4616 bp, Homo sapiens
  misc_feature (53)..(53): n is a, c, g, or t
  misc_feature (4401)..(4401): n is a, c, g, or t
  misc_feature (4469)..(4469): n is a, c, g, or t
  misc_feature (4480)..(4480): n is a, c, g, or t
cttccccaactctcgctccctcgtatataccgggttatcctcattaccatggncttctgcttgctgaactaggaactggtcggcttcagacaacgtctgggcctagaagccccgttcttattctccggaaccatgggctcgtgtcagttggagagagcgttgaggaggccttctattacatccataaccttgtggttgcctgtgagatccaggttcgaactctggccagtgcaggaggaccagacaacttagtcctgctgaatcctgagaagtacaaagccaagtcccgttccccagggtctccggtaggggaaggcactggatcgcctcccaagtggcagattggtgagcaggaatttgaagccctcatgcggatgctcgataatctgggctacagaactggctacccttatcgataccctgctctgagagagaagtctaaaaaatacagcgatgtggaggttcctgctagtgtcacaggttactcctttgctagtgacggtgattcgggcacttgctccccactcagacacagttttcagaagcagcagcgggagaagacaagatggctgaactctggccggggcgacgaagcttccgaggaagggcagaatggaagcagtcccaagtcgaagactaaggtgtggacgaacattacacacgatcacgtgaaacccttgctgcagtctctctcgtccggtgtctgcgtgccaagctgtattaccaactgcttggtctgtgcctaccttactgttcatagttagatgacgtagagcaagttgggtagctggggcttcggaggctttgggaatccagcctttctgacccaggtgtaaagcgaaccttccttattcactttcttgtagtctgaacctaagtccactgaatgcattactaaaattcggataatactatctgcttgaaactgcttaagatgtaatgtaactccgcagtagttccagtatatctccgtatatagcaaaaatatacaataatttacatgtattaacctacaaataggagctcttcttatttaattcaaattatattcagggactcttaatacttcatgcacaaaaagacacttcagtcctaaacctgtattttagtgttgtgaactccagtggtttcaagtcactaaagtttcttaagtcttcagtgttttcttaagcagttttcccttgtggctccctggcgtgttctctgctgactcttgtcccctgcccttagtgttattcccctgctttctatcccaaagcctccgaatgcacacccccagctgccctctgcatggactgttgcatgtgagtagacggccatagtggcgagtcaccttctgactcctgttgggtgcggcatgacccaagtgcagcgcaggccatctgcaggcaccagcgacagacgctgcaaggggtgcttcgtttcagcgttaatgccgctcaagttatcgtttgtcctgagaggtgctcccatgtcgtggtgctgagacctcctctgaagatgggtctttattcctcctgtaacctacctctaacagtccacccagctctgctttaaactgtatgtagaagaggcccatttccagaagcccctggaatggaggagacaggggctgaagcagactcatctgtgcatgactagttcattaggagttcagttgaaattagattagatgctcctaaaaccatgggcaaccaaatacataaagtggggctttcttttccccttgtaacagtgttttactttatagatttatttaaagaaaaaaagttttatcttccccaggtggtcctggtgttttcctgacgcagttggtgagaagcctccgtgctcctgagcggccgcgtcacctgggcagggaccctgtgtggccatggggctctgagcatgggagtgcgtctctcctcttctttcctgccctccttgtcttctttccccccttcttcctgtctccccttttctttcatttgtttattttttacttgtttcacttgttaaaggaagtgggcgttataaaacaaaaaaaaaaaaccccaaaacacctttctgcggctgatgtgaagcacagtgctgaattgccatgaggaagttttccaaagcgtttaggcagcagcgcgagctttatttaccattagcttgcaaaacaactaagtcactttaggcctagtagtcaatgtgtacatccaaggggaggccttgctccgcatttatatttgtttcttactgttctggagtgacagagtccatgcagtgctcccaggttggtatcttttcatttataatgattgctgttactttttcaaatgtgttcaagtttctgaggttgctgtttgaaatgctttgactaaaaattatttttaataaaacgctggagttgtttttatctgagaagataaccatcagtgagtacccagagctccatgcccattccacactctcctcgcagtggctcagcatttgctggttttgttgctttttttaaagtcgtatggtttatggctatcttattgcctctcgaaagtattctgaaaggcataacatttgctctcgaagatgggcttgttttaatgttcagtgcctactcatgccttagaatttgattaaaaatctcagatttgattggagatccaaaaaaaaattatgggtggaaggctcagcatgctgacgagatgcactgatactaaaacagcctttaaatattaaggactcatgaagcgcttcaagtttgtttgggatatttttgtagcactcaaaaatattaagttatataaaatattcgacatcaccaaactcttcttccaggtagctaccgtgtaagtgtccatacagtaatgttcttgggttgaaagttacgcagacagtgcattctgatgctgtcatttactttaatgcaaaactttggtgatgcccactcttgcctcacggtgcaggctcctccctaaccctgggtagcagcatcacattgcttttcatgaccctgtcatctcatgcttccagttggctttggtgttggatgattttcagagcagtgaaccaatggtctctgaggggcctcccctgctggtcccagggttatggggctcagctctgtcgtcagcctaccttatgacccagattcagctgggctttccagatggtggttttccatcagtcatgactttgacttccagcattaactggtctttatgtggctgcatcctgctcccatggcgactctgctgagtgacccagattagatgtggtcattggttcagtcctctctgtgatgttcagtgcatgaccagatgtgagataaactgaatagattggatgctatgtcacttattgttgtcataattctgacttttcaactgttcttgatattacagtggactaaagaggatggacatagaacttccacctctgctgtccctaacctgtttgttccattgaacactaacccaaaagaggtccaggagatgaggaacaagatccgagagcagaatttacaggacattaagacggctggccctcagtcccaggttttgtgtggtgtagtgatggacaggagcctcgtccagggagagctggtgacggcctccaaggccatcattgaaaaggagtaccagccccacgtcattgtgagcaccacgggccccaaccccttcaccacactcacagaccgtgagctggaggagtaccgcagggaggtggagaggaagcagaagggctctgaagagaatctggacgaggctagagaacagaaagaaaagagtcctccagaccagcctgcggtcccccacccgcctcccagcactcccatcaagctggaggaagaccttgtgccggagccgactactggagatgacagtgatgctgccacctttaagccaactctccccgatctgtcccctgatgaaccttcagaagcactcggcttcccaatgttagagaaggaggaggaagcccatagacccccaagccccactgaggcccctactgaggccagccccgagccagccccagacccagccccggtggctgaagaggctgccccctcagctgtcgaggagggggccgccgcggaccctggcagcgatgggtctccaggcaagtccccgtccaaaaagaagaagaagttccgtaccccgtcctttctgaagaagagcaagaagaagagtgactcctgaaagccctgcgctaacactgtcctgtccggagcgaccctggctctgccagcgtccccggccacgtctgtgctctgtccttgtgtaatggaatgcaaaaaagccaagccctccgcctagaggtcccctcacgtgaccagccccgtgtagccccgggctgacccagtgtgtgctcagcagccccaccccaccctgccccgatctgtcccctgatgaaccttcagaagcactcggnttcccaatgttagagaaggaggaggaagcccatagacccccaagccccactgaggcccctactgaggncagccccgagncagccccagacccagccccggtggctgtaagaggctgccccctcagctgtcgaggagggggccgccgcggatcctgcagcgatggtctccaggcaagtccctgtgtcccagctatgagttatattccatacctcgg

SEQ ID NO: 455288 - DNA, 4353 bp, Homo sapiens
  misc_feature (53)..(53): n is a, c, g, or t
cttccccaactctcgctccctcgtatataccgggttatcctcattaccatggncttctgcttgctgaactaggaactggtcggcttcagacaacgtctgggcctagaagccccgttcttattctccggaaccatgggctcgtgtcagttggagagagcgttgaggaggccttctattacatccataaccttgtggttgcctgtgagatccaggttcgaactctggccagtgcaggaggaccagacaacttagtcctgctgaatcctgagaagtacaaagccaagtcccgttccccagggtctccggtaggggaaggcactggatcgcctcccaagtggcagattggtgagcaggaatttgaagccctcatgcggatgctcgataatctgggctacagaactggctacccttatcgataccctgctctgagagagaagtctaaaaaatacagcgatgtggaggttcctgctagtgtcacaggttactcctttgctagtgacggtgattcgggcacttgctccccactcagacacagttttcagaagcagcagcgggagaagacaagatggctgaactctggccggggcgacgaagcttccgaggaagggcagaatggaagcagtcccaagtcgaagactaaggtgtggacgaacattacacacgatcacgtgaaacccttgctgcagtctctctcgtccggtgtctgcgtgccaagctgtattaccaactgcttggtctgtgcctaccttactgttcatagttagatgacgtagagcaagttgggtagctggggcttcggaggctttgggaatccagcctttctgacccaggtgtaaagcgaaccttccttattcactttcttgtagtctgaacctaagtccactgaatgcattactaaaattcggataatactatctgcttgaaactgcttaagatgtaatgtaactccgcagtagttccagtatatctccgtatatagcaaaaatatacaataatttacatgtattaacctacaaataggagctcttcttatttaattcaaattatattcagggactcttaatacttcatgcacaaaaagacacttcagtcctaaacctgtattttagtgttgtgaactccagtggtttcaagtcactaaagtttcttaagtcttcagtgttttcttaagcagttttcccttgtggctccctggcgtgttctctgctgactcttgtcccctgcccttagtgttattcccctgctttctatcccaaagcctccgaatgcacacccccagctgccctctgcatggactgttgcatgtgagtagacggccatagtggcgagtcaccttctgactcctgttgggtgcggcatgacccaagtgcagcgcaggccatctgcaggcaccagcgacagacgctgcaaggggtgcttcgtttcagcgttaatgccgctcaagttatcgtttgtcctgagaggtgctcccatgtcgtggtgctgagacctcctctgaagatgggtctttattcctcctgtaacctacctctaacagtccacccagctctgctttaaactgtatgtagaagaggcccatttccagaagcccctggaatggaggagacaggggctgaagcagactcatctgtgcatgactagttcattaggagttcagttgaaattagattagatgctcctaaaaccatgggcaaccaaatacataaagtggggctttcttttccccttgtaacagtgttttactttatagatttatttaaagaaaaaaagttttatcttccccaggtggtcctggtgttttcctgacgcagttggtgagaagcctccgtgctcctgagcggccgcgtcacctgggcagggaccctgtgtggccatggggctctgagcatgggagtgcgtctctcctcttctttcctgccctccttgtcttctttccccccttcttcctgtctccccttttctttcatttgtttattttttacttgtttcacttgttaaaggaagtgggcgttataaaacaaaaaaaaaaaaccccaaaacacctttctgcggctgatgtgaagcacagtgctgaattgccatgaggaagttttccaaagcgtttaggcagcagcgcgagctttatttaccattagcttgcaaaacaactaagtcactttaggcctagtagtcaatgtgtacatccaaggggaggccttgctccgcatttatatttgtttcttactgttctggagtgacagagtccatgcagtgctcccaggttggtatcttttcatttataatgattgctgttactttttcaaatgtgttcaagtttctgaggttgctgtttgaaatgctttgactaaaaattatttttaataaaacgctggagttgtttttatctgagaagataaccatcagtgagtacccagagctccatgcccattccacactctcctcgcagtggctcagcatttgctggttttgttgctttttttaaagtcgtatggtttatggctatcttattgcctctcgaaagtattctgaaaggcataacatttgctctcgaagatgggcttgttttaatgttcagtgcctactcatgccttagaatttgattaaaaatctcagatttgattggagatccaaaaaaaaattatgggtggaaggctcagcatgctgacgagatgcactgatactaaaacagcctttaaatattaaggactcatgaagcgcttcaagtttgtttgggatatttttgtagcactcaaaaatattaagttatataaaatattcgacatcaccaaactcttcttccaggtagctaccgtgtaagtgtccatacagtaatgttcttgggttgaaagttacgcagacagtgcattctgatgctgtcatttactttaatgcaaaactttggtgatgcccactcttgcctcacggtgcaggctcctccctaaccctgggtagcagcatcacattgcttttcatgaccctgtcatctcatgcttccagttggctttggtgttggatgattttcagagcagtgaaccaatggtctctgaggggcctcccctgctggtcccagggttatggggctcagctctgtcgtcagcctaccttatgacccagattcagctgggctttccagatggtggttttccatcagtcatgactttgacttccagcattaactggtctttatgtggctgcatcctgctcccatggcgactctgctgagtgacccagattagatgtggtcattggttcagtcctctctgtgatgttcagtgcatgaccagatgtgagataaactgaatagattggatgctatgtcacttattgttgtcataattctgacttttcaactgttcttgatattacagtggactaaagaggatggacatagaacttccacctctgctgtccctaacctgtttgttccattgaacactaacccaaaagaggtccaggagatgaggaacaagatccgagagcagaatttacaggacattaagacggctggccctcagtcccaggttttgtgtggtgtagtgatggacaggagcctcgtccagggagagctggtgacggcctccaaggccatcattgaaaaggagtaccagccccacgtcattgtgagcaccacgggccccaaccccttcaccacactcacagaccgtgagctggaggagtaccgcagggaggtggagaggaagcagaagggctctgaagagaatctggacgaggctagagaacagaaagaaaagagtcctccagaccagcctgcggtcccccacccgcctcccagcactcccatcaagctggaggaagaccttgtgccggagccgactactggagatgacagtgatgctgccacctttaagccaactctccccgatctgtcccctgatgaaccttcagaagcactcggcttcccaatgttagagaaggaggaggaagcccatagacccccaagccccactgaggcccctactgaggccagccccgagccagccccagacccagccccggtggctgaagaggctgccccctcagctgtcgaggagggggccgccgcggaccctggcagcgatgggtctccaggcaagtccccgtccaaaaagaagaagaagttccgtaccccgtcctttctgaagaagagcaagaagaagagtgaaccccacatatgcaatgacttttaattttcacttttgtagtttaatcctttgtattacaacatgaaatatagttgcatatatggacaccgacttgggaggacaggtcctgaatgtcctttctccagtgtaacatgttttactcacaaataaaattctttcagcaagttccttgtctaaatctgggaaacag

SEQ ID NO: 455289 - DNA, 4927 bp, Homo sapiens
  misc_feature (53)..(53): n is a, c, g, or t
cttccccaactctcgctccctcgtatataccgggttatcctcattaccatggncttctgcttgctgaactaggaactggtcggcttcagacaacgtctgggcctagaagccccgttcttattctccggaaccatgggctcgtgtcagttggagagagcgttgaggaggccttctattacatccataaccttgtggttgcctgtgagatccaggttcgaactctggccagtgcaggaggaccagacaacttagtcctgctgaatcctgagaagtacaaagccaagtcccgttccccagggtctccggtaggggaaggcactggatcgcctcccaagtggcagattggtgagcaggaatttgaagccctcatgcggatgctcgataatctgggctacagaactggctacccttatcgataccctgctctgagagagaagtctaaaaaatacagcgatgtggaggttcctgctagtgtcacaggttactcctttgctagtgacggtgattcgggcacttgctccccactcagacacagttttcagaagcagcagcgggagaagacaagatggctgaactctggccggggcgacgaagcttccgaggaagggcagaatggaagcagtcccaagtcgaagactaaggtgtggacgaacattacacacgatcacgtgaaacccttgctgcagtctctctcgtccggtgtctgcgtgccaagctgtattaccaactgcttggtctgtgcctaccttactgttcatagttagatgacgtagagcaagttgggtagctggggcttcggaggctttgggaatccagcctttctgacccaggtgtaaagcgaaccttccttattcactttcttgtagtctgaacctaagtccactgaatgcattactaaaattcggataatactatctgcttgaaactgcttaagatgtaatgtaactccgcagtagttccagtatatctccgtatatagcaaaaatatacaataatttacatgtattaacctacaaataggagctcttcttatttaattcaaattatattcagggactcttaatacttcatgcacaaaaagacacttcagtcctaaacctgtattttagtgttgtgaactccagtggtttcaagtcactaaagtttcttaagtcttcagtgttttcttaagcagttttcccttgtggctccctggcgtgttctctgctgactcttgtcccctgcccttagtgttattcccctgctttctatcccaaagcctccgaatgcacacccccagctgccctctgcatggactgttgcatgtgagtagacggccatagtggcgagtcaccttctgactcctgttgggtgcggcatgacccaagtgcagcgcaggccatctgcaggcaccagcgacagacgctgcaaggggtgcttcgtttcagcgttaatgccgctcaagttatcgtttgtcctgagaggtgctcccatgtcgtggtgctgagacctcctctgaagatgggtctttattcctcctgtaacctacctctaacagtccacccagctctgctttaaactgtatgtagaagaggcccatttccagaagcccctggaatggaggagacaggggctgaagcagactcatctgtgcatgactagttcattaggagttcagttgaaattagattagatgctcctaaaaccatgggcaaccaaatacataaagtggggctttcttttccccttgtaacagtgttttactttatagatttatttaaagaaaaaaagttttatcttccccaggtggtcctggtgttttcctgacgcagttggtgagaagcctccgtgctcctgagcggccgcgtcacctgggcagggaccctgtgtggccatggggctctgagcatgggagtgcgtctctcctcttctttcctgccctccttgtcttctttccccccttcttcctgtctccccttttctttcatttgtttattttttacttgtttcacttgttaaaggaagtgggcgttataaaacaaaaaaaaaaaaccccaaaacacctttctgcggctgatgtgaagcacagtgctgaattgccatgaggaagttttccaaagcgtttaggcagcagcgcgagctttatttaccattagcttgcaaaacaactaagtcactttaggcctagtagtcaatgtgtacatccaaggggaggccttgctccgcatttatatttgtttcttactgttctggagtgacagagtccatgcagtgctcccaggttggtatcttttcatttataatgattgctgttactttttcaaatgtgttcaagtttctgaggttgctgtttgaaatgctttgactaaaaattatttttaataaaacgctggagttgtttttatctgagaagataaccatcagtgagtacccagagctccatgcccattccacactctcctcgcagtggctcagcatttgctggttttgttgctttttttaaagtcgtatggtttatggctatcttattgcctctcgaaagtattctgaaaggcataacatttgctctcgaagatgggcttgttttaatgttcagtgcctactcatgccttagaatttgattaaaaatctcagatttgattggagatccaaaaaaaaattatgggtggaaggctcagcatgctgacgagatgcactgatactaaaacagcctttaaatattaaggactcatgaagcgcttcaagtttgtttgggatatttttgtagcactcaaaaatattaagttatataaaatattcgacatcaccaaactcttcttccaggtagctaccgtgtaagtgtccatacagtaatgttcttgggttgaaagttacgcagacagtgcattctgatgctgtcatttactttaatgcaaaactttggtgatgcccactcttgcctcacggtgcaggctcctccctaaccctgggtagcagcatcacattgcttttcatgaccctgtcatctcatgcttccagttggctttggtgttggatgattttcagagcagtgaaccaatggtctctgaggggcctcccctgctggtcccagggttatggggctcagctctgtcgtcagcctaccttatgacccagattcagctgggctttccagatggtggttttccatcagtcatgactttgacttccagcattaactggtctttatgtggctgcatcctgctcccatggcgactctgctgagtgacccagattagatgtggtcattggttcagtcctctctgtgatgttcagtgcatgaccagatgtgagataaactgaatagattggatgctatgtcacttattgttgtcataattctgacttttcaactgttcttgatattacagtggactaaagaggatggacatagaacttccacctctgctgtccctaacctgtttgttccattgaacactaacccaaaagaggtccaggagatgaggaacaagatccgagagcagaatttacaggacattaagacggctggccctcagtcccaggttttgtgtggtgtagtgatggacaggagcctcgtccaggtgagagcccagagtgtctctgactttagtgggtggtggctgtgtgaccgcctgctccaaagttattctgaaattgagagagtgactttatgaggtaagtattctaggcaaccagttacctttgttaaaaccttcatgatgagaaacggttcaggcacttttcgttgagttctagaaggagcgagcatgctgagggctgtgtccacccctctggtcatgccccttgtaatgcatgcatatgtgagggtggcacatacaccaccagctttggggctcagattcggcccgggttcagcagcgttctgtgtaaggcgctaggagagggtgggtttagggactcttgttctggtacatattgctgtctgcaacaaagtgctgcttgggttgcagaggggtgggtgcctgtaagtgtggtgcacatttacacacatttctacaaaatgactctaccttgtggcacattgaagataattgtgtaagtagttatctctgaaaactaatatgccacctaatgctttaacacctgactctgcaggggtagacgattgttggatttgtccagccgtggtcctggtttcgtgttcagtgtctgcacgtcctgccatcatcactgccacacttactgttgacagctgtccctgctgcatgctcttagccagctccatcctgtgctctcagctgatatttcacaggctgggcctggtgtgctctggtgactcagtttactgtttcaggatgcacctctctctgactgtacggaaactatcgaagggctcgagcttacagagcagacctttagtcccgctaaatctctctcttttagaaaggtactcactgccctgtcctcactacctgtctatgcgccttgctcccctcccctcccccctccccgtctcctctcttcaggcattgtcttagttactgaagtagcttcaaatggatctttaacctgtttgtgagattgtacagaaggttctgttctatctacttgattctttaattaaaacatttgctatgaggtgtgataacaatttccagcattcgaagttgttactgagaaatggccagtctgagcaacgtggtgcatttctgcagttccgcacgggactttggtcagtgcgtgttttgggtttcagaatttgccttttccatgactctgactgcagacagcctcttctgggcagtctgttgctgttggcagcggccactcccgagtgcccttccaccctcgctggttcaactttgactgtaaatgtcatgaatgtagccactagaggtcatatcattgaaagatgtcatttcagaggaatgggaattcagacagtctttgtcagcccttgataaaatgtatttatttgtacctcaaa

SEQ ID NO: 455290 - DNA, 4071 bp, Homo sapiens
  misc_feature (53)..(53): n is a, c, g, or t
cttccccaactctcgctccctcgtatataccgggttatcctcattaccatggncttctgcttgctgaactaggaactggtcggcttcagacaacgtctgggcctagaagccccgttcttattctccggaaccatgggctcgtgtcagttggagagagcgttgaggaggccttctattacatccataaccttgtggttgcctgtgagatccaggttcgaactctggccagtgcaggaggaccagacaacttagtcctgctgaatcctgagaagtacaaagccaagtcccgttccccagggtctccggtaggggaaggcactggatcgcctcccaagtggcagattggtgagcaggaatttgaagccctcatgcggatgctcgataatctgggctacagaactggctacccttatcgataccctgctctgagagagaagtctaaaaaatacagcgatgtggaggttcctgctagtgtcacaggttactcctttgctagtgacggtgattcgggcacttgctccccactcagacacagttttcagaagcagcagcgggagaagacaagatggctgaactctggccggggcgacgaagcttccgaggaagggcagaatggaagcagtcccaagtcgaagactaaggtgtggacgaacattacacacgatcacgtgaaacccttgctgcagtctctctcgtccggtgtctgcgtgccaagctgtattaccaactgcttggtctgtgcctaccttactgttcatagttagatgacgtagagcaagttgggtagctggggcttcggaggctttgggaatccagcctttctgacccaggtgtaaagcgaaccttccttattcactttcttgtagtctgaacctaagtccactgaatgcattactaaaattcggataatactatctgcttgaaactgcttaagatgtaatgtaactccgcagtagttccagtatatctccgtatatagcaaaaatatacaataatttacatgtattaacctacaaataggagctcttcttatttaattcaaattatattcagggactcttaatacttcatgcacaaaaagacacttcagtcctaaacctgtattttagtgttgtgaactccagtggtttcaagtcactaaagtttcttaagtcttcagtgttttcttaagcagttttcccttgtggctccctggcgtgttctctgctgactcttgtcccctgcccttagtgttattcccctgctttctatcccaaagcctccgaatgcacacccccagctgccctctgcatggactgttgcatgtgagtagacggccatagtggcgagtcaccttctgactcctgttgggtgcggcatgacccaagtgcagcgcaggccatctgcaggcaccagcgacagacgctgcaaggggtgcttcgtttcagcgttaatgccgctcaagttatcgtttgtcctgagaggtgctcccatgtcgtggtgctgagacctcctctgaagatgggtctttattcctcctgtaacctacctctaacagtccacccagctctgctttaaactgtatgtagaagaggcccatttccagaagcccctggaatggaggagacaggggctgaagcagactcatctgtgcatgactagttcattaggagttcagttgaaattagattagatgctcctaaaaccatgggcaaccaaatacataaagtggggctttcttttccccttgtaacagtgttttactttatagatttatttaaagaaaaaaagttttatcttccccaggtggtcctggtgttttcctgacgcagttggtgagaagcctccgtgctcctgagcggccgcgtcacctgggcagggaccctgtgtggccatggggctctgagcatgggagtgcgtctctcctcttctttcctgccctccttgtcttctttccccccttcttcctgtctccccttttctttcatttgtttattttttacttgtttcacttgttaaaggaagtgggcgttataaaacaaaaaaaaaaaaccccaaaacacctttctgcggctgatgtgaagcacagtgctgaattgccatgaggaagttttccaaagcgtttaggcagcagcgcgagctttatttaccattagcttgcaaaacaactaagtcactttaggcctagtagtcaatgtgtacatccaaggggaggccttgctccgcatttatatttgtttcttactgttctggagtgacagagtccatgcagtgctcccaggttggtatcttttcatttataatgattgctgttactttttcaaatgtgttcaagtttctgaggttgctgtttgaaatgctttgactaaaaattatttttaataaaacgctggagttgtttttatctgagaagataaccatcagtgagtacccagagctccatgcccattccacactctcctcgcagtggctcagcatttgctggttttgttgctttttttaaagtcgtatggtttatggctatcttattgcctctcgaaagtattctgaaaggcataacatttgctctcgaagatgggcttgttttaatgttcagtgcctactcatgccttagaatttgattaaaaatctcagatttgattggagatccaaaaaaaaattatgggtggaaggctcagcatgctgacgagatgcactgatactaaaacagcctttaaatattaaggactcatgaagcgcttcaagtttgtttgggatatttttgtagcactcaaaaatattaagttatataaaatattcgacatcaccaaactcttcttccaggtagctaccgtgtaagtgtccatacagtaatgttcttgggttgaaagttacgcagacagtgcattctgatgctgtcatttactttaatgcaaaactttggtgatgcccactcttgcctcacggtgcaggctcctccctaaccctgggtagcagcatcacattgcttttcatgaccctgtcatctcatgcttccagttggctttggtgttggatgattttcagagcagtgaaccaatggtctctgaggggcctcccctgctggtcccagggttatggggctcagctctgtcgtcagcctaccttatgacccagattcagctgggctttccagatggtggttttccatcagtcatgactttgacttccagcattaactggtctttatgtggctgcatcctgctcccatggcgactctgctgagtgacccagattagatgtggtcattggttcagtcctctctgtgatgttcagtgcatgaccagatgtgagataaactgaatagattggatgctatgtcacttattgttgtcataattctgacttttcaactgttcttgatattacagtggactaaagaggatggacatagaacttccacctctgctgtccctaacctgtttgttccattgaacactaacccaaaagaggtccaggagatgaggaacaaggtgcgtcctgcgtcggcactcagcgggggcttgggtgtgggattggaagggatgccagctgctttggggggagcgggtgcttgcttctagcagagggcatctgctgttgttgccactgttgcagtgaagccatctcttcacaccgctgctgttctaccaccagtgtgaagtatgagcagcagacattttttgggccctattgattcttgaactgatgtttgctcacgatgtttgctcaccggtcagaattggaagctgcaaaacctgttcttagcaagagcagactgctgtccctttcagggttcgttcaaagacttgtgagtggcatttggtgtatcagagcaggagccctgccagtgctcacatcactagacgatggacatgcagcgagtgtttcccccaagttaatgacagtgagagataggtgtcctgcccaagcatctggaagatgtggggagctgggaatagtctccatccctgcagacccacgccccactaagcaggcatggcggtcactcagaacacatggggccatcctgcctgcgtggggcagtgggagagctgaaatgtagcttccatgtggctggggcccaagtgcaca

SEQ ID NO: 455291 - DNA, 1538 bp, Homo sapiens
  misc_feature (53)..(53): n is a, c, g, or t
cttccccaactctcgctccctcgtatataccgggttatcctcattaccatggncttctgcttgctgaactaggaactggtcggcttcagacaacgtctgggcctagaagccccgttcttattctccggaaccatgggctcgtgtcagttggagagagcgttgaggaggccttctattacatccataaccttgtggttgcctgtgagatccaggtaggggacagccattccagtcactctgcagtttatttagatgtgtctggggttcacatagatttttttttgatacttatcgagtaggagaggagtctttgagcaatctctttgccaaagataagctcatggatttgggacttgatcaggacaaatgctgtttcactgattgaagttggcaaaggattactgggcttttcatttctaatttttaaattttcaaatatgtcagtcactaccatttatggagtactggtgtgtataggcctggcatcaggtgcttagtgtgtgtcatcgcatatgtgatgtcacgtgacccccacagtactctttgaaaaagcaggtatacagaagtagagactcagagacttgcctgcagcttacagctgtgagttcccctccgctccgtcagccgttagttcacgttctcccctctgcttcttgacttatgtctgtggcgtagtgaagtcccaagtcctttgtaggatcctgaaaggtgctgtgttttctcatttctctgccaactttggtgcccaatatttttgtcatgctaaagaaatacttctgaaagtaactttgtgatcagtctgtcactatccattctacattttttattcttacactctagagatttggtttcttttgaaacctacatttttattcaagtcatctgaccctcttgatctcagtaaggaactcaagccatgctgtgtgtgttttggaaaaggttcgaactctggccagtgcaggaggaccagacaacttagtcctgctgaatcctgagaagtacaaagccaagtcccgttccccagggtctccggtaggggaaggcactggatcgcctcccaagtggcagattggtgagcaggaatttgaagccctcatgcggatgctcgataatctgggctacagaactggctacccttatcgataccctgctctgagagaggatcccactgattggccagccgagcgagaaccaggctgctgcatggcactgaccgccgcttccagcttcctctgagccgcagggcctgctacgcgggcaagcgtgctgcctctcttctgtgtcgttttgttgccaaggcagaatgaaaagtccttaaccgtggactcttcctttatcccctcctttaccccacatatgcaatgacttttaattttcacttttgtagtttaatcctttgtattacaacatgaaatatagttgcatatatggacaccgacttgggaggacaggtcctgaatgtcctttctccagtgtaacatgttttactcacaaataaaattctttcagcaagttccttgtctaaatctgggaaacag

SEQ ID NO: 455292 - DNA, 520 bp, Homo sapiens
tgtcgccctcctagatacagcaaaggcatgaaagttctttaattccaattattcaactctcaagttacatgctgctgttgttcagtgttttagtccagactttttttttttctttttaaagagacacagtcttgctctgacactcagactggagtgcacaagtttttttcttttcttttttttgagacaggttctcactctgttgcccaggctggagtgcagtggcgcgatcacagctcactgcagccttgacctcctgagctttagtgatcctcccacttcagcccccaagtagctgggactacaggcacatgccgccatgaccagctattttttgtatttttttgttgaaacagggttttgccatgttgtgtaggctagtctcaaactctgggactcgagatctgcctgcctcagtctcccagagtgctaggattacaggcgtgcaccaccattgggcatggtggtgcatgcctgtagtcccagctactcggaaattatttcacacaagttctttttt

SEQ ID NO: 455293 - DNA, 706 bp, Homo sapiens
tattttcagactgtctgtgttctgtttcatgggtatattagttttttgtggctcctgtaacaagttaccacatacgtggtgctttaaaacagcagaaattattctctcatagttctggaggccagaagtttgaaaacaatatcactggaccaaaatcaaggtgtcactagggctgtgcattcttcctctggaggtcgtatgggagaatctgttcctcgcctcttccagcttctcatggctgccacattccttggctgtggctgcatcactccaatctttgtgacccaggtcagattggtttcttgtcttctgtgtggttaaatctcccccacctcgattttataaggatactggtgattacattcagggcccacccaggtaatccaggataatttcacaatcccaaaatacttaattatatctgtagtctttgccatataaagtaatatttacaggttccaggcattattcagacctgttaacttggggaccgttactcagcttactaaaagagtgtctcttataagttacctgtaatttctgtcttttaactggcataatttagtacatttatgttatgattcagataaatttgtactttctttatcatcttaggtttgtattctgtttgtcttttctccccatgcttgcctttttaaacaactgggagttgtttgtttttctttatattcttccatcttttggt

SEQ ID NO: 455294 - DNA, 214 bp, Homo sapiens
gtgaatcaggccggcttcaccttacactctgcaatttatgctgcacgcccggacgtgaagtgcgtcgtgcacattcacaccccagcaggggctgcggtgagtggctgccctggtagcatctcaaggtctaaagctgctgagtgaaaggcactgcacgtttcctctgaattgcccttgttgtttatagtcagtaaaactaattttgttgaatata

SEQ ID NO: 455295 - DNA, 664 bp, Homo sapiens
agtagaataatggaaagcttccagtaccccttggcttcgtgacaggcattgtgcatggacgcttccctgcatagctcactcagtgttctgaacaaacccgtgaatttgtagcctgaaagagatgcaaataatttcacttggatctttgagctaattcagtcattttccccacagaccagagtgaactccgagcaggaacacttcctcattgtcccttttgggcttctttacagtgaagtgactgcatccagtttggtaagaatgtccttctctttggcagcttgtatgtgcaggtcatgttaggtcattcaacatcttcagatcagctaaatatgtaaaacccaagaaacaagaaagagcctatgttttatgtggtgtgttcagttagagaaaaacctttgagagaagttacaaatattgtaatcttgagtttgaatagtttctagttagggtaatttgaagtcctcttgggctggggtgcagtggctcatgcctgtaattccagtacttaagttcgagaccagcctggccaacatggcggtaccccaactctacaaaaaaataccaaaattagctgggcatggtggtgggaggattgtttgaacctgggaggtggaggccgaggtcgcaccactgcactccagcctgggcgacagagccagac

SEQ ID NO: 455296 - DNA, 696 bp, Homo sapiens
cacttgctctacgtcatctaactatgaacagtaaggtaggcacagacccagcagttggtaatacagcttggcacgcagacaccggacgagagagactgcaccaagggtttcacgtgatcgtgtgtaatgttcgtccacaccttagtcttcgacttgggactgcttccattctgcccttcctcggaagcttcgtcgccccggccagagttcagccatcttgtcttctccgaagggatgccgctgctgttctaccaccagtgtgaagtatgagcagcagacattttttgggccctattgattcttgaactgatgtttgctcacgatgtttgctcaccggtcagaattggaagctgcaaaacctgttcttagcaagagcagactgctgtccctttcagggttcgttcaaagacttgtgagtggcatttggtgtatcagagcaggagccctgccagtgctcacatcactagacgatggacatgcagcgagtgtttcccccaagttaatgacagtgagagataggtgtcctgcccaagcatctggaagatgtggggagctgggaatagtctccatccctgcagacccacgccccactaagcaggcatggcggtcactcagaacacatggggccatcctgcctgcgtggggcagtgggagagctgaaatgtagcttccatgtggctggggcccaagtgcaca

SEQ ID NO: 455297 - DNA, 5675 bp, Homo sapiens
  misc_feature (53)..(53): n is a, c, g, or t
cttccccaactctcgctccctcgtatataccgggttatcctcattaccatggncttctgcttgctgaactaggaactggtcggcttcagacaacgtctgggcctagaagccccgttcttattctccggaaccatgggctcgtgtcagttggagagagcgttgaggaggccttctattacatccataaccttgtggttgcctgtgagatccaggttcgaactctggccagtgcaggaggaccagacaacttagtcctgctgaatcctgagaagtacaaagccaagtcccgttccccagggtctccggtaggggaaggcactggatcgcctcccaagtggcagattggtgagcaggaatttgaagccctcatgcggatgctcgataatctgggctacagaactggctacccttatcgataccctgctctgagagagaagtctaaaaaatacagcgatgtggaggttcctgctagtgtcacaggttactcctttgctagtgacggtgattcgggcacttgctccccactcagacacagttttcagaagcagcagcgggagaagacaagatggctgaactctggccggggcgacgaagcttccgaggaagggcagaatggaagcagtcccaagtcgaagactaaggtgtggacgaacattacacacgatcacgtgaaacccttgctgcagtctctctcgtccggtgtctgcgtgccaagctgtattaccaactgcttggtctgtgcctaccttactgttcatagttagatgacgtagagcaagttgggtagctggggcttcggaggctttgggaatccagcctttctgacccaggtgtaaagcgaaccttccttattcactttcttgtagtctgaacctaagtccactgaatgcattactaaaattcggataatactatctgcttgaaactgcttaagatgtaatgtaactccgcagtagttccagtatatctccgtatatagcaaaaatatacaataatttacatgtattaacctacaaataggagctcttcttatttaattcaaattatattcagggactcttaatacttcatgcacaaaaagacacttcagtcctaaacctgtattttagtgttgtgaactccagtggtttcaagtcactaaagtttcttaagtcttcagtgttttcttaagcagttttcccttgtggctccctggcgtgttctctgctgactcttgtcccctgcccttagtgttattcccctgctttctatcccaaagcctccgaatgcacacccccagctgccctctgcatggactgttgcatgtgagtagacggccatagtggcgagtcaccttctgactcctgttgggtgcggcatgacccaagtgcagcgcaggccatctgcaggcaccagcgacagacgctgcaaggggtgcttcgtttcagcgttaatgccgctcaagttatcgtttgtcctgagaggtgctcccatgtcgtggtgctgagacctcctctgaagatgggtctttattcctcctgtaacctacctctaacagtccacccagctctgctttaaactgtatgtagaagaggcccatttccagaagcccctggaatggaggagacaggggctgaagcagactcatctgtgcatgactagttcattaggagttcagttgaaattagattagatgctcctaaaaccatgggcaaccaaatacataaagtggggctttcttttccccttgtaacagtgttttactttatagatttatttaaagaaaaaaagttttatcttccccaggtggtcctggtgttttcctgacgcagttggtgagaagcctccgtgctcctgagcggccgcgtcacctgggcagggaccctgtgtggccatggggctctgagcatgggagtgcgtctctcctcttctttcctgccctccttgtcttctttccccccttcttcctgtctccccttttctttcatttgtttattttttacttgtttcacttgttaaaggaagtgggcgttataaaacaaaaaaaaaaaaccccaaaacacctttctgcggctgatgtgaagcacagtgctgaattgccatgaggaagttttccaaagcgtttaggcagcagcgcgagctttatttaccattagcttgcaaaacaactaagtcactttaggcctagtagtcaatgtgtacatccaaggggaggccttgctccgcatttatatttgtttcttactgttctggagtgacagagtccatgcagtgctcccaggttggtatcttttcatttataatgattgctgttactttttcaaatgtgttcaagtttctgaggttgctgtttgaaatgctttgactaaaaattatttttaataaaacgctggagttgtttttatctgagaagataaccatcagtgagtacccagagctccatgcccattccacactctcctcgcagtggctcagcatttgctggttttgttgctttttttaaagtcgtatggtttatggctatcttattgcctctcgaaagtattctgaaaggcataacatttgctctcgaagatgggcttgttttaatgttcagtgcctactcatgccttagaatttgattaaaaatctcagatttgattggagatccacctttaaatattaaggactcatgaagcgcttcaagtttgtttgggatatttttgtagcactcaaaaatattaagttatataaaatattcgacatcaccaaactcttcttccaggtagctaccgtgtaagtgtccatacagtaatgttcttgggttgaaagttacgcagacagtgcattctgatgctgtcatttactttaatgcaaaactttggtgatgcccactcttgcctcacggtgcaggctcctccctaaccctgggtagcagcatcacattgcttttcatgaccctgtcatctcatgcttccagttggctttggtgttggatgattttcagagcagtgaaccaatggtctctgaggggcctcccctgctggtcccagggttatggggctcagctctgtcgtcagcctaccttatgacccagattcagctgggctttccagatggtggttttccatcagtcatgactttgacttccagcattaactggtctttatgtggctgcatcctgctcccatggcgactctgctgagtgacccagattagatgtggtcattggttcagtcctctctgtgatgttcagtgcatgaccagatgtgagataaactgaatagattggatgctatgtcacttattgttgtcataattctgacttttcaactgttcttgatattacagtggactaaagaggatggacatagaacttccacctctgctgtccctaacctgtttgttccattgaacactaacccaaaagaggtccaggagatgaggaacaagatccgagagcagaatttacaggacattaagacggctggccctcagtcccaggttttgtgtggtgtagtgatggacaggagcctcgtccagggagagctggtgacggcctccaaggccatcattgaaaaggagtaccagccccacgtcattgtgagcaccacgggccccaaccccttcaccacactcacagaccgtgagctggaggagtaccgcagggaggtggagaggaagcagaagggctctgaagagaatctggacgaggctagagaacagaaagaaaagagtcctccagaccagcctgcggtcccccacccgcctcccagcactcccatcaagctggaggaagaccttgtgccggagccgactactggagatgacagtgatgctgccacctttaagccaactctccccgatctgtcccctgatgaaccttcagaagcactcggcttcccaatgttagagaaggaggaggaagcccatagacccccaagccccactgaggcccctactgaggccagccccgagccagccccagacccagccccggtggctgaagaggctgccccctcagctgtcgaggagggggccgccgcggaccctggcagcgatgggtctccaggcaagtccccgtccaaaaagaagaagaagttccgtaccccgtcctttctgaagaagagcaagaagaagagtgactcctgaaagccctgcgctaacactgtcctgtccggagcgaccctggctctgccagcgtccccggccacgtctgtgctctgtccttgtgtaatggaatgcaaaaaagccaagccctccgcctagaggtcccctcacgtgaccagccccgtgtagccccgggctgacccagtgtgtgctcagcagccccaccccaccctgccccttgtcctctcagagcctcagcttctgggggagacatgctctccccacaggggggaggcactaagtcatggtcctggctggaaggtactgaaggcttctgcagctttggctgcacgtcaccctcctgagcctcacctttcctgccgtccctcctgttgtgaaatcaccacattctgtctctgcttggcttcccctccaccctaaagtctcaggtgacggactcagactcctggcttcatgtggcattctctctgctcagtgatctcacttaaatctatatacaaagccttggtcccgtgaaaacactcgtgtgcccaccagcggccttgaagaggcaggtctgggccagatgctgggcaggaaaccccagcggcagatgggcctgtgtgcacccaacgtgatgctatgcatgtctgaccgacgatccctcgaccagaatcagattcaggagctcagtttctttttcacttgggtctctggattcctgtcatagggaaggtatatcaggaggggaagaggcctttctagaattttctttgagcaggtttacaatttagcttacatttttcgactgtgaacgtgaataggctgctttttgctttcttctttccagaccccacagtagagcacttttcacttatttgggggaggcttcaggggactgttctcaccttaactcagccagaaagatgccctagttgtgatcaaaggtaactcgaggtggagggtagccctggggcccctcgacatcaccgtcattgatggagcctgaaccgtgtgctcctcggcagatgctgttgttgttacttccctccaagaggctggaaaagggctcagagctgctgagcaggaaccggagggtgacccatttcaggaggtgccggtaccagcctgactaggtacaggcaagcttgtgtgggcccaacaggcccttggtagagctggtgccagatgtgggctcagatcctgggcatgatgggccgagccacctcggatcccactgattggccagccgagcgagaaccaggctgctgcatggcactgaccgccgcttccagcttcctctgagccgcagggcctgctacgcgggcaagcgtgctgcctctcttctgtgtcgttttgttgccaaggcagaatgaaaagtccttaaccgtggactcttcctttatcccctcctttaccccacatatgcaatgacttttaattttcacttttgtagtttaatcctttgtattacaacatgaaatatagttgcatatatggacaccgacttgggaggacaggtcctgaatgtcctttctccagtgtaacatgttttactcacaaataaaattctttcagcaagttccttgtctaaatctgggaaacag

SEQ ID NO: 455298 - DNA, 3734 bp, Homo sapiens
  misc_feature (53)..(53): n is a, c, g, or t
cttccccaactctcgctccctcgtatataccgggttatcctcattaccatggncttctgcttgctgaactaggaactggtcggcttcagacaacgtctgggcctagaagccccgttcttattctccggaaccatgggctcgtgtcagttggagagagcgttgaggaggccttctattacatccataaccttgtggttgcctgtgagatccaggtaggggacagccattccagtcactctgcagtttatttagatgtgtctggggttcacatagatttttttttgatacttatcgagtaggagaggagtctttgagcaatctctttgccaaagataagctcatggatttgggacttgatcaggacaaatgctgtttcactgattgaagttggcaaaggattactgggcttttcatttctaatttttaaattttcaaatatgtcagtcactaccatttatggagtactggtgtgtataggcctggcatcaggtgcttagtgtgtgtcatcgcatatgtgatgtcacgtgacccccacagtactctttgaaaaagcaggtatacagaagtagagactcagagacttgcctgcagcttacagctgtgagttcccctccgctccgtcagccgttagttcacgttctcccctctgcttcttgacttatgtctgtggcgtagtgaagtcccaagtcctttgtaggatcctgaaaggtgctgtgttttctcatttctctgccaactttggtgcccaatatttttgtcatgctaaagaaatacttctgaaagtaactttgtgatcagtctgtcactatccattctacattttttattcttacactctagagatttggtttcttttgaaacctacatttttattcaagtcatctgaccctcttgatctcagtaaggaactcaagccatgctgtgtgtgttttggaaaaggttcgaactctggccagtgcaggaggaccagacaacttagtcctgctgaatcctgagaagtacaaagccaagtcccgttccccagggtctccggtaggggaaggcactggatcgcctcccaagtggcagattggtgagcaggaatttgaagccctcatgcggatgctcgataatctgggctacagaactggctacccttatcgataccctgctctgagagagaagtctaaaaaatacagcgatgtggaggttcctgctagtgtcacaggttactcctttgctagtgacggtgattcgggcacttgctccccactcagacacagttttcagaagcagcagcgggagaagacaagatggctgaactctggccggggcgacgaagcttccgaggaagggcagaatggaagcagtcccaagtcgaagactaagtggactaaagaggatggacatagaacttccacctctgctgtccctaacctgtttgttccattgaacactaacccaaaagaggtccaggagatgaggaacaagatccgagagcagaatttacaggacattaagacggctggccctcagtcccaggttttgtgtggtgtagtgatggacaggagcctcgtccagggagagctggtgacggcctccaaggccatcattgaaaaggagtaccagccccacgtcattgtgagcaccacgggccccaaccccttcaccacactcacagaccgtgagctggaggagtaccgcagggaggtggagaggaagcagaagggctctgaagagaatctggacgaggctagagaacagaaagaaaagagtcctccagaccagcctgcggtcccccacccgcctcccagcactcccatcaagctggaggaagaccttgtgccggagccgactactggagatgacagtgatgctgccacctttaagccaactctccccgatctgtcccctgatgaaccttcagaagcactcggcttcccaatgttagagaaggaggaggaagcccatagacccccaagccccactgaggcccctactgaggccagccccgagccagccccagacccagccccggtggctgaagaggctgccccctcagctgtcgaggagggggccgccgcggaccctggcagcgatgggtctccaggcaagtccccgtccaaaaagaagaagaagttccgtaccccgtcctttctgaagaagagcaagaagaagagtgactcctgaaagccctgcgctaacactgtcctgtccggagcgaccctggctctgccagcgtccccggccacgtctgtgctctgtccttgtgtaatggaatgcaaaaaagccaagccctccgcctagaggtcccctcacgtgaccagccccgtgtagccccgggctgacccagtgtgtgctcagcagccccaccccaccctgccccttgtcctctcagagcctcagcttctgggggagacatgctctccccacaggggggaggcactaagtcatggtcctggctggaaggtactgaaggcttctgcagctttggctgcacgtcaccctcctgagcctcacctttcctgccgtccctcctgttgtgaaatcaccacattctgtctctgcttggcttcccctccaccctaaagtctcaggtgacggactcagactcctggcttcatgtggcattctctctgctcagtgatctcacttaaatctatatacaaagccttggtcccgtgaaaacactcgtgtgcccaccagcggccttgaagaggcaggtctgggccagatgctgggcaggaaaccccagcggcagatgggcctgtgtgcacccaacgtgatgctatgcatgtctgaccgacgatccctcgaccagaatcagattcaggagctcagtttctttttcacttgggtctctggattcctgtcatagggaaggtatatcaggaggggaagaggcctttctagaattttctttgagcaggtttacaatttagcttacatttttcgactgtgaacgtgaataggctgctttttgctttcttctttccagaccccacagtagagcacttttcacttatttgggggaggcttcaggggactgttctcaccttaactcagccagaaagatgccctagttgtgatcaaaggtaactcgaggtggagggtagccctggggcccctcgacatcaccgtcattgatggagcctgaaccgtgtgctcctcggcagatgctgttgttgttacttccctccaagaggctggaaaagggctcagagctgctgagcaggaaccggagggtgacccatttcaggaggtgccggtaccagcctgactaggtacaggcaagcttgtgtgggcccaacaggcccttggtagagctggtgccagatgtgggctcagatcctgggcatgatgggccgagccacctcggatcccactgattggccagccgagcgagaaccaggctgctgcatggcactgaccgccgcttccagcttcctctgagccgcagggcctgctacgcgggcaagcgtgctgcctctcttctgtgtcgttttgttgccaaggcagaatgaaaagtccttaaccgtggactcttcctttatcccctcctttaccccacatatgcaatgacttttaattttcacttttgtagtttaatcctttgtattacaacatgaaatatagttgcatatatggacaccgacttgggaggacaggtcctgaatgtcctttctccagtgtaacatgttttactcacaaataaaattctttcagcaagttccttgtctaaatctgggaaacag

SEQ ID NO: 455299 - DNA, 6297 bp, Homo sapiens
  misc_feature (53)..(53): n is a, c, g, or t
cttccccaactctcgctccctcgtatataccgggttatcctcattaccatggncttctgcttgctgaactaggaactggtcggcttcagacaacgtctgggcctagaagccccgttcttattctccggaaccatgggctcgtgtcagttggagagagcgttgaggaggccttctattacatccataaccttgtggttgcctgtgagatccaggttcgaactctggccagtgcaggaggaccagacaacttagtcctgctgaatcctgagaagtacaaagccaagtcccgttccccagggtctccggtaggggaaggcactggatcgcctcccaagtggcagattggtgagcaggaatttgaagccctcatgcggatgctcgataatctgggctacagaactggctacccttatcgataccctgctctgagagagaagtctaaaaaatacagcgatgtggaggttcctgctagtgtcacaggttactcctttgctagtgacggtgattcgggcacttgctccccactcagacacagttttcagaagcagcagcgggagaagacaagatggctgaactctggccggggcgacgaagcttccgaggaagggcagaatggaagcagtcccaagtcgaagactaaggtgtggacgaacattacacacgatcacgtgaaacccttgctgcagtctctctcgtccggtgtctgcgtgccaagctgtattaccaactgcttggtctgtgcctaccttactgttcatagttagatgacgtagagcaagttgggtagctggggcttcggaggctttgggaatccagcctttctgacccaggtgtaaagcgaaccttccttattcactttcttgtagtctgaacctaagtccactgaatgcattactaaaattcggataatactatctgcttgaaactgcttaagatgtaatgtaactccgcagtagttccagtatatctccgtatatagcaaaaatatacaataatttacatgtattaacctacaaataggagctcttcttatttaattcaaattatattcagggactcttaatacttcatgcacaaaaagacacttcagtcctaaacctgtattttagtgttgtgaactccagtggtttcaagtcactaaagtttcttaagtcttcagtgttttcttaagcagttttcccttgtggctccctggcgtgttctctgctgactcttgtcccctgcccttagtgttattcccctgctttctatcccaaagcctccgaatgcacacccccagctgccctctgcatggactgttgcatgtgagtagacggccatagtggcgagtcaccttctgactcctgttgggtgcggcatgacccaagtgcagcgcaggccatctgcaggcaccagcgacagacgctgcaaggggtgcttcgtttcagcgttaatgccgctcaagttatcgtttgtcctgagaggtgctcccatgtcgtggtgctgagacctcctctgaagatgggtctttattcctcctgtaacctacctctaacagtccacccagctctgctttaaactgtatgtagaagaggcccatttccagaagcccctggaatggaggagacaggggctgaagcagactcatctgtgcatgactagttcattaggagttcagttgaaattagattagatgctcctaaaaccatgggcaaccaaatacataaagtggggctttcttttccccttgtaacagtgttttactttatagatttatttaaagaaaaaaagttttatcttccccaggtggtcctggtgttttcctgacgcagttggtgagaagcctccgtgctcctgagcggccgcgtcacctgggcagggaccctgtgtggccatggggctctgagcatgggagtgcgtctctcctcttctttcctgccctccttgtcttctttccccccttcttcctgtctccccttttctttcatttgtttattttttacttgtttcacttgttaaaggaagtgggcgttataaaacaaaaaaaaaaaaccccaaaacacctttctgcggctgatgtgaagcacagtgctgaattgccatgaggaagttttccaaagcgtttaggcagcagcgcgagctttatttaccattagcttgcaaaacaactaagtcactttaggcctagtagtcaatgtgtacatccaaggggaggccttgctccgcatttatatttgtttcttactgttctggagtgacagagtccatgcagtgctcccaggttggtatcttttcatttataatgattgctgttactttttcaaatgtgttcaagtttctgaggttgctgtttgaaatgctttgactaaaaattatttttaataaaacgctggagttgtttttatctgagaagataaccatcagtgagtacccagagctccatgcccattccacactctcctcgcagtggctcagcatttgctggttttgttgctttttttaaagtcgtatggtttatggctatcttattgcctctcgaaagtattctgaaaggcataacatttgctctcgaagatgggcttgttttaatgttcagtgcctactcatgccttagaatttgattaaaaatctcagatttgattggagatccaaaaaaaaattatgggtggaaggctcagcatgctgacgagatgcactgatactaaaacagcctttaaatattaaggactcatgaagcgcttcaagtttgtttgggatatttttgtagcactcaaaaatattaagttatataaaatattcgacatcaccaaactcttcttccaggtagctaccgtgtaagtgtccatacagtaatgttcttgggttgaaagttacgcagacagtgcattctgatgctgtcatttactttaatgcaaaactttggtgatgcccactcttgcctcacggtgcaggctcctccctaaccctgggtagcagcatcacattgcttttcatgaccctgtcatctcatgcttccagttggctttggtgttggatgattttcagagcagtgaaccaatggtctctgaggggcctcccctgctggtcccagggttatggggctcagctctgtcgtcagcctaccttatgacccagattcagctgggctttccagatggtggttttccatcagtcatgactttgacttccagcattaactggtctttatgtggctgcatcctgctcccatggcgactctgctgagtgacccagattagatgtggtcattggttcagtcctctctgtgatgttcagtgcatgaccagatgtgagataaactgaatagattggatgctatgtcacttattgttgtcataattctgacttttcaactgttcttgatattacagtggactaaagaggatggacatagaacttccacctctgctgtccctaacctgtttgttccattgaacactaacccaaaagaggtccaggagatgaggaacaagatccgagagcagaatttacaggacattaagacggctggccctcagtcccaggttttgtgtggtgtagtgatggacaggagcctcgtccagggagagctggtgacggcctccaaggccatcattgaaaaggagtaccagccccacgtcattgtgagcaccacgggccccaaccccttcaccacactcacagaccgtgagctggaggagtaccgcagggaggtggagaggaagcagaagggctctgaagagaatctggacgaggctagagaacagaaagaaaagagtcctccagaccagcctgcggtcccccacccgcctcccagcactcccatcaagctggaggaaggtgagctctgggtggcagcggccgccactgtgggagggtgcacggctcgtgcgcgctgtggcggaatgtggcgggagtcgtgttaacagcaacacggaagtgtgtgcttgcatcagcgccaggacgtgacacctttctcctcctatattgcttctgtcctgggtaactccaggcaaaacagatttgtatgtgagctgtgaccaggtaggaaggccggcctcgggggtcggaacccaccatggttgctggtgtccacgttgcccattgctcgcacactcctcgtgctgtgttgtcatgcagatgccaccttcggaggtgccctccgctgtgtgagccacacgccggctgcctctcagccaccgtgtgtctgtggtgtgtgatcccgggtgtctgtccctcggtctcgtacatccatgtctctcgtgaagcccgtggccctgcctttcttcttctgtaacctgatggctgtgactgaatgcatagattctctccttgtgcttttttctccctgtggctgcgtcacaagcaggagacggatgcgctagagagtacctgttaccctaaccttgtgccggagccgactactggagatgacagtgatgctgccacctttaagccaactctccccgatctgtcccctgatgaaccttcagaagcactcggcttcccaatgttagagaaggaggaggaagcccatagacccccaagccccactgaggcccctactgaggccagccccgagccagccccagacccagccccggtggctgaagaggctgccccctcagctgtcgaggagggggccgccgcggaccctggcagcgatgggtctccaggcaagtccccgtccaaaaagaagaagaagttccgtaccccgtcctttctgaagaagagcaagaagaagagtgactcctgaaagccctgcgctaacactgtcctgtccggagcgaccctggctctgccagcgtccccggccacgtctgtgctctgtccttgtgtaatggaatgcaaaaaagccaagccctccgcctagaggtcccctcacgtgaccagccccgtgtagccccgggctgacccagtgtgtgctcagcagccccaccccaccctgccccttgtcctctcagagcctcagcttctgggggagacatgctctccccacaggggggaggcactaagtcatggtcctggctggaaggtactgaaggcttctgcagctttggctgcacgtcaccctcctgagcctcacctttcctgccgtccctcctgttgtgaaatcaccacattctgtctctgcttggcttcccctccaccctaaagtctcaggtgacggactcagactcctggcttcatgtggcattctctctgctcagtgatctcacttaaatctatatacaaagccttggtcccgtgaaaacactcgtgtgcccaccagcggccttgaagaggcaggtctgggccagatgctgggcaggaaaccccagcggcagatgggcctgtgtgcacccaacgtgatgctatgcatgtctgaccgacgatccctcgaccagaatcagattcaggagctcagtttctttttcacttgggtctctggattcctgtcatagggaaggtatatcaggaggggaagaggcctttctagaattttctttgagcaggtttacaatttagcttacatttttcgactgtgaacgtgaataggctgctttttgctttcttctttccagaccccacagtagagcacttttcacttatttgggggaggcttcaggggactgttctcaccttaactcagccagaaagatgccctagttgtgatcaaaggtaactcgaggtggagggtagccctggggcccctcgacatcaccgtcattgatggagcctgaaccgtgtgctcctcggcagatgctgttgttgttacttccctccaagaggctggaaaagggctcagagctgctgagcaggaaccggagggtgacccatttcaggaggtgccggtaccagcctgactaggtacaggcaagcttgtgtgggcccaacaggcccttggtagagctggtgccagatgtgggctcagatcctgggcatgatgggccgagccacctcggatcccactgattggccagccgagcgagaaccaggctgctgcatggcactgaccgccgcttccagcttcctctgagccgcagggcctgctacgcgggcaagcgtgctgcctctcttctgtgtcgttttgttgccaaggcagaatgaaaagtccttaaccgtggactcttcctttatcccctcctttaccccacatatgcaatgacttttaattttcacttttgtagtttaatcctttgtattacaacatgaaatatagttgcatatatggacaccgacttgggaggacaggtcctgaatgtcctttctccagtgtaacatgttttactcacaaataaaattctttcagcaagttccttgtctaaatctgggaaacag

SEQ ID NO: 455300 - DNA, 5681 bp, Homo sapiens
  misc_feature (53)..(53): n is a, c, g, or t
cttccccaactctcgctccctcgtatataccgggttatcctcattaccatggncttctgcttgctgaactaggaactggtcggcttcagacaacgtctgggcctagaagccccgttcttattctccggaaccatgggctcgtgtcagttggagagagcgttgaggaggccttctattacatccataaccttgtggttgcctgtgagatccaggttcgaactctggccagtgcaggaggaccagacaacttagtcctgctgaatcctgagaagtacaaagccaagtcccgttccccagggtctccggtaggggaaggcactggatcgcctcccaagtggcagattggtgagcaggaatttgaagccctcatgcggatgctcgataatctgggctacagaactggctacccttatcgataccctgctctgagagagaagtctaaaaaatacagcgatgtggaggttcctgctagtgtcacaggttactcctttgctagtgacggtgattcgggcacttgctccccactcagacacagttttcagaagcagcagcgggagaagacaagatggctgaactctggccggggcgacgaagcttccgaggaagggcagaatggaagcagtcccaagtcgaagactaaggtgtggacgaacattacacacgatcacgtgaaacccttgctgcagtctctctcgtccggtgtctgcgtgccaagctgtattaccaactgcttggtctgtgcctaccttactgttcatagttagatgacgtagagcaagttgggtagctggggcttcggaggctttgggaatccagcctttctgacccaggtgtaaagcgaaccttccttattcactttcttgtagtctgaacctaagtccactgaatgcattactaaaattcggataatactatctgcttgaaactgcttaagatgtaatgtaactccgcagtagttccagtatatctccgtatatagcaaaaatatacaataatttacatgtattaacctacaaataggagctcttcttatttaattcaaattatattcagggactcttaatacttcatgcacaaaaagacacttcagtcctaaacctgtattttagtgttgtgaactccagtggtttcaagtcactaaagtttcttaagtcttcagtgttttcttaagcagttttcccttgtggctccctggcgtgttctctgctgactcttgtcccctgcccttagtgttattcccctgctttctatcccaaagcctccgaatgcacacccccagctgccctctgcatggactgttgcatgtgagtagacggccatagtggcgagtcaccttctgactcctgttgggtgcggcatgacccaagtgcagcgcaggccatctgcaggcaccagcgacagacgctgcaaggggtgcttcgtttcagcgttaatgccgctcaagttatcgtttgtcctgagaggtgctcccatgtcgtggtgctgagacctcctctgaagatgggtctttattcctcctgtaacctacctctaacagtccacccagctctgctttaaactgtatgtagaagaggcccatttccagaagcccctggaatggaggagacaggggctgaagcagactcatctgtgcatgactagttcattaggagttcagttgaaattagattagatgctcctaaaaccatgggcaaccaaatacataaagtggggctttcttttccccttgtaacagtgttttactttatagatttatttaaagaaaaaaagttttatcttccccaggtggtcctggtgttttcctgacgcagttggtgagaagcctccgtgctcctgagcggccgcgtcacctgggcagggaccctgtgtggccatggggctctgagcatgggagtgcgtctctcctcttctttcctgccctccttgtcttctttccccccttcttcctgtctccccttttctttcatttgtttattttttacttgtttcacttgttaaaggaagtgggcgttataaaacaaaaaaaaaaaaccccaaaacacctttctgcggctgatgtgaagcacagtgctgaattgccatgaggaagttttccaaagcgtttaggcagcagcgcgagctttatttaccattagcttgcaaaacaactaagtcactttaggcctagtagtcaatgtgtacatccaaggggaggccttgctccgcatttatatttgtttcttactgttctggagtgacagagtccatgcagtgctcccaggttggtatcttttcatttataatgattgctgttactttttcaaatgtgttcaagtttctgaggttgctgtttgaaatgctttgactaaaaattatttttaataaaacgctggagttgtttttatctgagaagataaccatcagtgagtacccagagctccatgcccattccacactctcctcgcagtggctcagcatttgctggttttgttgctttttttaaagtcgtatggtttatggctatcttattgcctctcgaaagtattctgaaaggcataacatttgctctcgaagatgggcttgttttaatgttcagtgcctactcatgccttagaatttgattaaaaatctcagatttgattggagatccaaaaaaaaattatgggtggaaggctcagcatgctgacgagatgcactgatactaaaacagcctttaaatattaaggactcatgaagcgcttcaagtttgtttgggatatttttgtagcactcaaaaatattaagttatataaaatattcgacatcaccaaactcttcttccaggtagctaccgtgtaagtgtccatacagtaatgttcttgggttgaaagttacgcagacagtgcattctgatgctgtcatttactttaatgcaaaactttggtgatgcccactcttgcctcacggtgcaggctcctccctaaccctgggtagcagcatcacattgcttttcatgaccctgtcatctcatgcttccagttggctttggtgttggatgattttcagagcagtgaaccaatggtctctgaggggcctcccctgctggtcccagggttatggggctcagctctgtcgtcagcctaccttatgacccagattcagctgggctttccagatggtggttttccatcagtcatgactttgacttccagcattaactggtctttatgtggctgcatcctgctcccatggcgactctgctgagtgacccagattagatgtggtcattggttcagtcctctctgtgatgttcagtgcatgaccagatgtgagataaactgaatagattggatgctatgtcacttattgttgtcataattctgacttttcaactgttcttgatattacagtggactaaagaggatggacatagaacttccacctctgctgtccctaacctgtttgttccattgaacactaacccaaaagaggtccaggagatgaggaacaagatccgagagcagaatttacaggacattaagacggctggccctcagtcccaggttttgtgtggtgtagtgatggacaggagcctcgtccagggagagctggtgacggcctccaaggccatcattgaaaaggagtaccagccccacgtcattgtgagcaccacgggccccaaccccttcaccacactcacagaccgtgagctggaggagtaccgcagggaggtggagaggaagcagaagggctctgaagagaatctggacgaggctagagaacagaaagaaaagagtcctccagaccagcctgcggtcccccacccgcctcccagcactcccatcaagctggaggaagaccttgtgccggagccgactactggagatgacagtgatgctgccacctttaagccaactctccccgatctgtcccctgatgaaccttcagaagcactcggcttcccaatgttagagaaggaggaggaagcccatagacccccaagccccactgaggcccctactgaggccagccccgagccagccccagacccagccccggtggctgaagaggctgccccctcagctgtcgaggagggggccgccgcggaccctggcagcgatgggtctccaggcaagtccccgtccaaaaagaagaagaagttccgtaccccgtcctttctgaagaagagcaagaagaagagtgactcctgaaagccctgcgctaacactgtcctgtccggagcgaccctggctctgccagcgtccccggccacgtctgtgctctgtccttgtgtaatggaatgcaaaaaagccaagccctccgcctagaggtcccctcacgtgaccagccccgtgtagccccgggctgacccagtgtgtgctcagcagccccaccccaccctgccccttgtcctctcagagcctcagcttctgggggagacatgctctccccacaggggggaggcactaagtcatggtcctggctggaaggtactgaaggcttctgcagctttggctgcacgtcaccctcctgagcctcacctttcctgccgtccctcctgttgtgaaatcaccacattctgtctctgcttggcttcccctccaccctaaagtctcaggtgacggactcagactcctggcttcatgtggcattctctctgctcagtgatctcacttaaatctatatacaaagccttggtcccatgctgggcaggaaaccccagcggcagatgggcctgtgtgcacccaacgtgatgctatgcatgtctgaccgacgatccctcgaccagaatcagattcaggagctcagtttctttttcacttgggtctctggattcctgtcatagggaaggtatatcaggaggggaagaggcctttctagaattttctttgagcaggtttacaatttagcttacatttttcgactgtgaacgtgaataggctgctttttgctttcttctttccagaccccacagtagagcacttttcacttatttgggggaggcttcaggggactgttctcaccttaactcagccagaaagatgccctagttgtgatcaaaggtaactcgaggtggagggtagccctggggcccctcgacatcaccgtcattgatggagcctgaaccgtgtgctcctcggcagatgctgttgttgttacttccctccaagaggctggaaaagggctcagagctgctgagcaggaaccggagggtgacccatttcaggaggtgccggtaccagcctgactaggtacaggcaagcttgtgtgggcccaacaggcccttggtagagctggtgccagatgtgggctcagatcctgggcatgatgggccgagccacctcggatcccactgattggccagccgagcgagaaccaggctgctgcatggcactgaccgccgcttccagcttcctctgagccgcagggcctgctacgcgggcaagcgtgctgcctctcttctgtgtcgttttgttgccaaggcagaatgaaaagtccttaaccgtggactcttcctttatcccctcctttaccccacatatgcaatgacttttaattttcacttttgtagtttaatcctttgtattacaacatgaaatatagttgcatatatggacaccgacttgggaggacaggtcctgaatgtcctttctccagtgtaacatgttttactcacaaataaaattctttcagcaagttccttgtctaaatctgggaaacag

SEQ ID NO: 455301 - DNA, 5721 bp, Homo sapiens
  misc_feature (53)..(53): n is a, c, g, or t
cttccccaactctcgctccctcgtatataccgggttatcctcattaccatggncttctgcttgctgaactaggaactggtcggcttcagacaacgtctgggcctagaagccccgttcttattctccggaaccatgggctcgtgtcagttggagagagcgttgaggaggccttctattacatccataaccttgtggttgcctgtgagatccaggttcgaactctggccagtgcaggaggaccagacaacttagtcctgctgaatcctgagaagtacaaagccaagtcccgttccccagggtctccggtaggggaaggcactggatcgcctcccaagtggcagattggtgagcaggaatttgaagccctcatgcggatgctcgataatctgggctacagaactggctacccttatcgataccctgctctgagagagaagtctaaaaaatacagcgatgtggaggttcctgctagtgtcacaggttactcctttgctagtgacggtgattcgggcacttgctccccactcagacacagttttcagaagcagcagcgggagaagacaagatggctgaactctggccggggcgacgaagcttccgaggaagggcagaatggaagcagtcccaagtcgaagactaaggtgtggacgaacattacacacgatcacgtgaaacccttgctgcagtctctctcgtccggtgtctgcgtgccaagctgtattaccaactgcttggtctgtgcctaccttactgttcatagttagatgacgtagagcaagttgggtagctggggcttcggaggctttgggaatccagcctttctgacccaggtgtaaagcgaaccttccttattcactttcttgtagtctgaacctaagtccactgaatgcattactaaaattcggataatactatctgcttgaaactgcttaagatgtaatgtaactccgcagtagttccagtatatctccgtatatagcaaaaatatacaataatttacatgtattaacctacaaataggagctcttcttatttaattcaaattatattcagggactcttaatacttcatgcacaaaaagacacttcagtcctaaacctgtattttagtgttgtgaactccagtggtttcaagtcactaaagtttcttaagtcttcagtgttttcttaagcagttttcccttgtggctccctggcgtgttctctgctgactcttgtcccctgcccttagtgttattcccctgctttctatcccaaagcctccgaatgcacacccccagctgccctctgcatggactgttgcatgtgagtagacggccatagtggcgagtcaccttctgactcctgttgggtgcggcatgacccaagtgcagcgcaggccatctgcaggcaccagcgacagacgctgcaaggggtgcttcgtttcagcgttaatgccgctcaagttatcgtttgtcctgagaggtgctcccatgtcgtggtgctgagacctcctctgaagatgggtctttattcctcctgtaacctacctctaacagtccacccagctctgctttaaactgtatgtagaagaggcccatttccagaagcccctggaatggaggagacaggggctgaagcagactcatctgtgcatgactagttcattaggagttcagttgaaattagattagatgctcctaaaaccatgggcaaccaaatacataaagtggggctttcttttccccttgtaacagtgttttactttatagatttatttaaagaaaaaaagttttatcttccccaggtggtcctggtgttttcctgacgcagttggtgagaagcctccgtgctcctgagcggccgcgtcacctgggcagggaccctgtgtggccatggggctctgagcatgggagtgcgtctctcctcttctttcctgccctccttgtcttctttccccccttcttcctgtctccccttttctttcatttgtttattttttacttgtttcacttgttaaaggaagtgggcgttataaaacaaaaaaaaaaaaccccaaaacacctttctgcggctgatgtgaagcacagtgctgaattgccatgaggaagttttccaaagcgtttaggcagcagcgcgagctttatttaccattagcttgcaaaacaactaagtcactttaggcctagtagtcaatgtgtacatccaaggggaggccttgctccgcatttatatttgtttcttactgttctggagtgacagagtccatgcagtgctcccaggttggtatcttttcatttataatgattgctgttactttttcaaatgtgttcaagtttctgaggttgctgtttgaaatgctttgactaaaaattatttttaataaaacgctggagttgtttttatctgagaagataaccatcagtgagtacccagagctccatgcccattccacactctcctcgcagtggctcagcatttgctggttttgttgctttttttaaagtcgtatggtttatggctatcttattgcctctcgaaagtattctgaaaggcataacatttgctctcgaagatgggcttgttttaatgttcagtgcctactcatgccttagaatttgattaaaaatctcagatttgattggagatccaaaaaaaaattatgggtggaaggctcagcatgctgacgagatgcactgatactaaaacagcctttaaatattaaggactcatgaagcgcttcaagtttgtttgggatatttttgtagcactcaaaaatattaagttatataaaatattcgacatcaccaaactcttcttccaggtagctaccgtgtaagtgtccatacagtaatgttcttgggttgaaagttacgcagacagtgcattctgatgctgtcatttactttaatgcaaaactttggtgatgcccactcttgcctcacggtgcaggctcctccctaaccctgggtagcagcatcacattgcttttcatgaccctgtcatctcatgcttccagttggctttggtgttggatgattttcagagcagtgaaccaatggtctctgaggggcctcccctgctggtcccagggttatggggctcagctctgtcgtcagcctaccttatgacccagattcagctgggctttccagatggtggttttccatcagtcatgactttgacttccagcattaactggtctttatgtggctgcatcctgctcccatggcgactctgctgagtgacccagattagatgtggtcattggttcagtcctctctgtgatgttcagtgcatgaccagatgtgagataaactgaatagattggatgctatgtcacttattgttgtcataattctgacttttcaactgttcttgatattacagtggactaaagaggatggacatagaacttccacctctgctgtccctaacctgtttgttccattgaacactaacccaaaagaggtccaggagatgaggaacaagatccgagagcagaatttacaggacattaagacggctggccctcagtcccaggttttgtgtggtgtagtgatggacaggagcctcgtccagggagagctggtgacggcctccaaggccatcattgaaaaggagtaccagccccacgtcattgtgagcaccacgggccccaaccccttcaccacactcacagaccgtgagctggaggagtaccgcagggaggtggagaggaagcagaagggctctgaagagaatctggacgaggctagagaacagaaagaaaagagtcctccagaccagcctgcggtcccccacccgcctcccagcactcccatcaagctggaggaagaccttgtgccggagccgactactggagatgacagtgatgctgccacctttaagccaactctccccgatctgtcccctgatgaaccttcagaagcactcggcttcccaatgttagagaaggaggaggaagcccatagacccccaagccccactgaggcccctactgaggccagccccgagccagccccagacccagccccggtggctgaagaggctgccccctcagctgtcgaggagggggccgccgcggaccctggcagcgatgggtctccaggcaagtccccgtccaaaaagaagaagaagttccgtaccccgtcctttctgaagaagagcaagaagaagagtgactcctgaaagccctgcgctaacactgtcctgtccggagcgaccctggctctgccagcgtccccggccacgtctgtgctctgtccttgtgtaatggaatgcaaaaaagccaagccctccgcctagaggtcccctcacgtgaccagccccgtgtagccccgggctgacccagtgtgtgctcagcagccccaccccaccctgccccttgtcctctcagagcctcagcttctgggggagacatgctctccccacaggggggaggcactaagtcatggtcctggctggaaggtactgaaggcttctgcagctttggctgcacgtcaccctcctgagcctcacctttcctgccgtccctcctgttgtgaaatcaccacattctgtctctgcttggcttcccctccaccctaaagtctcaggtgacggactcagactcctggcttcatgtggcattctctctgctcagtgatctcacttaaatctatatacaaagccttggtcccgtgaaaacactcgtgtgcccaccagcggccttgaagaggcaggtctgggccagatgctgggcaggaaaccccagcggcagatgggcctgtgtgcacccaacgtgatgctatgcatgtctgaccgacgatccctcgaccagaatcagattcaggagctcagtttctttttcacttgggtctctggattcctgtcatagggaaggtatatcaggaggggaagaggcctttctagaattttctttgagcaggtttacaatttagcttacatttttcgactgtgaacgtgaataggctgctttttgctttcttctttccagaccccacagtagagcacttttcacttatttgggggaggcttcaggggactgttctcaccttaactcagccagaaagatgccctagttgtgatcaaaggtaactcgaggtggagggtagccctggggcccctcgacatcaccgtcattgatggagcctgaaccgtgtgctcctcggcagatgctgttgttgttacttccctccaagaggctggaaaagggctcagagctgctgagcaggaaccggagggtgacccatttcaggaggtgccggtaccagcctgactaggtacaggcaagcttgtgtgggcccaacaggcccttggtagagctggtgccagatgtgggctcagatcctgggcatgatgggccgagccacctcggatcccactgattggccagccgagcgagaaccaggctgctgcatggcactgaccgccgcttccagcttcctctgagccgcagggcctgctacgcgggcaagcgtgctgcctctcttctgtgtcgttttgttgccaaggcagaatgaaaagtccttaaccgtggactcttcctttatcccctcctttaccccacatatgcaatgacttttaattttcacttttgtagtttaatcctttgtattacaacatgaaatatagttgcatatatggacaccgacttgggaggacaggtcctgaatgtccgttgggcgaggttaacatttttttctcgcccttttttttcttttatacagaaaccggggcg

SEQ ID NO: 455302 - DNA, 5694 bp, Homo sapiens
  misc_feature (53)..(53): n is a, c, g, or t
cttccccaactctcgctccctcgtatataccgggttatcctcattaccatggncttctgcttgctgaactaggaactggtcggcttcagacaacgtctgggcctagaagccccgttcttattctccggaaccatgggctcgtgtcagttggagagagcgttgaggaggccttctattacatccataaccttgtggttgcctgtgagatccaggttcgaactctggccagtgcaggaggaccagacaacttagtcctgctgaatcctgagaagtacaaagccaagtcccgttccccagggtctccggtaggggaaggcactggatcgcctcccaagtggcagattggtgagcaggaatttgaagccctcatgcggatgctcgataatctgggctacagaactggctacccttatcgataccctgctctgagagagaagtctaaaaaatacagcgatgtggaggttcctgctagtgtcacaggttactcctttgctagtgacggtgattcgggcacttgctccccactcagacacagttttcagaagcagcagcgggagaagacaagatggctgaactctggccggggcgacgaagcttccgaggaagggcagaatggaagcagtcccaagtcgaagactaaggtgtggacgaacattacacacgatcacgtgaaacccttgctgcagtctctctcgtccggtgtctgcgtgccaagctgtattaccaactgcttggtctgtgcctaccttactgttcatagttagatgacgtagagcaagttgggtagctggggcttcggaggctttgggaatccagcctttctgacccaggtgtaaagcgaaccttccttattcactttcttgtagtctgaacctaagtccactgaatgcattactaaaattcggataatactatctgcttgaaactgcttaagatgtaatgtaactccgcagtagttccagtatatctccgtatatagcaaaaatatacaataatttacatgtattaacctacaaataggagctcttcttatttaattcaaattatattcagggactcttaatacttcatgcacaaaaagacacttcagtcctaaacctgtattttagtgttgtgaactccagtggtttcaagtcactaaagtttcttaagtcttcagtgttttcttaagcagttttcccttgtggctccctggcgtgttctctgctgactcttgtcccctgcccttagtgttattcccctgctttctatcccaaagcctccgaatgcacacccccagctgccctctgcatggactgttgcatgtgagtagacggccatagtggcgagtcaccttctgactcctgttgggtgcggcatgacccaagtgcagcgcaggccatctgcaggcaccagcgacagacgctgcaaggggtgcttcgtttcagcgttaatgccgctcaagttatcgtttgtcctgagaggtgctcccatgtcgtggtgctgagacctcctctgaagatgggtctttattcctcctgtaacctacctctaacagtccacccagctctgctttaaactgtatgtagaagaggcccatttccagaagcccctggaatggaggagacaggggctgaagcagactcatctgtgcatgactagttcattaggagttcagttgaaattagattagatgctcctaaaaccatgggcaaccaaatacataaagtggggctttcttttccccttgtaacagtgttttactttatagatttatttaaagaaaaaaagttttatcttccccaggtggtcctggtgttttcctgacgcagttggtgagaagcctccgtgctcctgagcggccgcgtcacctgggcagggaccctgtgtggccatggggctctgagcatgggagtgcgtctctcctcttctttcctgccctccttgtcttctttccccccttcttcctgtctccccttttctttcatttgtttattttttacttgtttcacttgttaaaggaagtgggcgttataaaacaaaaaaaaaaaaccccaaaacacctttctgcggctgatgtgaagcacagtgctgaattgccatgaggaagttttccaaagcgtttaggcagcagcgcgagctttatttaccattagcttgcaaaacaactaagtcactttaggcctagtagtcaatgtgtacatccaaggggaggccttgctccgcatttatatttgtttcttactgttctggagtgacagagtccatgcagtgctcccaggttggtatcttttcatttataatgattgctgttactttttcaaatgtgttcaagtttctgaggttgctgtttgaaatgctttgactaaaaattatttttaataaaacgctggagttgtttttatctgagaagataaccatcagtgagtacccagagctccatgcccattccacactctcctcgcagtggctcagcatttgctggttttgttgctttttttaaagtcgtatggtttatggctatcttattgcctctcgaaagtattctgaaaggcataacatttgctctcgaagatgggcttgttttaatgttcagtgcctactcatgccttagaatttgattaaaaatctcagatttgattggagatccaaaaaaaaattatgggtggaaggctcagcatgctgacgagatgcactgatactaaaacagcctttaaatattaaggactcatgaagcgcttcaagtttgtttgggatatttttgtagcactcaaaaatattaagttatataaaatattcgacatcaccaaactcttcttccaggtagctaccgtgtaagtgtccatacagtaatgttcttgggttgaaagttacgcagacagtgcattctgatgctgtcatttactttaatgcaaaactttggtgatgcccactcttgcctcacggtgcaggctcctccctaaccctgggtagcagcatcacattgcttttcatgaccctgtcatctcatgcttccagttggctttggtgttggatgattttcagagcagtgaaccaatggtctctgaggggcctcccctgctggtcccagggttatggggctcagctctgtcgtcagcctaccttatgacccagattcagctgggctttccagatggtggttttccatcagtcatgactttgacttccagcattaactggtctttatgtggctgcatcctgctcccatggcgactctgctgagtgacccagattagatgtggtcattggttcagtcctctctgtgatgttcagtgcatgaccagatgtgagataaactgaatagattggatgctatgtcacttattgttgtcataattctgacttttcaactgttcttgatattacagtggactaaagaggatggacatagaacttccacctctgctgtccctaacctgtttgttccattgaacactaacccaaaagaggtccaggagatgaggaacaagatccgagagcagaatttacaggacattaagacggctggccctcagtcccaggttttgtgtggtgtagtgatggacaggagcctcgtccagggagagctggtgacggcctccaaggccatcattgaaaaggagtaccagccccacgtcattgtgagcaccacgggccccaaccccttcaccacactcacagaccgtgagctggaggagtaccgcagggaggtggagaggaagcagaagggctctgaagagaatctggacgaggctagagaacagaaagaaaagagtcctccagaccagcctgcggtcccccacccgcctcccagcactcccatcaagctggaggaagaccttgtgccggagccgactactggagatgacagtgatgctgccacctttaagccaactctccccgatctgtcccctgatgaaccttcagaagcactcggcttcccaatgttagagaaggaggaggaagcccatagacccccaagccccactgaggcccctactgaggccagccccgagccagccccagacccagccccggtggctgaagaggctgccccctcagctgtcgaggagggggccgccgcggaccctggcagcgatgggtctccaggcaagtccccgtccaaaaagaagaagaagttccgtaccccgtcctttctgaagaagagcaagaagaagagtgactcctgaaagccctgcgctaacactgtcctgtccggagcgaccctggctctgccagcgtccccggccacgtctgtgctctgtccttgtgtaatggaatgcaaaaaagccaagccctccgcctagaggtcccctcacgtgaccagccccgtgtagccccgggctgacccagtgtgtgctcagcagccccaccccaccctgccccttgtcctctcagagcctcagcttctgggggagacatgctctccccacaggggggaggcactaagtcatggtcctggctggaaggtactgaaggcttctgcagctttggctgcacgtcaccctcctgagcctcacctttcctgccgtccctcctgttgtgaaatcaccacattctgtctctgcttggcttcccctccaccctaaagtctcaggtgacggactcagactcctggcttcatgtggcattctctctgctcagtgatctcacttaaatctatatacaaagccttggtcccgtgaaaacactcgtgtgcccaccagcggccttgaagaggcaggtctgggccagatgctgggcaggaaaccccagcggcagatgggcctgtgtgcacccaacgtgatgctatgcatgtctgaccgacgatccctcgaccagaatcagattcaggagctcagtttctttttcacttgggtctctggattcctgtcatagggaaggtatatcaggaggggaagaggcctttctagaattttctttgagcaggtttacaatttagcttacatttttcgactgtgaacgtgaataggctgctttttgctttcttctttccagaccccacagtagagcacttttcacttatttgggggaggcttcaggggactgttctcaccttaactcagccagaaagatgccctagttgtgatcaaaggtaactcgaggtggagggtagccctggggcccctcgacatcaccgtcattgatggagcctgaaccgtgtgctcctcggcagatgctgttgttgttacttccctccaagaggctggaaaagggctcagagctgctgagcaggaaccggagggtgacccatttcaggaggtgccggtaccagcctgactaggtacaggcaagcttgtgtgggcccaacaggcccttggtagagctggtgccagatgatcccactgattggccagccgagcgagaaccaggctgctgcatggcactgaccgccgcttccagcttcctctgagccgcagggcctgctacgcgggcaagcgtgctgcctctcttctgtgtcgttttgttgccaaggcagaatgaaaagtccttaaccgtggactcttcctttatcccctcctttaccccacatatgcaatgacttttaattttcacttttgtagtttaatcctttgtattacaacatgaaatatagttgcatatatggacaccgacttgggaggacaggtcctgaatgtcctttctccagtgtaacatgttttactcacaaataaaattctttcagcaagttccttgtctaaatctgggaaacag

SEQ ID NO: 455303 - DNA, 4907 bp, Homo sapiens
  misc_feature (53)..(53): n is a, c, g, or t
cttccccaactctcgctccctcgtatataccgggttatcctcattaccatggncttctgcttgctgaactaggaactggtcggcttcagacaacgtctgggcctagaagccccgttcttattctccggaaccatgggctcgtgtcagttggagagagcgttgaggaggccttctattacatccataaccttgtggttgcctgtgagatccaggttcgaactctggccagtgcaggaggaccagacaacttagtcctgctgaatcctgagaagtacaaagccaagtcccgttccccagggtctccggtaggggaaggcactggatcgcctcccaagtggcagattggtgagcaggaatttgaagccctcatgcggatgctcgataatctgggctacagaactggctacccttatcgataccctgctctgagagagaagtctaaaaaatacagcgatgtggaggttcctgctagtgtcacaggttactcctttgctagtgacggtgattcgggcacttgctccccactcagacacagttttcagaagcagcagcgggagaagacaagatggctgaactctggccggggcgacgaagcttccgaggaagggcagaatggaagcagtcccaagtcgaagactaaggtgtggacgaacattacacacgatcacgtgaaacccttgctgcagtctctctcgtccggtgtctgcgtgccaagctgtattaccaactgcttggtctgtgcctaccttactgttcatagttagatgacgtagagcaagttgggtagctggggcttcggaggctttgggaatccagcctttctgacccaggtgtaaagcgaaccttccttattcactttcttgtagtctgaacctaagtccactgaatgcattactaaaattcggataatactatctgcttgaaactgcttaagatgtaatgtaactccgcagtagttccagtatatctccgtatatagcaaaaatatacaataatttacatgtattaacctacaaataggagctcttcttatttaattcaaattatattcagggactcttaatacttcatgcacaaaaagacacttcagtcctaaacctgtattttagtgttgtgaactccagtggtttcaagtcactaaagtttcttaagtcttcagtgttttcttaagcagttttcccttgtggctccctggcgtgttctctgctgactcttgtcccctgcccttagtgttattcccctgctttctatcccaaagcctccgaatgcacacccccagctgccctctgcatggactgttgcatgtgagtagacggccatagtggcgagtcaccttctgactcctgttgggtgcggcatgacccaagtgcagcgcaggccatctgcaggcaccagcgacagacgctgcaaggggtgcttcgtttcagcgttaatgccgctcaagttatcgtttgtcctgagaggtgctcccatgtcgtggtgctgagacctcctctgaagatgggtctttattcctcctgtaacctacctctaacagtccacccagctctgctttaaactgtatgtagaagaggcccatttccagaagcccctggaatggaggagacaggggctgaagcagactcatctgtgcatgactagttcattaggagttcagttgaaattagattagatgctcctaaaaccatgggcaaccaaatacataaagtggggctttcttttccccttgtaacagtgttttactttatagatttatttaaagaaaaaaagttttatcttccccaggtggtcctggtgttttcctgacgcagttggtgagaagcctccgtgctcctgagcggccgcgtcacctgggcagggaccctgtgtggccatggggctctgagcatgggagtgcgtctctcctcttctttcctgccctccttgtcttctttccccccttcttcctgtctccccttttctttcatttgtttattttttacttgtttcacttgttaaaggaagtgggcgttataaaacaaaaaaaaaaaaccccaaaacacctttctgcggctgatgtgaagcacagtgctgaattgccatgaggaagttttccaaagcgtttaggcagcagcgcgagctttatttaccattagcttgcaaaacaactaagtcactttaggcctagtagtcaatgtgtacatccaaggggaggccttgctccgcatttatatttgtttcttactgttctggagtgacagagtccatgcagtgctcccaggttggtatcttttcatttataatgattgctgttactttttcaaatgtgttcaagtttctgaggttgctgtttgaaatgctttgactaaaaattatttttaataaaacgctggagttgtttttatctgagaagataaccatcagtgagtacccagagctccatgcccattccacactctcctcgcagtggctcagcatttgctggttttgttgctttttttaaagtcgtatggtttatggctatcttattgcctctcgaaagtattctgaaaggcataacatttgctctcgaagatgggcttgttttaatgttcagtgcctactcatgccttagaatttgattaaaaatctcagatttgattggagatccaaaaaaaaattatgggtggaaggctcagcatgctgacgagatgcactgatactaaaacagcctttaaatattaaggactcatgaagcgcttcaagtttgtttgggatatttttgtagcactcaaaaatattaagttatataaaatattcgacatcaccaaactcttcttccaggtagctaccgtgtaagtgtccatacagtaatgttcttgggttgaaagttacgcagacagtgcattctgatgctgtcatttactttaatgcaaaactttggtgatgcccactcttgcctcacggtgcaggctcctccctaaccctgggtagcagcatcacattgcttttcatgaccctgtcatctcatgcttccagttggctttggtgttggatgattttcagagcagtgaaccaatggtctctgaggggcctcccctgctggtcccagggttatggggctcagctctgtcgtcagcctaccttatgacccagattcagctgggctttccagatggtggttttccatcagtcatgactttgacttccagcattaactggtctttatgtggctgcatcctgctcccatggcgactctgctgagtgacccagattagatgtggtcattggttcagtcctctctgtgatgttcagtgcatgaccagatgtgagataaactgaatagattggatgctatgtcacttattgttgtcataattctgacttttcaactgttcttgatattacagtggactaaagaggatggacatagaacttccacctctgctgtccctaacctgtttgttccattgaacactaacccaaaagaggtccaggagatgaggaacaagatccgagagcagaatttacaggacattaagacggctggccctcagtcccaggttttgtgtggtgtagtgatggacaggagcctcgtccagggagagctggtgacggcctccaaggccatcattgaaaaggagtaccagccccacgtcattgtgagcaccacgggccccaaccccttcaccacactcacagaccgtgagctggaggagtaccgcagggaggtggagaggaagcagaagggctctgaagagaatctggacgaggctagagaacagaaagaaaagagtcctccagaccagcctgcggtcccccacccgcctcccagcactcccatcaagctggaggaagaccttgtgccggagccgactactggagatgacagtgatgctgccacctttaagccaactctccccgatctgtcccctgatgaaccttcagaagcactcggcttcccaatgttagagaaggaggaggaagcccatagacccccaagccccactgaggcccctactgaggccagccccgagccagccccagacccagccccggtggctgaagaggctgccccctcagctgtcgaggagggggccgccgcggaccctggcagcgatgggtctccaggcaagtccccgtccaaaaagaagaagaagttccgtaccccgtcctttctgaagaagagcaagaagaagagtgactcctgaaagccctgcgctaacactgtcctgtccggagcgaccctggctctgccagcgtccccggccacgtctgtgctctgtccttgtgtaatggaatgcaaaaaagccaagccctccgcctagaggtcccctcacgtgaccagccccgtgtagccccgggctgacccagtgtgtgctcagcagccccaccccaccctgccccttgtcctctcagagcctcagcttctgggggagacatgctctccccacaggggggaggcactaagtcatggtcctggctggaaggtactgaaggcttctgcagctttggctgcacgtcaccctcctgagcctcacctttcctgccgtccctcctgttgtgaaatcaccacattctgtctctgcttggcttcccctccaccctaaagtctcaggtgacggactcagactcctggcttcatgtggcattctctctgctcagtgatctcacttaaatctatatacaaagccttggtcccgtgaaaacactcgtgtgcccaccagcggccttgaagaggcaggtctgggccagatgctgggcaggaaaccccagcggcagatgggcctgtgtgcacccaacgtgatgctatgcatgtctgaccgacgatccctcgaccagaatcagattcaggagctcagtttctttttcacttgggtctctggattcctgtcatagggaaggtatatcaggagacccaagtgaaaaagaaaaaaagttggcggccg

SEQ ID NO: 455304 - DNA, 4830 bp, Homo sapiens
  misc_feature (53)..(53): n is a, c, g, or t
cttccccaactctcgctccctcgtatataccgggttatcctcattaccatggncttctgcttgctgaactaggaactggtcggcttcagacaacgtctgggcctagaagccccgttcttattctccggaaccatgggctcgtgtcagttggagagagcgttgaggaggccttctattacatccataaccttgtggttgcctgtgagatccaggttcgaactctggccagtgcaggaggaccagacaacttagtcctgctgaatcctgagaagtacaaagccaagtcccgttccccagggtctccggtaggggaaggcactggatcgcctcccaagtggcagattggtgagcaggaatttgaagccctcatgcggatgctcgataatctgggctacagaactggctacccttatcgataccctgctctgagagagaagtctaaaaaatacagcgatgtggaggttcctgctagtgtcacaggttactcctttgctagtgacggtgattcgggcacttgctccccactcagacacagttttcagaagcagcagcgggagaagacaagatggctgaactctggccggggcgacgaagcttccgaggaagggcagaatggaagcagtcccaagtcgaagactaaggtgtggacgaacattacacacgatcacgtgaaacccttgctgcagtctctctcgtccggtgtctgcgtgccaagctgtattaccaactgcttggtctgtgcctaccttactgttcatagttagatgacgtagagcaagttgggtagctggggcttcggaggctttgggaatccagcctttctgacccaggtgtaaagcgaaccttccttattcactttcttgtagtctgaacctaagtccactgaatgcattactaaaattcggataatactatctgcttgaaactgcttaagatgtaatgtaactccgcagtagttccagtatatctccgtatatagcaaaaatatacaataatttacatgtattaacctacaaataggagctcttcttatttaattcaaattatattcagggactcttaatacttcatgcacaaaaagacacttcagtcctaaacctgtattttagtgttgtgaactccagtggtttcaagtcactaaagtttcttaagtcttcagtgttttcttaagcagttttcccttgtggctccctggcgtgttctctgctgactcttgtcccctgcccttagtgttattcccctgctttctatcccaaagcctccgaatgcacacccccagctgccctctgcatggactgttgcatgtgagtagacggccatagtggcgagtcaccttctgactcctgttgggtgcggcatgacccaagtgcagcgcaggccatctgcaggcaccagcgacagacgctgcaaggggtgcttcgtttcagcgttaatgccgctcaagttatcgtttgtcctgagaggtgctcccatgtcgtggtgctgagacctcctctgaagatgggtctttattcctcctgtaacctacctctaacagtccacccagctctgctttaaactgtatgtagaagaggcccatttccagaagcccctggaatggaggagacaggggctgaagcagactcatctgtgcatgactagttcattaggagttcagttgaaattagattagatgctcctaaaaccatgggcaaccaaatacataaagtggggctttcttttccccttgtaacagtgttttactttatagatttatttaaagaaaaaaagttttatcttccccaggtggtcctggtgttttcctgacgcagttggtgagaagcctccgtgctcctgagcggccgcgtcacctgggcagggaccctgtgtggccatggggctctgagcatgggagtgcgtctctcctcttctttcctgccctccttgtcttctttccccccttcttcctgtctccccttttctttcatttgtttattttttacttgtttcacttgttaaaggaagtgggcgttataaaacaaaaaaaaaaaaccccaaaacacctttctgcggctgatgtgaagcacagtgctgaattgccatgaggaagttttccaaagcgtttaggcagcagcgcgagctttatttaccattagcttgcaaaacaactaagtcactttaggcctagtagtcaatgtgtacatccaaggggaggccttgctccgcatttatatttgtttcttactgttctggagtgacagagtccatgcagtgctcccaggttggtatcttttcatttataatgattgctgttactttttcaaatgtgttcaagtttctgaggttgctgtttgaaatgctttgactaaaaattatttttaataaaacgctggagttgtttttatctgagaagataaccatcagtgagtacccagagctccatgcccattccacactctcctcgcagtggctcagcatttgctggttttgttgctttttttaaagtcgtatggtttatggctatcttattgcctctcgaaagtattctgaaaggcataacatttgctctcgaagatgggcttgttttaatgttcagtgcctactcatgccttagaatttgattaaaaatctcagatttgattggagatccaaaaaaaaattatgggtggaaggctcagcatgctgacgagatgcactgatactaaaacagcctttaaatattaaggactcatgaagcgcttcaagtttgtttgggatatttttgtagcactcaaaaatattaagttatataaaatattcgacatcaccaaactcttcttccaggtagctaccgtgtaagtgtccatacagtaatgttcttgggttgaaagttacgcagacagtgcattctgatgctgtcatttactttaatgcaaaactttggtgatgcccactcttgcctcacggtgcaggctcctccctaaccctgggtagcagcatcacattgcttttcatgaccctgtcatctcatgcttccagttggctttggtgttggatgattttcagagcagtgaaccaatggtctctgaggggcctcccctgctggtcccagggttatggggctcagctctgtcgtcagcctaccttatgacccagattcagctgggctttccagatggtggttttccatcagtcatgactttgacttccagcattaactggtctttatgtggctgcatcctgctcccatggcgactctgctgagtgacccagattagatgtggtcattggttcagtcctctctgtgatgttcagtgcatgaccagatgtgagataaactgaatagattggatgctatgtcacttattgttgtcataattctgacttttcaactgttcttgatattacagtggactaaagaggatggacatagaacttccacctctgctgtccctaacctgtttgttccattgaacactaacccaaaagaggtccaggagatgaggaacaagatccgagagcagaatttacaggacattaagacggctggccctcagtcccaggttttgtgtggtgtagtgatggacaggagcctcgtccagggagagctggtgacggcctccaaggccatcattgaaaaggagtaccagccccacgtcattgtgagcaccacgggccccaaccccttcaccacactcacagaccgtgagctggaggagtaccgcagggaggtggagaggaagcagaagggctctgaagagaatctggacgaggctagagaacagaaagaaaagagtcctccagaccagcctgcggtcccccacccgcctcccagcactcccatcaagctggaggaaggtgagctctgggtggcagcggccgccactgtgggagggtgcacggctcgtgcgcgctgtggcggaatgtggcgggagtcgtgttaacagcaacacggaagtgtgtgcttgcatcagcgccaggacgtgacacctttctcctcctatattgcttctgtcctgggtaactccaggcaaaacagatttgtatgtgagctgtgaccaggtaggaaggccggcctcgggggtcggaacccaccatggttgctggtgtccacgttgcccattgctcgcacactcctcgtgctgtgttgtcatgcagatgccaccttcggaggtgccctccgctgtgtgagccacacgccggctgcctctcagccaccgtgtgtctgtggtgtgtgatcccgggtgtctgtccctcggtctcgtacatccatgtctctcgtgaagcccgtggccctgcctttcttcttctgtaacctgatggctgtgactgaatgcatagattctctccttgtgcttttttctccctgtggctgcgtcacaagcaggagacggatgcgctagagagtacctgttaccctagtaagtaccgcgctgcctccgctctccaccggtgccctgcgctttgcctcattctcctgcttctttgttgtttattaagttttgttttctgtttatttaaaataaaaacagaagccccccttttttgtacccagtcccttggaggccttcctggaagtggttcagtcacctgagtgctgtgctgccttcagcggcagcgggtacctccacgcacctaggtgccatggagcactctgggcctcaggagttcctacctccagcctttgagggtctctttggattgcttggtgggagggttttgccacactggatcagatgtaagtgcagcctcggttcagacagggtggggttctgccacctgccgtgtggggtcagattgccttggaccttaaatgtacctggtactatgtgcaattcgcattcctcctcactgtcggccgtttctccagat

SEQ ID NO: 455305 - DNA, 4010 bp, Homo sapiens
  misc_feature (53)..(53): n is a, c, g, or t
cttccccaactctcgctccctcgtatataccgggttatcctcattaccatggncttctgcttgctgaactaggaactggtcggcttcagacaacgtctgggcctagaagccccgttcttattctccggaaccatgggctcgtgtcagttggagagagcgttgaggaggccttctattacatccataaccttgtggttgcctgtgagatccaggttcgaactctggccagtgcaggaggaccagacaacttagtcctgctgaatcctgagaagtacaaagccaagtcccgttccccagggtctccggtaggggaaggcactggatcgcctcccaagtggcagattggtgagcaggaatttgaagccctcatgcggatgctcgataatctgggctacagaactggctacccttatcgataccctgctctgagagagaagtctaaaaaatacagcgatgtggaggttcctgctagtgtcacaggttactcctttgctagtgacggtgattcgggcacttgctccccactcagacacagttttcagaagcagcagcgggagaagacaagatggctgaactctggccggggcgacgaagcttccgaggaagggcagaatggaagcagtcccaagtcgaagactaaggtgtggacgaacattacacacgatcacgtgaaacccttgctgcagtctctctcgtccggtgtctgcgtgccaagctgtattaccaactgcttggtctgtgcctaccttactgttcatagttagatgacgtagagcaagttgggtagctggggcttcggaggctttgggaatccagcctttctgacccaggtgtaaagcgaaccttccttattcactttcttgtagtctgaacctaagtccactgaatgcattactaaaattcggataatactatctgcttgaaactgcttaagatgtaatgtaactccgcagtagttccagtatatctccgtatatagcaaaaatatacaataatttacatgtattaacctacaaataggagctcttcttatttaattcaaattatattcagggactcttaatacttcatgcacaaaaagacacttcagtcctaaacctgtattttagtgttgtgaactccagtggtttcaagtcactaaagtttcttaagtcttcagtgttttcttaagcagttttcccttgtggctccctggcgtgttctctgctgactcttgtcccctgcccttagtgttattcccctgctttctatcccaaagcctccgaatgcacacccccagctgccctctgcatggactgttgcatgtgagtagacggccatagtggcgagtcaccttctgactcctgttgggtgcggcatgacccaagtgcagcgcaggccatctgcaggcaccagcgacagacgctgcaaggggtgcttcgtttcagcgttaatgccgctcaagttatcgtttgtcctgagaggtgctcccatgtcgtggtgctgagacctcctctgaagatgggtctttattcctcctgtaacctacctctaacagtccacccagctctgctttaaactgtatgtagaagaggcccatttccagaagcccctggaatggaggagacaggggctgaagcagactcatctgtgcatgactagttcattaggagttcagttgaaattagattagatgctcctaaaaccatgggcaaccaaatacataaagtggggctttcttttccccttgtaacagtgttttactttatagatttatttaaagaaaaaaagttttatcttccccaggtggtcctggtgttttcctgacgcagttggtgagaagcctccgtgctcctgagcggccgcgtcacctgggcagggaccctgtgtggccatggggctctgagcatgggagtgcgtctctcctcttctttcctgccctccttgtcttctttccccccttcttcctgtctccccttttctttcatttgtttattttttacttgtttcacttgttaaaggaagtgggcgttataaaacaaaaaaaaaaaaccccaaaacacctttctgcggctgatgtgaagcacagtgctgaattgccatgaggaagttttccaaagcgtttaggcagcagcgcgagctttatttaccattagcttgcaaaacaactaagtcactttaggcctagtagtcaatgtgtacatccaaggggaggccttgctccgcatttatatttgtttcttactgttctggagtgacagagtccatgcagtgctcccaggttggtatcttttcatttataatgattgctgttactttttcaaatgtgttcaagtttctgaggttgctgtttgaaatgctttgactaaaaattatttttaataaaacgctggagttgtttttatctgagaagataaccatcagtgagtacccagagctccatgcccattccacactctcctcgcagtggctcagcatttgctggttttgttgctttttttaaagtcgtatggtttatggctatcttattgcctctcgaaagtattctgaaaggcataacatttgctctcgaagatgggcttgttttaatgttcagtgcctactcatgccttagaatttgattaaaaatctcagatttgattggagatccaaaaaaaaattatgggtggaaggctcagcatgctgacgagatgcactgatactaaaacagcctttaaatattaaggactcatgaagcgcttcaagtttgtttgggatatttttgtagcactcaaaaatattaagttatataaaatattcgacatcaccaaactcttcttccaggtagctaccgtgtaagtgtccatacagtaatgttcttgggttgaaagttacgcagacagtgcattctgatgctgtcatttactttaatgcaaaactttggtgatgcccactcttgcctcacggtgcaggctcctccctaaccctgggtagcagcatcacattgcttttcatgaccctgtcatctcatgcttccagttggctttggtgttggatgattttcagagcagtgaaccaatggtctctgaggggcctcccctgctggtcccagggttatggggctcagctctgtcgtcagcctaccttatgacccagattcagctgggctttccagatggtggttttccatcagtcatgactttgacttccagcattaactggtctttatgtggctgcatcctgctcccatggcgactctgctgagtgacccagattagatgtggtcattggttcagtcctctctgtgatgttcagtgcatgaccagatgtgagataaactgaatagattggatgctatgtcacttattgttgtcataattctgacttttcaactgttcttgatattacagtggactaaagaggatggacatagaacttccacctctgctgtccctaacctgtttgttccattgaacactaacccaaaagaggtccaggagatgaggaacaagatccgagagcagaatttacaggacattaagacggctggccctcagtcccaggttttgtgtggtgtagtgatggacaggagcctcgtccagggagagctggtgacggcctccaaggccatcattgaaaaggagtaccagccccacgtcattgtgagcaccacgggccccaaccccttcaccacactcacagaccgtgagctggaggagtaccgcagggaggtggagaggaagcagaagggctctgaagagaatctggacgaggctagagaacagaaagaaaagagtcctccagaccagcctgcggtcccccacccgcctcccagcactcccatcaagctggaggaagaccttgtgccggagccgactactggagatgacagtgatgctgccacctttaagccaactctccccgatctgtcccttgcatatatggacaccgacttgggaggacaggtcctgaatgtcctttctccagtgtaacatgttttactcacaaataaaattctttcagcaagttccttgtctaaatctgggaaacag

SEQ ID NO: 455306 - DNA, 3091 bp, Homo sapiens
  misc_feature (53)..(53): n is a, c, g, or t
cttccccaactctcgctccctcgtatataccgggttatcctcattaccatggncttctgcttgctgaactaggaactggtcggcttcagacaacgtctgggcctagaagccccgttcttattctccggaaccatgggctcgtgtcagttggagagagcgttgaggaggccttctattacatccataaccttgtggttgcctgtgagatccaggttcgaactctggccagtgcaggaggaccagacaacttagtcctgctgaatcctgagaagtacaaagccaagtcccgttccccagggtctccggtaggggaaggcactggatcgcctcccaagtggcagattggtgagcaggaatttgaagccctcatgcggatgctcgataatctgaagaatggtgccaccacttgatgataaaccttttgttctaaaagcatcagtgttggtgttcttacagcaagtgcgattgctgtcttttatgcagtatctgaataccttcaccttcaaagtcatgaagaagcactagggttgtttaacttctgaggtaaattacaataaaatgtagaggtgaaggattcctggtattgttttattttttaaagataaccttgtgtttggactcagtggggacaagagcacagagaatgcgtaggcagctggatgaccagctgtgtcagctcagtccccaccatcccacaagcaagcgagagaggtggcacttttgaaatcggtcagtcaggtatttaggcttttgtcttaacagcaaatcctggctgtctggggcctgatgactgtgttccatgggtatccactccctgtccacagcgtgggagcccctcagctgcttattgcagggacacagagcccggcatggtccagaaggcgggcttatggggcctgcagcacacagggaaagtgagcccacactgtgataggagggcagacacacaggatgtgttctgtgttacagggttgccgtgaagaatttcattcttttgcaaggactggagagaaaattttatgtggaaggtagcccttggaaatgacctcaaagaataggtaggatcttagcctgcgtttgaaagcctggaaaaaaacaggatgacaggatgaagaggccacagcacagctgcagacaatgggagtggggagatgggaacatgcaacgtacggtgcacctttcaggttcatcttgactttaccaggatcattaaatactcagttcttagagctgtattagaacactgcccttggggtctcagtcccgcagccacatcatcagacacagggctctggaacagatcccttccatgctgcacatcagacctcttagatgggggtcacgatggtccgtcctaacgccacatgacctcaagtggtgtagatgtgaggacatgtcagtgtggggaaagaaggcctcagaggggccagtatccttgtatgctgccagccagtactggacaagtgggcacgttccagcctaagacaggcgtggcccttggaccagatcacagatgagatgggtggcttcaggaagcagggtggcttcaggaggcaggaagtttaactttcctgaaggtttggaataaaaagtattcataggtctgattcaggctatgttaaatgttcttactgaaattctttgcacttgggatgaatattgtccgctagaaaggaggaactgagggttttctgcctgggcgcgatagtcagtcagtggagtagactcaatcagtgacacagggacgaacagagaaggcagagtctagcgtaactttttgagttcatataatcagtgaggttgattgcattaattgactgtctactgttgagtcatgaacaggacacagttcttgccctcaggagtttatgacctaataagagagatggacaaacgattcccaaatgagccctgcccctgtgatctgtgcagtcataggcatgatgagagcttgcaggcagaggtgggtgccgattggtcaaggaggtaggaagaggagcaaaagctcatgaagaaggctgaagaagcagttagagttgggtggccagccagggtagtgaagctgcagggactcatagatggagaaagcttgagagtggggcagccatggcccaggtgtgcgtcaggagccaggtcatccagcatggctgtgcaaggtaaggagggctgaggttggcccagtcacacagcccctgcctcctggtaaatacggcgacattttgctgctcttctacttacagtcagtgtgagggaggagagaggggggtcagaatgcacagcagccaccaaagactgtgctgaaagcacatcctagaaggcggagagggggaagtcaaaatcaggtagaaactctgatttggtagggaaggaagataaggatgaatgattaataagtaaaacattcattacaaaaagcatgatgaatgtttactcagtgtccttaatgtgtacagattgttttaatattagaaggccatatagtttataagaaataaactagacagcaatcactaatcatagtccatgttttaatttagcatcggggttggcatatatgttgtttgctaataactgagtagagaatagttgccaatttccacactataatatatgttgcagccgagcacagtggctcactcctgtgatcccagcacttcaggaggctgaggtgggagaccaggagcttaagaccagcctgggcaacatagcgagattcctctccacaaaaaataaaaaaatttcaaaaagagagataatatttcatttgaacttctacagttagaaaaaaaatgctaaattgtcccccccccccaaaaaaaatcaagatataatttcagtttctcaaagaaggaacaaatccatatatattttctctttctttttttttttggagagacaggatgtcgtcatgttgcctaggctggtgttgaactcctgggctgaagcagtcctcccacctcagcctcccaaagtgctaggattatgggtgtaaactaccacgcctgacccaaatccatgtttttaactacaagccagatagtagttctgaggtctgagtattacttctggttttggtttaacagcatttaaa

SEQ ID NO: 455307 - DNA, 1013 bp, Homo sapiens
ttgtaggaattcgcagtgtaggggaaatggtacagattttataatcaggaaagacctgtattcagttctccatttgaccactttctgccagagccatgggaacagttttttaatttctctgaccctgtttcctcacttgggaatatgacttttgcagatctgttggaaaatattaaggccaagagggatttaaaatgagatgttgtctagcactgagtaggagcttaatatctatccgttcctttctgcttcagtcaaaactgagcttcatatgtagaatgattattgtttgtattacattctccattttgagtatggaaccatgaatgccaacagcttgataataaaaggagccgtttgtcaagagacagtcctgtaagcgctttttaacctggtagactgtgcatgtaagggcaggcaggttacaaatgcgaatccccatagccagcacactctacatacagcagattcttaagccatctgtgtactctttttaacactgtactgaagtccacttaagtcagagttcaacaaaatgaatgaatgtaatcccaggactatggaacttctctgtgattacatagcacagagaactacggaatcattttctggaagaatgcaccatgcgattatgctccatgtggaattggtatatataaatgttggtagactgtgaggatgaggttgacaggttgatctgagtagagaccctaggaggaaccgaggatactatgtagttttgttgttgttactgttttgcagttcctggctgctctgtgttggcagctgtgtgcacgctttctcttttgagccagcgaggcacaagacaagtaatttcccatcttgaatctctcacagctgctgagctgtagtggatatactgggatgtggctatgaactttaaaaatttgcataaatccagcccctactcccctgcaaaggctcagtcttgtctttacaccttccccgaggtaattattttctggggggtaggggtgggggttgggagggtg

SEQ ID NO: 455308 - DNA, 1016 bp, Homo sapiens
  misc_feature (65)..(65): n is a, c, g, or t
  misc_feature (251)..(251): n is a, c, g, or t
ggtactactggacgaaatgatcagatctccaggctattgtgacatacatctgagctgatctgtgncttgaataacttcactgcgacaatacatacaaactatgtctcagtgatctacttcctccctcctcatagactccactgctgcaagacacaacgttgggcaggtcaccttctgtactctatctcctcacacaagagcaagcctcgtagagtccgttaccgacctggcaagctactcctcagtttacnaggaaacatctccagactgctgttaaactgctgagcctagaaccaatgtttcatgtgaattcgccactataacgtaggattgcttcagaacctgcagcatttgcatatcactgggaacaaagtggacattctgccaaaacaattgtttaaatgcataaagttgaggactttgaatctgggacagaactgcatcacctcactcccagagaaagttggtcagctctcccagctcactcagctggagctgaaggggaactgcttggaccgcctgccagcccagctgggccagtgtcggatgctcaagaaaagcgggcttgttgtggaagatcacctttttgataccctgccactcgaagtcaaagaggcattgaatcaagacataaatattccctttgcaaatgggatttaaactaagataatatatgcacagtgatgtgcaggaacaacttcctagattgcaagtgctcacgtacaagttattacaagataatgcattttaggagtagatacatcttttaaaataaaacagagaggatgcatagaaggctgatagaagacataactgaatgttcaatgtttgtagggttttaagtcattcatttccaaatcatttttttttttcttttggggaaagggaaggaaaaattataatcactaatcttggttctttttaaattgtttgtaacttggatgctgccgctactgaatgtttacaaattgcttgcctgctaaagtaaatgattaaattgacattttcttactata

SEQ ID NO: 455309 - DNA, 1363 bp, Homo sapiens
gcgtgggctcttgggagcgggacttctgctcaaatcctgtccaggggcttgaaaaggaggagaattgggggtggttgccgggaggaccagcacctccagttactggagggttgataggggccttctcctttccgtcaccctttactagggggtatcccttgcagataaatgagattttttgatttcttaaaaagccagctgcagtgaagaagaactgctgcaggtcgaggggaagagaggaagtgcacggctgtctataacgtgctgccgggtctcaggatggaggagtgaagtctcctgtcgccgtggttccagcctccggagctcgcccaagccgcgtccccagagagcgccctgagagaacagggtggccgcttggtccaggaatgtttacccttgcggaagttgcatcacttaatgacattcagccaacttaccgaatcctgaaaccatggtgggatgtgtttatggattacctagctgttgttatgttaatggtagccatctttgcaggaaccatgcaacttaccaaagatcaggtggtctgtttgccagtattgccatctcctgtaaattcaaaggcacatacaccaccaggaaatgccgaggtcaccaccaacatcccaaagatggaagcagcaccaaccaagaccaagatgggcggacaacaaacgacatttcctttgggacatctgctgtgacacctgacatacctctcagagccacatatcctcgcacagatttcgcacttccaaatcaggaggcaaagaaagagaagaaagatccaacaggtcgaaaaacaaacttggattttcagcaatatgtatttattaatcaaatgtgttaccatctggcccttccgtggtattctaagtactttccatacctagctcttatacatactattattctcatggtcagtagcaacttttggttcaaatatcccaaaacatgctcaaaagtagaacattttgtttcaatattaggaaagtgctttgaatccccttggacgacaaaagcgttgtctgagacagcatgcgaagactcagaggaaaacaagcagagaataacaggtgcccagactctaccaaagcatgtttctaccagcagtgatgaagggagccccagtgccagtacaccaatgatcaataaaactggctttaaattttcagctgagaagcctgtgattgaagttcccagcatgacaatcctggataaaaaggatggagagcaggccaaagccctgtttgagaaagtgaggaagttccgtgcccatgtggaagatagtgacttgatctataaactctatgtggtccaaacagcttctccctttcccaaccaataaagtaaccactttcagcac

SEQ ID NO: 455310 - DNA, 859 bp, Homo sapiens
gggccaccggagaaagcgctcgcaatcacatggaggcccgggcccgccccattggctgcggccgggccagtcgcggcactcgccggctgcggttggtcccagagctgcagcgcctgcacgggcccggagtccatgttacgctttgtctaattcccctcgttacagagtcatgtgctgctgctcccgtcgccgctgtctgccgctgccgccgcccgtggtgccccggctcctccgccgcgcttcgaggtggcagccgcgggcggggccgcgggagcagggtccagggtgcagcgcgccttcgccgccccggcgcgtcccggtgcagccgccgcccgccgcgggtgatgccgccacctccggcctcagcataagccgtggcttggcggccgagctgcaccccaaggttggtgcgcacctctcccggcaggggccgggggctgcgagggaaggcgacgcgcaggtggagccgcgccgagccggagcgcgcaaccctggcgcaggcgccgcggcccgagctgcggttgcggccgggaactcattcggggacgtccgggggtcgggaggaggtggcggcgagcggagtgggctcccgtttgctgccgccagggcctgggagattgttccgctttctgcagtctgagcgtcggccgcttcggccccgggcggccggccctgcgggaggggagtgcggcttcctggctcctgaacccctcgcgcgcgctcccttctctcacctccctccgccctatcggaaaggcggggagagccggtttcggctctgctggttcctcccggaggtgggtgtttggtgtctggccttgctggcccggcgtccaaaggtgagccctttaacttctcc

SEQ ID NO: 455311 - DNA, 3318 bp, Homo sapiens
gcgtgggctcttgggagcgggacttctgctcaaatcctgtccaggggcttgaaaaggaggagaattgggggtggttgccgggaggaccagcacctccagttactggagggttgataggggccttctcctttccgtcaccctttactagggggtatcccttgcagataaatgagattttttgatttcttaaaaagccagctgcagtgaagaagaactgctgcaggtcgaggggaagagaggaagtgcacggctgtctataacgtgctgccgggtctcaggatggaggagtgaagtctcctgtcgccgtggttccagcctccggagctcgcccaagccgcgtccccagagagcgccctgagagaacagggtggccgcttggtccaggaatgtttacccttgcggaagttgcatcacttaatgacattcagccaacttaccgaatcctgaaaccatggtgggatgtgtttatggattacctagctgttgttatgttaatggtagccatctttgcaggaaccatgcaacttaccaaagatcaggtggtctgtttgccagtattgccatctcctgtaaattcaaaggcacatacaccaccaggaaatgccgaggtcaccaccaacatcccaaagatggaagcagcaccaaccaagaccaagatgggcggacaacaaacgacatttcctttgggacatctgctgtgacacctgacatacctctcagagccacatatcctcgcacagatttcgcacttccaaatcaggaggcaaagaaagagaagaaagatccaacaggtcgaaaaacaaacttggattttcagcaatatgtatttattaatcaaatgtgttaccatctggcccttccgtggtattctaagtactttccatacctagctcttatacatactattattctcatggtcagtagcaacttttggttcaaatatcccaaaacatgctcaaaagtagaacattttgtttcaatattaggaaagtgctttgaatccccttggacgacaaaagcgttgtctgagacagcatgcgaagactcagaggaaaacaagcagagaataacaggtgcccagactctaccaaagcatgtttctaccagcagtgatgaagggagccccagtgccagtacaccaatgatcaataaaactggctttaaattttcagctgagaagcctgtgattgaagttcccagcatgacaatcctggataaaaaggatggagagcaggccaaagccctgtttgagaaagtgaggaagttccgtgcccatgtggaagatagtgacttgatctataaactctatgtggtccaaacagttatcaaaacagccaagttcatttttattctctgctatacagcgaactttgtcaacgcaatcagctttgaacacgtctgcaagcccaaagttgagcatctgattggttatgaggtatttgagtgcacccacaatatggcttacatgttgaaaaagcttctcatcagttacatatccattatttgtgtttatggctttatctgcctctacactctcttctggttattcaggatacctttgaaggaatattctttcgaaaaagtcagagaagagagcagttttagtgacattccagatgtcaaaaacgattttgcgttccttcttcacatggtagaccagtatgaccagctatattccaagcgttttggtgtgttcttgtcagaagttagtgaaaataaacttagggaaattagtttgaaccatgagtggacatttgaaaaactcaggcagcacatttcacgcaacgcccaggacaagcaggagttgcatctgttcatgctgtcgggggtgcccgatgctgtctttgacctcacagacctggatgtgctaaagcttgaactaattccagaagctaaaattcctgctaagatttctcaaatgactaacctccaagagctccacctctgccactgccctgcaaaagttgaacagactgcttttagctttcttcgcgatcacttgagatgccttcacgtgaagttcactgatgtggctgaaattcctgcctgggtgtatttgctcaaaaaccttcgagagttgtacttaataggcaatttgaactctgaaaacaataagatgataggacttgaatctctccgagagttgcggcaccttaagattctccacgtgaagagcaatttgaccaaagttccctccaacattacagatgtggctccacatcttacaaagttagtcattcataatgacggcactaaactcttggtactgaacagccttaagaaaatgatgaatgtcgctgagctggaactccagaactgtgagctagagagaatcccacatgctattttcagcctctctaatttacaggaactggatttaaagtccaataacattcgcacaattgaggaaatcatcagtttccagcatttaaaacgactgacttgtttaaaattatggcataacaaaattgttactattcctccctctattacccatgtcaaaaacttggagtcactttatttctctaacaacaagctcgaatccttaccagtggcagtatttagtttacagaaactcagatgcttagatgtgagctacaacaacatttcaatgattccaatagaaataggattgcttcagaacctgcagcatttgcatatcactgggaacaaagtggacattctgccaaaacaattgtttaaatgcataaagttgaggactttgaatctgggacagaactgcatcacctcactcccagagaaagttggtcagctctcccagctcactcagctggagctgaaggggaactgcttggaccgcctgccagcccagctgggccagtgtcggatgctcaagaaaagcgggcttgttgtggaagatcacctttttgataccctgccactcgaagtcaaagaggcattgaatcaagacataaatattccctttgcaaatgggatttaaactaagataatatatgcacagtgatgtgcaggaacaacttcctagattgcaagtgctcacgtacaagttattacaagataatgcattttaggagtagatacatcttttaaaataaaacagagaggatgcatagaaggctgatagaagacataactgaatgttcaatgtttgtagggttttaagtcattcatttccaaatcatttttttttttcttttggggaaagggaaggaaaaattataatcactaatcttggttctttttaaattgtttgtaacttggatgctgccgctactgaatgtttacaaattgcttgcctgctaaagtaaatgattaaattgacattttcttactata

SEQ ID NO: 455312 - DNA, 3482 bp, Homo sapiens
gggccaccggagaaagcgctcgcaatcacatggaggcccgggcccgccccattggctgcggccgggccagtcgcggcactcgccggctgcggttggtcccagagctgcagcgcctgcacgggcccggagtccatgttacgctttgtctaattcccctcgttacagagtcatgtgctgctgctcccgtcgccgctgtctgccgctgccgccgcccgtggtgccccggctcctccgccgcgcttcgaggtggcagccgcgggcggggccgcgggagcagggtccagggtgcagcgcgccttcgccgccccggcgcgtcccggtgcagccgccgcccgccgcgggtgatgccgccacctccggcctcagcataagccgtggcttggcggccgagctgcaccccaaggaagtgcacggctgtctataacgtgctgccgggtctcaggatggaggagtgaagtctcctgtcgccgtggttccagcctccggagctcgcccaagccgcgtccccagagagcgccctgagagaacagggtggccgcttggtccaggaatgtttacccttgcggaagttgcatcacttaatgacattcagccaacttaccgaatcctgaaaccatggtgggatgtgtttatggattacctagctgttgttatgttaatggtagccatctttgcaggaaccatgcaacttaccaaagatcaggtggtctgtttgccagtattgccatctcctgtaaattcaaaggcacatacaccaccaggaaatgccgaggtcaccaccaacatcccaaagatggaagcagcaccaaccaagaccaagatgggcggacaacaaacgacatttcctttgggacatctgctgtgacacctgacatacctctcagagccacatatcctcgcacagatttcgcacttccaaatcaggaggcaaagaaagagaagaaagatccaacaggtcgaaaaacaaacttggattttcagcaatatgtatttattaatcaaatgtgttaccatctggcccttccgtggtattctaagtactttccatacctagctcttatacatactattattctcatggtcagtagcaacttttggttcaaatatcccaaaacatgctcaaaagtagaacattttgtttcaatattaggaaagtgctttgaatccccttggacgacaaaagcgttgtctgagacagcatgcgaagactcagaggaaaacaagcagagaataacaggtgcccagactctaccaaagcatgtttctaccagcagtgatgaagggagccccagtgccagtacaccaatgatcaataaaactggctttaaattttcagctgagaagcctgtgattgaagttcccagcatgacaatcctggataaaaaggatggagagcaggccaaagccctgtttgagaaagtgaggaagttccgtgcccatgtggaagatagtgacttgatctataaactctatgtggtccaaacagttatcaaaacagccaagttcatttttattctctgctatacagcgaactttgtcaacgcaatcagctttgaacacgtctgcaagcccaaagttgagcatctgattggttatgaggtatttgagtgcacccacaatatggcttacatgttgaaaaagcttctcatcagttacatatccattatttgtgtttatggctttatctgcctctacactctcttctggttattcaggatacctttgaaggaatattctttcgaaaaagtcagagaagagagcagttttagtgacattccagatgtcaaaaacgattttgcgttccttcttcacatggtagaccagtatgaccagctatattccaagcgttttggtgtgttcttgtcagaagttagtgaaaataaacttagggaaattagtttgaaccatgagtggacatttgaaaaactcaggcagcacatttcacgcaacgcccaggacaagcaggagttgcatctgttcatgctgtcgggggtgcccgatgctgtctttgacctcacagacctggatgtgctaaagcttgaactaattccagaagctaaaattcctgctaagatttctcaaatgactaacctccaagagctccacctctgccactgccctgcaaaagttgaacagactgcttttagctttcttcgcgatcacttgagatgccttcacgtgaagttcactgatgtggctgaaattcctgcctgggtgtatttgctcaaaaaccttcgagagttgtacttaataggcaatttgaactctgaaaacaataagatgataggacttgaatctctccgagagttgcggcaccttaagattctccacgtgaagagcaatttgaccaaagttccctccaacattacagatgtggctccacatcttacaaagttagtcattcataatgacggcactaaactcttggtactgaacagccttaagaaaatgatgaatgtcgctgagctggaactccagaactgtgagctagagagaatcccacatgctattttcagcctctctaatttacaggaactggatttaaagtccaataacattcgcacaattgaggaaatcatcagtttccagcatttaaaacgactgacttgtttaaaattatggcataacaaaattgttactattcctccctctattacccatgtcaaaaacttggagtcactttatttctctaacaacaagctcgaatccttaccagtggcagtatttagtttacagaaactcagatgcttagatgtgagctacaacaacatttcaatgattccaatagaaataggattgcttcagaacctgcagcatttgcatatcactgggaacaaagtggacattctgccaaaacaattgtttaaatgcataaagttgaggactttgaatctgggacagaactgcatcacctcactcccagagaaagttggtcagctctcccagctcactcagctggagctgaaggggaactgcttggaccgcctgccagcccagctgggccagtgtcggatgctcaagaaaagcgggcttgttgtggaagatcacctttttgataccctgccactcgaagtcaaagaggcattgaatcaagacataaatattccctttgcaaatgggatttaaactaagataatatatgcacagtgatgtgcaggaacaacttcctagattgcaagtgctcacgtacaagttattacaagataatgcattttaggagtagatacatcttttaaaataaaacagagaggatgcatagaaggctgatagaagacataactgaatgttcaatgtttgtagggttttaagtcattcatttccaaatcatttttttttttcttttggggaaagggaaggaaaaattataatcactaatcttggttctttttaaattgtttgtaacttggatgctgccgctactgaatgtttacaaattgcttgcctgctaaagtaaatgattaaattgacattttcttactata

SEQ ID NO: 455313 - DNA, 3285 bp, Homo sapiens
ccgggccgaggccgcgccacctcggcaccacgcgggcagccggtgcggcggggtcgccacggccaggggagcgctgggtgcccaccatggcagttatgcaagcggtgaccccctggtcttgcctccccgccgccctgcactccttcctccccgctgccgacacttggatctctctagctctttctctcccctgtgttttcaaacaggaagtgcacggctgtctataacgtgctgccgggtctcaggatggaggagtgaagtctcctgtcgccgtggttccagcctccggagctcgcccaagccgcgtccccagagagcgccctgagagaacagggtggccgcttggtccaggaatgtttacccttgcggaagttgcatcacttaatgacattcagccaacttaccgaatcctgaaaccatggtgggatgtgtttatggattacctagctgttgttatgttaatggtagccatctttgcaggaaccatgcaacttaccaaagatcaggtggtctgtttgccagtattgccatctcctgtaaattcaaaggcacatacaccaccaggaaatgccgaggtcaccaccaacatcccaaagatggaagcagcaccaaccaagaccaagatgggcggacaacaaacgacatttcctttgggacatctgctgtgacacctgacatacctctcagagccacatatcctcgcacagatttcgcacttccaaatcaggaggcaaagaaagagaagaaagatccaacaggtcgaaaaacaaacttggattttcagcaatatgtatttattaatcaaatgtgttaccatctggcccttccgtggtattctaagtactttccatacctagctcttatacatactattattctcatggtcagtagcaacttttggttcaaatatcccaaaacatgctcaaaagtagaacattttgtttcaatattaggaaagtgctttgaatccccttggacgacaaaagcgttgtctgagacagcatgcgaagactcagaggaaaacaagcagagaataacaggtgcccagactctaccaaagcatgtttctaccagcagtgatgaagggagccccagtgccagtacaccaatgatcaataaaactggctttaaattttcagctgagaagcctgtgattgaagttcccagcatgacaatcctggataaaaaggatggagagcaggccaaagccctgtttgagaaagtgaggaagttccgtgcccatgtggaagatagtgacttgatctataaactctatgtggtccaaacagttatcaaaacagccaagttcatttttattctctgctatacagcgaactttgtcaacgcaatcagctttgaacacgtctgcaagcccaaagttgagcatctgattggttatgaggtatttgagtgcacccacaatatggcttacatgttgaaaaagcttctcatcagttacatatccattatttgtgtttatggctttatctgcctctacactctcttctggttattcaggatacctttgaaggaatattctttcgaaaaagtcagagaagagagcagttttagtgacattccagatgtcaaaaacgattttgcgttccttcttcacatggtagaccagtatgaccagctatattccaagcgttttggtgtgttcttgtcagaagttagtgaaaataaacttagggaaattagtttgaaccatgagtggacatttgaaaaactcaggcagcacatttcacgcaacgcccaggacaagcaggagttgcatctgttcatgctgtcgggggtgcccgatgctgtctttgacctcacagacctggatgtgctaaagcttgaactaattccagaagctaaaattcctgctaagatttctcaaatgactaacctccaagagctccacctctgccactgccctgcaaaagttgaacagactgcttttagctttcttcgcgatcacttgagatgccttcacgtgaagttcactgatgtggctgaaattcctgcctgggtgtatttgctcaaaaaccttcgagagttgtacttaataggcaatttgaactctgaaaacaataagatgataggacttgaatctctccgagagttgcggcaccttaagattctccacgtgaagagcaatttgaccaaagttccctccaacattacagatgtggctccacatcttacaaagttagtcattcataatgacggcactaaactcttggtactgaacagccttaagaaaatgatgaatgtcgctgagctggaactccagaactgtgagctagagagaatcccacatgctattttcagcctctctaatttacaggaactggatttaaagtccaataacattcgcacaattgaggaaatcatcagtttccagcatttaaaacgactgacttgtttaaaattatggcataacaaaattgttactattcctccctctattacccatgtcaaaaacttggagtcactttatttctctaacaacaagctcgaatccttaccagtggcagtatttagtttacagaaactcagatgcttagatgtgagctacaacaacatttcaatgattccaatagaaataggattgcttcagaacctgcagcatttgcatatcactgggaacaaagtggacattctgccaaaacaattgtttaaatgcataaagttgaggactttgaatctgggacagaactgcatcacctcactcccagagaaagttggtcagctctcccagctcactcagctggagctgaaggggaactgcttggaccgcctgccagcccagctgggccagtgtcggatgctcaagaaaagcgggcttgttgtggaagatcacctttttgataccctgccactcgaagtcaaagaggcattgaatcaagacataaatattccctttgcaaatgggatttaaactaagataatatatgcacagtgatgtgcaggaacaacttcctagattgcaagtgctcacgtacaagttattacaagataatgcattttaggagtagatacatcttttaaaataaaacagagaggatgcatagaaggctgatagaagacataactgaatgttcaatgtttgtagggttttaagtcattcatttccaaatcatttttttttttcttttggggaaagggaaggaaaaattataatcactaatcttggttctttttaaattgtttgtaacttggatgctgccgctactgaatgtttacaaattgcttgcctgctaaagtaaatgattaaattgacattttcttactata

SEQ ID NO: 455314 - DNA, 3746 bp, Homo sapiens
gcgtgggctcttgggagcgggacttctgctcaaatcctgtccaggggcttgaaaaggaggagaattgggggtggttgccgggaggaccagcacctccagttactggagggttgataggggccttctcctttccgtcaccctttactagggggtatcccttgcagataaatgagattttttgatttcttaaaaagccagctgcagtgaagaagaactgctgcaggtcgaggggaagagaggaagtgcacggctgtctataacgtgctgccgggtctcaggatggaggagtgaagtctcctgtcgccgtggttccagcctccggagctcgcccaagccgcgtccccagagagcgccctgagagaacagggtggccgcttggtccaggaatgtttacccttgcggaagttgcatcacttaatgacattcagccaacttaccgaatcctgaaaccatggtgggatgtgtttatggattacctagctgttgttatgttaatggtagccatctttgcaggaaccatgcaacttaccaaagatcaggtggtctgtttgccagtattgccatctcctgtaaattcaaaggcacatacaccaccaggaaatgccgaggtcaccaccaacatcccaaagatggaagcagcaccaaccaagaccaagatgggcggacaacaaacgacatttcctttgggacatctgctgtgacacctgacatacctctcagagccacatatcctcgcacagatttcgcacttccaaatcaggaggcaaagaaagagaagaaagatccaacaggtcgaaaaacaaacttggattttcagcaatatgtatttattaatcaaatgtgttaccatctggcccttccgtggtattctaagtactttccatacctagctcttatacatactattattctcatggtcagtagcaacttttggttcaaatatcccaaaacatgctcaaaagtagaacattttgtttcaatattaggaaagtgctttgaatccccttggacgacaaaagcgttgtctgagacagcatgcgaagactcagaggaaaacaagcagagaataacaggtgcccagactctaccaaagcatgtttctaccagcagtgatgaagggagccccagtgccagtacaccaatgatcaataaaactggctttaaattttcagctgagaagcctgtgattgaagttcccagcatgacaatcctggataaaaaggatggagagcaggccaaagccctgtttgagaaagtgaggaagttccgtgcccatgtggaagatagtgacttgatctataaactctatgtggtccaaacagttatcaaaacagccaagttcatttttattctctgctatacagcgaactttgtcaacgcaatcagctttgaacacgtctgcaagcccaaagttgagcatctgattggttatgaggtatttgagtgcacccacaatatggcttacatgttgaaaaagcttctcatcagttacatatccattatttgtgtttatggctttatctgcctctacactctcttctggttattcaggatacctttgaaggaatattctttcgaaaaagtcagagaagagagcagttttagtgacattccagatgtcaaaaacgattttgcgttccttcttcacatggtagaccagtatgaccagctatattccaagcgttttggtgtgttcttgtcagaagttagtgaaaataaacttagggaaattagtttgaaccatgagtggacatttgaaaaactcaggcagcacatttcacgcaacgcccaggacaagcaggagttgcatctgttcatgctgtcgggggtgcccgatgctgtctttgacctcacagacctggatgtgctaaagcttgaactaattccagaagctaaaattcctgctaagatttctcaaatgactaacctccaagagctccacctctgccactgccctgcaaaagttgaacagactgcttttagctttcttcgcgatcacttgagatgccttcacgtgaagttcactgatgtggctgaaattcctgcctgggtgtatttgctcaaaaaccttcgagagttgtacttaataggcaatttgaactctgaaaacaataagatgataggacttgaatctctccgagagttgcggcaccttaagattctccacgtgaagagcaatttgaccaaagttccctccaacattacagatgtggctccacatcttacaaagttagtcattcataatgacggcactaaactcttggtactgaacagccttaagaaaatgatgaatgtcgctgagctggaactccagaactgtgagctagagagaatcccacatgctattttcagcctctctaatttacaggaactggatttaaagtccaataacattcgcacaattgaggaaatcatcagtttccagcatttaaaacgactgacttgtttaaaattatggcataacaaaattgttactattcctccctctattacccatgtcaaaaacttggagtcactttatttctctaacaacaagctcgaatccttaccagtggcagtatttagtttacagaaactcagatgcttagatgtgagctacaacaacatttcaatgattccaatagaaataggattgcttcagaacctgcagcatttgcatatcactgggaacaaagtggacattctgccaaaacaattgtttaaatgcataaagttgaggactttgaatctgggacagaactgcatcacctcactcccagagaaagttggtcagctctcccagctcactcagctggagctgaaggggaactgcttggaccgcctgccagcccagctgggccagtgtcggatgctcaagaaaagcgggcttgttgtggaagatcacctttttgataccctgccactcgaagtcaaagaggcattgaatcaagacataaatattccctttgcaaatgggatttaaactaagataatatatgcacagtgatgtgcaggaacaacttcctagattgcaagtgctcacgtacaagttattacaagataatgcattttaggagtagatacatcttttaaaataaaacagagaggatgcatagaaggctgatagaagacataactgaatgttcaatgtttgtagggttttaagtcattcatttccaaatcatttttttttttcttttggggaaagggaaggaaaaattataatcactaatcttggttctttttaaattgtttgtaacttggatgctgccgctactgaatgtttacaaattgcttgcctgctaaagtaaatgattaaattgacattttcttactatatcaccttttttgaggggtcttaatttactttgcttaattggtgcaatattgctttaactccgttcactaaagacaaacacatcaagtccaaacttgtaaatttagatttgctgaaatactgatttatttcctgttttaatttaaagtgcctcaagtaagcacctctcacaacagttgactggtactgctgctcctgagcacctcgtgtcatagattttatactcttacagacttggaatgcagtagaggtatgtggatttttaggggttttgtttttttaagaataagtaacaagaaataacacatttcttaataatagcttttttgacatagtttggagttctgattatatggtacatttttctaccagtaatatagggttgccaataaatagaaaatgttttctaaaaataaattttattacaaca

SEQ ID NO: 455315 - DNA, 2803 bp, Homo sapiens
gcgtgggctcttgggagcgggacttctgctcaaatcctgtccaggggcttgaaaaggaggagaattgggggtggttgccgggaggaccagcacctccagttactggagggttgataggggccttctcctttccgtcaccctttactagggggtatcccttgcagataaatgagattttttgatttcttaaaaagccagctgcagtgaagaagaactgctgcaggtcgaggggaagagaggaagtgcacggctgtctataacgtgctgccgggtctcaggatggaggagtgaagtctcctgtcgccgtggttccagcctccggagctcgcccaagccgcgtccccagagagcgccctgagagaacagggtggccgcttggtccaggaatgtttacccttgcggaagttgcatcacttaatgacattcagccaacttaccgaatcctgaaaccatggtgggatgtgtttatggattacctagctgttgttatgttaatggtagccatctttgcaggaaccatgcaacttaccaaagatcaggtggtctgtttgccagtattgccatctcctgtaaattcaaaggcacatacaccaccaggaaatgccgaggtcaccaccaacatcccaaagatggaagcagcaccaaccaagaccaagatgggcggacaacaaacgacatttcctttgggacatctgctgtgacacctgacatacctctcagagccacatatcctcgcacagatttcgcacttccaaatcaggaggcaaagaaagagaagaaagatccaacaggtcgaaaaacaaacttggattttcagcaatatgtatttattaatcaaatgtgttaccatctggcccttccgtggtattctaagtactttccatacctagctcttatacatactattattctcatggtcagtagcaacttttggttcaaatatcccaaaacatgctcaaaagtagaacattttgtttcaatattaggaaagtgctttgaatccccttggacgacaaaagcgttgtctgagacagcatgcgaagactcagaggaaaacaagcagagaataacaggtgcccagactctaccaaagcatgtttctaccagcagtgatgaagggagccccagtgccagtacaccaatgatcaataaaactggctttaaattttcagctgagaagcctgtgattgaagttcccagcatgacaatcctggataaaaaggatggagagcaggccaaagccctgtttgagaaagtgaggaagttccgtgcccatgtggaagatagtgacttgatctataaactctatgtggtccaaacagttatcaaaacagccaagttcatttttattctctgctatacagcgaactttgtcaacgcaatcagctttgaacacgtctgcaagcccaaagttgagcatctgattggttatgaggtatttgagtgcacccacaatatggcttacatgttgaaaaagcttctcatcagttacatatccattatttgtgtttatggctttatctgcctctacactctcttctggttattcaggatacctttgaaggaatattctttcgaaaaagtcagagaagagagcagttttagtgacattccagatgtcaaaaacgattttgcgttccttcttcacatggtagaccagtatgaccagctatattccaagcgttttggtgtgttcttgtcagaagttagtgaaaataaacttagggaaattagtttgaaccatgagtggacatttgaaaaactcaggcagcacatttcacgcaacgcccaggacaagcaggagttgcatctgttcatgctgtcgggggtgcccgatgctgtctttgacctcacagacctggatgtgctaaagcttgaactaattccagaagctaaaattcctgctaagatttctcaaatgactaacctccaagagctccacctctgccactgccctgcaaaagttgaacagactgcttttagctttcttcgcgatcacttgagatgccttcacgtgaagttcactgatgtggctgaaattcctgcctgggtgtatttgctcaaaaaccttcgagagttgtacttaataggcaatttgaactctgaaaacaataagatgataggacttgaatctctccgagagttgcggcaccttaagattctccacgtgaagagcaatttgaccaaagttccctccaacattacagatgtggctccacatcttacaaagttagtcattcataatgacggcactaaactcttggtactgaacagccttaagaaaatgatgaatgtcgctgagctggaactccagaactgtgagctagagagaatcccacatgctattttcagcctctctaatttacaggaactggatttaaagtccaataacattcgcacaattgaggaaatcatcagtttccagcatttaaaacgactgacttgtttaaaattatggcataacaaaattgttactattcctccctctattacccatgtcaaaaacttggagtcactttatttctctaacaacaagctcgaatccttaccagtggcagtatttagtttacagaaactcagatgcttagatgtgagctacaacaacatttcaatgtttgtagggttttaagtcattcatttccaaatcatttttttttttcttttggggaaagggaaggaaaaattataatcactaatcttggttctttttaaattgtttgtaacttggatgctgccgctactgaatgtttacaaattgcttgcctgctaaagtaaatgattaaattgacattttcttactata

SEQ ID NO: 455316 - DNA, 819 bp, Homo sapiens
gggccaccggagaaagcgctcgcaatcacatggaggcccgggcccgccccattggctgcggccgggccagtcgcggcactcgccggctgcggttggtcccagagctgcagcgcctgcacgggcccggagtccatgttacgctttgtctaattcccctcgttacagagtcatgtgctgctgctcccgtcgccgctgtctgccgctgccgccgcccgtggtgccccggctcctccgccgcgcttcgaggtggcagccgcgggcggggccgcgggagcagggtccagggtgcagcgcgccttcgccgccccggcgcgtcccggtgcagccgccgcccgccgcgggtgatgccgccacctccggcctcagcataagccgtggcttggcggccgagctgcaccccaaggaagtgcacggctgtctataacgtgctgccgggtctcaggatggaggagtgaagtctcctgtcgccgtggttccagcctccggagctcgcccaagccgcgtccccagagagcgccctgagagaacagggtggccgcttggtccaggaatgtttacccttgcggaagttgcatcacttaatgacattcagccaacttaccgaatcctgaaaccatggtgggatgtgtttatggattacctagctgttgttatgttaatggtagccatctttgcaggaaccatgcaacttaccaaagatcaggtggtctgtttgccagtattgccatctcctgtaaattcaaaggcacatacaccaccaggaaatgccgaggtcaccacccctctacgtttccccaataaagccttttaaaaaaaccc

SEQ ID NO: 455317 - DNA, 198 bp, Homo sapiens
gcgtgggctcttgggagcgggacttctgctcaaatcctgtccaggggcttgaaaaggaggagaattgggggtggttgccgggaggaccagcacctccagttactggagggttgataggggccttctcctttccgtcaccctttactagggggtatcccttgcagataaatgagaaggcccctgagaggggtaccgagc

SEQ ID NO: 455318 - DNA, 4050 bp, Homo sapiens
ttgtaggaattcgcagtgtaggggaaatggtacagattttataatcaggaaagacctgtattcagttctccatttgaccactttctgccagagccatgggaacagttttttaatttctctgaccctgtttcctcacttgggaatatgacttttgcagatctgttggaaaatattaaggccaagagggatttaaaatgagatgttgtctagcactgagtaggagcttaatatctatccgttcctttctgcttcagtcaaaactgagcttcatatgtagaatgattattgtttgtattacattctccattttgagtatggaaccatgaatgccaacagcttgataataaaaggagccgtttgtcaagagacagtcctgtaagcgctttttaacctggtagactgtgcatgtaagggcaggcaggttacaaatgcgaatccccatagccagcacactctacatacagcagattcttaagccatctgtgtactctttttaacactgtactgaagtccacttaagtcagagttcaacaaaatgaatgaatgtaatcccaggactatggaacttctctgtgattacatagcacagagaactacggaatcattttctggaagaatgcaccatgcgattatgctccatgtggaattggtatatataaatgttggtagactgtgaggatgaggttgacaggttgatctgagtagagaccctaggaggaaccgaggatactatgtagttttgttgttgttactgttttgcagttcctggctgctctgtgttggcagctgtgtgcacgctttctcttttgagccagcgaggcacaagacaagtaatttcccatcttgaatctctcacagctgctgagctgtagtggatatactgggatgtggctatgaactttaaaaatttgcataaatccagcccctactcccctgcaaaggctcagtcttgtctttacaccttccccgaggaagtgcacggctgtctataacgtgctgccgggtctcaggatggaggagtgaagtctcctgtcgccgtggttccagcctccggagctcgcccaagccgcgtccccagagagcgccctgagagaacagggtggccgcttggtccaggaatgtttacccttgcggaagttgcatcacttaatgacattcagccaacttaccgaatcctgaaaccatggtgggatgtgtttatggattacctagctgttgttatgttaatggtagccatctttgcaggaaccatgcaacttaccaaagatcaggtggtctgtttgccagtattgccatctcctgtaaattcaaaggcacatacaccaccaggaaatgccgaggtcaccaccaacatcccaaagatggaagcagcaccaaccaagaccaagatgggcggacaacaaacgacatttcctttgggacatctgctgtgacacctgacatacctctcagagccacatatcctcgcacagatttcgcacttccaaatcaggaggcaaagaaagagaagaaagatccaacaggtcgaaaaacaaacttggattttcagcaatatgtatttattaatcaaatgtgttaccatctggcccttccgtggtattctaagtactttccatacctagctcttatacatactattattctcatggtcagtagcaacttttggttcaaatatcccaaaacatgctcaaaagtagaacattttgtttcaatattaggaaagtgctttgaatccccttggacgacaaaagcgttgtctgagacagcatgcgaagactcagaggaaaacaagcagagaataacaggtgcccagactctaccaaagcatgtttctaccagcagtgatgaagggagccccagtgccagtacaccaatgatcaataaaactggctttaaattttcagctgagaagcctgtgattgaagttcccagcatgacaatcctggataaaaaggatggagagcaggccaaagccctgtttgagaaagtgaggaagttccgtgcccatgtggaagatagtgacttgatctataaactctatgtggtccaaacagttatcaaaacagccaagttcatttttattctctgctatacagcgaactttgtcaacgcaatcagctttgaacacgtctgcaagcccaaagttgagcatctgattggttatgaggtatttgagtgcacccacaatatggcttacatgttgaaaaagcttctcatcagttacatatccattatttgtgtttatggctttatctgcctctacactctcttctggttattcaggatacctttgaaggaatattctttcgaaaaagtcagagaagagagcagttttagtgacattccagatgtcaaaaacgattttgcgttccttcttcacatggtagaccagtatgaccagctatattccaagcgttttggtgtgttcttgtcagaagttagtgaaaataaacttagggaaattagtttgaaccatgagtggacatttgaaaaactcaggcagcacatttcacgcaacgcccaggacaagcaggagttgcatctgttcatgctgtcgggggtgcccgatgctgtctttgacctcacagacctggatgtgctaaagcttgaactaattccagaagctaaaattcctgctaagatttctcaaatgactaacctccaagagctccacctctgccactgccctgcaaaagttgaacagactgcttttagctttcttcgcgatcacttgagatgccttcacgtgaagttcactgatgtggctgaaattcctgcctgggtgtatttgctcaaaaaccttcgagagttgtacttaataggcaatttgaactctgaaaacaataagatgataggacttgaatctctccgagagttgcggcaccttaagattctccacgtgaagagcaatttgaccaaagttccctccaacattacagatgtggctccacatcttacaaagttagtcattcataatgacggcactaaactcttggtactgaacagccttaagaaaatgatgaatgtcgctgagctggaactccagaactgtgagctagagagaatcccacatgctattttcagcctctctaatttacaggaactggatttaaagtccaataacattcgcacaattgaggaaatcatcagtttccagcatttaaaacgactgacttgtttaaaattatggcataacaaaattgttactattcctccctctattacccatgtcaaaaacttggagtcactttatttctctaacaacaagctcgaatccttaccagtggcagtatttagtttacagaaactcagatgcttagatgtgagctacaacaacatttcaatgattccaatagaaataggattgcttcagaacctgcagcatttgcatatcactgggaacaaagtggacattctgccaaaacaattgtttaaatgcataaagttgaggactttgaatctgggacagaactgcatcacctcactcccagagaaagttggtcagctctcccagctcactcagctggagctgaaggggaactgcttggaccgcctgccagcccagctgggccagtgtcggatgctcaagaaaagcgggcttgttgtggaagatcacctttttgataccctgccactcgaagtcaaagaggcattgaatcaagacataaatattccctttgcaaatgggatttaaactaagataatatatgcacagtgatgtgcaggaacaacttcctagattgcaagtgctcacgtacaagttattacaagataatgcattttaggagtagatacatcttttaaaataaaacagagaggatgcatagaaggctgatagaagacataactgaatgttcaatgtttgtagggttttaagtcattcatttccaaatcatttttttttttcttttggggaaagggaaggaaaaattataatcactaatcttggttctttttaaattgtttgtaacttggatgctgccgctactgaatgtttacaaattgcttgcctgctaaagtaaatgattaaattgacattttcttactata

SEQ ID NO: 455319 - DNA, 3472 bp, Homo sapiens
cttctcaatccacatgctttccataggactgcatcaaaggccagagtttcagctatatatattgataaatcacaagtgtgtatagtaagactctggctaaacgctagacccttagtttcaactgttcatggacacttccaccagagtgattggagctaacgtaaacagctaacaaacacttgtggccagaggatgtgctaagagcgttacaatcattactttaatgagtccacaacaaatgccatcctgctgtcataccctccttcaaggtccactaagtaaccactatggacttggtgcagtctgtcataatttcttacctagaatgcaattcttactcattctttccctcttcccttgcactaggagagaaaagctgtatattccccttttagtttattttctactacatttatattggataaaaagataggacctgaatgagaaaactttagttaggagcaggcatagggtttttctcatttactcttttcatttgcatctctagaataatgtcttttgtcttcttgttttctaggaatgtttacccttgcggaagttgcatcacttaatgacattcagccaacttaccgaatcctgaaaccatggtgggatgtgtttatggattacctagctgttgttatgttaatggtagccatctttgcaggaaccatgcaacttaccaaagatcaggtggtctgtttgccagtattgccatctcctgtaaattcaaaggcacatacaccaccaggaaatgccgaggtcaccaccaacatcccaaagatggaagcagcaccaaccaagaccaagatgggcggacaacaaacgacatttcctttgggacatctgctgtgacacctgacatacctctcagagccacatatcctcgcacagatttcgcacttccaaatcaggaggcaaagaaagagaagaaagatccaacaggtcgaaaaacaaacttggattttcagcaatatgtatttattaatcaaatgtgttaccatctggcccttccgtggtattctaagtactttccatacctagctcttatacatactattattctcatggtcagtagcaacttttggttcaaatatcccaaaacatgctcaaaagtagaacattttgtttcaatattaggaaagtgctttgaatccccttggacgacaaaagcgttgtctgagacagcatgcgaagactcagaggaaaacaagcagagaataacaggtgcccagactctaccaaagcatgtttctaccagcagtgatgaagggagccccagtgccagtacaccaatgatcaataaaactggctttaaattttcagctgagaagcctgtgattgaagttcccagcatgacaatcctggataaaaaggatggagagcaggccaaagccctgtttgagaaagtgaggaagttccgtgcccatgtggaagatagtgacttgatctataaactctatgtggtccaaacagttatcaaaacagccaagttcatttttattctctgctatacagcgaactttgtcaacgcaatcagctttgaacacgtctgcaagcccaaagttgagcatctgattggttatgaggtatttgagtgcacccacaatatggcttacatgttgaaaaagcttctcatcagttacatatccattatttgtgtttatggctttatctgcctctacactctcttctggttattcaggatacctttgaaggaatattctttcgaaaaagtcagagaagagagcagttttagtgacattccagatgtcaaaaacgattttgcgttccttcttcacatggtagaccagtatgaccagctatattccaagcgttttggtgtgttcttgtcagaagttagtgaaaataaacttagggaaattagtttgaaccatgagtggacatttgaaaaactcaggcagcacatttcacgcaacgcccaggacaagcaggagttgcatctgttcatgctgtcgggggtgcccgatgctgtctttgacctcacagacctggatgtgctaaagcttgaactaattccagaagctaaaattcctgctaagatttctcaaatgactaacctccaagagctccacctctgccactgccctgcaaaagttgaacagactgcttttagctttcttcgcgatcacttgagatgccttcacgtgaagttcactgatgtggctgaaattcctgcctgggtgtatttgctcaaaaaccttcgagagttgtacttaataggcaatttgaactctgaaaacaataagatgataggacttgaatctctccgagagttgcggcaccttaagattctccacgtgaagagcaatttgaccaaagttccctccaacattacagatgtggctccacatcttacaaagttagtcattcataatgacggcactaaactcttggtactgaacagccttaagaaaatgatgaatgtcgctgagctggaactccagaactgtgagctagagagaatcccacatgctattttcagcctctctaatttacaggaactggatttaaagtccaataacattcgcacaattgaggaaatcatcagtttccagcatttaaaacgactgacttgtttaaaattatggcataacaaaattgttactattcctccctctattacccatgtcaaaaacttggagtcactttatttctctaacaacaagctcgaatccttaccagtggcagtatttagtttacagaaactcagatgcttagatgtgagctacaacaacatttcaatgattccaatagaaataggattgcttcagaacctgcagcatttgcatatcactgggaacaaagtggacattctgccaaaacaattgtttaaatgcataaagttgaggactttgaatctgggacagaactgcatcacctcactcccagagaaagttggtcagctctcccagctcactcagctggagctgaaggggaactgcttggaccgcctgccagcccagctgggccagtgtcggatgctcaagaaaagcgggcttgttgtggaagatcacctttttgataccctgccactcgaagtcaaagaggcattgaatcaagacataaatattccctttgcaaatgggatttaaactaagataatatatgcacagtgatgtgcaggaacaacttcctagattgcaagtgctcacgtacaagttattacaagataatgcattttaggagtagatacatcttttaaaataaaacagagaggatgcatagaaggctgatagaagacataactgaatgttcaatgtttgtagggttttaagtcattcatttccaaatcatttttttttttcttttggggaaagggaaggaaaaattataatcactaatcttggttctttttaaattgtttgtaacttggatgctgccgctactgaatgtttacaaattgcttgcctgctaaagtaaatgattaaattgacattttcttactata

SEQ ID NO: 455320 - DNA, 3204 bp, Homo sapiens
gcgtgggctcttgggagcgggacttctgctcaaatcctgtccaggggcttgaaaaggaggagaattgggggtggttgccgggaggaccagcacctccagttactggagggttgataggggccttctcctttccgtcaccctttactagggggtatcccttgcagataaatgagattttttgatttcttaaaaagccagctgcagtgaagaagaactgctgcaggtcgaggggaagagaggaagtgcacggctgtctataacgtgctgccgggtctcaggatggaggagtgaagtctcctgtcgccgtggttccagcctccggagctcgcccaagccgcgtccccagagagcgccctgagagaacagggtggccgcttggtccaggaatgtttacccttgcggaagttgcatcacttaatgacattcagccaacttaccgaatcctgaaaccatggtgggatgtgtttatggattacctagctgttgttatgttaatggtagccatctttgcaggaaccatgcaacttaccaaagatcaggtggtctgtttgccagtattgccatctcctgtaaattcaaaggcacatacaccaccaggaaatgccgaggtcaccaccaacatcccaaagatggaagcagcaccaaccaagaccaagatgggcggacaacaaacgacatttcctttgggacatctgctgtgacacctgacatacctctcagagccacatatcctcgcacagatttcgcacttccaaatcaggaggcaaagaaagagaagaaagatccaacaggtcgaaaaacaaacttggattttcagcaatatgtatttattaatcaaatgtgttaccatctggcccttccgtggtattctaagtactttccatacctagctcttatacatactattattctcatggtcagtagcaacttttggttcaaatatcccaaaacatgctcaaaagtagaacattttgtttcaatattaggaaagtgctttgaatccccttggacgacaaaagcgttgtctgagacagcatgcgaagactcagaggaaaacaagcagagaataacaggtgcccagactctaccaaagcatgtttctaccagcagtgatgaagggagccccagtgccagtacaccaatgatcaataaaactggctttaaattttcagctgagaagcctgtgattgaagttcccagcatgacaatcctggataaaaaggatggagagcaggccaaagccctgtttgagaaagtgaggaagttccgtgcccatgtggaagatagtgacttgatctataaactctatgtggtccaaacagttatcaaaacagccaagttcatttttattctctgctatacagcgaactttgtcaacgcaatcagctttgaacacgtctgcaagcccaaagttgagcatctgattggttatgaggtatttgagtgcacccacaatatggcttacatgttgaaaaagcttctcatcagttacatatccattatttgtgtttatggctttatctgcctctacactctcttctggttattcaggatacctttgaaggaatattctttcgaaaaagtcagagaagagagcagttttagtgacattccagatgtcaaaaacgattttgcgttccttcttcacatggtagaccagtatgaccagctatattccaagcgttttggtgtgttcttgtcagaagttagtgaaaataaacttagggaaattagtttgaaccatgagtggacatttgaaaaactcaggcagcacatttcacgcaacgcccaggacaagcaggagttgcatctgttcatgctgtcgggggtgcccgatgctgtctttgacctcacagacctggatgtgctaaagcttgaactaattccagaagctaaaattcctgctaagatttctcaaatgactaacctccaagagctccacctctgccactgccctgcaaaagttgaacagactgcttttagctttcttcgcgatcacttgagatgccttcacgtgaagttcactgatgtggctgaaattcctgcctgggtgtatttgctcaaaaaccttcgagagttgtacttaataggcaatttgaactctgaaaacaataagatgataggacttgaatctctccgagagttgcggcaccttaagattctccacgtgaagagcaatttgaccaaagttccctccaacattacagatgtggctccacatcttacaaagttagtcattcataatgacggcactaaactcttggtactgaacagccttaagaaaatgatgaatgtcgctgagctggaactccagaactgtgagctagagagaatcccacatgctattttcagcctctctaatttacaggaactggatttaaagtccaataacattcgcacaattgaggaaatcatcagtttccagcatttaaaacgactgacttgtttaaaattatggcataacaaaattgttactattcctccctctattacccatgtcaaaaacttggagtcactttatttctctaacaacaagctcgaatccttaccagtggcagtatttagtttacagaaactcagatgcttagatgtgagctacaacaacatttcaatgattccaatagaaataggattgcttcagaacctgcagcatttgcatatcactgggaacaaagtggacattctgccaaaacaattgtttaaatgcataaagttgaggactttgaatctgggacagaactgcatcacctcactcccagagaaagttggtcagctctcccagctcactcagctggagctgaaggggaactgcttggaccgcctgccagcccagctgggccagtgtcggatgctcaagaaaagcgggcttgttgtggaagatcacctttttgataccctgccactcgaagtcaaagaggcattgaatcaagacataaatattccctttgcatcttttaaaataaaacagagaggatgcatagaaggctgatagaagacataactgaatgttcaatgtttgtagggttttaagtcattcatttccaaatcatttttttttttcttttggggaaagggaaggaaaaattataatcactaatcttggttctttttaaattgtttgtaacttggatgctgccgctactgaatgtttacaaattgcttgcctgctaaagtaaatgattaaattgacattttcttactata

SEQ ID NO: 455321 - DNA, 2430 bp, Homo sapiens
  misc_feature (2227)..(2227): n is a, c, g, or t
gcgtgggctcttgggagcgggacttctgctcaaatcctgtccaggggcttgaaaaggaggagaattgggggtggttgccgggaggaccagcacctccagttactggagggttgataggggccttctcctttccgtcaccctttactagggggtatcccttgcagataaatgagattttttgatttcttaaaaagccagctgcagtgaagaagaactgctgcaggtcgaggggaagagaggaagtgcacggctgtctataacgtgctgccgggtctcaggatggaggagtgaagtctcctgtcgccgtggttccagcctccggagctcgcccaagccgcgtccccagagagcgccctgagagaacagggtggccgcttggtccaggaatgtttacccttgcggaagttgcatcacttaatgacattcagccaacttaccgaatcctgaaaccatggtgggatgtgtttatggattacctagctgttgttatgttaatggtagccatctttgcaggaaccatgcaacttaccaaagatcaggtggtctgtttgccagtattgccatctcctgtaaattcaaaggcacatacaccaccaggaaatgccgaggtcaccaccaacatcccaaagatggaagcagcaccaaccaagaccaagatgggcggacaacaaacgacatttcctttgggacatctgctgtgacacctgacatacctctcagagccacatatcctcgcacagatttcgcacttccaaatcaggaggcaaagaaagagaagaaagatccaacaggtcgaaaaacaaacttggattttcagcaatatgtatttattaatcaaatgtgttaccatctggcccttccgtggtattctaagtactttccatacctagctcttatacatactattattctcatggtcagtagcaacttttggttcaaatatcccaaaacatgctcaaaagtagaacattttgtttcaatattaggaaagtgctttgaatccccttggacgacaaaagcgttgtctgagacagcatgcgaagactcagaggaaaacaagcagagaataacaggtgcccagactctaccaaagcatgtttctaccagcagtgatgaagggagccccagtgccagtacaccaatgatcaataaaactggctttaaattttcagctgagaagcctgtgattgaagttcccagcatgacaatcctggataaaaaggatggagagcaggccaaagccctgtttgagaaagtgaggaagttccgtgcccatgtggaagatagtgacttgatctataaactctatgtggtccaaacagttatcaaaacagccaagttcatttttattctctgctatacagcgaactttgtcaacgcaatcagctttgaacacgtctgcaagcccaaagttgagcatctgattggttatgaggtatttgagtgcacccacaatatggcttacatgttgaaaaagcttctcatcagttacatatccattatttgtgtttatggctttatctgcctctacactctcttctggttattcaggatacctttgaaggaatattctttcgaaaaagtcagagaagagagcagttttagtgacattccagatgtcaaaaacgattttgcgttccttcttcacatggtagaccagtatgaccagctatattccaagcgttttggtgtgttcttgtcagaagttagtgaaaataaacttagggaaattagtttgaaccatgagtggacatttgaaaaactcaggcagcacatttcacgcaacgcccaggacaagcaggagttgcatctgttcatgctgtcgggggtgcccgatgctgtctttgacctcacagacctggatgtgctaaagcttgaactaattccagaagctaaaattcctgctaagatttctcaaatgactaacctccaagagctccacctctgccactgccctgcaaaagttgaacagactgcttttagctttcttcgcgatcacttgagatgccttcacgtgaagttcactgatgtggctgaaattcctgcctgggtgtatttgctcaaaaaccttcgagagttgtacttaataggcaatttgaactctgaaaacaataagatgataggacttgaatctctccgagagttgcggcaccttaagattctccacgtgaagagcaatttgaccaaagttccctccaacattacagatgtgctcgtgccgattcgncacgagctcaatccccatcataatggtgggtccaggaaccgcatagccccgtttattgggttctacaacatagagagaaactccaagaacaacacccagatggaaattttggagcaatgtggttgttttttggctgcaggcataaggatagggattatctattcagaaaagagctcagacatttcctttaagcatgggatctt

SEQ ID NO: 455322 - DNA, 2624 bp, Homo sapiens
gaattaagatcttgtgtagacctgatttgtctggattttagagttatttgagagcccatatttcaccttgaggagggtgctgctgctgtgacagcctgcagtgttttgaaacagcatggattgggtgtcttgtttgcagcatgtgtcccatgttccccaacactgttgagggaaagctgttcctcaggacctgctgagtggccatattccctgaaggcctgaatctgtttcacaggccactgttggtaagatctaaagcatccagtagggaaacaaaattgataaatattgagtgtgagtaattgggattggggagattgtggcaaactagaggggaagtgcccattgtaaaaacacatccacagacagtccaggcactaaggctgaatgggatcagggtatccagaaatctcaggatctccagggccatgttactgttaggtcaaggtcactggtgcagcaacgaatgtagtttttctagattcctctccctccctgggctctttacctaatgtctttgcggcacaggcggtaaccctgggagtaaagaggtgtggtccaaggaagtagcttttgtgaccagctggagtttctggtgactcttttggcaatggtcctcattgtttgccagtttttcttactactgaggaagagattgtcttcccaagatatttggagtgataagagtcaccatagtgaggtagagtcactcttagtgatgtccagttgtccagtttccaatagaagtgggagatccagatttttaaatgggataactttttataggttcactgaggtgtaatcaacatgcaatatattgcacatatttaaagtgtacgagttaagtcttgatacacacacacacacacacacacacacacacacacacttgaaactatcaccctatcagtggtattggacatatctgttacccccaaagttaacctgaggcccttaacctttctctcagtgctcgccttcccccagaatccctaggcaaccactgagtagttttcactgtaggtaaatttgtcttttctagaattttatgtaagtctgcctataaagtgttaattttgcatgctgtctttcatgcaacataatttgaaatttgtccatggtatgtatgaacagtccattttaaaattactgagtcatattctgtatggatataccacagtttatccatttatcttaattgatgtctgtactccacccccatttttaaatattaaaaagctgctgcaaatattgatgcatgagtctttatgtggacacttagctgagaacatttttaagcagaggttttgaaggtgtgaccatatatcttactaattatagtaaaatatattggaaaagagatacatacagggaagaactgtgaaacagaaaagacctaagatttgatgatttgggaaattctcagcccatcttaattggaaaaaaaaaacaaaccattgaaattaagagattcattgttaggaaagatagatgttttagagagagagatgttttagagagatagccaaggatgtttgctgataccgggatcaaaacatacatcagaacactgtcacacaaaaagctctttgaagagattaaatgtgacttgtagatcccctcaatacaaacaatttataagaagtttaaactatcactcatctcagcaaaagccaaaaatatagataggggattccctaggaggaataatctgcataaacctcttttctaatgttgtgaatttcagtgatgtacaggagactcacaaaattcttgaaaattttataccagtggaaatgctcaccttgggtctaaagggaccttgaaagtatgaagttaaagggtgtaggcatgtaaagtgtgaagttaaaggttgtaatattctatacatgggactggctgcggaaacaggtgcaagcccttgctacctttcatgagaaaggaaggatgactcagagcagaggagagtccagtgggcagagtcctgaaccatgtgatattcccatgtcttgactcccagtggcatttgccaaactagatttcagattttcttgggattggtggttccattttttttgttttccccccttccatttcctccccttttgaaacaatgcatatacatataactattatcctaggtctttcccaaccttttgtttgggagcagataactagttttctagttttacagatccaaatgagacaggaatagcactgggtggtcacaggaggatggaaaatctcaacaccctggttttggtgcagctgaaaaaaaaaaagaaaaacccaaacaacagctaaaacgggaactaggcaaagaaaccgtgggataacagaaaacccaaaacaaaagagaaaactgccagaaccccagtcagggtgacatgtctgtaactcttccaggcaaacccaaataagggaggaggggtggtaatcaggggtccctgaaatcccctcttttcccagaatacctaatgattacccctattaaaggaacacccatacaattagaaacccaaactttgttttgcatgacttgctctcaggggcactcccacacttctctcttgtgtgtacttttgcttcacaataaaagctgcttgcctttgcttcacaaaaaa

SEQ ID NO: 455323 - DNA, 2327 bp, Homo sapiens
cctgtgacttacacctcagtagtacaacaacaaagcagaaaagggctgagtttatctgggatctgcacatggttctggattgctgaattgacccatgaaatagagccaggaggggaagatttaataggtggattcagggcaacccatggcagtgtggccgttgatcaggaccagatgtaatcctggatgcattatccaagcattctctggatgctgtgtgcagatttgcatgtggggaagccatggaggtaccagtgttgtgggtgtccatagatgtaaaggaggtatagccaaaagggtgactcttttggcaatggtcctcattgtttgccagtttttcttactactgaggaagagattgtcttcccaagatatttggagtgataagagtcaccatagtgaggtagagtcactcttagtgatgtccagttgtccagtttccaatagaagtgggagatccagatttttaaatgggataactttttataggttcactgaggtgtaatcaacatgcaatatattgcacatatttaaagtgtacgagttaagtcttgatacacacacacacacacacacacacacacacacacacttgaaactatcaccctatcagtggtattggacatatctgttacccccaaagttaacctgaggcccttaacctttctctcagtgctcgccttcccccagaatccctaggcaaccactgagtagttttcactgtaggtaaatttgtcttttctagaattttatgtaagtctgcctataaagtgttaattttgcatgctgtctttcatgcaacataatttgaaatttgtccatggtatgtatgaacagtccattttaaaattactgagtcatattctgtatggatataccacagtttatccatttatcttaattgatgtctgtactccacccccatttttaaatattaaaaagctgctgcaaatattgatgcatgagtctttatgtggacacttagctgagaacatttttaagcagaggttttgaaggtgtgaccatatatcttactaattatagtaaaatatattggaaaagagatacatacagggaagaactgtgaaacagaaaagacctaagatttgatgatttgggaaattctcagcccatcttaattggaaaaaaaaaacaaaccattgaaattaagagattcattgttaggaaagatagatgttttagagagagagatgttttagagagatagccaaggatgtttgctgataccgggatcaaaacatacatcagaacactgtcacacaaaaagctctttgaagagattaaatgtgacttgtagatcccctcaatacaaacaatttataagaagtttaaactatcactcatctcagcaaaagccaaaaatatagataggggattccctaggaggaataatctgcataaacctcttttctaatgttgtgaatttcagtgatgtacaggagactcacaaaattcttgaaaattttataccagtggaaatgctcaccttgggtctaaagggaccttgaaagtatgaagttaaagggtgtaggcatgtaaagtgtgaagttaaaggttgtaatattctatacatgggactggctgcggaaacaggtgcaagcccttgctacctttcatgagaaaggaaggatgactcagagcagaggagagtccagtgggcagagtcctgaaccatgtgatattcccatgtcttgactcccagtggcatttgccaaactagatttcagattttcttgggattggtggttccattttttttgttttccccccttccatttcctccccttttgaaacaatgcatatacatataactattatcctaggtctttcccaaccttttgtttgggagcagataactagttttctagttttacagatccaaatgagacaggaatagcactgggtggtcacaggaggatggaaaatctcaacaccctggttttggtgcagctgaaaaaaaaaaagaaaaacccaaacaacagctaaaacgggaactaggcaaagaaaccgtgggataacagaaaacccaaaacaaaagagaaaactgccagaaccccagtcagggtgacatgtctgtaactcttccaggcaaacccaaataagggaggaggggtggtaatcaggggtccctgaaatcccctcttttcccagaatacctaatgattacccctattaaaggaacacccatacaattagaaacccaaactttgttttgcatgacttgctctcaggggcactcccacacttctctcttgtgtgtacttttgcttcacaataaaagctgcttgcctttgcttcacaaaaaa

SEQ ID NO: 455324 - DNA, 2048 bp, Homo sapiens
ttatgagtggagctaggtctccagaatgaagcaggatacagagtttatggtttactcattagttagtcatgtgccagtcaatctgatgaaccagggtattctccactttagccacacattagagtcatctaggaagcttgagaaaatggcgatgcttgtgacttacacccaaagattctgatttaattggtctgaaatgtagactgggcattgggacttttgaaagctccccaggggtgattttaattgggagacaagattgagagccactcttgatacacacacacacacacacacacacacacacacacacttgaaactatcaccctatcagtggtattggacatatctgttacccccaaagttaacctgaggcccttaacctttctctcagtgctcgccttcccccagaatccctaggcaaccactgagtagttttcactgtaggtaaatttgtcttttctagaattttatgtaagtctgcctataaagtgttaattttgcatgctgtctttcatgcaacataatttgaaatttgtccatggtatgtatgaacagtccattttaaaattactgagtcatattctgtatggatataccacagtttatccatttatcttaattgatgtctgtactccacccccatttttaaatattaaaaagctgctgcaaatattgatgcatgagtctttatgtggacacttagctgagaacatttttaagcagaggttttgaaggtgtgaccatatatcttactaattatagtaaaatatattggaaaagagatacatacagggaagaactgtgaaacagaaaagacctaagatttgatgatttgggaaattctcagcccatcttaattggaaaaaaaaaacaaaccattgaaattaagagattcattgttaggaaagatagatgttttagagagagagatgttttagagagatagccaaggatgtttgctgataccgggatcaaaacatacatcagaacactgtcacacaaaaagctctttgaagagattaaatgtgacttgtagatcccctcaatacaaacaatttataagaagtttaaactatcactcatctcagcaaaagccaaaaatatagataggggattccctaggaggaataatctgcataaacctcttttctaatgttgtgaatttcagtgatgtacaggagactcacaaaattcttgaaaattttataccagtggaaatgctcaccttgggtctaaagggaccttgaaagtatgaagttaaagggtgtaggcatgtaaagtgtgaagttaaaggttgtaatattctatacatgggactggctgcggaaacaggtgcaagcccttgctacctttcatgagaaaggaaggatgactcagagcagaggagagtccagtgggcagagtcctgaaccatgtgatattcccatgtcttgactcccagtggcatttgccaaactagatttcagattttcttgggattggtggttccattttttttgttttccccccttccatttcctccccttttgaaacaatgcatatacatataactattatcctaggtctttcccaaccttttgtttgggagcagataactagttttctagttttacagatccaaatgagacaggaatagcactgggtggtcacaggaggatggaaaatctcaacaccctggttttggtgcagctgaaaaaaaaaaagaaaaacccaaacaacagctaaaacgggaactaggcaaagaaaccgtgggataacagaaaacccaaaacaaaagagaaaactgccagaaccccagtcagggtgacatgtctgtaactcttccaggcaaacccaaataagggaggaggggtggtaatcaggggtccctgaaatcccctcttttcccagaatacctaatgattacccctattaaaggaacacccatacaattagaaacccaaactttgttttgcatgacttgctctcaggggcactcccacacttctctcttgtgtgtacttttgcttcacaataaaagctgcttgcctttgcttcacaaaaaa

SEQ ID NO: 455325 - DNA, 4986 bp, Homo sapiens
gtggctgagaagaaggaggcctgagagcgacatgtccccggcggctcaggcggagcggccgtggcgctgtttttctgagtccggggtggcctggcagccggccgaggacgagggtcggcgggggctgcccccgtggtggtggccgccatgctgggagcctgggcggttgagggaaccgctgtggcgctcctgcgactgctgctgctgctgctgccgccggcgatccggggacccgggctcggcgtggccggcgtggccggcgcggcgggggccgggctgcccgagagcgtcatttgggcggtcaacgcgggtggagaggcgcatgtggacgtgcacgggatccacttccgcaaggaccctttggaaggccgggtgggccgagcctcagactatggcatgaaactgccaatcctgcgttccaaccctgaggaccagatcctgtatcaaactgagcggtacaatgaggagacctttggctacgaagtgcccatcaaagaggagggggactacgtgctggtcttgaaatttgcagaggtctactttgcacagtcccagcaaaaggtatttgatgtacgattgaatggccacgtcgtggtgaaggacttggatatctttgatcgtgttgggcatagcacagctcacgatgaaattatacctatgagcatcagaaaggggaagctgagtgtccagggggaggtgtccaccttcacagggaaactctacattgagtttgtcaaggggtactatgacaatcccaaggtctgtgcactctacatcatggctgggacagtggatgatgtaccaaagcttcagcctcatccgggattggagaagaaagaagaggaagaagaagaagaagaatatgatgaagggtctaatctcaaaaaacagaccaataagaaccgggtgcagtcaggcccccgcacacccaacccctatgcctcggacaacagcagcctcatgtttcccatcctggtggccttcggagtcttcattccaaccctcttctgcctctgccggttgtgagaacaaatgactatcctgaacagggtggaggggtgtgggaaagaaaccagccatattggttttggtttctgtatttttcacaatgattaatgaacaaaaacaaagagaaaaaaacacacatcaattaaaggagacaaaaagaggcagagcgagtagagagcagccctcattcaccacctggtcccagacgtgcttcagtcctcgtcctctctttgtggctggctcccagccttctctttcctcttgaggatacttagggtaaactggatccttcctgctcaaggatcctcatttgtatacctagtggaaaggactctgaactcagaggagtcactgttcctttttttaggttagaaattaacagcagggaaatgccatcttattacctgagacgaccagcactgggagttaggtacggtctgaagttatgtctagataagacttcagacgtcctgggattgaaagaatgtgtgtgaaggggtagaatttgtgcggtaaagacttaaaaaaaaaagtagggagattaaaaaaaaagaaagaaaatgcttccttatctggaagcctttctggattaatccagtgatggtcccacctttagtgtttgagctttgtcattgcttgtctccctggcatgtgccagttatagactgtccagcatccaagacgtttcggttatgtcgggtcctcagatcgcctctgacttgttaccacaacaaatcattttgatttcagtgcctgttggggacttgatttcttctcagttttgtttgtttgtttgtttccttaatctggctcatttgaaatttcttctccctctcaaccatcccactaagttatagccaagaagggaaggagacacggggatttggggttctctgcttgaatgtcttctcctttaccacctcaccttgttggtacctccctccctggatctctgagccagcagccaggaggacctgacccagcagttctttactggcccctttgtagggccttgctgccagggggcagggatgctttccagcctgcagcaacagaacacttgaccttaaaagtctcttctggtctttggattagaaaaggcttatgttagcatagcttaagagcaacctcagagatttgagccctactaagtgactgaccactgtttagagtgtctagtatctgatgttcatttattcccatgttcttgtgtgtcacagttcagccagttttggtttatgcctagagctacttcaaggaactagactaattagctatataggcccagcgatgcttcttattgatcttaatagtatgcccctccttcccctgtcctttcatttctctatccaagtagcagtcaggttcttggtgtgatgggactgaaagaattccagtcagccagagccttggcagctctgaagctaaccttagcatctaagtgtcgatcttgaattccctgaaaaaatttctataggaaatgaagcttccctggtcccctcctttctggccattgtcatccatttcccagttagggcaacaatgaaggaggacccagccaagctagaaggaattttgtggatgggagacagcaggattagcttcagcttgggctggagcagtcaatataggatctcaggccaggcccgcttttctagaatgtgtttaattttgagtttgctttattagatatgttttttaagagctctgtatatttgaactgctccttatgtgacaaaataggtagctcttgggctcatgtcctgggttttggctctttaatgattactccaggccagcatttagtcgtttgagaattgtagcctgttgttttcgctgtgacttgggtctcagtgctagggtattgagtcaggcagctggagggttgtggcccgaggctgcagtcagaggtatacttcccatagtgcttcacacagctcccctgcttctaaaggataaggtactgtagccttggtcctggggaccacctgcctggggcagtggacatcctaactaaacaggcttctggcagtagctttggttcctatcccatcgaaattccccaaagccctgggccactgccattgggttagtcaagatgaaggaggaggactggctgcctccattttgccttgtttgttagtttgcctgggtctgtctgaggaaggagggggtcccgccttccacctcaacacatcccttcagtgactcagagtctcagaaggaaaccctgactcctggggccatttcctaatggtactgtaagccaagcagctttgcttctgcctctgtttccaagcccacccttttcccctgagctcagggttagggatgggcgctttcctctctggttgtgaacgaaaggaaggaacatctttctatggctaacaaaaactaaaggggaagtgaggaaacaggaagaagtatggtgggggctggggtagactcccctggagccaagcctatccagctaacaagagctccctggggctggtcacagctggctcatgatgctgaacttgaaagtttttttgtttttgtttttgttttgtggctcctccaagatataggtacatgaagtttaggttaaaggggtgggattctttatttttatttttgtattgtatgtgtcaagaattactctgttgttcaccttttgctttttgcactgtttgttctcttatctgtattttgagcttagtgctaggactgagaggctgcaccatagggaatgtatgggagatggtgaggggtgccagtgaggggtgcgtggaggagaggcctgggctcctctactggatctacactctgtcccaggtttttagatcccactgagcccagctgactgaaaacaaggacagtcagggtgaaacttcttttgccagaagtgtggcctgagttgaatttctgggaggatgacgcagatgtctgctgcagagctgggctgagagttctgcagtctagctctgacttaggtcaggggcctgttggtctctcattggacgtttttgggtctcactcatgcttactgaaacattgtgccaagaaactctgtgggatttgtgtcccttaaaccagactcacttttctgaaaaatctccattgttgaggagaggctgctcaatcgacaccccgagttctcatgactgggaagatagttttcttcaggtgtcaatggcgttagactcccaggaagactagccctgcccacagggccacctgttggtttgagagcgtgttcgtgttctcttgccctccctgcctaagagctactgggatcacgttagcgggcatttaggctttgatgagagggcacagtttgagttaggtttacctccccctttctgtgcctgggaactgtttggtccagctttagaactgtggttttgacttccttatctcttgggagaagcttctgttttaaggaatttctcttccttcttctcctgcctctagcctctcctggaaaggcctggatatggtttctaaaatctcagctgagaacttcagaaaacagcagcagtattttccttttcctagtgctaaaatccctttccctagaaattggctcaccttgggaaacccagggaaagaatcagcaggttctctgccctccctaggggttggggaaggacccaccccggtcagcacagtgccttttcctctcctgctctgagccagggtggggcattccctctagattcaggtttgggcaggggtcctatagtccctgccatggggctgcttccctgtcccttccctcccctttgctggcctactctggcataattcaagtgtcttcttgccttggggatccttagtggcatcaaatggcaacatggaatattgtcctccatgcccctccagaaggacctaggagagtaggtgagctttccaaagtgagagacgaatctttctttctttttttttttaaagggcaggatgggtatgctttgggctttctcctcctgtggcccc

SEQ ID NO: 455326 - DNA, 4996 bp, Homo sapiens
gtggctgagaagaaggaggcctgagagcgacatgtccccggcggctcaggcggagcggccgtggcgctgtttttctgagtccggggtggcctggcagccggccgaggacgagggtcggcgggggctgcccccgtggtggtggccgccatgctgggagcctgggcggttgagggaaccgctgtggcgctcctgcgactgctgctgctgctgctgccgccggcgatccggggacccgggctcggcgtggccggcgtggccggcgcggcgggggccgggctgcccgagagcgtcatttgggcggtcaacgcgggtggagaggcgcatgtggacgtgcacgggatccacttccgcaaggaccctttggaaggccgggtgggccgagcctcagactatggcatgaaactgccaatcctgcgttccaaccctgaggaccagatcctgtatcaaactgagcggtacaatgaggagacctttggctacgaagtgcccatcaaagaggagggggactacgtgctggtcttgaaatttgcagaggtctactttgcacagtcccagcaaaaggtatttgatgtacgattgaatggccacgtcgtggtgaaggacttggatatctttgatcgtgttgggcatagcacagctcacgatgaaattatacctatgagcatcagaaaggggaagctgagtgtccagggggaggtgtccaccttcacagggaaactctacattgagtttgtcaagcggggtactaatgacaactcccaaggtactgtgcactctgacatgcatggtctgggacacgtggatcgatgtaccaaagcttcagcctcatccgggattggagaagaaagaagaggaagaagaagaagaagaatatgatgaagggtctaatctcaaaaaacagaccaataagaaccgggtgcagtcaggcccccgcacacccaacccctatgcctcggacaacagcagcctcatgtttcccatcctggtggccttcggagtcttcattccaaccctcttctgcctctgccggttgtgagaacaaatgactatcctgaacagggtggaggggtgtgggaaagaaaccagccatattggttttggtttctgtatttttcacaatgattaatgaacaaaaacaaagagaaaaaaacacacatcaattaaaggagacaaaaagaggcagagcgagtagagagcagccctcattcaccacctggtcccagacgtgcttcagtcctcgtcctctctttgtggctggctcccagccttctctttcctcttgaggatacttagggtaaactggatccttcctgctcaaggatcctcatttgtatacctagtggaaaggactctgaactcagaggagtcactgttcctttttttaggttagaaattaacagcagggaaatgccatcttattacctgagacgaccagcactgggagttaggtacggtctgaagttatgtctagataagacttcagacgtcctgggattgaaagaatgtgtgtgaaggggtagaatttgtgcggtaaagacttaaaaaaaaaagtagggagattaaaaaaaaagaaagaaaatgcttccttatctggaagcctttctggattaatccagtgatggtcccacctttagtgtttgagctttgtcattgcttgtctccctggcatgtgccagttatagactgtccagcatccaagacgtttcggttatgtcgggtcctcagatcgcctctgacttgttaccacaacaaatcattttgatttcagtgcctgttggggacttgatttcttctcagttttgtttgtttgtttgtttccttaatctggctcatttgaaatttcttctccctctcaaccatcccactaagttatagccaagaagggaaggagacacggggatttggggttctctgcttgaatgtcttctcctttaccacctcaccttgttggtacctccctccctggatctctgagccagcagccaggaggacctgacccagcagttctttactggcccctttgtagggccttgctgccagggggcagggatgctttccagcctgcagcaacagaacacttgaccttaaaagtctcttctggtctttggattagaaaaggcttatgttagcatagcttaagagcaacctcagagatttgagccctactaagtgactgaccactgtttagagtgtctagtatctgatgttcatttattcccatgttcttgtgtgtcacagttcagccagttttggtttatgcctagagctacttcaaggaactagactaattagctatataggcccagcgatgcttcttattgatcttaatagtatgcccctccttcccctgtcctttcatttctctatccaagtagcagtcaggttcttggtgtgatgggactgaaagaattccagtcagccagagccttggcagctctgaagctaaccttagcatctaagtgtcgatcttgaattccctgaaaaaatttctataggaaatgaagcttccctggtcccctcctttctggccattgtcatccatttcccagttagggcaacaatgaaggaggacccagccaagctagaaggaattttgtggatgggagacagcaggattagcttcagcttgggctggagcagtcaatataggatctcaggccaggcccgcttttctagaatgtgtttaattttgagtttgctttattagatatgttttttaagagctctgtatatttgaactgctccttatgtgacaaaataggtagctcttgggctcatgtcctgggttttggctctttaatgattactccaggccagcatttagtcgtttgagaattgtagcctgttgttttcgctgtgacttgggtctcagtgctagggtattgagtcaggcagctggagggttgtggcccgaggctgcagtcagaggtatacttcccatagtgcttcacacagctcccctgcttctaaaggataaggtactgtagccttggtcctggggaccacctgcctggggcagtggacatcctaactaaacaggcttctggcagtagctttggttcctatcccatcgaaattccccaaagccctgggccactgccattgggttagtcaagatgaaggaggaggactggctgcctccattttgccttgtttgttagtttgcctgggtctgtctgaggaaggagggggtcccgccttccacctcaacacatcccttcagtgactcagagtctcagaaggaaaccctgactcctggggccatttcctaatggtactgtaagccaagcagctttgcttctgcctctgtttccaagcccacccttttcccctgagctcagggttagggatgggcgctttcctctctggttgtgaacgaaaggaaggaacatctttctatggctaacaaaaactaaaggggaagtgaggaaacaggaagaagtatggtgggggctggggtagactcccctggagccaagcctatccagctaacaagagctccctggggctggtcacagctggctcatgatgctgaacttgaaagtttttttgtttttgtttttgttttgtggctcctccaagatataggtacatgaagtttaggttaaaggggtgggattctttatttttatttttgtattgtatgtgtcaagaattactctgttgttcaccttttgctttttgcactgtttgttctcttatctgtattttgagcttagtgctaggactgagaggctgcaccatagggaatgtatgggagatggtgaggggtgccagtgaggggtgcgtggaggagaggcctgggctcctctactggatctacactctgtcccaggtttttagatcccactgagcccagctgactgaaaacaaggacagtcagggtgaaacttcttttgccagaagtgtggcctgagttgaatttctgggaggatgacgcagatgtctgctgcagagctgggctgagagttctgcagtctagctctgacttaggtcaggggcctgttggtctctcattggacgtttttgggtctcactcatgcttactgaaacattgtgccaagaaactctgtgggatttgtgtcccttaaaccagactcacttttctgaaaaatctccattgttgaggagaggctgctcaatcgacaccccgagttctcatgactgggaagatagttttcttcaggtgtcaatggcgttagactcccaggaagactagccctgcccacagggccacctgttggtttgagagcgtgttcgtgttctcttgccctccctgcctaagagctactgggatcacgttagcgggcatttaggctttgatgagagggcacagtttgagttaggtttacctccccctttctgtgcctgggaactgtttggtccagctttagaactgtggttttgacttccttatctcttgggagaagcttctgttttaaggaatttctcttccttcttctcctgcctctagcctctcctggaaaggcctggatatggtttctaaaatctcagctgagaacttcagaaaacagcagcagtattttccttttcctagtgctaaaatccctttccctagaaattggctcaccttgggaaacccagggaaagaatcagcaggttctctgccctccctaggggttggggaaggacccaccccggtcagcacagtgccttttcctctcctgctctgagccagggtggggcattccctctagattcaggtttgggcaggggtcctatagtccctgccatggggctgcttccctgtcccttccctcccctttgctggcctactctggcataattcaagtgtcttcttgccttggggatccttagtggcatcaaatggcaacatggaatattgtcctccatgcccctccagaaggacctaggagagtaggtgagctttccaaagtgagagacgaatctttctttctttttttttttaaagggcaggatgggtatgctttgggctttctcctcctgtggcccc

SEQ ID NO: 455327 - DNA, 4799 bp, Homo sapiens
gtggctgagaagaaggaggcctgagagcgacatgtccccggcggctcaggcggagcggccgtggcgctgtttttctgagtccggggtggcctggcagccggccgaggacgagggtcggcgggggctgcccccgtggtggtggccgccatgctgggagcctgggcggttgagggaaccgctgtggcgctcctgcgactgctgctgctgctgctgccgccggcgatccggggacccgggctcggcgtggccggcgtggccggcgcggcgggggccgggctgcccgagagcgtcatttgggcggtcaacgcgggtggagaggcgcatgtggacgtgcacgggatccacttccgcaaggaccctttggaaggccgggtgggccgagcctcagactatggcatgaaactgccaatcctgcgttccaaccctgaggaccagatcctgtatcaaactgagcggtacaatgaggagacctttggctacgaagtgcccatcaaagaggagggggactacgtgctggtcttgaaatttgcagaggtctactttgcacagtcccagcaaaaggtatttgatgtacgattgaatggccacgtcgtggtgaaggacttggatatctttgatcgtgttgggcatagcacagctcacgatgaaattatacctatgagcatcagaaaggggaagctgagtgtccagggggaggtgtccaccttcacagggaaactctacattgagtttgtcaaggggtactatgacaatcccaaggtctgtgcactctacatcatggctgggacagtggatgcggagtcttcattccaaccctcttctgcctctgccggttgtgagaacaaatgactatcctgaacagggtggaggggtgtgggaaagaaaccagccatattggttttggtttctgtatttttcacaatgattaatgaacaaaaacaaagagaaaaaaacacacatcaattaaaggagacaaaaagaggcagagcgagtagagagcagccctcattcaccacctggtcccagacgtgcttcagtcctcgtcctctctttgtggctggctcccagccttctctttcctcttgaggatacttagggtaaactggatccttcctgctcaaggatcctcatttgtatacctagtggaaaggactctgaactcagaggagtcactgttcctttttttaggttagaaattaacagcagggaaatgccatcttattacctgagacgaccagcactgggagttaggtacggtctgaagttatgtctagataagacttcagacgtcctgggattgaaagaatgtgtgtgaaggggtagaatttgtgcggtaaagacttaaaaaaaaaagtagggagattaaaaaaaaagaaagaaaatgcttccttatctggaagcctttctggattaatccagtgatggtcccacctttagtgtttgagctttgtcattgcttgtctccctggcatgtgccagttatagactgtccagcatccaagacgtttcggttatgtcgggtcctcagatcgcctctgacttgttaccacaacaaatcattttgatttcagtgcctgttggggacttgatttcttctcagttttgtttgtttgtttgtttccttaatctggctcatttgaaatttcttctccctctcaaccatcccactaagttatagccaagaagggaaggagacacggggatttggggttctctgcttgaatgtcttctcctttaccacctcaccttgttggtacctccctccctggatctctgagccagcagccaggaggacctgacccagcagttctttactggcccctttgtagggccttgctgccagggggcagggatgctttccagcctgcagcaacagaacacttgaccttaaaagtctcttctggtctttggattagaaaaggcttatgttagcatagcttaagagcaacctcagagatttgagccctactaagtgactgaccactgtttagagtgtctagtatctgatgttcatttattcccatgttcttgtgtgtcacagttcagccagttttggtttatgcctagagctacttcaaggaactagactaattagctatataggcccagcgatgcttcttattgatcttaatagtatgcccctccttcccctgtcctttcatttctctatccaagtagcagtcaggttcttggtgtgatgggactgaaagaattccagtcagccagagccttggcagctctgaagctaaccttagcatctaagtgtcgatcttgaattccctgaaaaaatttctataggaaatgaagcttccctggtcccctcctttctggccattgtcatccatttcccagttagggcaacaatgaaggaggacccagccaagctagaaggaattttgtggatgggagacagcaggattagcttcagcttgggctggagcagtcaatataggatctcaggccaggcccgcttttctagaatgtgtttaattttgagtttgctttattagatatgttttttaagagctctgtatatttgaactgctccttatgtgacaaaataggtagctcttgggctcatgtcctgggttttggctctttaatgattactccaggccagcatttagtcgtttgagaattgtagcctgttgttttcgctgtgacttgggtctcagtgctagggtattgagtcaggcagctggagggttgtggcccgaggctgcagtcagaggtatacttcccatagtgcttcacacagctcccctgcttctaaaggataaggtactgtagccttggtcctggggaccacctgcctggggcagtggacatcctaactaaacaggcttctggcagtagctttggttcctatcccatcgaaattccccaaagccctgggccactgccattgggttagtcaagatgaaggaggaggactggctgcctccattttgccttgtttgttagtttgcctgggtctgtctgaggaaggagggggtcccgccttccacctcaacacatcccttcagtgactcagagtctcagaaggaaaccctgactcctggggccatttcctaatggtactgtaagccaagcagctttgcttctgcctctgtttccaagcccacccttttcccctgagctcagggttagggatgggcgctttcctctctggttgtgaacgaaaggaaggaacatctttctatggctaacaaaaactaaaggggaagtgaggaaacaggaagaagtatggtgggggctggggtagactcccctggagccaagcctatccagctaacaagagctccctggggctggtcacagctggctcatgatgctgaacttgaaagtttttttgtttttgtttttgttttgtggctcctccaagatataggtacatgaagtttaggttaaaggggtgggattctttatttttatttttgtattgtatgtgtcaagaattactctgttgttcaccttttgctttttgcactgtttgttctcttatctgtattttgagcttagtgctaggactgagaggctgcaccatagggaatgtatgggagatggtgaggggtgccagtgaggggtgcgtggaggagaggcctgggctcctctactggatctacactctgtcccaggtttttagatcccactgagcccagctgactgaaaacaaggacagtcagggtgaaacttcttttgccagaagtgtggcctgagttgaatttctgggaggatgacgcagatgtctgctgcagagctgggctgagagttctgcagtctagctctgacttaggtcaggggcctgttggtctctcattggacgtttttgggtctcactcatgcttactgaaacattgtgccaagaaactctgtgggatttgtgtcccttaaaccagactcacttttctgaaaaatctccattgttgaggagaggctgctcaatcgacaccccgagttctcatgactgggaagatagttttcttcaggtgtcaatggcgttagactcccaggaagactagccctgcccacagggccacctgttggtttgagagcgtgttcgtgttctcttgccctccctgcctaagagctactgggatcacgttagcgggcatttaggctttgatgagagggcacagtttgagttaggtttacctccccctttctgtgcctgggaactgtttggtccagctttagaactgtggttttgacttccttatctcttgggagaagcttctgttttaaggaatttctcttccttcttctcctgcctctagcctctcctggaaaggcctggatatggtttctaaaatctcagctgagaacttcagaaaacagcagcagtattttccttttcctagtgctaaaatccctttccctagaaattggctcaccttgggaaacccagggaaagaatcagcaggttctctgccctccctaggggttggggaaggacccaccccggtcagcacagtgccttttcctctcctgctctgagccagggtggggcattccctctagattcaggtttgggcaggggtcctatagtccctgccatggggctgcttccctgtcccttccctcccctttgctggcctactctggcataattcaagtgtcttcttgccttggggatccttagtggcatcaaatggcaacatggaatattgtcctccatgcccctccagaaggacctaggagagtaggtgagctttccaaagtgagagacgaatctttctttctttttttttttaaagggcaggatgggtatgctttgggctttctcctcctgtggcccc

SEQ ID NO: 455328 - DNA, 1629 bp, Homo sapiens
gtggctgagaagaaggaggcctgagagcgacatgtccccggcggctcaggcggagcggccgtggcgctgtttttctgagtccggggtggcctggcagccggccgaggacgagggtcggcgggggctgcccccgtggtggtggccgccatgctgggagcctgggcggttgagggaaccgctgtggcgctcctgcgactgctgctgctgctgctgccgccggcgatccggggacccgggctcggcgtggccggcgtggccggcgcggcgggggccgggctgcccgagagcgtcatttgggcggtcaacgcgggtggagaggcgcatgtggacgtgcacgggatccacttccgcaaggaccctttggaaggccgggtgggccgagcctcagactatggcatgaaactgccaatcctgcgttccaaccctgaggaccagatcctgtatcaaactgagcggtacaatgaggagacctttggctacgaagtgcccatcaaagaggagggggactacgtgctggtcttgaaatttgcagaggtctactttgcacagtcccagcaaaaggtatttgatgtacgattgaatggccacgtcgtggtgaaggacttggatatctttgatcgtgttgggcatagcacagctcacgatgaaattatacctatgagcatcagaaaggggaagctgagtgtccagggggaggtgtccaccttcacagggaaactctacattgagtttgtcaaggggtactatgacaatcccaaggtctgtgcactctacatcatggctgggacagtggatgatgtaccaaagcttcagcctcatccgggattggagaagaaagaagaggaagaagaagaagaagaatatgatgaagggtctaatctcaaaaaacagaccaataagaaccgggtgcagtcaggcccccgcacacccaacccctatgcctcggacaacagcagcctcatgtttcccatcctggtggccttcggagtcttcattccaaccctcttctgcctctgccggttgtgagaacaaatgactatcctgaacagggtggaggggtgtgggaaagaaaccagccatattggttttggtttctgtatttttcacaatgattaatgaacaaaaacaaagagaaaaaaacacacatcaattaaaggagacaaaaagaggcagagcgagtagagagcagccctcattcaccacctggtcccagacgtgcttcagtcctcgtcctctctttgtggctggctcccagccttctctttcctcttgaggatacttagggtaaactggatccttcctgctcaaggatcctcatttgtatacctagtggaaaggactctgaactcagaggagtcactgttcctttttttaggttagaaattaacagcagggaaatgccatcttattacctgagacgaccagcactgggagttaggtacggtctgaagttatgtctagataagacttcagacgtcctgggattgaaagaatgtgtgtgtgtgtgtgtgtgtaacagagagaggtagagagaggaggaagtggaggatgaggaggtagttgctctgttgtggaactcgaagacaccatcgataagcaagaccccataagagcaaagaccccaaaaga

SEQ ID NO: 455329 - DNA, 4751 bp, Homo sapiens
gtggctgagaagaaggaggcctgagagcgacatgtccccggcggctcaggcggagcggccgtggcgctgtttttctgagtccggggtggcctggcagccggccgaggacgagggtcggcgggggctgcccccgtggtggtggccgccatgctgggagcctgggcggttgagggaaccgctgtggcgctcctgcgactgctgctgctgctgctgccgccggcgatccggggacccgggctcggcgtggccggcgtggccggcgcggcgggggccgggctgcccgagagcgtcatttgggcggtcaacgcgggtggagaggcgcatgtggacgtgcacgggatccacttccgcaaggaccctttggaaggccgggtgggccgagcctcagactatggcatgaaactgccaatcctgcgttccaaccctgaggaccagatcctgtatcaaactgagcggtacaatgaggagacctttggctacgaagtgcccatcaaagaggagggggactacgtgctggtcttgaaatttgcagaggtctactttgcacagtcccagcaaaagatgtaccaaagcttcagcctcatccgggattggagaagaaagaagaggaagaagaagaagaagaatatgatgaagggtctaatctcaaaaaacagaccaataagaaccgggtgcagtcaggcccccgcacacccaacccctatgcctcggacaacagcagcctcatgtttcccatcctggtggccttcggagtcttcattccaaccctcttctgcctctgccggttgtgagaacaaatgactatcctgaacagggtggaggggtgtgggaaagaaaccagccatattggttttggtttctgtatttttcacaatgattaatgaacaaaaacaaagagaaaaaaacacacatcaattaaaggagacaaaaagaggcagagcgagtagagagcagccctcattcaccacctggtcccagacgtgcttcagtcctcgtcctctctttgtggctggctcccagccttctctttcctcttgaggatacttagggtaaactggatccttcctgctcaaggatcctcatttgtatacctagtggaaaggactctgaactcagaggagtcactgttcctttttttaggttagaaattaacagcagggaaatgccatcttattacctgagacgaccagcactgggagttaggtacggtctgaagttatgtctagataagacttcagacgtcctgggattgaaagaatgtgtgtgaaggggtagaatttgtgcggtaaagacttaaaaaaaaaagtagggagattaaaaaaaaagaaagaaaatgcttccttatctggaagcctttctggattaatccagtgatggtcccacctttagtgtttgagctttgtcattgcttgtctccctggcatgtgccagttatagactgtccagcatccaagacgtttcggttatgtcgggtcctcagatcgcctctgacttgttaccacaacaaatcattttgatttcagtgcctgttggggacttgatttcttctcagttttgtttgtttgtttgtttccttaatctggctcatttgaaatttcttctccctctcaaccatcccactaagttatagccaagaagggaaggagacacggggatttggggttctctgcttgaatgtcttctcctttaccacctcaccttgttggtacctccctccctggatctctgagccagcagccaggaggacctgacccagcagttctttactggcccctttgtagggccttgctgccagggggcagggatgctttccagcctgcagcaacagaacacttgaccttaaaagtctcttctggtctttggattagaaaaggcttatgttagcatagcttaagagcaacctcagagatttgagccctactaagtgactgaccactgtttagagtgtctagtatctgatgttcatttattcccatgttcttgtgtgtcacagttcagccagttttggtttatgcctagagctacttcaaggaactagactaattagctatataggcccagcgatgcttcttattgatcttaatagtatgcccctccttcccctgtcctttcatttctctatccaagtagcagtcaggttcttggtgtgatgggactgaaagaattccagtcagccagagccttggcagctctgaagctaaccttagcatctaagtgtcgatcttgaattccctgaaaaaatttctataggaaatgaagcttccctggtcccctcctttctggccattgtcatccatttcccagttagggcaacaatgaaggaggacccagccaagctagaaggaattttgtggatgggagacagcaggattagcttcagcttgggctggagcagtcaatataggatctcaggccaggcccgcttttctagaatgtgtttaattttgagtttgctttattagatatgttttttaagagctctgtatatttgaactgctccttatgtgacaaaataggtagctcttgggctcatgtcctgggttttggctctttaatgattactccaggccagcatttagtcgtttgagaattgtagcctgttgttttcgctgtgacttgggtctcagtgctagggtattgagtcaggcagctggagggttgtggcccgaggctgcagtcagaggtatacttcccatagtgcttcacacagctcccctgcttctaaaggataaggtactgtagccttggtcctggggaccacctgcctggggcagtggacatcctaactaaacaggcttctggcagtagctttggttcctatcccatcgaaattccccaaagccctgggccactgccattgggttagtcaagatgaaggaggaggactggctgcctccattttgccttgtttgttagtttgcctgggtctgtctgaggaaggagggggtcccgccttccacctcaacacatcccttcagtgactcagagtctcagaaggaaaccctgactcctggggccatttcctaatggtactgtaagccaagcagctttgcttctgcctctgtttccaagcccacccttttcccctgagctcagggttagggatgggcgctttcctctctggttgtgaacgaaaggaaggaacatctttctatggctaacaaaaactaaaggggaagtgaggaaacaggaagaagtatggtgggggctggggtagactcccctggagccaagcctatccagctaacaagagctccctggggctggtcacagctggctcatgatgctgaacttgaaagtttttttgtttttgtttttgttttgtggctcctccaagatataggtacatgaagtttaggttaaaggggtgggattctttatttttatttttgtattgtatgtgtcaagaattactctgttgttcaccttttgctttttgcactgtttgttctcttatctgtattttgagcttagtgctaggactgagaggctgcaccatagggaatgtatgggagatggtgaggggtgccagtgaggggtgcgtggaggagaggcctgggctcctctactggatctacactctgtcccaggtttttagatcccactgagcccagctgactgaaaacaaggacagtcagggtgaaacttcttttgccagaagtgtggcctgagttgaatttctgggaggatgacgcagatgtctgctgcagagctgggctgagagttctgcagtctagctctgacttaggtcaggggcctgttggtctctcattggacgtttttgggtctcactcatgcttactgaaacattgtgccaagaaactctgtgggatttgtgtcccttaaaccagactcacttttctgaaaaatctccattgttgaggagaggctgctcaatcgacaccccgagttctcatgactgggaagatagttttcttcaggtgtcaatggcgttagactcccaggaagactagccctgcccacagggccacctgttggtttgagagcgtgttcgtgttctcttgccctccctgcctaagagctactgggatcacgttagcgggcatttaggctttgatgagagggcacagtttgagttaggtttacctccccctttctgtgcctgggaactgtttggtccagctttagaactgtggttttgacttccttatctcttgggagaagcttctgttttaaggaatttctcttccttcttctcctgcctctagcctctcctggaaaggcctggatatggtttctaaaatctcagctgagaacttcagaaaacagcagcagtattttccttttcctagtgctaaaatccctttccctagaaattggctcaccttgggaaacccagggaaagaatcagcaggttctctgccctccctaggggttggggaaggacccaccccggtcagcacagtgccttttcctctcctgctctgagccagggtggggcattccctctagattcaggtttgggcaggggtcctatagtccctgccatggggctgcttccctgtcccttccctcccctttgctggcctactctggcataattcaagtgtcttcttgccttggggatccttagtggcatcaaatggcaacatggaatattgtcctccatgcccctccagaaggacctaggagagtaggtgagctttccaaagtgagagacgaatctttctttctttttttttttaaagggcaggatgggtatgctttgggctttctcctcctgtggcccc

SEQ ID NO: 455330 - DNA, 1178 bp, Homo sapiens
  misc_feature (1157)..(1157): n is a, c, g, or t
  misc_feature (1161)..(1161): n is a, c, g, or t
  misc_feature (1170)..(1171): n is a, c, g, or t
gtggctgagaagaaggaggcctgagagcgacatgtccccggcggctcaggcggagcggccgtggcgctgtttttctgagtccggggtggcctggcagccggccgaggacgagggtcggcgggggctgcccccgtggtggtggccgccatgctgggagcctgggcggttgagggaaccgctgtggcgctcctgcgactgctgctgctgctgctgccgccggcgatccggggacccgggctcggcgtggccggcgtggccggcgcggcgggggccgggctgcccgagagcgtcatttgggcggtcaacgcgggtggagaggcgcatgtggacgtgcacgggatccacttccgcaaggaccctttggaaggccgggtgggccgagcctcagactatggcatgaaactgccaatcctgcgttccaaccctgaggaccagatcctgtatcaaactgagcggtacaatgaggagacctttggctacgaagtgcccatcaaagaggagggggactacgtgctggtcttgaaatttgcagaggtctactttgcacagtcccagcaaaaggtatttgatgtacgattgaatggccacgtcgtggtgaaggacttggatatctttgatcgtgttgggcatagcacagctcacgatgaaattatacctatgagcatcagaaaggggaagctgagtgtccagggggaggtgtccaccttcacagggaaactctacattgagtttgtcaaggggtactatgacaatcccaaggtctgtgcactctacatcatggctgggacagtggatgatgtaccaaagcttcagcctcatccgggattggagaagaaagaagaggaagaagaagaagaagaatatgatgaagggtctaatctcaaaaaacagaccaataagaaccgggtgcagtcaggcccccgcacacccaacccctatgcctcggacaacagcagcctcatgtttcccatcctggtggccttcggagtcttcattccaaccctcttctgcctctgccggttgtgagaacaaatgactatcctgaacagggtggaggggtgtgggaaagaaaccagccatattggttttggttagttttttccatgattatgacaggcggtggggaaacaactcataagaaaataggccgttctacnagancaaaaaaanncctcggg

SEQ ID NO: 455331 - DNA, 1468 bp, Homo sapiens
tcttatgaagtatgatggatgtttttcctaggcaagtattggaagtcagtaaggatggtggctgtgccaaggggctgtgctctggctggtgctcagttgcaagaggagacagagaccgtttctgccctggcctccctaacagtggatgtggaacagccctttgctcaggaagacagcagaactgctggtgagcctatggaagaggagccagccttgtgaagtgccaagtccccctctgatatttcctgtgtgtgacatcattgtgtatccccccaccccagtaccctcagacatgtcttgtctgctgcctgggtggcacagattcaatggaacataaacactgggcacaaaattctgaacagcagcttcacttgttctttggatggacttgaaagggcattaaagattccttaaacgtaaccgctgtgattctagagttacagtaaaccacgattggaagaaactgcttccagcatgcttttaatatgctgggtgacccactcctagacaccaagtttgaactagaaacattcagtacagcactagatattgttaatttcagaagctatgacagccagtgaaattttgggcaaaacctgagacatagtcattcctgacattctgatcagctttttttggggtaatttgtttttcaaacagtcttaacttgtttacaagatttgcttttagctatgaacggatcgtaattccacccagaatgtaatgtttcttgtttgtttgttttgttttgttagggtttttttctcaactttaacacacagttcaactgttcctagtaaaagttcaagatggaggaactagcatgaggcttttttcagtatctcgaagtccaaatgccaaaggaacctcacacactgtttgtaatggtgcaatattttatatcacttttttttaaacatccccaacatctttgtgttctcacacacaggcaatttgcaatgttgcaattgtgttggagaatgaagtccccccacctcccagccacacacacatcctttgttctcatgacagtaggtctgagcaaatgttccaccaagcattttcagtgtctttgaaaagcacgtaacttttcaaaggtggtcttaatttgctgcatatctatcaaggacttattcactcacctttccttttctgccctctatcaattgatttcttcttacctttcatcattcattccttcctttagaaaaactgaagattacccataatctcctcttattacttgagggccttgactatttagtttattttgtttactttacaggttaacacagttgttttgtctgattgcattttattaactgtgaagccgttgaaatgaatatcacttaagcaacgttgctaaatttctatgtgtttgaaatgtgttaatgaaggcactgcttatttgtagtcaccttgaactgacttaacctagaagctgtgccttcttgtgaaaaaaaaaaaa

SEQ ID NO: 455332 - DNA, 781 bp, Homo sapiens
tgttgggaattattatggttacaggatgcagacatcagaacgtgaggggagtgggccggagctgagccccagcgtgatgcccgaggctcccctggagtctccaccttttcctaccaagtccccagcgtttgaccttttcaacttggttctctcctacaagaggctggagatctacctggaacccttgaaggatgcaggtgatggtgttcgatacttgctcaggtacagactttgtggagttgctctggtctgctctgccttctgccgtcctgctctgtagtaactaacactgaccatttaggcagtggctgggctgtcctttctgccctagtgaggagcagttctgggaggtctgttcggcctctgggtttatctaggcctaccctgtgtctcaggcccagcccaggagaggcagatactgggaatgatcctgcctttcagcaaggttcttctttgtgactgaataagctccttcctctggactgctggacaaccttgaacatcacgccttctacagcttagagcaggcttaattttttcctttgcccccaatattagcataattaatattaaaaaattagggtataattttgaacaaaaattaaagaaatacaaaaacctgtgaataagcagataccattttcactacttttttttttttgagacagaatcttgctgtattgtccaggctggaatgcagtcgtgtgaacatggctcactgtagcctcagcctcttcagctcaagcgatcctcctacctcagccaccatgcctggctaatt

SEQ ID NO: 455333 - DNA, 651 bp, Homo sapiens
tcgacccacgcgtccgcggacgcgtgggtcgcggacgcgtgggctcgaagacagtctcagttatgggataaggccccctgggggtctccatttctttccaacagtttcatgttcactactggactcttacgggctcagtatctctcccttagccatgagctggctcaggcatcccttcccttccctggagctgccctgcctttctcaagtatttatttatttattgcatggttcctgggaacatgtggcacaagtaatgggatgaggaggaattgggggtgggggtcttctacctaggactcttccctggagtcatgggctgcctgggacccaggacccatgagggggctgagaggtttctacactcgaggagcaggggtccagagaggcaggctggggaggcaagggacccatcctaggcccgctttcttgccgagccaagcagcttagctggggctgtgcagccaggggcttacccaggccagtggaggtgccacagccctggggagccagacaggctttggtatcgtatcgcctctgtgtccttttaagagaggagagttcagtaccccgtgctttctttacactggagaggaactaaaaggatctctgtgtctatggagaattgtcaataaaaaggcctcaagcttc

SEQ ID NO: 455334 - DNA, 2939 bp, Homo sapiens
agagcgattcgcgtcccggaagcggcggtggcggccgcggcgtaggcggaggagattttcggacctgcgacttccgaacaaccctggcaggaggagcggcgttcagccgggggaggcctgaagaaacgctccggggcccagtggctctacccctgctcctgcccgaccctgccgcctccctcacggagccagcggccgggatgcagacatcagaacgtgaggggagtgggccggagctgagccccagcgtgatgcccgaggctcccctggagtctccaccttttcctaccaagtccccagcgtttgaccttttcaacttggttctctcctacaagaggctggagatctacctggaacccttgaaggatgcaggtgatggtgttcgatacttgctcaggtgcatggtactcagtaggtgccctgatgatttcagtgcccgccctgctgggctaccttcaggaggtttgccgggcacggctgcctgattccgagctgatgcggaggaagtatcatagcgtgaggcaggaggacctgcagagaggtcgcctgtctcgtcccgaggccgtggctgaggtgaagagcttcttgatccagctggaggccttcctgagccgcctgtgctgcacatgtgaagccgcctaccgcgtgctgcactgggagaaccccgtcgtgtcctcacagttctatggggctcttctgggcacagtctgcatgctgtatttgctgccactctgctgggttctcacccttttaaacagcacgctctttctggggaatgtggagttcttccgagttgtgtctgagtacagggcatctctgcagcagaggatgaacccaaagcaggaagagcatgcctttgagagtcctccaccaccagatgttggggggaaggatggtctgatggacagcacgcctgccctcacacccacggaggacctcacaccgggcagcgtggaggaggctgaggaggctgagccagatgaagagtttaaagatgcgattgaggaggatgatgagggcgccccgtgcccagcagaggatgagctggccctgcaggacaacgggttcctgagcaagaatgaggtgctgcgcagcaaggtgtctcggctcacggagcggctccgcaagcgctaccccaccaacaacttcgggaactgcacgggctgctcggccaccttctcagtgctgaagaagaggcggagctgcagtaattgtggaaacagcttctgctctcgatgctgctccttcaaggtgcccaagtcctccatgggggccacagcccctgaagcccagagggagactgtgtttgtgtgtgcctcgtgtaaccagaccttgagcaagtgagaagagaggccagggtccaaccaggcacccgtccttgggaccagcagtagaccccccactctccccacccctggcccactgtggtgtgtgctgggcaaatgtggcctgaatgctaggtaggcttccccttccttcctcactctctccagctggattctggagctgttctccatccatgagagtggctggcaatggctgctctcaatcccttgagggagaagagcccctggagggcctggcatgtttgccctgctctgcctgggactgagcgagtggacttagggctgggcaggcagtagccaccagagggcagcagcgaactaggccaggcctgactggggtctgaagatcagggtcagtgtggctatgcctgggaattccagacctgaggttgggaaaagaggtttttctcctgcagggtactgggccaggccctcagcctcagagagcctgcagaagggcttgggagtgccacaccccatctctgctgattgaatgtccctccaggcaccaggatctcatcatttccccatcagagggtgtggccaggcctaacaagaccatgggtgcttctagaaacagggttgaagttcccagattccctgagaggagaatgtgtataggagggtttggctgagtccttcagcgttaagtggaggaaagcttggggaagccccaatagctggacagacctcggcctcccctcgaagacacctcaattcacagactctcagcccacacaatgccccagtgtccccagctccgctggagcagctgcagggcacttggatcacaacttctgcaccctctgtccagagtctagggcagtcctccactggcccagcactccagtttcctttccctgcctcttgtccaatggagtgggaggccaggtgagtggagcagaggtcctgaagcccttgacccctgggggcctgggtagtgtaggatctcgctgggctgggtcctggattccagggctattccctggaggacagtctcagttatgggataaggccccctgggggtctccatttctttccaacagtttcatgttcactactggactcttacgggctcagtatctctcccttagccatgagctggctcaggcatcccttcccttccctggagctgccctgcctttctcaagtatttatttatttattgcatggttcctgggaacatgtggcacaagtaatgggatgaggaggaattgggggtgggggtcttctacctaggactcttccctggagtcatgggctgcctgggacccaggacccatgagggggctgagaggtttctacactcgaggagcaggggtccagagaggcaggctggggaggcaagggacccatcctaggcccgctttcttgccgagccaagcagcttagctggggctgtgcagccaggggcttacccaggccagtggaggtgccacagccctggggagccagacaggctttggtatcgtatcgcctctgtgtccttttaagagaggagagttcagtaccccgtgctttctttacactggagaggaactaaaaggatctctgtgtctatggagaattgtcaataaaaaggcctcaagcttc

SEQ ID NO: 455335 - DNA, 2199 bp, Homo sapiens
gttagatctagaggatcccgagctctctctgttggggaatgtgatcttccgagttgtgtctgagtacagggcatctctgcagcagaggatgaacccaaagcaggaagagcatgcctttgagagtcctccaccaccagatgttggggggaaggatggtctgatggacagcacgcctgccctcacacccacggaggacctcacaccgggcagcgtggaggaggctgaggaggctgagccagatgaagagtttaaagatgcgattgaggaggatgatgagggcgccccgtgcccagcagaggatgagctggccctgcaggacaacgggttcctgagcaagaatgaggtgctgcgcagcaaggtgtctcggctcacggagcggctccgcaagcgctaccccaccaacaacttcgggaactgcacgggctgctcggccaccttctcagtgctgaagaagaggcggagctgcagtaattgtggaaacagcttctgctctcgatgctgctccttcaaggtgcccaagtcctccatgggggccacagcccctgaagcccagagggagactgtgtttgtgtgtgcctcgtgtaaccagaccttgagcaagtgagaagagaggccagggtccaaccaggcacccgtccttgggaccagcagtagaccccccactctccccacccctggcccactgtggtgtgtgctgggcaaatgtggcctgaatgctaggtaggcttccccttccttcctcactctctccagctggattctggagctgttctccatccatgagagtggctggcaatggctgctctcaatcccttgagggagaagagcccctggagggcctggcatgtttgccctgctctgcctgggactgagcgagtggacttagggctgggcaggcagtagccaccagagggcagcagcgaactaggccaggcctgactggggtctgaagatcagggtcagtgtggctatgcctgggaattccagacctgaggttgggaaaagaggtttttctcctgcagggtactgggccaggccctcagcctcagagagcctgcagaagggcttgggagtgccacaccccatctctgctgattgaatgtccctccaggcaccaggatctcatcatttccccatcagagggtgtggccaggcctaacaagaccatgggtgcttctagaaacagggttgaagttcccagattccctgagaggagaatgtgtataggagggtttggctgagtccttcagcgttaagtggaggaaagcttggggaagccccaatagctggacagacctcggcctcccctcgaagacacctcaattcacagactctcagcccacacaatgccccagtgtccccagctccgctggagcagctgcagggcacttggatcacaacttctgcaccctctgtccagagtctagggcagtcctccactggcccagcactccagtttcctttccctgcctcttgtccaatggagtgggaggccaggtgagtggagcagaggtcctgaagcccttgacccctgggggcctgggtagtgtaggatctcgctgggctgggtcctggattccagggctattccctggaggacagtctcagttatgggataaggccccctgggggtctccatttctttccaacagtttcatgttcactactggactcttacgggctcagtatctctcccttagccatgagctggctcaggcatcccttcccttccctggagctgccctgcctttctcaagtatttatttatttattgcatggttcctgggaacatgtggcacaagtaatgggatgaggaggaattgggggtgggggtcttctacctaggactcttccctggagtcatgggctgcctgggacccaggacccatgagggggctgagaggtttctacactcgaggagcaggggtccagagaggcaggctggggaggcaagggacccatcctaggcccgctttcttgccgagccaagcagcttagctggggctgtgcagccaggggcttacccaggccagtggaggtgccacagccctggggagccagacaggctttggtatcgtatcgcctctgtgtccttttaagagaggagagttcagtaccccgtgctttctttacactggagaggaactaaaaggatctctgtgtctatggagaattgtcaataaaaaggcctcaagcttc

SEQ ID NO: 455336 - DNA, 2786 bp, Homo sapiens
agagcgattcgcgtcccggaagcggcggtggcggccgcggcgtaggcggaggagattttcggacctgcgacttccgaacaaccctggcaggaggagcggcgttcagccgggggaggcctgaagaaacgctccggggcccagtggctctacccctgctcctgcccgaccctgccgcctccctcacggagccagcggccgggatgcagacatcagaacgtgaggggagtgggccggagctgagccccagcgtgatgcccgaggctcccctggagtctccaccttttcctaccaagtccccagcgtttgaccttttcaacttggttctctcctacaagaggctggagatctacctggaacccttgaaggatgcaggtgatggtgttcgatacttgctcaggtggcagatgcctttgtgttccttgctgacctgcctgggcctcaacgtcttgttcctcactttgaatgagggtgcatggtactcagtaggtgccctgatgatttcagtgcccgccctgctgggctaccttcaggaggtttgccgggcacggctgcctgattccgagctgatgcggaggaagtatcatagcgtgaggcaggaggacctgcagagaggtcgcctgtctcgtcccgaggccgtggctgaggtgaagagcttcttgatccagctggaggccttcctgagccgcctgtgctgcacatgtgaagccgcctaccgcgtgctgcactgggagaaccccgtcgtgtcctcacagttctatggggctcttctgggcacagtctgcatgctgtatttgctgccactctgctgggttctcacccttttaaacagcacgctctttctggggaatgtggagttcttccgagttgtgtctgagtacagggcatctctgcagcagaggatgaacccaaagcaggaagagcatgcctttgagagtcctccaccaccagatgttggggggaaggatggtctgatggacagcacgcctgccctcacacccacggaggacctcacaccgggcagcgtggaggaggctgaggaggctgagccagatgaagagtttaaagatgcgattgaggaggatgatgagggcgccccgtgcccagcagaggatgagctggccctgcaggacaacgggttcctgagcaagaatgaggtgctgcgcagcaaggtgtctcggctcacggagcggctccgcaagcgctaccccaccaacaacttcgggaactgcacgggctgctcggccaccttctcagtgctgaagaagaggcggagctgcagtaattgtggaaacagcttctgctctcgatgctgctccttcaaggtgcccaagtcctccatgggggccacagcccctgaagcccagagggagactgtgtttgtgtgtgcctcgtgtaaccagaccttgagcaagtgagaagagaggccagggtccaaccaggcacccgtccttgggaccagcagtagaccccccactctccccacccctggcccactgtggtgtgtgctgggcaaatgtggcctgaatgctaggtaggcttccccttccttcctcactctctccagctggattctggagctgttctccatccatgagagtggctggcaatggctgctctcaatcccttgagggagaagagcccctggagggcctggcatgtttgccctgctctgcctgggactgagcgagtggacttagggctgggcaggcagtagccaccagagggcagcagcgaactaggccaggcctgactggggtctgaagatcagggtcagtgtggctatgcctgggaattccagacctgaggttgggaaaagaggtttttctcctgcagggtactgggccaggccctcagcctcagagagcctgcagaagggcttgggagtgccacaccccatctctgctgattgaatgtccctccaggcaccaggatctcatcatttccccatcagagggtgtggccaggcctaacaagaccatgggtgcttctagaaacagggttgaagttcccagattccctgagaggagaatgtgtataggagggtttggctgagtccttcagcgttaagtggaggaaagcttggggaagccccaatagctggacagacctcggcctcccctcgaagacacctcaattcacagactctcagcccacacaatgccccagtgtccccagctccgctggagcagctgcagggcacttggatcacaacttctgcaccctctgtccagagtctagggcagtcctccactggcccagcactccagtttcctttccctgcctcttgtccaatggagtgggaggccaggtgagtggagcagaggtcctgaagcccttgacccctgggggcctgggtagtgtaggatctcgctgggctgggtcctggattccagggctattccctggaggacagtctcagttatgggataaggccccctgggggtctccatttctttccaacagtttcatgttcactactggactcttacgggctcagtatctctcccttagccatgagctggctcaggctggggaggcaagggacccatcctaggcccgctttcttgccgagccaagcagcttagctggggctgtgcagccaggggcttacccaggccagtggaggtgccacagccctggggagccagacaggctttggtatcgtatcgcctctgtgtccttttaagagaggagagttcagtaccccgtgctttctttacactggagaggaactaaaaggatctctgtgtctatggagaattgtcaataaaaaggcctcaagcttc

SEQ ID NO: 455337 - DNA, 2765 bp, Homo sapiens
agagcgattcgcgtcccggaagcggcggtggcggccgcggcgtaggcggaggagattttcggacctgcgacttccgaacaaccctggcaggaggagcggcgttcagccgggggaggcctgaagaaacgctccggggcccagtggctctacccctgctcctgcccgaccctgccgcctccctcacggagccagcggccgggatgcagacatcagaacgtgaggggagtgggccggagctgagccccagcgtgatgcccgaggctcccctggagtctccaccttttcctaccaagtccccagcgtttgaccttttcaacttggttctctcctacaagaggctggagatctacctggaacccttgaaggatgcaggtgatggtgttcgatacttgctcaggtggcagatgcctttgtgttccttgctgacctgcctgggcctcaacgtcttgttcctcactttgaatgagggtgcatggtactcagtaggtgccctgatgatttcagtgcccgccctgctgggctaccttcaggaggtttgccgggcacggctgcctgattccgagctgatgcggaggaagtatcatagcgtgaggcaggaggacctgcagagaggtcgcctgtctcgtcccgaggccgtggctgaggtgaagagcttcttgatccagctggaggccttcctgagccgcctgtgctgcacatgtgaagccgcctaccgcgtgctgcactgggagaaccccgtcgtgtcctcacagttctatggggctcttctgggcacagtctgcatgctgtatttgctgccactctgctgggttctcacccttttaaacagcacgctctttctggggaatgtggagttcttccgagttgtgtctgagtacagggcatctctgcagcagaggatgaacccaaagcaggaagagcatgcctttgagagtcctccaccaccagatgttggggggaaggatggtctgatggacagcacgcctgccctcacacccacggaggacctcacaccgggcagcgtggaggaggctgaggaggctgagccagatgaagagtttaaagatgcgattgaggaggatgatgagggcgccccgtgcccagcagaggatgagctggccctgcaggacaacgggttcctgagcaagaatgaggtgctgcgcagcaaggtgtctcggctcacggagcggctccgcaagcgctaccccaccaacaacttcgggaactgcacgggctgctcggccaccttctcagtgctgaagaagaggcggagctgcagtaattgtggaaacagcttctgctctcgatgctgctccttcaaggtgcccaagtcctccatgggggccacagcccctgaagcccagagggagactgtgtttgtgtgtgcctcgtgtaaccagaccttgagcaagtgagaagagaggccagggtccaaccaggcacccgtccttgggaccagcagtagaccccccactctccccacccctggcccactgtggtgtgtgctgggcaaatgtggcctgaatgctaggtaggcttccccttccttcctcactctctccagctggattctggagctgttctccatccatgagagtggctggcaatggctgctctcaatcccttgagggagaagagcccctggagggcctggcatgtttgccctgctctgcctgggactgagcgagtggacttagggctgggcaggcagtagccaccagagggcagcagcgaactaggccaggcctgactggggtctgaagatcagggtcagtgtggctatgcctgggaattccagacctgaggttgggaaaagaggtttttctcctgcagggtactgggccaggccctcagcctcagagagcctgcagaagggcttgggagtgccacaccccatctctgctgattgaatgtccctccaggcaccaggatctcatcatttccccatcagagggtgtggccaggcctaacaagaccatgggtgcttctagaaacagggttgaagttcccagattccctgagaggagaatgtgtataggagggtttggctgagtccttcagcgttaagtggaggaaagcttggggaagccccaatagctggacagacctcggcctcccctcgaagacacctcaattcacagactctcagcccacacaatgccccagtgtccccagctccgctggagcagctgcagggcacttggatcacaacttctgcaccctctgtccagagtctagggcagtcctccactggcccagcactccagtttcctttccctgcctcttgtccaatggagtgggaggccaggtgagtggagcagaggtcctgaagcccttgacccctgggggcctgggtagtgtaggatctcgctgggctgggtcctggattccagggctattccctggaggacagtctcagttatgggataaggccccctgggggtctccatttctttccaacagtttcatgttcactactggactcttacgggctcagtatctctccgctggggaggcaagggacccatcctaggcccgctttcttgccgagccaagcagcttagctggggctgtgcagccaggggcttacccaggccagtggaggtgccacagccctggggagccagacaggctttggtatcgtatcgcctctgtgtccttttaagagaggagagttcagtaccccgtgctttctttacactggagaggaactaaaaggatctctgtgtctatggagaattgtcaataaaaaggcctcaagcttc

SEQ ID NO: 455338 - DNA, 1863 bp, Homo sapiens
agagcgattcgcgtcccggaagcggcggtggcggccgcggcgtaggcggaggagattttcggacctgcgacttccgaacaaccctggcaggaggagcggcgttcagccgggggaggcctgaagaaacgctccggggcccagtggctctacccctgctcctgcccgaccctgccgcctccctcacggagccagcggccgggatgcagacatcagaacgtgaggggagtgggccggagctgagccccagcgtgatgcccgaggctcccctggagtctccaccttttcctaccaagtccccagcgtttgaccttttcaacttggttctctcctacaagaggctggagatctacctggaacccttgaaggatgcaggtgatggtgttcgatacttgctcaggtggcagatgcctttgtgttccttgctgacctgcctgggcctcaacgtcttgttcctcactttgaatgagggtgcatggtactcagtaggtgccctgatgatttcagtgcccgccctgctgggctaccttcaggaggtttgccgggcacggctgcctgattccgagctgatgcggaggaagtatcatagcgtgaggcaggaggacctgcagagaggtcgcctgtctcgtcccgaggccgtggctgaggtgaagagcttcttgatccagctggaggccttcctgagccgcctgtgctgcacatgtgaagccgcctaccgcgtgctgcactgggagaaccccgtcgtgtcctcacagttctatggggctcttctgggcacagtctgcatgctgtatttgctgccactctgctgggttctcacccttttaaacagcacgctctttctggggaatgtggagttcttccgagttgtgtctgagtacagggcatctctgcagcagaggatgaacccaaagcaggaagagcatgcctttgagagtcctccaccaccagatgttggggggaaggatggtctgatggacagcacgcctgccctcacacccacggaggacctcacaccgggcagcgtggaggaggctgaggaggctgagccagatgaagagtttaaagatgcgattgaggaggatgatgagggcgccccgtgcccagcagaggatgagctggccctgcaggacaacgggttcctgagcaagaatgaggtgctgcgcagcaaggtgtctcggctcacggagcggctccgcaagcgctaccccaccaacaacttcgggaactgcacgggctgctcggccaccttctcagtgctgaagaagaggcggagctgcagtaattgtggaaacagcttctgctctcgatgctgctccttcaaggtgcccaagtcctccatgggggccacagcaaaatcctgaaacatttggtacatgccgaagaatagatatgatgtacctgtgaattgtgaagggtaataacaagatgaatacctgtggctgcttcactaaagttgaaaaacaagagccctggcaacacccccgcagctcccagcactgctcctgccttcctggagtcaatcaccagccgcaattttaatctttttcttatttccttggcactttgaacaaaactaaaaattcctttttttccttttataaaatataaaatatttcctatacatattgtaaataaaaaacacagataagcaaaaggaaaaaaaattcctgatttcttcctgagagaacaatcgggcatggaccctgctgctcattagcttgcatgtagaataaaagcacatgcatattcctgaaaaatgtggtcacatttcatgtaccgttttgtagtataatgttaaaccaagtttttttttttttttttttgagacggagtttcactcttgttgcccaggctggagtgcag

SEQ ID NO: 455339 - DNA, 956 bp, Homo sapiens
agagcgattcgcgtcccggaagcggcggtggcggccgcggcgtaggcggaggagattttcggacctgcgacttccgaacaaccctggcaggaggagcggcgttcagccgggggaggcctgaagaaacgctccggggcccagtggctctacccctgctcctgcccgaccctgccgcctccctcacggagccagcggccgggatgcagacatcagaacgtgaggggagtgggccggagctgagccccagcgtgatgcccgaggctcccctggagtctccaccttttcctaccaagtccccagcgtttgaccttttcaacttggttctctcctacaagaggctggagatctacctggaacccttgaaggatgcaggtgatggtgttcgatacttgctcaggtacagactttgtggagttgctctggtctgctctgccttctgccgtcctgctctgtagtaactaacactgaccatttaggcagtggctgggctgtcctttctgccctagtgaggagcagttctgggaggtctgttcggcctctgggtttatctaggcctaccctgtgtctcaggcccagcccaggagaggcagatactgggaatgatcctgcctttcagcaaggttcttctttgtgactgaataagctccttcctctggactgctggacaaccttgaacatcacgccttctacagcttagagcaggcttaattttttcctttgcccccaatattagcataattaatattaaaaaattagggtataattttgaacaaaaattaaagaaatacaaaaacctgtgaataagcagataccattttcactacttttttttttttgagacagaatcttgctgtattgtccaggctggaatgcagtcgtgtgaacatggctcactgtagcctcagcctcttcagctcaagcgatcctcctacctcagccaccatgcctggctaatt

SEQ ID NO: 455340 - DNA, 3010 bp, Homo sapiens
agagcgattcgcgtcccggaagcggcggtggcggccgcggcgtaggcggaggagattttcggacctgcgacttccgaacaaccctggcaggaggagcggcgttcagccgggggaggcctgaagaaacgctccggggcccagtggctctacccctgctcctgcccgaccctgccgcctccctcacggagccagcggccgggatgcagacatcagaacgtgaggggagtgggccggagctgagccccagcgtgatgcccgaggctcccctggagtctccaccttttcctaccaagtccccagcgtttgaccttttcaacttggttctctcctacaagaggctggagatctacctggaacccttgaaggatgcaggtgatggtgttcgatacttgctcaggtggcagatgcctttgtgttccttgctgacctgcctgggcctcaacgtcttgttcctcactttgaatgagggtgcatggtactcagtaggtgccctgatgatttcagtgcccgccctgctgggctaccttcaggaggtttgccgggcacggctgcctgattccgagctgatgcggaggaagtatcatagcgtgaggcaggaggacctgcagagaggtcgcctgtctcgtcccgaggccgtggctgaggtgaagagcttcttgatccagctggaggccttcctgagccgcctgtgctgcacatgtgaagccgcctaccgcgtgctgcactgggagaaccccgtcgtgtcctcacagttctatggggctcttctgggcacagtctgcatgctgtatttgctgccactctgctgggttctcacccttttaaacagcacgctctttctggggaatgtggagttcttccgagttgtgtctgagtacagggcatctctgcagcagaggatgaacccaaagcaggaagagcatgcctttgagagtcctccaccaccagatgttggggggaaggatggtctgatggacagcacgcctgccctcacacccacggaggacctcacaccgggcagcgtggaggaggctgaggaggctgagccagatgaagagtttaaagatgcgattgaggaggatgatgagggcgccccgtgcccagcagaggatgagctggccctgcaggacaacgggttcctgagcaagaatgaggtgctgcgcagcaaggtgtctcggctcacggagcggctccgcaagcgctaccccaccaacaacttcgggaactgcacgggctgctcggccaccttctcagtgctgaagaagaggcggagctgcagtaattgtggaaacagcttctgctctcgatgctgctccttcaaggtgcccaagtcctccatgggggccacagcccctgaagcccagagggagactgtgtttgtgtgtgcctcgtgtaaccagaccttgagcaagtgagaagagaggccagggtccaaccaggcacccgtccttgggaccagcagtagaccccccactctccccacccctggcccactgtggtgtgtgctgggcaaatgtggcctgaatgctaggtaggcttccccttccttcctcactctctccagctggattctggagctgttctccatccatgagagtggctggcaatggctgctctcaatcccttgagggagaagagcccctggagggcctggcatgtttgccctgctctgcctgggactgagcgagtggacttagggctgggcaggcagtagccaccagagggcagcagcgaactaggccaggcctgactggggtctgaagatcagggtcagtgtggctatgcctgggaattccagacctgaggttgggaaaagaggtttttctcctgcagggtactgggccaggccctcagcctcagagagcctgcagaagggcttgggagtgccacaccccatctctgctgattgaatgtccctccaggcaccaggatctcatcatttccccatcagagggtgtggccaggcctaacaagaccatgggtgcttctagaaacagggttgaagttcccagattccctgagaggagaatgtgtataggagggtttggctgagtccttcagcgttaagtggaggaaagcttggggaagccccaatagctggacagacctcggcctcccctcgaagacacctcaattcacagactctcagcccacacaatgccccagtgtccccagctccgctggagcagctgcagggcacttggatcacaacttctgcaccctctgtccagagtctagggcagtcctccactggcccagcactccagtttcctttccctgcctcttgtccaatggagtgggaggccaggtgagtggagcagaggtcctgaagcccttgacccctgggggcctgggtagtgtaggatctcgctgggctgggtcctggattccagggctattccctggaggacagtctcagttatgggataaggccccctgggggtctccatttctttccaacagtttcatgttcactactggactcttacgggctcagtatctctcccttagccatgagctggctcaggcatcccttcccttccctggagctgccctgcctttctcaagtatttatttatttattgcatggttcctgggaacatgtggcacaagtaatgggatgaggaggaattgggggtgggggtcttctacctaggactcttccctggagtcatgggctgcctgggacccaggacccatgagggggctgagaggtttctacactcgaggagcaggggtccagagaggcaggctggggaggcaagggacccatcctaggcccgctttcttgccgagccaagcagcttagctggggctgtgcagccaggggcttacccaggccagtggaggtgccacagccctggggagccagacaggctttggtatcgtatcgcctctgtgtccttttaagagaggagagttcagtaccccgtgctttctttacactggagaggaactaaaaggatctctgtgtctatggagaattgtcaataaaaaggcctcaagcttc

SEQ ID NO: 455341 - DNA, 2825 bp, Homo sapiens
agagcgattcgcgtcccggaagcggcggtggcggccgcggcgtaggcggaggagattttcggacctgcgacttccgaacaaccctggcaggaggagcggcgttcagccgggggaggcctgaagaaacgctccggggcccagtggctctacccctgctcctgcccgaccctgccgcctccctcacggagccagcggccgggtggcagatgcctttgtgttccttgctgacctgcctgggcctcaacgtcttgttcctcactttgaatgagggtgcatggtactcagtaggtgccctgatgatttcagtgcccgccctgctgggctaccttcaggaggtttgccgggcacggctgcctgattccgagctgatgcggaggaagtatcatagcgtgaggcaggaggacctgcagagaggtcgcctgtctcgtcccgaggccgtggctgaggtgaagagcttctctctggtactccgactgtggagctcttctcgtgccgccgtgctgtggctgcatgttgtgacgccgactacccgggtgctggctgggagacccccggcgtgtctcacagttctatggggctcttctgggcacagtctgcatgctgtatttgctgccactctgctgggttctcacccttttaaacagcacgctctttctggggaatgtggagttcttccgagttgtgtctgagtacagggcatctctgcagcagaggatgaacccaaagcaggaagagcatgcctttgagagtcctccaccaccagatgttggggggaaggatggtctgatggacagcacgcctgccctcacacccacggaggacctcacaccgggcagcgtggaggaggctgaggaggctgagccagatgaagagtttaaagatgcgattgaggaggatgatgagggcgccccgtgcccagcagaggatgagctggccctgcaggacaacgggttcctgagcaagaatgaggtgctgcgcagcaaggtgtctcggctcacggagcggctccgcaagcgctaccccaccaacaacttcgggaactgcacgggctgctcggccaccttctcagtgctgaagaagaggcggagctgcagtaattgtggaaacagcttctgctctcgatgctgctccttcaaggtgcccaagtcctccatgggggccacagcccctgaagcccagagggagactgtgtttgtgtgtgcctcgtgtaaccagaccttgagcaagtgagaagagaggccagggtccaaccaggcacccgtccttgggaccagcagtagaccccccactctccccacccctggcccactgtggtgtgtgctgggcaaatgtggcctgaatgctaggtaggcttccccttccttcctcactctctccagctggattctggagctgttctccatccatgagagtggctggcaatggctgctctcaatcccttgagggagaagagcccctggagggcctggcatgtttgccctgctctgcctgggactgagcgagtggacttagggctgggcaggcagtagccaccagagggcagcagcgaactaggccaggcctgactggggtctgaagatcagggtcagtgtggctatgcctgggaattccagacctgaggttgggaaaagaggtttttctcctgcagggtactgggccaggccctcagcctcagagagcctgcagaagggcttgggagtgccacaccccatctctgctgattgaatgtccctccaggcaccaggatctcatcatttccccatcagagggtgtggccaggcctaacaagaccatgggtgcttctagaaacagggttgaagttcccagattccctgagaggagaatgtgtataggagggtttggctgagtccttcagcgttaagtggaggaaagcttggggaagccccaatagctggacagacctcggcctcccctcgaagacacctcaattcacagactctcagcccacacaatgccccagtgtccccagctccgctggagcagctgcagggcacttggatcacaacttctgcaccctctgtccagagtctagggcagtcctccactggcccagcactccagtttcctttccctgcctcttgtccaatggagtgggaggccaggtgagtggagcagaggtcctgaagcccttgacccctgggggcctgggtagtgtaggatctcgctgggctgggtcctggattccagggctattccctggaggacagtctcagttatgggataaggccccctgggggtctccatttctttccaacagtttcatgttcactactggactcttacgggctcagtatctctcccttagccatgagctggctcaggcatcccttcccttccctggagctgccctgcctttctcaagtatttatttatttattgcatggttcctgggaacatgtggcacaagtaatgggatgaggaggaattgggggtgggggtcttctacctaggactcttccctggagtcatgggctgcctgggacccaggacccatgagggggctgagaggtttctacactcgaggagcaggggtccagagaggcaggctggggaggcaagggacccatcctaggcccgctttcttgccgagccaagcagcttagctggggctgtgcagccaggggcttacccaggccagtggaggtgccacagccctggggagccagacaggctttggtatcgtatcgcctctgtgtccttttaagagaggagagttcagtaccccgtgctttctttacactggagaggaactaaaaggatctctgtgtctatggagaattgtcaataaaaaggcctcaagcttc

SEQ ID NO: 455342 - DNA, 1851 bp, Homo sapiens
gagcaggtgagcgtgagagtcctgggatgggcgggggttgagctgctgcctctgtttctcagggaactgcacgggctgctcggccaccttctcagtgctgaagaagaggcggagctgcagtaattgtggaaacagcttctgctctcgatgctgctccttcaaggtgcccaagtcctccatgggggccacagcccctgaagcccagagggagactgtgtttgtgtgtgcctcgtgtaaccagaccttgagcaagtgagaagagaggccagggtccaaccaggcacccgtccttgggaccagcagtagaccccccactctccccacccctggcccactgtggtgtgtgctgggcaaatgtggcctgaatgctaggtaggcttccccttccttcctcactctctccagctggattctggagctgttctccatccatgagagtggctggcaatggctgctctcaatcccttgagggagaagagcccctggagggcctggcatgtttgccctgctctgcctgggactgagcgagtggacttagggctgggcaggcagtagccaccagagggcagcagcgaactaggccaggcctgactggggtctgaagatcagggtcagtgtggctatgcctgggaattccagacctgaggttgggaaaagaggtttttctcctgcagggtactgggccaggccctcagcctcagagagcctgcagaagggcttgggagtgccacaccccatctctgctgattgaatgtccctccaggcaccaggatctcatcatttccccatcagagggtgtggccaggcctaacaagaccatgggtgcttctagaaacagggttgaagttcccagattccctgagaggagaatgtgtataggagggtttggctgagtccttcagcgttaagtggaggaaagcttggggaagccccaatagctggacagacctcggcctcccctcgaagacacctcaattcacagactctcagcccacacaatgccccagtgtccccagctccgctggagcagctgcagggcacttggatcacaacttctgcaccctctgtccagagtctagggcagtcctccactggcccagcactccagtttcctttccctgcctcttgtccaatggagtgggaggccaggtgagtggagcagaggtcctgaagcccttgacccctgggggcctgggtagtgtaggatctcgctgggctgggtcctggattccagggctattccctggaggacagtctcagttatgggataaggccccctgggggtctccatttctttccaacagtttcatgttcactactggactcttacgggctcagtatctctcccttagccatgagctggctcaggcatcccttcccttccctggagctgccctgcctttctcaagtatttatttatttattgcatggttcctgggaacatgtggcacaagtaatgggatgaggaggaattgggggtgggggtcttctacctaggactcttccctggagtcatgggctgcctgggacccaggacccatgagggggctgagaggtttctacactcgaggagcaggggtccagagaggcaggctggggaggcaagggacccatcctaggcccgctttcttgccgagccaagcagcttagctggggctgtgcagccaggggcttacccaggccagtggaggtgccacagccctggggagccagacaggctttggtatcgtatcgcctctgtgtccttttaagagaggagagttcagtaccccgtgctttctttacactggagaggaactaaaaggatctctgtgtctatggagaattgtcaataaaaaggcctcaagcttc

SEQ ID NO: 455343 - DNA, 2233 bp, Homo sapiens
agagcgattcgcgtcccggaagcggcggtggcggccgcggcgtaggcggaggagattttcggacctgcgacttccgaacaaccctggcaggaggagcggcgttcagccgggggaggcctgaagaaacgctccggggcccagtggctctacccctgctcctgcccgaccctgccgcctccctcacggagccagcggccgggatgcagacatcagaacgtgaggggagtgggccggagctgagccccagcgtgatgcccgaggctcccctggagtctccaccttttcctaccaagtccccagcgtttgaccttttcaacttggttctctcctacaagaggctggagatctacctggaacccttgaaggatgcaggtgatggtgttcgatacttgctcaggtggcagatgcctttgtgttccttgctgacctgcctgggcctcaacgtcttgttcctcactttgaatgagggtgcatggtactcagtaggtgccctgatgatttcagtgcccgccctgctgggctaccttcaggaggtttgccgggcacggctgcctgattccgagctgatgcggaggaagtatcatagcgtgaggcaggaggacctgcagagaggtcgcctgtctcgtcccgaggccgtggctgaggtgaagagcttcttgatccagctggaggccttcctgagccgcctgtgctgcacatgtgaagccgcctaccgcgtgctgcactgggagaaccccgtcgtgtcctcacagttctatggggctcttctgggcacagtctgcatgctgtatttgctgccactctgctgggttctcacccttttaaacagcacgctctttctggggaatgtggagttcttccgagttgtgtctgagtacagggcatctctgcagcagaggatgaacccaaagcaggaagagcatgcctttgagagtcctccaccaccagatgttggggggaaggatggtctgatggacagcacgcctgccctcacacccacggaggacctcacaccgggcagcgtggaggaggctgaggaggctgagccagatgaagagtttaaagatgcgattgaggaggatgatgagggcgccccgtgcccagcagaggatgagctggccctgcaggacaacgggttcctgagcaagaatgaggtgctgcgcagcaaggtgtctcggctcacggagcggctccgcaagcgctaccccaccaacaacttcgggaactgcacgggctgctcggccaccttctcagtgctgaagaagaggcggagctgcagtaattgtggaaacagcttctgctctcgatgctgctccttcaaggtgcccaagtcctccatgggggccacagcccctgaagcccagagggagactgtgtttgtgtgtgcctcgtgtaaccagaccttgagcaagtgagaagagaggccagggtccaaccaggcacccgtccttgggaccagcagtagaccccccactctccccacccctggcccactgtggtgtgtgctgggcaaatgtggcctgaatgctaggtaggcttccccttccttcctcactctctccagctggattctggagctgttctccatccatgagagtggctggcaatggctgctctcaatcccttgagggagaagagcccctggagggcctggcatgtttgccctgctctgcctgggactgagcgagtggacttagggctgggcaggcagtagccaccagagggcagcagcgaactaggccaggcctgactggggtctgaagatcagggtcagtgtggctatgcctgggaattccagacctgaggttgggaaaagaggtttttctcctgcagggtactgggccaggccctcagcctcagagagcctgcagaagggcttgggagtgccacaccccatctctgctgattgaatgtccctccaggcaccaggatctcatcatttccccatcagagggtgtggccaggcctaacaagaccatgggtgcttctagaaacagggttgaagttcccagattccctgagaggagaatgtgtataggagggtttggctgagtccttcagcgttaatggaggtgccacagccctggggagccagacaggctttggtatcgtatcgcctctgtgtccttttaagagaggagagttcagtaccccgtgctttctttacactggagaggaactaaaaggatctctgtgtctatggagaattgtcaataaaaaggcctcaagcttc

SEQ ID NO: 455344 - DNA, 1577 bp, Homo sapiens
agagcgattcgcgtcccggaagcggcggtggcggccgcggcgtaggcggaggagattttcggacctgcgacttccgaacaaccctggcaggaggagcggcgttcagccgggggaggcctgaagaaacgctccggggcccagtggctctacccctgctcctgcccgaccctgccgcctccctcacggagccagcggccgggatgcagacatcagaacgtgaggggagtgggccggagctgagccccagcgtgatgcccgaggctcccctggagtctccaccttttcctaccaagtccccagcgtttgaccttttcaacttggttctctcctacaagaggctggagatctacctggaacccttgaaggatgcaggtgatggtgttcgatacttgctcaggtggcagatgcctttgtgttccttgctgacctgcctgggcctcaacgtcttgttcctcactttgaatgagggtgcatggtactcagtaggtgccctgatgatttcagtgcccgccctgctgggctaccttcaggaggtttgccgggcacggctgcctgattccgagctgatgcggaggaagtatcatagcgtgaggcaggaggacctgcagagaggtcgcctgtctcgtcccgaggccgtggctgaggtgaagagcttcttgatccagctggaggccttcctgagccgcctgtgctgcacatgtgaagccgcctaccgcgtgctgcactgggagaaccccgtcgtgtcctcacagttctatggggctcttctgggcacagtctgcatgctgtatttgctgccactctgctgggttctcacccttttaaacagcacgctctttctggggaatgtggagttcttccgagttgtgtctgagtacagggcatctctgcagcagaggatgaacccaaagcaggaagagcatgcctttgagagtcctccaccaccagatgttggggggaaggatggtctgatggacagcacgcctgccctcacacccacggaggacctcacaccgggcagcgtggaggaggctgaggaggctgagccagatgaagagtttaaagatgcgattgaggaggatgatgagggcgccccgtgcccagcagaggatgagctggccctgcaggacaacgggttcctgagcaagaatgaggtgctgcgcagcaaggtgtctcggctcacggagcggctccgcaagcgctaccccaccaacaacttcggtgtgacaggagcaggcagttcttaagggttcagagcagccagattccagcagtgcccggtaacactacacacaagaagtattactctggtccagcaaataatttgtctatttctacaacttctaagtaaaggtacttagctgttcccattttacagatgagtaacctgaggtaaaaagagtgctttgcccagagactttggcctggaaatggtggagctgtgactcaaattcaggttgtctgattcggctcttgtcttctttctacctcttcatcctccctctctgttttccctttgcccttgcgtgtgaagtcccttgttttatgcctgtcccgcttttgtatttgatttttgg

SEQ ID NO: 455345 - DNA, 487 bp, Homo sapiens
agagcgattcgcgtcccggaagcggcggtggcggccgcggcgtaggcggaggagattttcggacctgcgacttccgaacaaccctggcaggaggagcggcgttcagccgggggaggcctgaagaaacgctccggggcccagtggctctacccctgctcctgcccgaccctgccgcctccctcacggagccagcggccgggtaggtgaggtgccgtccccccgcgtcccagtgtctccgcaggctgtgtgtagttgggtgcttgggcgcagcgggggccgccacatgctggccccacgacctcgggcatggccttccctgtccagcctcacgggctccatcaggcccccctggctgcagaggtgttggccaaggccagtgcgggcgtcgatatacctcgccccttcctgggctcatacctggcgccgctctgtgccctttcgccttggctcggcctgcggggatttcggggtcccgttggcccctttg

SEQ ID NO: 455346 - DNA, 4458 bp, Homo sapiens
tgaggcgctttacggcgacggcggctgagtgagaaccttggcggctgtggaggctgccgcggctgcgaaggaggcggcggcggtggcggaggaagaggagtggcggcagcggcggcggggacccgtgcggggatggcggaggtaccgcctgggcctagcagcctcctcccaccaccagcacctccggccccggcggcggtcgagccccgctgtcccttcccggcgggggccgccctcgcctgctgcagcgaggacgaggaggacgacgaagagcacgaaggcggcggcagcaggagcccggcgggcggagagtcggcgacggtggcggccaaggggcatccgtgcctccgctgccctcagccgccgcaggagcagcagcagctcaacggattgattagccccgaactgcggcacctccgggcggccgcctccctcaagagcaaggtcctgagcgtagcagaggtggccgcgaccacagccacccctgacggaggccccagagcgactgcaacaaaaggagccggggtacactcgggcgagaggccccctcactccctctctagtaatgcaagaactgcggtccccagcccggtggaggcagcggcggcgagcgatcccgcggcggcccgcaatggactggccgagggcaccgagcaggaggaggaggaggaagacgagcaggtgcggctgctgtcttcgtccctgaccgccgactgcagcttaagaagcccttcgggcagggaggttgagcctggggaggatcggacgatacgatatgtccgatatgaatccgagctacaaatgcccgatatcatgagactgatcaccaaagatctgtccgaaccctactccatttatacctatagatattttatccacaactggccacagctgtgcttcttggccatggtaggggaggagtgtgtaggtgccatcgtttgcaagttggatatgcacaaaaagatgttccgcagaggttatatagccatgttagccgtggattccaaatacaggagaaatggcattggtactaacttggttaagaaagctatatatgccatggttgagggagactgtgatgaggttgttttggaaaccgaaataacaaataagtccgctttgaaactttatgaaaatcttggttttgttcgagataagaggctgttcagatactatttaaatggagttgatgcactgcgacttaaactgtggctgcgttgagaaactgacatcaaggaacaactatcatccacacagaatcgacctttgcatgcaatgcaatttgtacagaattgctttgcaggtggatttagtaatttccatgcagctcttacctgtcagtgtctcattgagtgtcgcacaatatttgttgcactttggcatggcacatttgttctgaattaaaagattgttttaaacttcaggagttcttttggtaccaacaagatgtgccagttgatagccaagatttatgtgttcatttgcaaagtctgctgacaatgttatttacacagtgatcattttatcacagaaccagtaagtggaacataatttttgttccctaaaaaagccaatgtggattgtaaaagtctttaagtatactaacatttcacacaaaacctgccctagttttctgaagtgggtgagggagacgcttcagttttaggttttattttttcaatattaaattttccattcttgaatattggtacctcagtgattagtgaatgaaaaaaatgtagggtgggtatgtcttacaatgagtaaaggtaacaattaaattttgtctgccagtgcctgtgtagataagtatatttgtcttcatctccagtttttgaatgcatgctatcttttccttttctttaaggcctttgcaagcaaacttttgtttttatttaaattctaaatttgataaattatttcagatttttataatttggatacttttttcaggtgaatgaaagaatggtttactttagaagtccctttttccttacagtaacaagttgaatctacttggaaaattgagaaatggctcaaaagagataagaaaagttgatggagccgggaattgctggggtttagatgcactttttcttttgagagtaagggaagttttggaaaagaatagaaaattagtgtaagttgatatgattttatttaatcaaaattactgctacgctgcgaagaacagcttttacaaagtagctgaatttgtttttcccacttgatttggattcacattgctttcatttcttaaaatgcttcacttcaggttcttggtcttggaaataaatttcaaggtgcattgtatccattttaagctgctttattttattttcacttgtatgagcaaattcttgggggagctttgcttttcttctgccagaaaaacaaaagggggaaatgaaaatcttttttggaatgagttctgtgggttttcttaacagccaccatgtttattagttacattgtgttttggccaatcagtgcaatgtaacaaattttacagttaattgctttcaattgagtcagtaaacctgtgatagataatttatttaactggaaaacctaggtacccataagaaaaaagattcattctctgtgaaaactgtaggaatctgttgttgttttcatttgaatatgctctacttctgctctagtatttggtttggaatatattttgtggctctaattactgtatttttaaaaaccctacctccattaacagttggtaaaggccccttttcaggaaagtttgttgcttttttttttttttaaaggaaagctgctctttgctcagtatagtgttttgaaagtgaacatagtaacaaatactttaaaaataaagatacacaatttatatttgaaaataaaaactttctgctggtgggattatttatagttctttatttttaaagaaaatgttttcctttttatattgctcttgaaagtttaatgagcagaatacaatactggttataataaaaatatggtaaccacacagtactcagcctttcaatatgtttttggtcaaacttcatttaggcactagcatttagaagaataccaatcacagtgatgcttttgttatttaatatgaaggaaatggaactaaaacatttatgtcatcaaattttatttcacttctttatatttgacttgctggttgatacataatggttgatgaacatatatttgcttaaatcactaatagggatggttgtaaagtagatagatcattggttcaaccattttagtgtttttgccagattgtcaatgaaaccatcatactgaccttttcctccaaaattgccaaattgactgaactggttgggtgtttgtaaagatgacgttaactgtgtgactaaaaagtcagatggttgccatattgtttggaatatgttgaatgtcagtgtatgccttatgtctttaattgggtatgcaaaaaaatttttacttaagtagattaaaattttaacctctagcatgaaaacccagcaccaacactgaaagactccattcaggttgaagtagcctcaaacagtaatttactttttgataataggctgttgtttttcttaaataagcttaaaacaattctatctgaaattggtagcatgggttcacttggctacaactgagcaaaatagatgcaactttcttttaatggggtgctgcctctttaggactgactgtactatccactgacactggtttggcagttggtactgctgaacatttttatacatgctaccatgaagctatatatgttagtattgaagaagctaacgggtatactatcatttttgatgtgtgggctgattataatttcctgtatttcctgtacattgggatgaaactactttagcaaagtccacagatcagaaaccagacggtagtttttgaagttgaaaccagcaaaataagaaaaaataaaaaatcgattttaatattttctgcctctttcccaaattacccttcccacttgctcgacaaatctatgtaaagcagtttgttttttcatgttttaactttaccttgccctgtgttatggtactggctgacatgtctaagactggatgtgtatatttattatggtgtctaaaaatcatgaagttcatcacttttcaggagtatagataaaatcaaattggtagtacatcagagttacttttcagtgcaccatgacatcactaaaatgagtgctgtaatgttacagggctttcaggtttgtaaaaacataaccataaattatattgacgtcagatatgagttgagtatctataaaatatcacgtgtatctcaaaatattggactgctgtttgactggatattgctgcataattttcttctattgtcccatatccttttggagagagatttaatgggatttgaaatgtgcaagctgtctaaataagatgcagtcaaataaagtatggttaagttgtgtttgca

SEQ ID NO: 455347 - DNA, 4129 bp, Homo sapiens
agcggggtcggcgacggtggcggagagtcagccgccgcaggagcagcagcagctcaacggattgattagccccgaactgcggcacctccgggcggccgcctccctcaagagcaaggtcctgagcgtagcagaggtggccgcgaccacagccacccctgacggaggccccagagcgactgcaacaaaaggagccggggtacactcgggcgagaggccccctcactccctctctagtaatgcaagaactgcggtccccagcccggtggaggcagcggcggcgagcgatcccgcggcggcccgcaatggactggccgagggcaccgagcaggaggaggaggaggaagacgagcaggtgcggctgctgtcttcgtccctgaccgccgactgcagcttaagaagcccttcgggcagggaggttgagcctggggaggatcggacgatacgatatgtccgatatgaatccgagctacaaatgcccgatatcatgagactgatcaccaaagatctgtccgaaccctactccatttatacctatagatattttatccacaactggccacagctgtgcttcttggccatggtaggggaggagtgtgtaggtgccatcgtttgcaagttggatatgcacaaaaagatgttccgcagaggttatatagccatgttagccgtggattccaaatacaggagaaatggcattggtactaacttggttaagaaagctatatatgccatggttgagggagactgtgatgaggttgttttggaaaccgaaataacaaataagtccgctttgaaactttatgaaaatcttggttttgttcgagataagaggctgttcagatactatttaaatggagttgatgcactgcgacttaaactgtggctgcgttgagaaactgacatcaaggaacaactatcatccacacagaatcgacctttgcatgcaatgcaatttgtacagaattgctttgcaggtggatttagtaatttccatgcagctcttacctgtcagtgtctcattgagtgtcgcacaatatttgttgcactttggcatggcacatttgttctgaattaaaagattgttttaaacttcaggagttcttttggtaccaacaagatgtgccagttgatagccaagatttatgtgttcatttgcaaagtctgctgacaatgttatttacacagtgatcattttatcacagaaccagtaagtggaacataatttttgttccctaaaaaagccaatgtggattgtaaaagtctttaagtatactaacatttcacacaaaacctgccctagttttctgaagtgggtgagggagacgcttcagttttaggttttattttttcaatattaaattttccattcttgaatattggtacctcagtgattagtgaatgaaaaaaatgtagggtgggtatgtcttacaatgagtaaaggtaacaattaaattttgtctgccagtgcctgtgtagataagtatatttgtcttcatctccagtttttgaatgcatgctatcttttccttttctttaaggcctttgcaagcaaacttttgtttttatttaaattctaaatttgataaattatttcagatttttataatttggatacttttttcaggtgaatgaaagaatggtttactttagaagtccctttttccttacagtaacaagttgaatctacttggaaaattgagaaatggctcaaaagagataagaaaagttgatggagccgggaattgctggggtttagatgcactttttcttttgagagtaagggaagttttggaaaagaatagaaaattagtgtaagttgatatgattttatttaatcaaaattactgctacgctgcgaagaacagcttttacaaagtagctgaatttgtttttcccacttgatttggattcacattgctttcatttcttaaaatgcttcacttcaggttcttggtcttggaaataaatttcaaggtgcattgtatccattttaagctgctttattttattttcacttgtatgagcaaattcttgggggagctttgcttttcttctgccagaaaaacaaaagggggaaatgaaaatcttttttggaatgagttctgtgggttttcttaacagccaccatgtttattagttacattgtgttttggccaatcagtgcaatgtaacaaattttacagttaattgctttcaattgagtcagtaaacctgtgatagataatttatttaactggaaaacctaggtacccataagaaaaaagattcattctctgtgaaaactgtaggaatctgttgttgttttcatttgaatatgctctacttctgctctagtatttggtttggaatatattttgtggctctaattactgtatttttaaaaaccctacctccattaacagttggtaaaggccccttttcaggaaagtttgttgcttttttttttttttaaaggaaagctgctctttgctcagtatagtgttttgaaagtgaacatagtaacaaatactttaaaaataaagatacacaatttatatttgaaaataaaaactttctgctggtgggattatttatagttctttatttttaaagaaaatgttttcctttttatattgctcttgaaagtttaatgagcagaatacaatactggttataataaaaatatggtaaccacacagtactcagcctttcaatatgtttttggtcaaacttcatttaggcactagcatttagaagaataccaatcacagtgatgcttttgttatttaatatgaaggaaatggaactaaaacatttatgtcatcaaattttatttcacttctttatatttgacttgctggttgatacataatggttgatgaacatatatttgcttaaatcactaatagggatggttgtaaagtagatagatcattggttcaaccattttagtgtttttgccagattgtcaatgaaaccatcatactgaccttttcctccaaaattgccaaattgactgaactggttgggtgtttgtaaagatgacgttaactgtgtgactaaaaagtcagatggttgccatattgtttggaatatgttgaatgtcagtgtatgccttatgtctttaattgggtatgcaaaaaaatttttacttaagtagattaaaattttaacctctagcatgaaaacccagcaccaacactgaaagactccattcaggttgaagtagcctcaaacagtaatttactttttgataataggctgttgtttttcttaaataagcttaaaacaattctatctgaaattggtagcatgggttcacttggctacaactgagcaaaatagatgcaactttcttttaatggggtgctgcctctttaggactgactgtactatccactgacactggtttggcagttggtactgctgaacatttttatacatgctaccatgaagctatatatgttagtattgaagaagctaacgggtatactatcatttttgatgtgtgggctgattataatttcctgtatttcctgtacattgggatgaaactactttagcaaagtccacagatcagaaaccagacggtagtttttgaagttgaaaccagcaaaataagaaaaaataaaaaatcgattttaatattttctgcctctttcccaaattacccttcccacttgctcgacaaatctatgtaaagcagtttgttttttcatgttttaactttaccttgccctgtgttatggtactggctgacatgtctaagactggatgtgtatatttattatggtgtctaaaaatcatgaagttcatcacttttcaggagtatagataaaatcaaattggtagtacatcagagttacttttcagtgcaccatgacatcactaaaatgagtgctgtaatgttacagggctttcaggtttgtaaaaacataaccataaattatattgacgtcagatatgagttgagtatctataaaatatcacgtgtatctcaaaatattggactgctgtttgactggatattgctgcataattttcttctattgtcccatatccttttggagagagatttaatgggatttgaaatgtgcaagctgtctaaataagatgcagtcaaataaagtatggttaagttgtgtttgca

SEQ ID NO: 455348 - DNA, 2825 bp, Homo sapiens
tgaggcgctttacggcgacggcggctgagtgagaaccttggcggctgtggaggctgccgcggctgcgaaggaggcggcggcggtggcggaggaagaggagtggcggcagcggcggcggggacccgtgcggggatggcggaggtaccgcctgggcctagcagcctcctcccaccaccagcacctccggccccggcggcggtcgagccccgctgtcccttcccggcgggggccgccctcgcctgctgcagcgaggacgaggaggacgacgaagagcacgaaggcggcggcagcaggagcccggcgggcggagagtcggcgacggtggcggccaaggggcatccgtgcctccgctgccctcagccgccgcaggagcagcagcagctcaacggattgattagccccgaactgcggcacctccgggcggccgcctccctcaagagcaaggtcctgagcgtagcagaggtggccgcgaccacagccacccctgacggaggccccagagcgactgcaacaaaaggagccggggtacactcgggcgagaggccccctcactccctctctagtaatgcaagaactgcggtccccagcccggtggaggcagcggcggcgagcgatcccgcggcggcccgcaatggactggccgagggcaccgagcaggaggaggaggaggaagacgagcaggtgcggctgctgtcttcgtccctgaccgccgactgcagcttaagaagcccttcgggcagggaggttgagcctggggaggatcggacgatacgatatgtccgatatgaatccgagctacaaatgcccgatatcatgagactgatcaccaaagatctgtccgaaccctactccatttatacctatagatattttatccacaactggccacagctgtgcttcttggccatggtaggggaggagtgtgtaggtgccatcgtttgcaagttggatatgcacaaaaagatgttccgcagaggttatatagccatgttagccgtggattccaaatacaggagaaatggcattggtactaacttggttaagaaagctatatatgccatggttgagggagactgtgatgaggttgttttggaaaccgaaataacaaataagtccgctttgaaactttatgaaaatcttggttttgttcgagataagaggctgttcagatactatttaaatggagttgatgcactgcgacttaaactgtggctgcgttgagaaactgacatcaaggaacaactatcatccacacagaatcgacctttgcatgcaatgcaatttgtacagaattgctttgcaggtggatttagtaatttccatgcagctcttacctgtcagtgtctcattgagtgtcgcacaatatttgttgcactttggcatggcacatttgttctgaattaaaagattgttttaaacttcaggagttcttttggtaccaacaagatgtgccagttgatagccaagatttatgtgttcatttgcaaagtctgctgacaatgttatttacacagtgatcattttatcacagaaccagtaagtggaacataatttttgttccctaaaaaagccaatgtggattgtaaaagtctttaagtatactaacatttcacacaaaacctgccctagttttctgaagtgggtgagggagacgcttcagttttaggttttattttttcaatattaaattttccattcttgaatattggtacctcagtgattagtgaatgaaaaaaatgtagggtgggtatgtcttacaatgagtaaaggtaacaattaaattttgtctgccagtgcctgtgtagataagtatatttgtcttcatctccagtttttgaatgcatgctatcttttccttttctttaaggcctttgcaagcaaacttttgtttttatttaaattctaaatttgataaattatttcagatttttataatttggatacttttttcaggtgaatgaaagaatggtttactttagaagtccctttttccttacagtaacaagttgaatctacttggaaaattgagaaatggctcaaaagagataagaaaagttgatggagccgggaattgctggggtttagatgcactttttcttttgagagtaagggaagttttggaaaagaatagaaaattagtgtaagttgatatgattttatttaatcaaaattactgctacgctgcgaagaacagcttttacaaagtagctgaatttgtttttcccacttgatttggattcacattgctttcatttcttaaaatgcttcacttcaggttcttggtcttggaaataaatttcaaggtgcattgtatccattttaagctgctttattttattttcacttgtatgagcaaattcttgggggagctttgcttttcttctgccagaaaaacaaaagggggaaatgaaaatcttttttggaatgagttctgtgggttttcttaacagccaccatgtttattagttacattgtgttttggccaatcagtgcaatgtaacaaattttacagttaattgctttcaattgagtcagtaaacctgtgatagataatttatttaactggaaaacctaggtacccataagaaaaaagattcattctctgtgaaaactgtaggaatctgttgttgttttcatttgaatatgctctacttctgctctagtatttggtttggaatatattcaaatgaaaacctaggtacccataagaaaaaagattcattctctgtgaaaactgtaggaatctgttgttgttttcatttgaatatgctctacttctgctctagtaattagagccacaaaatatattccaaaccaaatactag

SEQ ID NO: 455349 - DNA, 673 bp, Homo sapiens
gcgtagcagaggtggccgcgaccacagccacccctgacggaggccccagagcgactgcaacaaaaggagccggggtacactcgggcgagaggccccctcactccctctctagtaatgcaagaactgcggtccccagcccggtggaggcagcggcggcgagcgatcccgcggcggcccgcaatggactggccgagggcaccgagcaggaggaggaggaggaagacgagcaggtgcggctgctgtcttcgtccctgaccgccgactgcagcttaagaagcccttcgggcagggaggttgagcctggggaggatcggacgatacgatatgtccgatatgaatccgagctacaaatgcccgatatcatgagactgatcaccaaagatctgtccgaaccctactccatttatacctatagatattttatccacaactggccacagctgtgcttcttggtaagtggatagaataaaaagagggtgaacccagcagtgatcgagactgtgcggggcagggagtgagggcccagaatgtggcagtggatatctcctgctgcgtatcatagtacgttatatgatgtcaagtgctgtacacattcctagttatttaatgaaattgttttgaaggtaagacttcatgattcgggttaacgtgatactagtgtaactgcagcaag

SEQ ID NO: 455350 - DNA, 4540 bp, Homo sapiens
tgaggcgctttacggcgacggcggctgagtgagaaccttggcggctgtggaggctgccgcggctgcgaaggaggcggcggcggtggcggaggaagaggagtggcggcagcggcggcggggacccgtgcggggatggcggaggtaccgcctgggcctagcagcctcctcccaccaccagcacctccggccccggcggcggtcgagccccgctgtcccttcccggcgggggccgccctcgcctgctgcagcgaggacgaggaggacgacgaagagcacgaaggcggcggcagcaggagcccggcgggcggagagtcggcgacggtggcggccaaggggcatccgtgcctccgctgccctcagccgccgcaggagcagcagcagctcaacggattgattagccccgaactgcggcacctccgggcggccgcctccctcaagagcaaggtcctgagcgtagcagaggtggccgcgaccacagccacccctgacggaggccccagagcgactgcaacaaaaggagccggggtacactcgggcgagaggccccctcactccctctctagtaatgcaagaactgcggtccccagcccggtggaggcagcggcggcgagcgatcccgcggcggcccgcaatggactggccgagggcaccgagcaggaggaggaggaggaagacgagcaggtgcggctgctgtcttcgtccctgaccgccgactgcagcttaagaagcccttcgggcagggaggttgagcctggggaggatcggacgatacgatatgtccgatatgaatccgagctacaaatgcccgatatcatgagactgatcaccaaagatctgtccgaaccctactccatttatacctatagatattttatccacaactggccacagctgtgcttcttggccatggtaggggaggagtgtgtaggtgccatcgtttgcaagttggatatgcacaaaaagatgttccgcagaggttatatagccatgttagccgtggattccaaatacaggagaaatggcattggtactaacttggttaagaaagctatatatgccatggttgagggagactgtgatgaggttgttttggaaaccgaaataacaaataagtccgctttgaaactttatgaaaatcttggttttgttcgagataagaggctgttcagatactatttaaatggagttgatgcactgcgacttaaactgtggctgcgttgagaaactgacatcaaggaacaactatcatccacacagaatcgacctttgcatgcaatgcaatttgtacagaattgctttgcaggtggatttagtaatttccatgcagctcttacctgtcagtgtctcattgagtgtcgcacaatatttgttgcactttggcatggcacatttgttctgaattaaaagattgttttaaacttcaggagttcttttggtaccaacaagatgtgccagttgatagccaagatttatgtgttcatttgcaaagtctgctgacaatgttatttacacagtgatcattttatcacagaaccagtaagtggaacataatttttgttccctaaaaaagccaatgtggattgtaaaagtctttaagtatactaacatttcacacaaaacctgccctagttttctgaagtgggtgagggagacgcttcagttttaggttttattttttcaatattaaattttccattcttgaatattggtacctcagtgattagtgaatgaaaaaaatgtagggtgggtatgtcttacaatgagtaaaggtaacaattaaattttgtctgccagtgcctgtgtagataagtatatttgtcttcatctccagtttttgaatgcatgctatcttttccttttctttaaggcctttgcaagcaaacttttgtttttatttaaattctaaatttgataaattatttcagatttttataatttggatacttttttcaggtgaatgaaagaatggtttactttagaagtccctttttccttacagtaacaagttgaatctacttggaaaattgagaaatggctcaaaagagataagaaaagttgatggagccgggaattgctggggtttagatgcactttttcttttgagagtaagggaagttttggaaaagaatagaaaattagtgtaagttgatatgattttatttaatcaaaattactgctacgctgcgaagaacagcttttacaaagtagctgaatttgtttttcccacttgatttggattcacattgctttcatttcttaaaatgcttcacttcaggttcttggtcttggaaataaatttcaaggtgcattgtatccattttaagctgctttattttattttcacttgtatgagcaaattcttgggggagctttgcttttcttctgccagaaaaacaaaagggggaaatgaaaatcttttttggaatgagttctgtgggttttcttaacagccaccatgtttattagttacattgtgttttggccaatcagtgcaatgtaacaaattttacagttaattgctttcaattgagtcagtaaacctgtgatagataatttatttaactggaaaacctaggtacccataagaaaaaagattcattctctgtgaaaactgtaggaatctgttgttgttttcatttgaatatgctctacttctgctctagtatttggtttggaatatattttgtggctctaattactgtatttttaaaaaccctacctccattaacagttggtaaaggccccttttcaggaaagtttgttgcttttttttttttttaaaggaaagctgctctttgctcagtatagtgttttgaaagtgaacatagtaacaaatactttaaaaataaagatacacaatttatatttgaaaataaaaactttctgctggtgggattatttatagttctttatttttaaagaaaatgttttcctttttatattgctcttgaaagtttaatgagcagaatacaatactggttataataaaaatatggtaaccacacagtactcagcctttcaatatgtttttggtcaaacttcatttaggcactagcatttagaagaataccaatcacagtgatgcttttgttatttaatatgaaggaaatggaactaaaacatttatgtcatcaaattttatttcacttctttatatttgacttgctggttgatacataatggttgatgaacatatatttgcttaaatcactaatagggatggttgtaaagtagatagatcattggttcaaccattttagtgtttttgccagattgtcaatgaaaccatcatactgaccttttcctccaaaattgccaaattgactgaactggttgggtgtttgtaaagatgacgttaactgtgtgactaaaaagtcagatggttgccatattgtttggaatatgttgaatgtcagtgtatgccttatgtctttaattgggtatgcaaaaaaatttttacttaagtagattaaaattttaacctctagcatgaaaacccagcaccaacactgaaagactccattcaggttgaagtagcctcaaacagtaatttactttttgataataggctgttgtttttcttaaataagcttaaaacaattctatctgaaattggtagcatgggttcacttggctacaactgagcaaaatagatgcaactttcttttaatggggtgctgcctctttaggactgactgtactatccactgacactggtttggcagttggtactgctgaacatttttatacatgctaccatgaagctatatatgttagtattgaagaagctaacgggtatactatcatttttgatgtgtgggctgattataatttcctgtatttcctgtacattgggatgaaactactttagcaaagtccacagatcagaaaccagacggtagtttttgaagttgaaaccagcaaaataagaaaaaataaaaaatcgattttaatattttctgcctctttcccaaattacccttcccacttgctcgacaaatctatgtaaagcagtttgttttttcatgttttaactttaccttgccctgtgttatggtactggctgacatgtctaagactggatgtgtatatttattatggtgtctaaaaatcatgaagttcatcacttttcaggagtatagataaaatcaaattggtagtacatcagagttacttttcagtgcaccatgacatcactaaaatgagtgctgtaatgttacagggctttcaggtttgtaaaaacataaccataaattatattgacgtcagatatgagttgagtatctataaaatatcacgtgtatctcaaaatattggactgctgtttgactggatattgctgcataattttcttctattgtcccatatccttttggagagagatttaatgggatttgaaatgtgcaagctgtctaaataagatgcagtcaaataaagtatggttaagttgtgtttgcatttttcttttagatacagctgtgtgcattttatgattgggttgttttgcttttacctactaagtaaaacagcaacaaacaat

SEQ ID NO: 455351 - DNA, 1008 bp, Homo sapiens
tgaggcgctttacggcgacggcggctgagtgagaaccttggcggctgtggaggctgccgcggctgcgaaggaggcggcggcggtggcggaggaagaggagtggcggcagcggcggcggggacccgtgcggggatggcggaggtaccgcctgggcctagcagcctcctcccaccaccagcacctccggccccggcggcggtcgagccccgctgtcccttcccggcgggggccgccctcgcctgctgcagcgaggacgaggaggacgacgaagagcacgaaggcggcggcagcaggagcccggcgggcggagagtcggcgacggtggcggccaaggggcatccgtgcctccgctgccctcagccgccgcaggagcagcagcagctcaacggattgattagccccgaactgcggcacctccgggcggccgcctccctcaagagcaaggtcctgagcgtagcagaggtggccgcgaccacagccacccctgacggaggccccagagcgactgcaacaaaaggagccggggtacactcgggcgagaggccccctcactccctctctagtaatgcaagaactgcggtccccagcccggtggaggcagcggcggcgagcgatcccgcggcggcccgcaatggactggccgagggcaccgagcaggaggaggaggaggaagacgagcaggtgcggctgctgtcttcgtccctgaccgccgactgcagcttaagaagcccttcgggcagggaggttgagcctggggaggatcggacgatacgatatgtccgatatgaatccgagctacaaatgcccgatatcatgagactgatcaccaaagatctgtccgaaccctactccatttatacctatagatattttatccacaactggccacagctgtgcttcttggtcatggtaggggaggagtgttttctgtttctcttctctttttttacagcttttatctttacttaatacataatctaggttagtcactttttttcctatctgttc

SEQ ID NO: 455352 - DNA, 6274 bp, Homo sapiens
  misc_feature (3207)..(3207): n is a, c, g, or t
  misc_feature (3299)..(3299): n is a, c, g, or t
  misc_feature (3925)..(3925): n is a, c, g, or t
gcggggggcaatggcactgcagctctgggccctgaccctgctgggcctgctgggcgcaggtgccagcctgaggccccgcaagctggacttcttccgcagcgagaaagagctgaaccacctggctgtggatgaggcctcaggcgtggtgtacctgggggcggtgaatgccctctaccagctggatgcgaagctgcagctggagcagcaggtggccacgggcccggccctggacaacaagaagtgcacgccgcccatcgaggccagccagtgccatgaggctgagatgactgacaatgtcaaccagctgctgctgctcgaccctcccaggaagcgcctggtggagtgcggcagcctcttcaagggcatctgcgctctgcgcgccctgagcaacatctccctccgcctgttctacgaggacggcagcggggagaagtctttcgtggccagcaatgatgagggcgtggccacagtggggctggtgagctccacgggtcctggtggtgaccgcgtgctgtttgtgggcaaaggcaatgggccacacgacaacggcatcatcgtgagcactcggctgttggaccggactgacagcagggaggcctttgaagcctacacggaccacgccacctacaaggccggctacctgtccaccaacacacagcagttcgtggcggccttcgaggacggcccctacgtcttctttgtcttcaaccagcaggacaagcacccggcccggaaccgcacgctgctggcacgcatgtgcagagaagaccccaactactactcctacctggagatggacctgcagtgccgggaccccgacatccacgccgctgcctttggcacctgcctggccgcctccgtggctgcgcctggctctggcagggtgctatatgctgtcttcagcagagacagccggagcagtggggggcccggtgcgggcctctgcctgttcccgctggacaaggtgcacgccaagatggaggccaaccgcaacgcctgttacacaggcacccgggaggcccgtgacatcttctacaagcccttccacggcgatatccagtgcggcggccacgcgccgggctccagcaagagcttcccatgtggctcggagcacctgccctacccgctgggcagccgcgacgggctcagaggcacagccgtgctgcagcgtggaggcctgaacctcacggccgtgacggtcgccgccgagaacaaccacactgttgcttttctgggcacctctgatggccggatcctcaaggtgtacctcaccccagatggcacctcctcagagtacgactctatccttgtggagataaacaagagagtcaagcgcgacctggtactgtctggagacctgggcagcctgtacgccatgacccaggacaaggtgttccggctgccggtgcaggagtgcctgagctacccgacctgcacccagtgccgcgactcccaggacccctactgcggctggtgcgtcgtcgagggacgatgcacccggaaggccgagtgtccgcgggccgaggaggccagccactggctgtggagccgaagcaagtcctgcgtggccgtcaccagcgcccagccacagaacatgagccggcgggcccagggggaggtgcagctgaccgtcagccccctccctgccctgagcgaggaggacgagttgctgtgcctttttggggagtcgccgccacaccccgcccgcgtggagggcgaggccgtcatctgcaactccccaagcagcatccccgtcacaccgccaggccaggaccacgtggccgtgaccatccagctcctccttagacgaggcaacatcttcctcacgtcctaccagtaccccttctacgactgccgccaggccatgagcctggaggagaacctgccgtgcatctcctgcgtgagcaaccgctggacctgccagtgggacctgcgctaccacgagtgccgggaggcttcgcccaaccctgaggacggcatcgtccgtgcccacatggaggacagctgtccccagttcctgggacccagccccctggtgatccccatgaaccacgagacagatgtgaacttccagggcaagaacctggacaccgtgaagggttcctccctgcacgtgggcagtgacttgctcaagttcatggagccggtgaccatgcaggaatctgggaccttcgcctttcggaccccaaagctgtcccacgatgccaacgagacgctgcccctgcacctctacgtcaagtcttacggcaagaatatcgacagcaagctccatgtgaccctctacaactgctcctttggccgcagcgactgcagcctgtgccgggccgctaaccccgactacaggtgtgcgtggtgcgggggccagagcaggtgcgtgtatgaggccctgtgcaacaccacctccgagtgcccgccgcccgtcatcaccaggatccagcctgagacgggccccctgggtgggggcatccgcatcaccatcctggggtccaatttgggcgtccaagcaggggacatccagaggatctctgtggccggccggaactgctcctttcagccggaacgttactccgtgtccacccggatcgtgtgtgtgatcgaggctgcggagacgcctttcacggggggtgtcgaggtggacgtcttcgggaaactgggccgttcgcctcccaatgtccagttcaccttccaacagcccaagcctctcagtgtggagccgcagcagggaccgcaggcgggcggcaccacactgaccatccacggcacccacctggacacgggctcccaggaggacgtgcgggtgaccctcaacggcgtcccgtgtaaagtgacgaagtttggggcgcagctccagtgtgtcactggcccccaggcgacacggggccagatgcttctggaggtctcctacggggggtcccccgtgcccaaccccggcatcttcttcacctaccgcgaaaaccccgtactgcgagccttcgagccgctacgaagctttgccagtggtggccgcagcatcaacgtcacgggtcagggcttcagcctgatccagaggtttgccatggtggtcatcgcggagcccctgcagtcctggcagccgccgcgggaggctgaatccctgcagcccatgacggtggtgggtacagactacgtgttccacaatgacaccaaggtcgtcttcctgtccccggctgtgcctgaggagccagaggnctacaacctcacggtgctgatcgagatggacgggcaccgtgccctgctcagaacagaggccggggccttcgagtacgtgcctgaccccaccnttgagaacttcacaggtggcgtcaagaagcaggtcaacaagctcatccacgcccggggcaccaatctgaacaaggcgatgacgctgcaggaggccgaggccttcgtgggtgccgagcgctgcaccatgaagacgctgacggagaccgacctgtactgtgagcccccggaggtgcagcccccgcccaagcggcggcagaaacgagacaccacacacaacctgcccgagttcattgtgaagttcggctctcgcgagtgggtgctgggccgcgtggagtacgacacacgggtgagcgacgtgccgctcagcctcatcttgccgctggtcatcgtgcccatggtggtcgtcatcgcggtgtctgtctactgctactggaggaagagccagcaggccgaacgagagtatgagaagatcaagtcccagctggagggcctggaggagagcgtgcgggaccgctgcaagaaggaattcacagacctgatgatcgagatggaggaccagaccaacgacgtgcacgaggccggcatccccgtgctggactacaagacctacaccgaccgcgtcttcttcctgccctccaaggacggcgacaaggacgtgatgatcaccggcaagctggacatcccngagccgcggcggccggtggtggagcaggccctctaccagttctccaacctgctgaacagcaagtctttcctcatcaatttcatccacaccctggagaaccagcgggagttctcggcccgcgccaaggtctacttcgcgtccctgctgacggtggcgctgcacgggaaactggagtactacacggacatcatgcacacgctcttcctggagctcctggagcagtacgtggtggccaagaaccccaagctgatgctgcgcaggtctgagactgtggtggagaggatgctgtccaactggatgtccatctgcctgtaccagtacctcaaggacagtgccggggagcccctgtacaagctcttcaaggccatcaaacatcaggtggaaaagggcccggtggatgcggtacagaagaaggccaagtacactctcaacgacacggggctgctgggggatgatgtggagtacgcacccctgacggtgagcgtgatcgtgcaggacgagggagtggacgccatcccggtgaaggtcctcaactgtgacaccatctcccaggtcaaggagaagatcattgaccaggtgtaccgtgggcagccctgctcctgctggcccaggccagacagcgtggtcctggagtggcgtccgggctccacagcgcagatcctgtcggacctggacctgacgtcacagcgggagggccggtggaagcgcgtcaacacccttatgcactacaatgtccgggatggagccaccctcatcctgtccaaggtgggggtctcccagcagccggaggacagccagcaggacctgcctggggagcgccatgccctcctggaggaggagaaccgggtgtggcacctggtgcggccgaccgacgaggtggacgagggcaagtccaagagaggcagcgtgaaagagaaggagcggacgaaggccatcaccgagatctacctgacgcggctgctctcagtcaagggcacactgcagcagtttgtggacaacttcttccagagcgtgctggcgcctgggcacgcggtgccacctgcagtcaagtacttcttcgacttcctggacgagcaggcagagaagcacaacatccaggatgaagacaccatccacatctggaagacgaacagtttaccgctccggttctgggtgaacatcctcaagaacccccacttcatctttgacgtgcatgtccacgaggtggtggacgcctcgctgtcagtcatcgcgcagaccttcatggatgcctgcacgcgcacggagcataagctgagccgcgattctcccagcaacaagctgctgtacgccaaggagatctccacctacaagaagatggtggaggattactacaaggggatccggcagatggtgcaggtcagcgaccaggacatgaacacacacctggcagagatttcccgggcgcacacggactccttgaacaccctcgtggcactccaccagctctaccaatacacgcagaagtactatgacgagatcatcaatgccttggaggaggatcctgccgcccagaagatgcagctggccttccgcctgcagcagattgccgctgcactggagaacaaggtcactgacctctgacctacaatctccagtgctgccttgggacataggtacctgaggtacctgagagcccctcaggggaggaggccgagtggctgtggctgaggcccccaccctcccctggaacgcgccccaagccggagtgggtgcagccggaacccgcccagcgtctagactgtagcatcttcctctgagcaataccgccgggcaccgcaccagcaccagccccagccccagctccctccggccgcagaaccagcatcgggtgttcactgtcgagtctcgagtgatttgaaaatgtgccttacgctgccacgctgggggcagctggcctccgcctccgcccacgcaccagcagccgcctccatgccctaggttgggcccctgggggatctgagggcctgtggcccccagggcaagttcccagatcctatgtctgtctgtccaccacgagatgggaggaggagaaaaagcggtacgatgccttcctgacctcaccggcctccccaagggtgccggcactctgggtggactcacggctgctgggccccacgtcaaaggtcaagtgagacgtaggtcaagtcctacgtcggggcccagacatcctggggtcctggtctgtcagacaggctgccctagagccccacccagtccggggggactgggagcagttccaagaccaccccacccctttttgtaaatcttgttcattgtaaatcaaatacagcgtctttttcactccgcgggttggctgagtgttcctcc

SEQ ID NO: 455353 - DNA, 4000 bp, Homo sapiens
  misc_feature (3207)..(3207): n is a, c, g, or t
  misc_feature (3299)..(3299): n is a, c, g, or t
gcggggggcaatggcactgcagctctgggccctgaccctgctgggcctgctgggcgcaggtgccagcctgaggccccgcaagctggacttcttccgcagcgagaaagagctgaaccacctggctgtggatgaggcctcaggcgtggtgtacctgggggcggtgaatgccctctaccagctggatgcgaagctgcagctggagcagcaggtggccacgggcccggccctggacaacaagaagtgcacgccgcccatcgaggccagccagtgccatgaggctgagatgactgacaatgtcaaccagctgctgctgctcgaccctcccaggaagcgcctggtggagtgcggcagcctcttcaagggcatctgcgctctgcgcgccctgagcaacatctccctccgcctgttctacgaggacggcagcggggagaagtctttcgtggccagcaatgatgagggcgtggccacagtggggctggtgagctccacgggtcctggtggtgaccgcgtgctgtttgtgggcaaaggcaatgggccacacgacaacggcatcatcgtgagcactcggctgttggaccggactgacagcagggaggcctttgaagcctacacggaccacgccacctacaaggccggctacctgtccaccaacacacagcagttcgtggcggccttcgaggacggcccctacgtcttctttgtcttcaaccagcaggacaagcacccggcccggaaccgcacgctgctggcacgcatgtgcagagaagaccccaactactactcctacctggagatggacctgcagtgccgggaccccgacatccacgccgctgcctttggcacctgcctggccgcctccgtggctgcgcctggctctggcagggtgctatatgctgtcttcagcagagacagccggagcagtggggggcccggtgcgggcctctgcctgttcccgctggacaaggtgcacgccaagatggaggccaaccgcaacgcctgttacacaggcacccgggaggcccgtgacatcttctacaagcccttccacggcgatatccagtgcggcggccacgcgccgggctccagcaagagcttcccatgtggctcggagcacctgccctacccgctgggcagccgcgacgggctcagaggcacagccgtgctgcagcgtggaggcctgaacctcacggccgtgacggtcgccgccgagaacaaccacactgttgcttttctgggcacctctgatggccggatcctcaaggtgtacctcaccccagatggcacctcctcagagtacgactctatccttgtggagataaacaagagagtcaagcgcgacctggtactgtctggagacctgggcagcctgtacgccatgacccaggacaaggtgttccggctgccggtgcaggagtgcctgagctacccgacctgcacccagtgccgcgactcccaggacccctactgcggctggtgcgtcgtcgagggacgatgcacccggaaggccgagtgtccgcgggccgaggaggccagccactggctgtggagccgaagcaagtcctgcgtggccgtcaccagcgcccagccacagaacatgagccggcgggcccagggggaggtgcagctgaccgtcagccccctccctgccctgagcgaggaggacgagttgctgtgcctttttggggagtcgccgccacaccccgcccgcgtggagggcgaggccgtcatctgcaactccccaagcagcatccccgtcacaccgccaggccaggaccacgtggccgtgaccatccagctcctccttagacgaggcaacatcttcctcacgtcctaccagtaccccttctacgactgccgccaggccatgagcctggaggagaacctgccgtgcatctcctgcgtgagcaaccgctggacctgccagtgggacctgcgctaccacgagtgccgggaggcttcgcccaaccctgaggacggcatcgtccgtgcccacatggaggacagctgtccccagttcctgggacccagccccctggtgatccccatgaaccacgagacagatgtgaacttccagggcaagaacctggacaccgtgaagggttcctccctgcacgtgggcagtgacttgctcaagttcatggagccggtgaccatgcaggaatctgggaccttcgcctttcggaccccaaagctgtcccacgatgccaacgagacgctgcccctgcacctctacgtcaagtcttacggcaagaatatcgacagcaagctccatgtgaccctctacaactgctcctttggccgcagcgactgcagcctgtgccgggccgctaaccccgactacaggtgtgcgtggtgcgggggccagagcaggtgcgtgtatgaggccctgtgcaacaccacctccgagtgcccgccgcccgtcatcaccaggatccagcctgagacgggccccctgggtgggggcatccgcatcaccatcctggggtccaatttgggcgtccaagcaggggacatccagaggatctctgtggccggccggaactgctcctttcagccggaacgttactccgtgtccacccggatcgtgtgtgtgatcgaggctgcggagacgcctttcacggggggtgtcgaggtggacgtcttcgggaaactgggccgttcgcctcccaatgtccagttcaccttccaacagcccaagcctctcagtgtggagccgcagcagggaccgcaggcgggcggcaccacactgaccatccacggcacccacctggacacgggctcccaggaggacgtgcgggtgaccctcaacggcgtcccgtgtaaagtgacgaagtttggggcgcagctccagtgtgtcactggcccccaggcgacacggggccagatgcttctggaggtctcctacggggggtcccccgtgcccaaccccggcatcttcttcacctaccgcgaaaaccccgtactgcgagccttcgagccgctacgaagctttgccagtggtggccgcagcatcaacgtcacgggtcagggcttcagcctgatccagaggtttgccatggtggtcatcgcggagcccctgcagtcctggcagccgccgcgggaggctgaatccctgcagcccatgacggtggtgggtacagactacgtgttccacaatgacaccaaggtcgtcttcctgtccccggctgtgcctgaggagccagaggnctacaacctcacggtgctgatcgagatggacgggcaccgtgccctgctcagaacagaggccggggccttcgagtacgtgcctgaccccaccnttgagaacttcacaggtggcgtcaagaagcaggtcaacaagctcatccacgcccggggcaccaatctgaacaaggcgatgacgctgcaggaggccgaggccttcgtgggtgccgagcgctgcaccatgaagacgctgacggagaccgacctgtactgtgagcccccggaggtgcagcccccgcccaagcggcggcagaaacgagacaccacacacaacctgcccgagttcattgtgaagttcggctctcgcgagtgggtgctgggccgcgtggagtacgacacacgggtgagcgacgtgccgctcagcctcatcttgccgctggtcatcgtgcccatggtggtcgtcatcgcggtgtctgtctactgctactggaggaagagccagcaggccgaacgagagtatgagaagatcaagtcccagctggagggcctggaggagagcgtgcgggaccgctgcaagaaggaattcacagacctgatgatctgggtggactcacggctgctgggccccacgtcaaaggtcaagtgagacgtaggtcaagtcctacgtcggggcccagacatcctggggtcctggtctgtcagacaggctgccctagagccccacccagtccggggggactgggagcagttccaagaccaccccacccctttttgtaaatcttgttcattgtaaatcaaatacagcgtctttttcact

SEQ ID NO: 455354 - DNA, 6406 bp, Homo sapiens
  misc_feature (3207)..(3207): n is a, c, g, or t
  misc_feature (3299)..(3299): n is a, c, g, or t
  misc_feature (3925)..(3925): n is a, c, g, or t
gcggggggcaatggcactgcagctctgggccctgaccctgctgggcctgctgggcgcaggtgccagcctgaggccccgcaagctggacttcttccgcagcgagaaagagctgaaccacctggctgtggatgaggcctcaggcgtggtgtacctgggggcggtgaatgccctctaccagctggatgcgaagctgcagctggagcagcaggtggccacgggcccggccctggacaacaagaagtgcacgccgcccatcgaggccagccagtgccatgaggctgagatgactgacaatgtcaaccagctgctgctgctcgaccctcccaggaagcgcctggtggagtgcggcagcctcttcaagggcatctgcgctctgcgcgccctgagcaacatctccctccgcctgttctacgaggacggcagcggggagaagtctttcgtggccagcaatgatgagggcgtggccacagtggggctggtgagctccacgggtcctggtggtgaccgcgtgctgtttgtgggcaaaggcaatgggccacacgacaacggcatcatcgtgagcactcggctgttggaccggactgacagcagggaggcctttgaagcctacacggaccacgccacctacaaggccggctacctgtccaccaacacacagcagttcgtggcggccttcgaggacggcccctacgtcttctttgtcttcaaccagcaggacaagcacccggcccggaaccgcacgctgctggcacgcatgtgcagagaagaccccaactactactcctacctggagatggacctgcagtgccgggaccccgacatccacgccgctgcctttggcacctgcctggccgcctccgtggctgcgcctggctctggcagggtgctatatgctgtcttcagcagagacagccggagcagtggggggcccggtgcgggcctctgcctgttcccgctggacaaggtgcacgccaagatggaggccaaccgcaacgcctgttacacaggcacccgggaggcccgtgacatcttctacaagcccttccacggcgatatccagtgcggcggccacgcgccgggctccagcaagagcttcccatgtggctcggagcacctgccctacccgctgggcagccgcgacgggctcagaggcacagccgtgctgcagcgtggaggcctgaacctcacggccgtgacggtcgccgccgagaacaaccacactgttgcttttctgggcacctctgatggccggatcctcaaggtgtacctcaccccagatggcacctcctcagagtacgactctatccttgtggagataaacaagagagtcaagcgcgacctggtactgtctggagacctgggcagcctgtacgccatgacccaggacaaggtgttccggctgccggtgcaggagtgcctgagctacccgacctgcacccagtgccgcgactcccaggacccctactgcggctggtgcgtcgtcgagggacgatgcacccggaaggccgagtgtccgcgggccgaggaggccagccactggctgtggagccgaagcaagtcctgcgtggccgtcaccagcgcccagccacagaacatgagccggcgggcccagggggaggtgcagctgaccgtcagccccctccctgccctgagcgaggaggacgagttgctgtgcctttttggggagtcgccgccacaccccgcccgcgtggagggcgaggccgtcatctgcaactccccaagcagcatccccgtcacaccgccaggccaggaccacgtggccgtgaccatccagctcctccttagacgaggcaacatcttcctcacgtcctaccagtaccccttctacgactgccgccaggccatgagcctggaggagaacctgccgtgcatctcctgcgtgagcaaccgctggacctgccagtgggacctgcgctaccacgagtgccgggaggcttcgcccaaccctgaggacggcatcgtccgtgcccacatggaggacagctgtccccagttcctgggacccagccccctggtgatccccatgaaccacgagacagatgtgaacttccagggcaagaacctggacaccgtgaagggttcctccctgcacgtgggcagtgacttgctcaagttcatggagccggtgaccatgcaggaatctgggaccttcgcctttcggaccccaaagctgtcccacgatgccaacgagacgctgcccctgcacctctacgtcaagtcttacggcaagaatatcgacagcaagctccatgtgaccctctacaactgctcctttggccgcagcgactgcagcctgtgccgggccgctaaccccgactacaggtgtgcgtggtgcgggggccagagcaggtgcgtgtatgaggccctgtgcaacaccacctccgagtgcccgccgcccgtcatcaccaggatccagcctgagacgggccccctgggtgggggcatccgcatcaccatcctggggtccaatttgggcgtccaagcaggggacatccagaggatctctgtggccggccggaactgctcctttcagccggaacgttactccgtgtccacccggatcgtgtgtgtgatcgaggctgcggagacgcctttcacggggggtgtcgaggtggacgtcttcgggaaactgggccgttcgcctcccaatgtccagttcaccttccaacagcccaagcctctcagtgtggagccgcagcagggaccgcaggcgggcggcaccacactgaccatccacggcacccacctggacacgggctcccaggaggacgtgcgggtgaccctcaacggcgtcccgtgtaaagtgacgaagtttggggcgcagctccagtgtgtcactggcccccaggcgacacggggccagatgcttctggaggtctcctacggggggtcccccgtgcccaaccccggcatcttcttcacctaccgcgaaaaccccgtactgcgagccttcgagccgctacgaagctttgccagtggtggccgcagcatcaacgtcacgggtcagggcttcagcctgatccagaggtttgccatggtggtcatcgcggagcccctgcagtcctggcagccgccgcgggaggctgaatccctgcagcccatgacggtggtgggtacagactacgtgttccacaatgacaccaaggtcgtcttcctgtccccggctgtgcctgaggagccagaggnctacaacctcacggtgctgatcgagatggacgggcaccgtgccctgctcagaacagaggccggggccttcgagtacgtgcctgaccccaccnttgagaacttcacaggtggcgtcaagaagcaggtcaacaagctcatccacgcccggggcaccaatctgaacaaggcgatgacgctgcaggaggccgaggccttcgtgggtgccgagcgctgcaccatgaagacgctgacggagaccgacctgtactgtgagcccccggaggtgcagcccccgcccaagcggcggcagaaacgagacaccacacacaacctgcccgagttcattgtgaagttcggctctcgcgagtgggtgctgggccgcgtggagtacgacacacgggtgagcgacgtgccgctcagcctcatcttgccgctggtcatcgtgcccatggtggtcgtcatcgcggtgtctgtctactgctactggaggaagagccagcaggccgaacgagagtatgagaagatcaagtcccagctggagggcctggaggagagcgtgcgggaccgctgcaagaaggaattcacagacctgatgatcgagatggaggaccagaccaacgacgtgcacgaggccggcatccccgtgctggactacaagacctacaccgaccgcgtcttcttcctgccctccaaggacggcgacaaggacgtgatgatcaccggcaagctggacatcccngagccgcggcggccggtggtggagcaggccctctaccagttctccaacctgctgaacagcaagtctttcctcatcaatttcatccacaccctggagaaccagcgggagttctcggcccgcgccaaggtctacttcgcgtccctgctgacggtggcgctgcacgggaaactggagtactacacggacatcatgcacacgctcttcctggagctcctggagcagtacgtggtggccaagaaccccaagctgatgctgcgcaggtctgagactgtggtggagaggatgctgtccaactggatgtccatctgcctgtaccagtacctcaaggacagtgccggggagcccctgtacaagctcttcaaggccatcaaacatcaggtggaaaagggcccggtggatgcggtacagaagaaggccaagtacactctcaacgacacggggctgctgggggatgatgtggagtacgcacccctgacggtgagcgtgatcgtgcaggacgagggagtggacgccatcccggtgaaggtcctcaactgtgacaccatctcccaggtcaaggagaagatcattgaccaggtgtaccgtgggcagccctgctcctgctggcccaggccagacagcgtggtcctggagtggcgtccgggctccacagcgcagatcctgtcggacctggacctgacgtcacagcgggagggccggtggaagcgcgtcaacacccttatgcactacaatgtccgggatggagccaccctcatcctgtccaaggtgggggtctcccagcagccggaggacagccagcaggacctgcctggggagcgccatgccctcctggaggaggagaaccgggtgtggcacctggtgcggccgaccgacgaggtggacgagggcaagtccaagagaggcagcgtgaaagagaaggagcggacgaaggccatcaccgagatcctcctgcgtacagcagcttgttgctgggagaatcgcggctcagcttatgctccgtgcgcgtgcaggcatccatgaaggtctgcgcgatgactgacagcgaggcgtccaccacctcgtggacatgcacgtcaaagatgaagtgggggttcttgaggatgttcacccagaaccggagcggtaaactgttcgtcttccagatgtggatggtgtcttcatcctggatgttgtgcttctctgcctgctcgtccaggaagtcgaagaagtacttgactgcaggtggcaccgcgtgcccaggcagccagcacgctctggaagaagttgtccacaaactgctgcagtgtgcccttgactgagagcacccgcgtcaggtagatctcggtgatggccttcgtccgctccatctctatcacactgcctctcatggacatgccctcgtccacctcgtcggtcggccgcaccaggtgccacacccggttctcctcctccaggagggcatggcgctccccaggcaggtcctgctggctgtcctccggctgctgggagacccccaccttggacaggatgagggtggctccatcccggacattgtagtgcataagggtgttgacgcgctgccaccgtcccaccgctcgtgacgtcacgtccagtccgctctaccaatacacgcagaagtactatgacgagatcatcaatgccttggaggaggatcctgccgcccagaagatgcagctggccttccgcctgcagcagattgccgctgcactggagaacaaggtcactgacctctgacctacaatctccagtgctgccttgggacataggtacctgaggtacctgagagcccctcaggggaggaggccgagtggctgtggctgaggcccccaccctcccctggaacgcgccccaagccggagtgggtgcagccggaacccgcccagcgtctagactgtagcatcttcctctgagcaataccgccgggcaccgcaccagcaccagccccagccccagctccctccggccgcagaaccagcatcgggtgttcactgtcgagtctcgagtgatttgaaaatgtgccttacgctgccacgctgggggcagctggcctccgcctccgcccacgcaccagcagccgcctccatgccctaggttgggcccctgggggatctgagggcctgtggcccccagggcaagttcccagatcctatgtctgtctgtccaccacgagatgggaggaggagaaaaagcggtacgatgccttcctgacctcaccggcctccccaagggtgccggcactctgggtggactcacggctgctgggccccacgtcaaaggtcaagtgagacgtaggtcaagtcctacgtcggggcccagacatcctggggtcctggtctgtcagacaggctgccctagagccccacccagtccggggggactgggagcagttccaagaccaccccacccctttttgtaaatcttgttcattgtaaatcaaatacagcgtctttttcactccgcgggttggctgagtgttcctcc

SEQ ID NO: 455355 - DNA, 5052 bp, Homo sapiens
  misc_feature (3207)..(3207): n is a, c, g, or t
  misc_feature (3299)..(3299): n is a, c, g, or t
  misc_feature (3925)..(3925): n is a, c, g, or t
gcggggggcaatggcactgcagctctgggccctgaccctgctgggcctgctgggcgcaggtgccagcctgaggccccgcaagctggacttcttccgcagcgagaaagagctgaaccacctggctgtggatgaggcctcaggcgtggtgtacctgggggcggtgaatgccctctaccagctggatgcgaagctgcagctggagcagcaggtggccacgggcccggccctggacaacaagaagtgcacgccgcccatcgaggccagccagtgccatgaggctgagatgactgacaatgtcaaccagctgctgctgctcgaccctcccaggaagcgcctggtggagtgcggcagcctcttcaagggcatctgcgctctgcgcgccctgagcaacatctccctccgcctgttctacgaggacggcagcggggagaagtctttcgtggccagcaatgatgagggcgtggccacagtggggctggtgagctccacgggtcctggtggtgaccgcgtgctgtttgtgggcaaaggcaatgggccacacgacaacggcatcatcgtgagcactcggctgttggaccggactgacagcagggaggcctttgaagcctacacggaccacgccacctacaaggccggctacctgtccaccaacacacagcagttcgtggcggccttcgaggacggcccctacgtcttctttgtcttcaaccagcaggacaagcacccggcccggaaccgcacgctgctggcacgcatgtgcagagaagaccccaactactactcctacctggagatggacctgcagtgccgggaccccgacatccacgccgctgcctttggcacctgcctggccgcctccgtggctgcgcctggctctggcagggtgctatatgctgtcttcagcagagacagccggagcagtggggggcccggtgcgggcctctgcctgttcccgctggacaaggtgcacgccaagatggaggccaaccgcaacgcctgttacacaggcacccgggaggcccgtgacatcttctacaagcccttccacggcgatatccagtgcggcggccacgcgccgggctccagcaagagcttcccatgtggctcggagcacctgccctacccgctgggcagccgcgacgggctcagaggcacagccgtgctgcagcgtggaggcctgaacctcacggccgtgacggtcgccgccgagaacaaccacactgttgcttttctgggcacctctgatggccggatcctcaaggtgtacctcaccccagatggcacctcctcagagtacgactctatccttgtggagataaacaagagagtcaagcgcgacctggtactgtctggagacctgggcagcctgtacgccatgacccaggacaaggtgttccggctgccggtgcaggagtgcctgagctacccgacctgcacccagtgccgcgactcccaggacccctactgcggctggtgcgtcgtcgagggacgatgcacccggaaggccgagtgtccgcgggccgaggaggccagccactggctgtggagccgaagcaagtcctgcgtggccgtcaccagcgcccagccacagaacatgagccggcgggcccagggggaggtgcagctgaccgtcagccccctccctgccctgagcgaggaggacgagttgctgtgcctttttggggagtcgccgccacaccccgcccgcgtggagggcgaggccgtcatctgcaactccccaagcagcatccccgtcacaccgccaggccaggaccacgtggccgtgaccatccagctcctccttagacgaggcaacatcttcctcacgtcctaccagtaccccttctacgactgccgccaggccatgagcctggaggagaacctgccgtgcatctcctgcgtgagcaaccgctggacctgccagtgggacctgcgctaccacgagtgccgggaggcttcgcccaaccctgaggacggcatcgtccgtgcccacatggaggacagctgtccccagttcctgggacccagccccctggtgatccccatgaaccacgagacagatgtgaacttccagggcaagaacctggacaccgtgaagggttcctccctgcacgtgggcagtgacttgctcaagttcatggagccggtgaccatgcaggaatctgggaccttcgcctttcggaccccaaagctgtcccacgatgccaacgagacgctgcccctgcacctctacgtcaagtcttacggcaagaatatcgacagcaagctccatgtgaccctctacaactgctcctttggccgcagcgactgcagcctgtgccgggccgctaaccccgactacaggtgtgcgtggtgcgggggccagagcaggtgcgtgtatgaggccctgtgcaacaccacctccgagtgcccgccgcccgtcatcaccaggatccagcctgagacgggccccctgggtgggggcatccgcatcaccatcctggggtccaatttgggcgtccaagcaggggacatccagaggatctctgtggccggccggaactgctcctttcagccggaacgttactccgtgtccacccggatcgtgtgtgtgatcgaggctgcggagacgcctttcacggggggtgtcgaggtggacgtcttcgggaaactgggccgttcgcctcccaatgtccagttcaccttccaacagcccaagcctctcagtgtggagccgcagcagggaccgcaggcgggcggcaccacactgaccatccacggcacccacctggacacgggctcccaggaggacgtgcgggtgaccctcaacggcgtcccgtgtaaagtgacgaagtttggggcgcagctccagtgtgtcactggcccccaggcgacacggggccagatgcttctggaggtctcctacggggggtcccccgtgcccaaccccggcatcttcttcacctaccgcgaaaaccccgtactgcgagccttcgagccgctacgaagctttgccagtggtggccgcagcatcaacgtcacgggtcagggcttcagcctgatccagaggtttgccatggtggtcatcgcggagcccctgcagtcctggcagccgccgcgggaggctgaatccctgcagcccatgacggtggtgggtacagactacgtgttccacaatgacaccaaggtcgtcttcctgtccccggctgtgcctgaggagccagaggnctacaacctcacggtgctgatcgagatggacgggcaccgtgccctgctcagaacagaggccggggccttcgagtacgtgcctgaccccaccnttgagaacttcacaggtggcgtcaagaagcaggtcaacaagctcatccacgcccggggcaccaatctgaacaaggcgatgacgctgcaggaggccgaggccttcgtgggtgccgagcgctgcaccatgaagacgctgacggagaccgacctgtactgtgagcccccggaggtgcagcccccgcccaagcggcggcagaaacgagacaccacacacaacctgcccgagttcattgtgaagttcggctctcgcgagtgggtgctgggccgcgtggagtacgacacacgggtgagcgacgtgccgctcagcctcatcttgccgctggtcatcgtgcccatggtggtcgtcatcgcggtgtctgtctactgctactggaggaagagccagcaggccgaacgagagtatgagaagatcaagtcccagctggagggcctggaggagagcgtgcgggaccgctgcaagaaggaattcacagacctgatgatcgagatggaggaccagaccaacgacgtgcacgaggccggcatccccgtgctggactacaagacctacaccgaccgcgtcttcttcctgccctccaaggacggcgacaaggacgtgatgatcaccggcaagctggacatcccngagccgcggcggccggtggtggagcaggccctctaccagttctccaacctgctgaacagcaagtctttcctcatcaatttcatccacaccctggagaaccagcgggagttctcggcccgcgccaaggtctacttcgcgtccctgctgacggtggcgctgcacgggaaactggagtactacacggacatcatgcacacgctcttcctggagctcctggagcagtacgtggtggccaagaaccccaagctgatgctgcgcaggtctgagactgtggtggagaggatgctgtccaactggatgtccatctgcctgtaccagtacctcaaggacagtgccggggagcccctgtacaagctcttcaaggccatcaaacatcaggtggaaaagggcccggtggatgcggtacagaagaaggccaagtacactctcaacgacacggggctgctgggggatgatgtggagtacgcacccctgacggtgagcgtgatcgtgcaggacgagggagtggacgccatcccggtgaaggtcctcaactgtgacaccatctcccaggtcaaggagaagatcattgaccaggtgtaccgtgggcagccctgctcctgctggcccaggccagacagcgtggtcctggagtggcgtccgggctccacagcgcagatcctgtcggacctggacctgacgtcacagcgggagggccggtggaagcgcgtcaacacccttatgcactacaatgtccgggatggagccaccctcatcctgtccaaggtgggggtctcccagcagccggaggacagccagcagggcaagttcccagatcctatgtctgtctgtccaccacgagatgggaggaggagaaaaagcggtacgatgccttcctgacctcaccggcctccccaagggtgccggcactctgggtggactcacggctgctgggccccacgtcaaaggtcaagtgagacgtaggtcaagtcctacgtcggggcccagacatcctggggtcctggtctgtcagacaggctgccctagagccccacccagtccggggggactgggagcagttccaagaccaccccacccctttttgtaaatcttgttcattgtaaatcaaatacagcgtctttttcact

SEQ ID NO: 455356 - DNA, 6249 bp, Homo sapiens
  misc_feature (3207)..(3207): n is a, c, g, or t
  misc_feature (3299)..(3299): n is a, c, g, or t
  misc_feature (3925)..(3925): n is a, c, g, or t
gcggggggcaatggcactgcagctctgggccctgaccctgctgggcctgctgggcgcaggtgccagcctgaggccccgcaagctggacttcttccgcagcgagaaagagctgaaccacctggctgtggatgaggcctcaggcgtggtgtacctgggggcggtgaatgccctctaccagctggatgcgaagctgcagctggagcagcaggtggccacgggcccggccctggacaacaagaagtgcacgccgcccatcgaggccagccagtgccatgaggctgagatgactgacaatgtcaaccagctgctgctgctcgaccctcccaggaagcgcctggtggagtgcggcagcctcttcaagggcatctgcgctctgcgcgccctgagcaacatctccctccgcctgttctacgaggacggcagcggggagaagtctttcgtggccagcaatgatgagggcgtggccacagtggggctggtgagctccacgggtcctggtggtgaccgcgtgctgtttgtgggcaaaggcaatgggccacacgacaacggcatcatcgtgagcactcggctgttggaccggactgacagcagggaggcctttgaagcctacacggaccacgccacctacaaggccggctacctgtccaccaacacacagcagttcgtggcggccttcgaggacggcccctacgtcttctttgtcttcaaccagcaggacaagcacccggcccggaaccgcacgctgctggcacgcatgtgcagagaagaccccaactactactcctacctggagatggacctgcagtgccgggaccccgacatccacgccgctgcctttggcacctgcctggccgcctccgtggctgcgcctggctctggcagggtgctatatgctgtcttcagcagagacagccggagcagtggggggcccggtgcgggcctctgcctgttcccgctggacaaggtgcacgccaagatggaggccaaccgcaacgcctgttacacaggcacccgggaggcccgtgacatcttctacaagcccttccacggcgatatccagtgcggcggccacgcgccgggctccagcaagagcttcccatgtggctcggagcacctgccctacccgctgggcagccgcgacgggctcagaggcacagccgtgctgcagcgtggaggcctgaacctcacggccgtgacggtcgccgccgagaacaaccacactgttgcttttctgggcacctctgatggccggatcctcaaggtgtacctcaccccagatggcacctcctcagagtacgactctatccttgtggagataaacaagagagtcaagcgcgacctggtactgtctggagacctgggcagcctgtacgccatgacccaggacaaggtgttccggctgccggtgcaggagtgcctgagctacccgacctgcacccagtgccgcgactcccaggacccctactgcggctggtgcgtcgtcgagggacgatgcacccggaaggccgagtgtccgcgggccgaggaggccagccactggctgtggagccgaagcaagtcctgcgtggccgtcaccagcgcccagccacagaacatgagccggcgggcccagggggaggtgcagctgaccgtcagccccctccctgccctgagcgaggaggacgagttgctgtgcctttttggggagtcgccgccacaccccgcccgcgtggagggcgaggccgtcatctgcaactccccaagcagcatccccgtcacaccgccaggccaggaccacgtggccgtgaccatccagctcctccttagacgaggcaacatcttcctcacgtcctaccagtaccccttctacgactgccgccaggccatgagcctggaggagaacctgccgtgcatctcctgcgtgagcaaccgctggacctgccagtgggacctgcgctaccacgagtgccgggaggcttcgcccaaccctgaggacggcatcgtccgtgcccacatggaggacagctgtccccagttcctgggacccagccccctggtgatccccatgaaccacgagacagatgtgaacttccagggcaagaacctggacaccgtgaagggttcctccctgcacgtgggcagtgacttgctcaagttcatggagccggtgaccatgcaggaatctgggaccttcgcctttcggaccccaaagctgtcccacgatgccaacgagacgctgcccctgcacctctacgtcaagtcttacggcaagaatatcgacagcaagctccatgtgaccctctacaactgctcctttggccgcagcgactgcagcctgtgccgggccgctaaccccgactacaggtgtgcgtggtgcgggggccagagcaggtgcgtgtatgaggccctgtgcaacaccacctccgagtgcccgccgcccgtcatcaccaggatccagcctgagacgggccccctgggtgggggcatccgcatcaccatcctggggtccaatttgggcgtccaagcaggggacatccagaggatctctgtggccggccggaactgctcctttcagccggaacgttactccgtgtccacccggatcgtgtgtgtgatcgaggctgcggagacgcctttcacggggggtgtcgaggtggacgtcttcgggaaactgggccgttcgcctcccaatgtccagttcaccttccaacagcccaagcctctcagtgtggagccgcagcagggaccgcaggcgggcggcaccacactgaccatccacggcacccacctggacacgggctcccaggaggacgtgcgggtgaccctcaacggcgtcccgtgtaaagtgacgaagtttggggcgcagctccagtgtgtcactggcccccaggcgacacggggccagatgcttctggaggtctcctacggggggtcccccgtgcccaaccccggcatcttcttcacctaccgcgaaaaccccgtactgcgagccttcgagccgctacgaagctttgccagtggtggccgcagcatcaacgtcacgggtcagggcttcagcctgatccagaggtttgccatggtggtcatcgcggagcccctgcagtcctggcagccgccgcgggaggctgaatccctgcagcccatgacggtggtgggtacagactacgtgttccacaatgacaccaaggtcgtcttcctgtccccggctgtgcctgaggagccagaggnctacaacctcacggtgctgatcgagatggacgggcaccgtgccctgctcagaacagaggccggggccttcgagtacgtgcctgaccccaccnttgagaacttcacaggtggcgtcaagaagcaggtcaacaagctcatccacgcccggggcaccaatctgaacaaggcgatgacgctgcaggaggccgaggccttcgtgggtgccgagcgctgcaccatgaagacgctgacggagaccgacctgtactgtgagcccccggaggtgcagcccccgcccaagcggcggcagaaacgagacaccacacacaacctgcccgagttcattgtgaagttcggctctcgcgagtgggtgctgggccgcgtggagtacgacacacgggtgagcgacgtgccgctcagcctcatcttgccgctggtcatcgtgcccatggtggtcgtcatcgcggtgtctgtctactgctactggaggaagagccagcaggccgaacgagagtatgagaagatcaagtcccagctggagggcctggaggagagcgtgcgggaccgctgcaagaaggaattcacagacctgatgatcgagatggaggaccagaccaacgacgtgcacgaggccggcatccccgtgctggactacaagacctacaccgaccgcgtcttcttcctgccctccaaggacggcgacaaggacgtgatgatcaccggcaagctggacatcccngagccgcggcggccggtggtggagcaggccctctaccagttctccaacctgctgaacagcaagtctttcctcatcaatttcatccacaccctggagaaccagcgggagttctcggcccgcgccaaggtctacttcgcgtccctgctgacggtggcgctgcacgggaaactggagtactacacggacatcatgcacacgctcttcctggagctcctggagcagtacgtggtggccaagaaccccaagctgatgctgcgcaggtctgagactgtggtggagaggatgctgtccaactggatgtccatctgcctgtaccagtacctcaaggacagtgccggggagcccctgtacaagctcttcaaggccatcaaacatcaggtggaaaagggcccggtggatgcggtacagaagaaggccaagtacactctcaacgacacggggctgctgggggatgatgtggagtacgcacccctgacggtgagcgtgatcgtgcaggacgagggagtggacgccatcccggtgaaggtcctcaactgtgacaccatctcccaggtcaaggagaagatcattgaccaggtgtaccgtgggcagccctgctcctgctggcccaggccagacagcgtggtcctggagtggcgtccgggctccacagcgcagatcctgtcggacctggacctgacgtcacagcgggagggccggtggaagcgcgtcaacacccttatgcactacaatgtccgggatggagccaccctcatcctgtccaaggtgggggtctcccagcagccggaggacagccagcaggacctgcctggggagcgccatgccctcctggaggaggagaaccgggtgtggcacctggtgcggccgaccgacgaggtggacgagggcaagtccaagagaggcagcgtgaaagagaaggagcggacgaaggccatcaccgagatctacctgacgcggctgctctcagtcaagggcacactgcagcagtttgtggacaacttcttccagagcgtgctggcgcctgggcacgcggtgccacctgcagtcaagtacttcttcgacttcctggacgagcaggcagagaagcacaacatccaggatgaagacaccatccacatctggaagacgaacagtttaccgctccggttctgggtgaacatcctcaagaacccccacttcatctttgacgtgcatgtccacgaggtggtggacgcctcgctgtcagtcatcgcgcagaccttcatggatgcctgcacgcgcacggagcataagctgagccgcgattctcccagcaacaagctgctgtacgccaaggagatctccacctacaagaagatggtggaggattactacaaggggatccggcagatggtgcaggtcagcgaccaggacatgaacacacacctggcagagatttcccgggcgcacacggactccttgaacaccctcgtggcactccaccagctctaccaatacacgcagaagtactatgacgagatcatcaatgccttggaggaggatcctgccgcccagaagatgcagctggccttccgcctgcagcagattgccgctgcactggagaacaaggtcactgacctctgacctacaatctccagtgctgccttgggacataggtacctgaggtacctgagagcccctcaggggaggaggccgagtggctgtggctgaggcccccaccctcccctggaacgcgccccaagccggagtgggtgcagccggaacccgcccagcgtctagactgtagcatcttcctctgagcaataccgccgggcaccgcaccagcaccagccccagccccagctccctccggccgcagaaccagcatcgggtgttcactgtcgagtctcgagtgatttgaaaatgtgccttacgctgccacgctgggggcagctggcctccgcctccgcccacgcaccagcagccgcctccatgccctaggttgggcccctgggggatctgagggcctgtggcccccagggcaagttcccagatcctatgtctgtctgtccaccacgagatgggaggaggagaaaaagcggtacgatgccttcctgacctcaccggcctccccaagggtgccggcactctgggtggactcacggctgctgggccccacgtcaaaggtcaagtgagacgtaggtcaagtcctacgtcggggcccagacatcctggggtcctggtctgtcagacaggctgccctagagccccacccagtccggggggactgggagcagttccaagaccaccccacccctttttgtaaatcttgttcattgtaaatcaaatacagcgtctttttcact

SEQ ID NO: 455357 - DNA, 6270 bp, Homo sapiens
  misc_feature (3207)..(3207): n is a, c, g, or t
  misc_feature (3299)..(3299): n is a, c, g, or t
  misc_feature (3925)..(3925): n is a, c, g, or t
gcggggggcaatggcactgcagctctgggccctgaccctgctgggcctgctgggcgcaggtgccagcctgaggccccgcaagctggacttcttccgcagcgagaaagagctgaaccacctggctgtggatgaggcctcaggcgtggtgtacctgggggcggtgaatgccctctaccagctggatgcgaagctgcagctggagcagcaggtggccacgggcccggccctggacaacaagaagtgcacgccgcccatcgaggccagccagtgccatgaggctgagatgactgacaatgtcaaccagctgctgctgctcgaccctcccaggaagcgcctggtggagtgcggcagcctcttcaagggcatctgcgctctgcgcgccctgagcaacatctccctccgcctgttctacgaggacggcagcggggagaagtctttcgtggccagcaatgatgagggcgtggccacagtggggctggtgagctccacgggtcctggtggtgaccgcgtgctgtttgtgggcaaaggcaatgggccacacgacaacggcatcatcgtgagcactcggctgttggaccggactgacagcagggaggcctttgaagcctacacggaccacgccacctacaaggccggctacctgtccaccaacacacagcagttcgtggcggccttcgaggacggcccctacgtcttctttgtcttcaaccagcaggacaagcacccggcccggaaccgcacgctgctggcacgcatgtgcagagaagaccccaactactactcctacctggagatggacctgcagtgccgggaccccgacatccacgccgctgcctttggcacctgcctggccgcctccgtggctgcgcctggctctggcagggtgctatatgctgtcttcagcagagacagccggagcagtggggggcccggtgcgggcctctgcctgttcccgctggacaaggtgcacgccaagatggaggccaaccgcaacgcctgttacacaggcacccgggaggcccgtgacatcttctacaagcccttccacggcgatatccagtgcggcggccacgcgccgggctccagcaagagcttcccatgtggctcggagcacctgccctacccgctgggcagccgcgacgggctcagaggcacagccgtgctgcagcgtggaggcctgaacctcacggccgtgacggtcgccgccgagaacaaccacactgttgcttttctgggcacctctgatggccggatcctcaaggtgtacctcaccccagatggcacctcctcagagtacgactctatccttgtggagataaacaagagagtcaagcgcgacctggtactgtctggagacctgggcagcctgtacgccatgacccaggacaaggtgttccggctgccggtgcaggagtgcctgagctacccgacctgcacccagtgccgcgactcccaggacccctactgcggctggtgcgtcgtcgagggacgatgcacccggaaggccgagtgtccgcgggccgaggaggccagccactggctgtggagccgaagcaagtcctgcgtggccgtcaccagcgcccagccacagaacatgagccggcgggcccagggggaggtgcagctgaccgtcagccccctccctgccctgagcgaggaggacgagttgctgtgcctttttggggagtcgccgccacaccccgcccgcgtggagggcgaggccgtcatctgcaactccccaagcagcatccccgtcacaccgccaggccaggaccacgtggccgtgaccatccagctcctccttagacgaggcaacatcttcctcacgtcctaccagtaccccttctacgactgccgccaggccatgagcctggaggagaacctgccgtgcatctcctgcgtgagcaaccgctggacctgccagtgggacctgcgctaccacgagtgccgggaggcttcgcccaaccctgaggacggcatcgtccgtgcccacatggaggacagctgtccccagttcctgggacccagccccctggtgatccccatgaaccacgagacagatgtgaacttccagggcaagaacctggacaccgtgaagggttcctccctgcacgtgggcagtgacttgctcaagttcatggagccggtgaccatgcaggaatctgggaccttcgcctttcggaccccaaagctgtcccacgatgccaacgagacgctgcccctgcacctctacgtcaagtcttacggcaagaatatcgacagcaagctccatgtgaccctctacaactgctcctttggccgcagcgactgcagcctgtgccgggccgctaaccccgactacaggtgtgcgtggtgcgggggccagagcaggtgcgtgtatgaggccctgtgcaacaccacctccgagtgcccgccgcccgtcatcaccaggatccagcctgagacgggccccctgggtgggggcatccgcatcaccatcctggggtccaatttgggcgtccaagcaggggacatccagaggatctctgtggccggccggaactgctcctttcagccggaacgttactccgtgtccacccggatcgtgtgtgtgatcgaggctgcggagacgcctttcacggggggtgtcgaggtggacgtcttcgggaaactgggccgttcgcctcccaatgtccagttcaccttccaacagcccaagcctctcagtgtggagccgcagcagggaccgcaggcgggcggcaccacactgaccatccacggcacccacctggacacgggctcccaggaggacgtgcgggtgaccctcaacggcgtcccgtgtaaagtgacgaagtttggggcgcagctccagtgtgtcactggcccccaggcgacacggggccagatgcttctggaggtctcctacggggggtcccccgtgcccaaccccggcatcttcttcacctaccgcgaaaaccccgtactgcgagccttcgagccgctacgaagctttgccagtggtggccgcagcatcaacgtcacgggtcagggcttcagcctgatccagaggtttgccatggtggtcatcgcggagcccctgcagtcctggcagccgccgcgggaggctgaatccctgcagcccatgacggtggtgggtacagactacgtgttccacaatgacaccaaggtcgtcttcctgtccccggctgtgcctgaggagccagaggnctacaacctcacggtgctgatcgagatggacgggcaccgtgccctgctcagaacagaggccggggccttcgagtacgtgcctgaccccaccnttgagaacttcacaggtggcgtcaagaagcaggtcaacaagctcatccacgcccggggcaccaatctgaacaaggcgatgacgctgcaggaggccgaggccttcgtgggtgccgagcgctgcaccatgaagacgctgacggagaccgacctgtactgtgagcccccggaggtgcagcccccgcccaagcggcggcagaaacgagacaccacacacaacctgcccgagttcattgtgaagttcggctctcgcgagtgggtgctgggccgcgtggagtacgacacacgggtgagcgacgtgccgctcagcctcatcttgccgctggtcatcgtgcccatggtggtcgtcatcgcggtgtctgtctactgctactggaggaagagccagcaggccgaacgagagtatgagaagatcaagtcccagctggagggcctggaggagagcgtgcgggaccgctgcaagaaggaattcacagacctgatgatcgagatggaggaccagaccaacgacgtgcacgaggccggcatccccgtgctggactacaagacctacaccgaccgcgtcttcttcctgccctccaaggacggcgacaaggacgtgatgatcaccggcaagctggacatcccngagccgcggcggccggtggtggagcaggccctctaccagttctccaacctgctgaacagcaagtctttcctcatcaatttcatccacaccctggagaaccagcgggagttctcggcccgcgccaaggtctacttcgcgtccctgctgacggtggcgctgcacgggaaactggagtactacacggacatcatgcacacgctcttcctggagctcctggagcagtacgtggtggccaagaaccccaagctgatgctgcgcaggtctgagactgtggtggagaggatgctgtccaactggatgtccatctgcctgtaccagtacctcaaggacagtgccggggagcccctgtacaagctcttcaaggccatcaaacatcaggtggaaaagggcccggtggatgcggtacagaagaaggccaagtacactctcaacgacacggggctgctgggggatgatgtggagtacgcacccctgacggtgagcgtgatcgtgcaggacgagggagtggacgccatcccggtgaaggtcctcaactgtgacaccatctcccaggtcaaggagaagatcattgaccaggtgtaccgtgggcagccctgctcctgctggcccaggccagacagcgtggtcctggagtggcgtccgggctccacagcgcagatcctgtcggacctggacctgacgtcacagcgggagggccggtggaagcgcgtcaacacccttatgcactacaatgtccgggatggagccaccctcatcctgtccaaggtgggggtctcccagcagccggaggacagccagcaggacctgcctggggagcgccatgccctcctggaggaggagaaccgggtgtggcacctggtgcggccgaccgacgaggtggacgagggcaagtccaagagaggcagcgtgaaagagaaggagcggacgaaggccatcaccgagatctacctgacgcggctgctctcagtcaagggcacactgcagcagtttgtggacaacttcttccagagcgtgctggcgcctgggcacgcggtgccacctgcagtcaagtacttcttcgacttcctggacgagcaggcagagaagcacaacatccaggatgaagacaccatccacatctggaagacgaacagtttaccgctccggttctgggtgaacatcctcaagaacccccacttcatctttgacgtgcatgtccacgaggtggtggacgcctcgctgtcagtcatcgcgcagaccttcatggatgcctgcacgcgcacggagcataagctgagccgcgattctcccagcaacaagctgctgtacgccaaggagatctccacctacaagaagatggtggaggattactacaaggggatccggcagatggtgcaggtcagcgaccaggacatgaacacacacctggcagagatttcccgggcgcacacggactccttgaacaccctcgtggcactccaccagctctaccaatacacgcagaagtactatgacgagatcatcaatgccttggaggaggatcctgccgcccagaagatgcagctggccttccgcctgcagcagattgccgctgcactggagaacaaggtcactgacctctgacctacaatctccagtgctgccttgggacataggtacctgaggtacctgagagcccctcaggggaggaggccgagtggctgtggctgaggcccccaccctcccctggaacgcgccccaagccggagtgggtgcagccggaacccgcccagcgtctagactgtagcatcttcctctgagcaataccgccgggcaccgcaccagcaccagccccagccccagctccctccggccgcagaaccagcatcgggtgttcactgtcgagtctcgagtgatttgaaaatgtgccttacgctgccacgctgggggcagctggcctccgcctccgcccacgcaccagcagccgcctccatgccctaggttgggcccctgggggatctgagggcctgtggcccccagggcaagttcccagatcctatgtctgtctgtccaccacgagatgggaggaggagaaaaagcggtacgatgccttcctgacctcaccggcctccccaagggtgccggcactctgggtggactcacggctgctgggccccacgtcaaaggtcaagtgagacgtaggtcaagtcctacgtcggggcccagacatcctggggtcctggtctgtcagacaggctgccctagagccccacccagtccggggggactgggagcagttccaagaccaccccacccctttttgtaaatcttgttcattgtaaatcaaatacagcgtctttttcactagaaaaaaaatcacaaaaaaa

SEQ ID NO: 455358 - DNA, 4898 bp, Homo sapiens
  misc_feature (3207)..(3207): n is a, c, g, or t
  misc_feature (3299)..(3299): n is a, c, g, or t
  misc_feature (3925)..(3925): n is a, c, g, or t
gcggggggcaatggcactgcagctctgggccctgaccctgctgggcctgctgggcgcaggtgccagcctgaggccccgcaagctggacttcttccgcagcgagaaagagctgaaccacctggctgtggatgaggcctcaggcgtggtgtacctgggggcggtgaatgccctctaccagctggatgcgaagctgcagctggagcagcaggtggccacgggcccggccctggacaacaagaagtgcacgccgcccatcgaggccagccagtgccatgaggctgagatgactgacaatgtcaaccagctgctgctgctcgaccctcccaggaagcgcctggtggagtgcggcagcctcttcaagggcatctgcgctctgcgcgccctgagcaacatctccctccgcctgttctacgaggacggcagcggggagaagtctttcgtggccagcaatgatgagggcgtggccacagtggggctggtgagctccacgggtcctggtggtgaccgcgtgctgtttgtgggcaaaggcaatgggccacacgacaacggcatcatcgtgagcactcggctgttggaccggactgacagcagggaggcctttgaagcctacacggaccacgccacctacaaggccggctacctgtccaccaacacacagcagttcgtggcggccttcgaggacggcccctacgtcttctttgtcttcaaccagcaggacaagcacccggcccggaaccgcacgctgctggcacgcatgtgcagagaagaccccaactactactcctacctggagatggacctgcagtgccgggaccccgacatccacgccgctgcctttggcacctgcctggccgcctccgtggctgcgcctggctctggcagggtgctatatgctgtcttcagcagagacagccggagcagtggggggcccggtgcgggcctctgcctgttcccgctggacaaggtgcacgccaagatggaggccaaccgcaacgcctgttacacaggcacccgggaggcccgtgacatcttctacaagcccttccacggcgatatccagtgcggcggccacgcgccgggctccagcaagagcttcccatgtggctcggagcacctgccctacccgctgggcagccgcgacgggctcagaggcacagccgtgctgcagcgtggaggcctgaacctcacggccgtgacggtcgccgccgagaacaaccacactgttgcttttctgggcacctctgatggccggatcctcaaggtgtacctcaccccagatggcacctcctcagagtacgactctatccttgtggagataaacaagagagtcaagcgcgacctggtactgtctggagacctgggcagcctgtacgccatgacccaggacaaggtgttccggctgccggtgcaggagtgcctgagctacccgacctgcacccagtgccgcgactcccaggacccctactgcggctggtgcgtcgtcgagggacgatgcacccggaaggccgagtgtccgcgggccgaggaggccagccactggctgtggagccgaagcaagtcctgcgtggccgtcaccagcgcccagccacagaacatgagccggcgggcccagggggaggtgcagctgaccgtcagccccctccctgccctgagcgaggaggacgagttgctgtgcctttttggggagtcgccgccacaccccgcccgcgtggagggcgaggccgtcatctgcaactccccaagcagcatccccgtcacaccgccaggccaggaccacgtggccgtgaccatccagctcctccttagacgaggcaacatcttcctcacgtcctaccagtaccccttctacgactgccgccaggccatgagcctggaggagaacctgccgtgcatctcctgcgtgagcaaccgctggacctgccagtgggacctgcgctaccacgagtgccgggaggcttcgcccaaccctgaggacggcatcgtccgtgcccacatggaggacagctgtccccagttcctgggacccagccccctggtgatccccatgaaccacgagacagatgtgaacttccagggcaagaacctggacaccgtgaagggttcctccctgcacgtgggcagtgacttgctcaagttcatggagccggtgaccatgcaggaatctgggaccttcgcctttcggaccccaaagctgtcccacgatgccaacgagacgctgcccctgcacctctacgtcaagtcttacggcaagaatatcgacagcaagctccatgtgaccctctacaactgctcctttggccgcagcgactgcagcctgtgccgggccgctaaccccgactacaggtgtgcgtggtgcgggggccagagcaggtgcgtgtatgaggccctgtgcaacaccacctccgagtgcccgccgcccgtcatcaccaggatccagcctgagacgggccccctgggtgggggcatccgcatcaccatcctggggtccaatttgggcgtccaagcaggggacatccagaggatctctgtggccggccggaactgctcctttcagccggaacgttactccgtgtccacccggatcgtgtgtgtgatcgaggctgcggagacgcctttcacggggggtgtcgaggtggacgtcttcgggaaactgggccgttcgcctcccaatgtccagttcaccttccaacagcccaagcctctcagtgtggagccgcagcagggaccgcaggcgggcggcaccacactgaccatccacggcacccacctggacacgggctcccaggaggacgtgcgggtgaccctcaacggcgtcccgtgtaaagtgacgaagtttggggcgcagctccagtgtgtcactggcccccaggcgacacggggccagatgcttctggaggtctcctacggggggtcccccgtgcccaaccccggcatcttcttcacctaccgcgaaaaccccgtactgcgagccttcgagccgctacgaagctttgccagtggtggccgcagcatcaacgtcacgggtcagggcttcagcctgatccagaggtttgccatggtggtcatcgcggagcccctgcagtcctggcagccgccgcgggaggctgaatccctgcagcccatgacggtggtgggtacagactacgtgttccacaatgacaccaaggtcgtcttcctgtccccggctgtgcctgaggagccagaggnctacaacctcacggtgctgatcgagatggacgggcaccgtgccctgctcagaacagaggccggggccttcgagtacgtgcctgaccccaccnttgagaacttcacaggtggcgtcaagaagcaggtcaacaagctcatccacgcccggggcaccaatctgaacaaggcgatgacgctgcaggaggccgaggccttcgtgggtgccgagcgctgcaccatgaagacgctgacggagaccgacctgtactgtgagcccccggaggtgcagcccccgcccaagcggcggcagaaacgagacaccacacacaacctgcccgagttcattgtgaagttcggctctcgcgagtgggtgctgggccgcgtggagtacgacacacgggtgagcgacgtgccgctcagcctcatcttgccgctggtcatcgtgcccatggtggtcgtcatcgcggtgtctgtctactgctactggaggaagagccagcaggccgaacgagagtatgagaagatcaagtcccagctggagggcctggaggagagcgtgcgggaccgctgcaagaaggaattcacagacctgatgatcgagatggaggaccagaccaacgacgtgcacgaggccggcatccccgtgctggactacaagacctacaccgaccgcgtcttcttcctgccctccaaggacggcgacaaggacgtgatgatcaccggcaagctggacatcccngagccgcggcggccggtggtggagcaggccctctaccagttctccaacctgctgaacagcaagtctttcctcatcaatttcatccacaccctggagaaccagcgggagttctcggcccgcgccaaggtctacttcgcgtccctgctgacggtggcgctgcacgggaaactggagtactacacggacatcatgcacacgctcttcctggagctcctggagcagtacgtggtggccaagaaccccaagctgatgctgcgcaggtctgagactgtggtggagaggatgctgtccaactggatgtccatctgcctgtaccagtacctcaaggacagtgccggggagcccctgtacaagctcttcaaggccatcaaacatcaggtggaaaagggcccggtggatgcggtacagaagaaggccaagtacactctcaacgacacggggctgctgggggatgatgtggagtacgcacccctgacggtgagcgtgatcgtgcaggacgagggagtggacgccatcccggtgaaggtcctcaactgtgacaccatctcccaggtcaaggagaagatcattgaccaggtgtaccgtgggcagccctgctcctgctggcccaggccagacagcgtggtcctggagtggcgtccgggctccacagcgcagatcctgtcggacctggacctgacgtcacagcgggagggccggtggaagcgcgtcaacacccttatgcactacaatgtccgggatggagccatcccggtgaaggtcctcaactgtgacaccatctcccacgtcaaaggtcaagtgagacgtaggtcaagtcctacgtcggggcccagacatcctggggtcctggtctgtcagacaggctgccctagagccccacccagtccggggggactgggagcagttccaagaccaccccacccctttttgtaaatcttgttcattgtaaatcaaatacagcgtctttttcact

SEQ ID NO: 455359 - DNA, 796 bp, Homo sapiens
  misc_feature (754)..(755): n is a, c, g, or t
tagtcgttgtgacgccattcttctgcgacggcgcggacctggagcttccgcgcggtggcttcactctcctgtaaaacgctagagcggcgagttgttacctgcgtcctctgacctgagagcgaaggggaaagcggcgagatgactgaccgctacaccatccatagccagctggagcacctgcagtccaagtacatcggcacgggccacgccgacaccaccaagtgggagtggctggtgaaccaacaccgcgactcgtactgctcctacatgggccacttcgaccttctcaactacttcgccattgcggagaatgagagcaaagcgcgagtccgcttcaacttgatggaaaagatgcttcagccttgtggaccgccagccgacaagcccgaggagaactgagactctgccttaccaccgcagtgcggggcacctctcccagcgtttctccggtttgccaatcctcttaagtattcctgtctccaaaggaccggctctccatggctcctgcgcctcgtgctttccgcgtacagaagtgcttgcccggggagtcccgcctgacctgccttcatgtggacccttagaacagcactgggagaccagcaggactcctgagaactgtgctggtggagaggtcctagagccggcgagcgtttgagaagagggcatggcgctggagtgagatgggatttggcgtctcgtttttggctaattgattgtcattggctttttccataaagtttagaaatcggggagnnagcttttgttcggggccccattgctccttggccattcccct

SEQ ID NO: 455360 - DNA, 1088 bp, Homo sapiens
  misc_feature (362)..(362): n is a, c, g, or t
tccagaggatccacacacttcgatcgcggagaagacacctttgactgtgatacctgtgcaatgaccaccatgcatctcttgtttagggtagcttcatttataaaggtaaaagcactggttcttggcacttcagaagcctttagaattttcactcctaacagtgcaattaatgaaacaactgaacaggacctggaatattataaaagagaatagcgaaagattcttgacaggtcatgtgccttcaagtcctgttaatttgatgaatcagtaggagatgaaatcaatataaacctgaaggaattctcccacacttcgatcgcggagaatgagagcaaagcgcgagtccgcttcaacttgatggnaaagatgcttcagccttgtggaccgccagccgacaagcccgaggagaactgagactctgccttaccaccgcagtgcggggcacctctcccagcgtttctccggtttgccaatcctcttaagtattcctgtctccaaaggaccggctctccatggctccgcgactcgtactgctcctacatgggccacttcgaccttctcaactacttcgccattgcggagaatgagagcaaagcgcgagtccgcttcaacttgatggaaaagatgcttcagccttgtggaccgccagccgacaagcccgaggagaactgagactctgccttaccaccgcagtgcggggcacctctcccagcgtttctccggtttgccaatcctcttaagtattcctgtctccaaaggaccggctctccatggctcctgcgcctcgtgctttccgcgtacagaagtgcttgcccggggagtcccgcctgacctgccttcatgtggacccttagaacagcactgggagaccagcaggactcctgagaactgtgctggtggagaggtcctagagccggcgagcgtttgagaagagggcatggcgctggagtgagatgggatttggcgtctcgtttttggctaattgattgtcattggctttttccataaagtttagaaatcgttcagtctcttggtgtgaactttctgtgttagggtggaaggctccggaaagagctgagcgggaagtg

SEQ ID NO: 455361 - DNA, 790 bp, Homo sapiens
tagtcgttgtgacgccattcttctgcgacggcgcggacctggagcttccgcgcggtggcttcactctcctgtaaaacgctagagcggcgagttgttacctgcgtcctctgacctgagagcgaaggggaaagcggcgagatgactgaccgctacaccatccatagccagctggagcacctgcagtccaagtacatcggcacgggccacgccgacaccaccaagtgggagtggctggtgaaccaacaccgcgactcgtactgctcctacatgggccacttcgaccttctcaactacttcgccattgcggagaatgagagcaaagcgcgagtccgcttcaacttgatggaaaagatgcttcagccttgtggaccgccagccgacaagcccgaggagaactgagactctgccttaccaccgcagtgcggggcacctctcccagcgtttctccggtttgccaatcctcttaagtattcctgtctccaaaggaccggctctccatggctcctgcgcctcgtgctttccgcgtacagaagtgcttgcccggggagtcccgcctgacctgccttcatgtggacccttagaacagcactgggagaccagcaggactcctgagaactgtgctggtggagaggtcctagagccggcgagcgtttgagaagagggcatggcgctggagtgagatgggatttggcgtctcgtttttggctaattgattgtcattggctttttccataaagtttagaaaaacaaccaactcgaggcggggcccggacccttgcgctatgtgggt

SEQ ID NO: 455362 - DNA, 469 bp, Homo sapiens
gtggcccggagctgggtttgtcgcaaaacttatgtgacccgcgggagaactgagactctgccttaccaccgcagtgcggggcacctctcccagcgtttctccggtttgccaatcctcttaagtattcctgtctccaaaggaccggctctccatggctcctgcgcctcgtgctttccgcgtacagaagtgcttgcccggggagtcccgcctgacctgccttcatgtggacccttagaacagcactgggagaccagcaggactcctgagaactgtgctggtggagaggtcctagagccggcgagcgtttgagaagagggcatggcgctggagtgagatgggatttggcgtctcgtttttggctaattgattgtcattggctttttccataaagtttagaaatcgttcagtctcttggtgtgaactttctgtgttagggtggaaggctccggaaagagctgagcgggaagtg

SEQ ID NO: 455363 - DNA, 815 bp, Homo sapiens
tagtcgttgtgacgccattcttctgcgacggcgcggacctggagcttccgcgcggtggcttcactctcctgtaaaacgctagagcggcgagttgttacctgcgtcctctgacctgagagcgaaggggaaagcggcgagatgactgaccgctacaccatccatagccagctggagcacctgcagtccaagtacatcggcacgggccacgccgacaccaccaagtgggagtggctggtgaaccaacaccgcgactcgtactgctcctacatgggccacttcgaccttctcaactacttcgccattgcggagaatgagagcaaagcgcgagtccgcttcaacttgatggaaaagatgcttcagccttgtggaccgccagccgacaagcccgaggagaactgagactctgccttaccaccgcagtgcggggcacctctcccagcgtttctccggtttgccaatcctcttaagtattcctgtctccaaaggaccggctctccatggctcctgcgcctcgtgctttccgcgtacagaagtgcttgcccggggagtcccgcctgacctgccttcatgtggacccttagaacagcactgggagaccagcaggactcctgagaactgtgctggtggagaggtcctagagccggcgagcgtttgagaagagggcatggcgctggagtgagatgggatttggcgtctcgtttttggctaattgattgtcattggctttttccataaagtttagaaatcgttcagtctcttggtgtgaactttctgtgttagggtggaaggctccggaaagagctgagcgggaagtg

SEQ ID NO: 455364 - DNA, 761 bp, Homo sapiens
tagtcgttgtgacgccattcttctgcgacggcgcggacctggagcttccgcgcggtggcttcactctcctgtaaaacgctagagcggcgagttgttacctgcgtcctctgacctgagagcgaaggggaaagcggcgagatgactgaccgctacaccatccatagccagctggagcacctgcagtccaagtacatcggcacgggccacgccgacaccaccaagtgggagtggctggtgaaccaacaccgcgactcgtactgctcctacatgggccacttcgaccttctcaactacttcgccattgcggagaatgagagcaaagcgcgagtccgcttcaacttgatggactctgccttaccaccgcagtgcggggcacctctcccagcgtttctccggtttgccaatcctcttaagtattcctgtctccaaaggaccggctctccatggctcctgcgcctcgtgctttccgcgtacagaagtgcttgcccggggagtcccgcctgacctgccttcatgtggacccttagaacagcactgggagaccagcaggactcctgagaactgtgctggtggagaggtcctagagccggcgagcgtttgagaagagggcatggcgctggagtgagatgggatttggcgtctcgtttttggctaattgattgtcattggctttttccataaagtttagaaatcgttcagtctcttggtgtgaactttctgtgttagggtggaaggctccggaaagagctgagcgggaagtg

SEQ ID NO: 455365 - DNA, 4056 bp, Homo sapiens
gagaagcacctgaacgtgtccaagaagttccaccaggtcagcatcctgctggggatcgagctgctgtaccaagtgaacttcagcagggaggccctccaggagcgccgggcccgctgcgagacgcagaacattgaccccgtggtgtggaccaaccagcgggtgctcaagtgggttcgagacatcgacctgaaggagtacgcagacaacctgaccaacagcggcgtccatggtgctgtgctggtgctggagcccacattcaatgccgaggccatggccactgccctgggcatccccagtgggaagcacatcctccggagacacctggcagaggagatgagcgccgtcttccacccagccaactccacaggcatccgggaggctgagcgttttggaacgccccctggcagggcctccagcgtcacgcgggcaggaaaggaggagaacagcagcggtctcaagtacaaggctggccggctgcccctggggaagataggaaggggcttcagcagcaaagatcccgatttccatgatgactatggctctcttcaaaacgaagattgcggagacgatgacccccagagcaggctggaacagtgccgtctggaaggctacaacagcctggaggtcaccaacgtgtaaggaactggtggctccaccagacccaacgtgagagacccaggaaggaagagaagccagatggccccaggtgtcgttctcactgtacatagcggccgcaggctgaggatgtcccttgctcctgggcaaaatcccgatggactctgcggtttcagctccacagcgcccaggagagagaagacaccagcccacctgtcttgggtgggccatggactttcctgttcagctggagatgggcccagaggacctgtcacagtgtccggccctgcctccatccaggatacacaggctccacctcagagtgaccgtcactgtggagcagccaagcagtccctggagccttaaacggagctgccaaggtgggaagaggcccacagttccctaaaacacccttccggcgggagcaggggggaccccaaccccacaccccagcgcccagtgcattggcagagccgggtgcaggaagtgctgcctcttgccgagacgtcggacagggcgggggttggggaactctcggctacagcatcttacccttgactgagaacttgggtcctgacttggctcactgaatctctcttgggagaatgcaaaatccttccacctgaaaagctctgtgacacatgggggtggacgtattgaagagctgtttgccgatccacccaggagtggctacgctgagtggggagccggtgaatgatccgtgcaggagtggggcttagcagccacatttctaggagatgcagatatcctatcaccagaatgaaagctattgggacaacaggatcggggatgaccgatggccccatatggtgaatctctggcctgtggtttggctttactgagattccaaaccccactatctgcactccgtgacagtggtatggagtgtggcaatgagtctggggtctggggcagggaaatgcttgacattgttaacccaacaaacctttgttgtgatgtccctgtcacctgaaacataggtgacatagctcaccaatgtcctaaccgagacacaaactccacagagcaaaatcatttggtattgggtggggagaaccccagcccttttcttgacctgccactgttatgctgtgtggcttcttcccagtggcctcacctctctgtgcctcgatgtcttcatctacgatacttctggttccctcccagggacatcgtgaggattaacacttgctaatatctgtaacacaatttgtaacctctcaggagacaatgggaagttatggggtagctaatttcccatttacaacacagaaatgatatagagctagttcgctccaactctttaggttgaagcagtgtgcaaaaggaagaaaagaaatgtttaatgttcagacctgccaagagcctccaacagggctcaagaaacatataaatcccatgagcacagccttgaaaaccagtttgactcaagccttcgggcctcagttcattgaccagatgacagccacgtgatgattagggaaggacggatgcattgcgattctgcttacacatcgggttatcaaagcgagtcacttgttggaaccatgatgctcgacctccttcaaggccgtttgcactggggcttgagtttccaagattcacaacaggtgtcagcctctgagaaccctcaaagcgtgtgttcttcaacctggcaaattgtttcctctcatgggggaagccgagctctgatgaacttgagaattacacctctctcatgccgaagaccgtggtgttccccctaatgacataaacgcagcctttcttgctgtctgagaccaaatgtctagttggtagacaggtggatgtttggcctcctaagggcacacttctgatcctgggccccaggtggtgaatctctggcatgtggcttggctttgttgagactccaaattccattatcttcatgacattcggcctcatccatagggtcctgaagctgcagtccacagctcagaaaggagaggtgagacctccctccaacctggtgccacaggtctctcccaagccacatccagcctggatgacctgggaccccagaaactgccgtttgggaggcagcaacagcaacgtgcccaggcaggcagttattcccacagagtgagccagaattgtagcagggcacttgaatgcagagctgatgattttgaaaccaacgttcacccaacttgtcagaaatggcacttacatggttcgatcttgctggagacaagtggacaattgggggtcactggcagagacggtattgcccaaaatgttcacagcaggaggccagcaggcctgaggcaacacgggcaaccgcgaatgcctcttttggtttaaattatgccatcacaaccctctttcacccatgaggctccccatccctgacagccaggtgagcatttggagctggtttctcaacatgaggatgggttggttgttaaattaacaacctccacagtatcagattgagtgagctttgtctgctggaaaaacctgaaacgtcaactctgcttcaaggtcggcaagaagaacagaaggcggagacttggcagagagactcaagctgattgtcacaggctacagaggggccagctccagaacagtgaccagctacatcctgtccaagcagcccgagtgtggtcttggtccctgcagggcgatgtgggcatctggacctggggacgatgtggatgcacttcttggaaagctgttgtagcttgtgcctgtgggtggagaaggcacctgcctggtagactctcagctttctgacccccaggagcctctgcgaggcccctttgtccttggctgagccggacctttcttttggaaatctgtctgtctgttggcatcgctgttttcagaccccaggctgcagaggaggggagaagccacacaacaatctggacccaataaagtggagagaagggcgtctctacacagcccggccagcgtggagggccccaggacagggacccaaaagcttgacgtcactgaacagggctgggtactggcagaacaggaagatttggccagaggtgacctcagtgttccctccaggggcatccaggcccctctgacctggggagaagaaggcccatgctcaggcccacctccctcttcccatcagagcccatgcgtcctgggcaccaccacttccactctgcttttcgaggctccggagggctcttcctgctgtgaaaggaaaggagaagaaagcctgtgggcaatggcaacctctgagtctggcattcttgccaatggctggccagcgaggagaatctcccgagccctgacacacaaaggcattttgtggctgcagaggaaatgggttggctctgaacaaagatgcagtttctagggccgtggccccaaatcgcttccccgagagtgaattttaacactgtaacaataaatactactgcacagcaaaaaatg

SEQ ID NO: 455366 - DNA, 3679 bp, Homo sapiens
tcacagagcaattagaattggagacatttcccagaccttcattcttaattcttgtttctcttcttcctgtcctttgatcatattcttctcttctcagctgcccctggggaagataggaaggggcttcagcagcaaagatcccgatttccatgatgactatggctctcttcaaaacgaagattgcggagacgatgacccccagagcaggctggaacagtgccgtctggaaggctacaacagcctggaggtcaccaacgtgtaaggaactggtggctccaccagacccaacgtgagagacccaggaaggaagagaagccagatggccccaggtgtcgttctcactgtacatagcggccgcaggctgaggatgtcccttgctcctgggcaaaatcccgatggactctgcggtttcagctccacagcgcccaggagagagaagacaccagcccacctgtcttgggtgggccatggactttcctgttcagctggagatgggcccagaggacctgtcacagtgtccggccctgcctccatccaggatacacaggctccacctcagagtgaccgtcactgtggagcagccaagcagtccctggagccttaaacggagctgccaaggtgggaagaggcccacagttccctaaaacacccttccggcgggagcaggggggaccccaaccccacaccccagcgcccagtgcattggcagagccgggtgcaggaagtgctgcctcttgccgagacgtcggacagggcgggggttggggaactctcggctacagcatcttacccttgactgagaacttgggtcctgacttggctcactgaatctctcttgggagaatgcaaaatccttccacctgaaaagctctgtgacacatgggggtggacgtattgaagagctgtttgccgatccacccaggagtggctacgctgagtggggagccggtgaatgatccgtgcaggagtggggcttagcagccacatttctaggagatgcagatatcctatcaccagaatgaaagctattgggacaacaggatcggggatgaccgatggccccatatggtgaatctctggcctgtggtttggctttactgagattccaaaccccactatctgcactccgtgacagtggtatggagtgtggcaatgagtctggggtctggggcagggaaatgcttgacattgttaacccaacaaacctttgttgtgatgtccctgtcacctgaaacataggtgacatagctcaccaatgtcctaaccgagacacaaactccacagagcaaaatcatttggtattgggtggggagaaccccagcccttttcttgacctgccactgttatgctgtgtggcttcttcccagtggcctcacctctctgtgcctcgatgtcttcatctacgatacttctggttccctcccagggacatcgtgaggattaacacttgctaatatctgtaacacaatttgtaacctctcaggagacaatgggaagttatggggtagctaatttcccatttacaacacagaaatgatatagagctagttcgctccaactctttaggttgaagcagtgtgcaaaaggaagaaaagaaatgtttaatgttcagacctgccaagagcctccaacagggctcaagaaacatataaatcccatgagcacagccttgaaaaccagtttgactcaagccttcgggcctcagttcattgaccagatgacagccacgtgatgattagggaaggacggatgcattgcgattctgcttacacatcgggttatcaaagcgagtcacttgttggaaccatgatgctcgacctccttcaaggccgtttgcactggggcttgagtttccaagattcacaacaggtgtcagcctctgagaaccctcaaagcgtgtgttcttcaacctggcaaattgtttcctctcatgggggaagccgagctctgatgaacttgagaattacacctctctcatgccgaagaccgtggtgttccccctaatgacataaacgcagcctttcttgctgtctgagaccaaatgtctagttggtagacaggtggatgtttggcctcctaagggcacacttctgatcctgggccccaggtggtgaatctctggcatgtggcttggctttgttgagactccaaattccattatcttcatgacattcggcctcatccatagggtcctgaagctgcagtccacagctcagaaaggagaggtgagacctccctccaacctggtgccacaggtctctcccaagccacatccagcctggatgacctgggaccccagaaactgccgtttgggaggcagcaacagcaacgtgcccaggcaggcagttattcccacagagtgagccagaattgtagcagggcacttgaatgcagagctgatgattttgaaaccaacgttcacccaacttgtcagaaatggcacttacatggttcgatcttgctggagacaagtggacaattgggggtcactggcagagacggtattgcccaaaatgttcacagcaggaggccagcaggcctgaggcaacacgggcaaccgcgaatgcctcttttggtttaaattatgccatcacaaccctctttcacccatgaggctccccatccctgacagccaggtgagcatttggagctggtttctcaacatgaggatgggttggttgttaaattaacaacctccacagtatcagattgagtgagctttgtctgctggaaaaacctgaaacgtcaactctgcttcaaggtcggcaagaagaacagaaggcggagacttggcagagagactcaagctgattgtcacaggctacagaggggccagctccagaacagtgaccagctacatcctgtccaagcagcccgagtgtggtcttggtccctgcagggcgatgtgggcatctggacctggggacgatgtggatgcacttcttggaaagctgttgtagcttgtgcctgtgggtggagaaggcacctgcctggtagactctcagctttctgacccccaggagcctctgcgaggcccctttgtccttggctgagccggacctttcttttggaaatctgtctgtctgttggcatcgctgttttcagaccccaggctgcagaggaggggagaagccacacaacaatctggacccaataaagtggagagaagggcgtctctacacagcccggccagcgtggagggccccaggacagggacccaaaagcttgacgtcactgaacagggctgggtactggcagaacaggaagatttggccagaggtgacctcagtgttccctccaggggcatccaggcccctctgacctggggagaagaaggcccatgctcaggcccacctccctcttcccatcagagcccatgcgtcctgggcaccaccacttccactctgcttttcgaggctccggagggctcttcctgctgtgaaaggaaaggagaagaaagcctgtgggcaatggcaacctctgagtctggcattcttgccaatggctggccagcgaggagaatctcccgagccctgacacacaaaggcattttgtggctgcagaggaaatgggttggctctgaacaaagatgcagtttctagggccgtggccccaaatcgcttccccgagagtgaattttaacactgtaacaataaatactactgcacagcaaaaaatg

SEQ ID NO: 455367 - DNA, 713 bp, Homo sapiens
ttttttcacctaaggaagacatttctaccacttagagctgttcagagagctgaaacaggctgcttgggagaccatagctctccttccccggaaatggtcaggcagagactgtaattccaatgtcagggagggattgaataaaatgacctccaacgtgccttccagcctaagaagtctggaatctttgcaggaatgtgagatggttctgggggctggagtttgcctttgattctgactgctctcttttgtctcacatttttcagctgcatttggctgctctgaacatgccattttctggggacattcgagctgattttcagtgcttcaagcaggccagagctgcaggactgttgtccacctaccgagcattcttatcttcccatttgcaagatctgtccaccattgtgaggaaagcagagagatacagccttcccatagtgaacctcaaggtaaaaataaatatggttcccattgccttctgcatgcattggtcgctacagggcctggaggcagttttcattcctgacatcaacagaagactgttgacttaagcctgctctctcccttactggctatgtcactttgggtgggttctttgccttccctgaacctcagttttctttatgcttgtgtgacccttgaagcatgcaggaggagagatagtgataacttctttcattgatacagggtattaagctcatggtgctagctct

SEQ ID NO: 455368 - DNA, 5620 bp, Homo sapiens
ggagtcgggtttcagagcgcgggtgactcggggcgcgggccgggagccgggattctgcccgccgccgccgctgccgagcgccgcctttgttccctgcaggaagggcgagcgcggcggccagcgctcagcgacccttcgtcctccgctaagctccaacgctctgctcgactagccgcgcgccttccggggctccgcagacccgcgagatggcaccaaggaggaacaacgggcagtgctggtgtctgctgatgctgctctcggtctccacgcccctccctgctgtcacccagacccgcggtgcgacagagactgcttcccagggtcacctggacctcacgcagctcatcggtgtcccgctgccctcgtccgtatcctttgtcacaggctatggtggcttcccggcctacagtttcgggcctggtgccaatgttggccgcccagccaggactctcatcccatccaccttcttcagggacttcgccatcaggctcgtggtgaagcccagcagcacccgtggtggcgtgctcttcgccatcactgacgccttccagaaggtcatctacctgggcctgcggctctcaggtgtggaggacggccaccagcggatcatcctctactacacggagccaggctcccatgtgtcccaagaggctgctgccttctcggtgcctgtgatgacccacaggtggaaccgcttcgccatgattgtccagggtgaggaagtgaccctcctcgtgaactgtgaggagcacagccgcatccccttccagcggtcctcccaggctttggcttttgagtccagcgctggaatcttcatgggcaatgcaggagctacagggctcgagagattcactggctccctccagcagctcaccgtgcaccccgaccccaggactcccgaggagctgtgtgaccctgaagagtcctcggcatctggagagaccagtgggctgcaggaggcagacggagtagctgagatcttagaagccgtcacctacactcaagcctcgcccaaagaagcaaaagttgaacccataaacacacctccaactccatcctccccctttgaagacatggaactttctggtgaacctgtacccgaggggaccctggaaaccaccaacatgagcatcatccagcacagcagccccaaacaagggtctggtgagatcctgaatgacacactggagggggttcattctgtggatggtgaccccattactgacagcggctcaggggctggggccttccttgacattgctgaagaaaagaatttagcagcaacagcagcggggctggccgaggtgcccatcagcactgctggagaagcagaggccagcagtgtgcccaccgggggaccaaccctctctatgtccacggagaacccagaggaaggggtcactccaggtccagataatgaagagcgtttacgcagcaacagcagcaggggaggccgaggcactcgccagcatgcctggggaagtggaggccagtggtgtggcccccggggagctggacctctccatgtccgcccagagcctcggggaagaggccactgtgggtccaagcagtgaagacagtttaacaacagctgcagctgcaaccgaagtgtccctcagtacttttgaggatgaggaagccagtggggtccccacagatggcctggctcccctcacagccaccatggcccctgagcgggcagtcacttctggtcctggtgatgaagaagacttggcagcagccacaacagaggagcccctcatcacagctgggggtgaagagtccggcagccctccccctgatgggccaccgctgcccctgcccacagtggctcctgaaagatggatcactccagctcaaagagaacatgtgggaatgaaaggacaggctgggcccaaaggagaaaagggtgatgctggggaggagcttcctggccctcctgaaccttctgggcctgttggacccacggcaggagcagaagcagagggctctggcctaggctggggctcggacgtcggctctggctctggtgacctggtgggcagtgagcagctgctgagaggtcctccaggacccccagggccacctggcttacctgggattccaggaaaaccaggaactgatgttttcatgggaccccctggatctcctggagaggatggacctgctggtgaacctgggcccccgggccctgagggacagcctggagttgatggagccaccggccttcccgggatgaaaggggagaagggagcaagagggcctaatggctcagttggtgaaaagggtgaccctggcaacagaggcttacctggacccccggggaaaaagggacaagctggccctcctggggtcatgggacccccagggcctcctggaccccctgggcccccaggccctggatgcacaatgggacttggattcgaggataccgaaggctctggaagcacccagctattgaatgaacccaaactctccagaccaacggctgcaattggtctcaaaggagagaaaggagaccggggacccaagggagaaagggggatggatggagccagtattgtgggaccccctgggccgagagggccacctgggcacatcaaggtcttgtctaattccttgatcaatatcacccatggattcatgaatttctcggacattcctgagctggtggggcctccggggccggacgggttgcctgggctgccaggatttccaggtcctagaggaccaaaaggtgacactggtttacctggctttccaggactaaaaggagaacagggcgagaagggagagccgggtgccatcctgacagaggacattcctctggaaaggctgatggggaaaaagggtgaacctggaatgcatggagccccaggaccaatggggcccaaaggaccaccaggacataaaggagaatttggccttcccgggcgacctggtcgcccaggactgaatggcctcaagggtaccaaaggagatccaggggtcattatgcagggcccacctggcttacctggccctccaggcccccctgggccacctggagctgtgattaacatcaaaggagccattttcccaatacccgtccgaccacactgcaaaatgccagttgatactgctcatcctgggagtccagagctcatcacttttcacggtgttaaaggagagaaaggatcctggggtcttcctggctcaaagggagaaaaaggcgaccagggagcccagggaccaccaggtcctccacttgatctagcttacctgagacactttctgaacaacttgaagggggagaatggagacaaggggttcaaaggtgaaaaaggagaaaaaggagacattaatggcagcttccttatgtctgggcctccaggcctgcccggaaatccaggcccggctggccaaaaaggggagacagtcgttgggccccaaggacccccaggtgctcctggtctgcctgggccacctggctttggaagacctggtgatcctgggccaccggggcccccggggccaccaggacctccagctatcctgggagcagctgtggcccttccaggtccccctggccctccaggacagccagggcttcccggatccagaaacctggtcacagcattcagcaacatggatgacatgctgcagaaagcgcatttggttatagaaggaacattcatctacctgagggacagcactgagtttttcattcgtgttagagatggctggaaaaaattacagctgggagaactgatccccattcctgccgacagccctccaccccctgcgctttccagcaacccacatcagcttctgcctccaccaaaccctatttcaagtgccaattatgagaagcctgctctgcatttggctgctctgaacatgccattttctggggacattcgagctgattttcagtgcttcaagcaggccagagctgcaggactgttgtccacctaccgagcattcttatcttcccatttgcaagatctgtccaccattgtgaggaaagcagagagatacagccttcccatagtgaacctcaagggccaagtactttttaataattgggactcaattttttctggccacggaggtcagttcaatatgcatattccaatatactcctttgatggtcgagacataatgacagatccttcttggccccagaaagtcatttggcatggctccagcccccatggcgtccgccttgtggataactactgtgaagcatggcgaaccgcggacacagcggtcacgggacttgcctccccgctgagcacggggaagattctggaccagaaagcatacagctgtgctaatcggctaattgtcctatgtatcgaaaacagtttcatgacagacgctaggaagtaatggccttctgatgattcttaaagagttttcaattttttcttatgtgaagagttgacactgaaatctaaaatgtttaattgttgtaaatattacagtttttttttttttactacatattctttacaacagcaaccaaagaaaacatacctcaatacactcaaaactgaagacatagaggactcagatcaaagacaaaatctgatccatatattggtgctagattctgcaggaaaccccagcagtgtgaacgcatcccaacataggttaagagcaagttgaaaacaaaggccatggcattctgccactgcatccttcagacagttatatcctccttttaaaccattgttgttgagtgtaagatgtccttcatgttttcttataaagtcagtgtttagaaatgttaccctttctaagttatatacagatcaaatgcttttttctttcacgtacatccatcatttgcaactgctgttcgtacacagaaacaggactgctcaaatgatcctatttgtattttctgatgctatcagactctaatgtttttttccctaaaatattattgccatcatgctttaggaattttatatttttacacaatcatattttagtatggtgtctgtttatgtaactctgacttgctggaaaagttgaaactccaaataatctgaaactagaaaagaaatagcacataattactaccttccccttggcggctctcctccccaacccccaccccacaattttatgacttccatttggcaattgttgaattataactgcgactgaaacaaacaggttcatagagatgaattttctgagaaacatatatctacatgttgtataattggattttttttccatgtaagtgaacataaaaacatcttttccgggtgctttcttcatttgactttttcccgctagttcctttattctccatcactgatgtggaagcagacctggggtgggtttgctaatcctgccacttgtgctgcccccaggcgatgatcagagaactgaaacgttttcccatcatgctcatctgccctggctgttgtcttccacctagtggggccagtgtaggttgtgtagagcctcagagtgggaaacaggatgagctgtgattctgccaccgtctcagggcatgactttgggcaagtcggcctctgtctctcaaggagattgggataagacaagcatagtattggctaccagtcattaaatatcagacttctgatatatcccattt

SEQ ID NO: 455369 - DNA, 5265 bp, Homo sapiens
ggagtcgggtttcagagcgcgggtgactcggggcgcgggccgggagccgggattctgcccgccgccgccgctgccgagcgccgcctttgttccctgcaggaagggcgagcgcggcggccagcgctcagcgacccttcgtcctccgctaagctccaacgctctgctcgactagccgcgcgccttccggggctccgcagacccgcgagatggcaccaaggaggaacaacgggcagtgctggtgtctgctgatgctgctctcggtctccacgcccctccctgctgtcacccagacccgcggtgcgacagagactgcttcccagggtcacctggacctcacgcagctcatcggtgtcccgctgccctcgtccgtatcctttgtcacaggctatggtggcttcccggcctacagtttcgggcctggtgccaatgttggccgcccagccaggactctcatcccatccaccttcttcagggacttcgccatcaggctcgtggtgaagcccagcagcacccgtggtggcgtgctcttcgccatcactgacgccttccagaaggtcatctacctgggcctgcggctctcaggtgtggaggacggccaccagcggatcatcctctactacacggagccaggctcccatgtgtcccaagaggctgctgccttctcggtgcctgtgatgacccacaggtggaaccgcttcgccatgattgtccagggtgaggaagtgaccctcctcgtgaactgtgaggagcacagccgcatccccttccagcggtcctcccaggctttggcttttgagtccagcgctggaatcttcatgggcaatgcaggagctacagggctcgagagattcactggctccctccagcagctcaccgtgcaccccgaccccaggactcccgaggagctgtgtgaccctgaagagtcctcggcatctggagagaccagtgggctgcaggaggcagacggagtagctgagatcttagaagccgtcacctacactcaagcctcgcccaaagaagcaaaagttgaacccataaacacacctccaactccatcctccccctttgaagacatggaactttctggtgaacctgtacccgaggggaccctggaaaccaccaacatgagcatcatccagcacagcagccccaaacaagggtctggtgagatcctgaatgacacactggagggggttcattctgtggatggtgaccccattactgacagcggctcaggggctggggccttccttgacattgctgaagaaaagaatttagcagcaacagcagcggggctggccgaggtgcccatcagcactgctggagaagcagaggccagcagtgtgcccaccgggggaccaaccctctctatgtccacggagaacccagaggaaggggtcactccaggtccagataatgaagagcgtttacgcagcaacagcagcaggggaggccgaggcactcgccagcatgcctggggaagtggaggccagtggtgtggcccccggggagctggacctctccatgtccgcccagagcctcggggaagaggccactgtgggtccaagcagtgaagacagtttaacaacagctgcagctgcaaccgaagtgtccctcagtacttttgaggatgaggaagccagtggggtccccacagatggcctggctcccctcacagccaccatggcccctgagcgggcagtcacttctggtcctggtgatgaagaagacttggcagcagccacaacagaggagcccctcatcacagctgggggtgaagagtccggcagccctccccctgatgggccaccgctgcccctgcccacagtggctcctgaaagatggatcactccagctcaaagagaacatgtgggaatgaaaggacaggctgggcccaaaggagaaaagggtgatgctggggaggagcttcctggccctcctgaaccttctgggcctgttggacccacggcaggagcagaagcagagggctctggcctaggctggggctcggacgtcggctctggctctggtgacctggtgggcagtgagcagctgctgagaggtcctccaggacccccagggccacctggcttacctgggattccaggaaaaccaggaactgatgttttcatgggaccccctggatctcctggagaggatggacctgctggtgaacctgggcccccgggccctgagggacagcctggagttgatggagccaccggccttcccgggatgaaaggggagaagggagcaagagggcctaatggctcagttggtgaaaagggtgaccctggcaacagaggcttacctggacccccggggaaaaagggacaagctggccctcctggggtcatgggacccccagggcctcctggaccccctgggcccccaggccctggatgcacaatgggacttggattcgaggataccgaaggctctggaagcacccagctattgaatgaacccaaactctccagaccaacggctgcaattggtctcaaaggagagaaaggagaccggggacccaagggagaaagggggatggatggagccagtattgtgggaccccctgggccgagagggccacctgggcacatcaaggtcttgtctaattccttgatcaatatcacccatggattcatgaatttctcggacattcctgagctggtggggcctccggggccggacgggttgcctgggctgccaggatttccaggtcctagaggaccaaaaggtgacactggtttacctggctttccaggactaaaaggagaacagggcgagaagggagagccgggtgccatcctgacagaggacattcctctggaaaggctgatggggaaaaagggtgaacctggaatgcatggagccccaggaccaatggggcccaaaggaccaccaggacataaaggagaatttggccttcccgggcgacctggtcgcccaggactgaatggcctcaagggtaccaaaggagatccaggggtcattatgcagggcccacctggcttacctggccctccaggcccccctgggccacctggagctgtgattaacatcaaaggagccattttcccaatacccgtccgaccacactgcaaaatgccagttgatactgctcatcctgggagtccagagctcatcacttttcacggtgttaaaggagagaaaggatcctggggtcttcctggctcaaagggagaaaaaggcgaccagggagcccagggaccaccaggtcctccacttgatctagcttacctgagacactttctgaacaacttgaagggggagaatggagacaaggggttcaaaggtgaaaaaggagaaaaaggagacattaatggcagcttccttatgtctgggcctccaggcctgcccggaaatccaggcccggctggccaaaaaggggagacagtcgttgggccccaaggacccccaggtgctcctggtctgcctgggccacctggctttggaagacctggtgatcctgggccaccggggcccccggggccaccaggacctccagctatcctgggagcagctgtggcccttccaggtccccctggccctccaggacagccagggcttcccggatccagaaacctggtcacagcattcagcaacatggatgacatgctgcagaaagcgcatttggttatagaaggaacattcatctacctgagggacagcactgagtttttcattcgtgttagagatggctggaaaaaattacagctgggagaactgatccccattcctgccgacagccctccaccccctgcgctttccagcaacccacatcagcttctgcctccaccaaaccctatttcaagtgccaattatgagaagcctgctctgcatttggctgctctgaacatgccattttctggggacattcgagctgattttcagtgcttcaagcaggccagagctgcaggactgttgtccacctaccgagcattcttatcttcccatttgcaagatctgtccaccattgtgaggaaagcagagagatacagccttcccatagtgaacctcaagggccaagtactttttaataattgggactcaattttttctggccacggaggtcagttcaatatgcatattccaatatactcctttgatggtcgagacataatgacagatccttcttggccccagaaagtcatttggcatggctccagcccccatggcgtccgccttgtggataactactgtgaagcatggcgaaccgcggacacagcggtcacgggacttgcctccccgctgagcacggggaagattctggaccagaaagcatacagctgtgctaatcggctaattgtcctatgtatcgaaaacagtttcatgacagacgctaggaagtaatggccttctgatgattcttaaagagttttcaattttttcttatgtgaagagttgacactgaaatctaaaatgtttaattgttgtaaatattacagtttttttttttttactacatattctttacaacagcaaccaaagaaaacatacctcaatacactcaaaactgaagacatagaggactcagatcaaagacaaaatctgatccatatattggtgctagattctgcaggaaaccccagcagtgtgaacgcatcccaacataggttaagagcaagttgaaaacaaaggccatggcattctgccactgcatccttcagacagttatatcctccttttaaaccattgttgttgagtgtaagatgtccttcatgttttcttataaagtcagtgtttagaaatgttaccctttctaagttatatacagatcaaatgcttttttctttcacgtacatccatcatttgcaactgctgttcgtacacagaaacaggactgctcaaatgatcctatttgtattttctgatgctatcagactctaatgtttttttccctaaaatattattgccatcatgctttaggaattttatatttttacacaatcatattttagtatggtgtctgtttatgtaactctgacttgctggaaaagttgaaactccaaataatctgaaactagaaaagaaatagcacataattactaccttccccttggcggctctcctccccaacccccaccccacaattttatgacttccatttggcaattgttgaattataactgcgactgaaacaaacaggttcatagagatgaattttctgagaaacatatatctacatgttgtataattggattttttttccatgtaagtgaacataaaaacatcttttccggg

SEQ ID NO: 455370 - DNA, 5212 bp, Homo sapiens
ggagtcgggtttcagagcgcgggtgactcggggcgcgggccgggagccgggattctgcccgccgccgccgctgccgagcgccgcctttgttccctgcaggaagggcgagcgcggcggccagcgctcagcgacccttcgtcctccgctaagctccaacgctctgctcgactagccgcgcgccttccggggctccgcagacccgcgagatggcaccaaggaggaacaacgggcagtgctggtgtctgctgatgctgctctcggtctccacgcccctccctgctgtcacccagacccgcggtgcgacagagactgcttcccagggtcacctggacctcacgcagctcatcggtgtcccgctgccctcgtccgtatcctttgtcacaggctatggtggcttcccggcctacagtttcgggcctggtgccaatgttggccgcccagccaggactctcatcccatccaccttcttcagggacttcgccatcaggctcgtggtgaagcccagcagcacccgtggtggcgtgctcttcgccatcactgacgccttccagaaggtcatctacctgggcctgcggctctcaggtgtggaggacggccaccagcggatcatcctctactacacggagccaggctcccatgtgtcccaagaggctgctgccttctcggtgcctgtgatgacccacaggtggaaccgcttcgccatgattgtccagggtgaggaagtgaccctcctcgtgaactgtgaggagcacagccgcatccccttccagcggtcctcccaggctttggcttttgagtccagcgctggaatcttcatgggcaatgcaggagctacagggctcgagagattcactggctccctccagcagctcaccgtgcaccccgaccccaggactcccgaggagctgtgtgaccctgaagagtcctcggcatctggagagaccagtgggctgcaggaggcagacggagtagctgagatcttagaagccgtcacctacactcaagcctcgcccaaagaagcaaaagttgaacccataaacacacctccaactccatcctccccctttgaagacatggaactttctggtgaacctgtacccgaggggaccctggaaaccaccaacatgagcatcatccagcacagcagccccaaacaagggtctggtgagatcctgaatgacacactggagggggttcattctgtggatggtgaccccattactgacagcggctcaggggctggggccttccttgacattgctgaagaaaagaatttagcagcaacagcagcggggctggccgaggtgcccatcagcactgctggagaagcagaggccagcagtgtgcccaccgggggaccaaccctctctatgtccacggagaacccagaggaaggggtcactccaggtccagataatgaagagcgtttacgcagcaacagcagcaggggaggccgaggcactcgccagcatgcctggggaagtggaggccagtggtgtggcccccggggagctggacctctccatgtccgcccagagcctcggggaagaggccactgtgggtccaagcagtgaagacagtttaacaacagctgcagctgcaaccgaagtgtccctcagtacttttgaggatgaggaagccagtggggtccccacagatggcctggctcccctcacagccaccatggcccctgagcgggcagtcacttctggtcctggtgatgaagaagacttggcagcagccacaacagaggagcccctcatcacagctgggggtgaagagtccggcagccctccccctgatgggccaccgctgcccctgcccacagtggctcctgaaagatggatcactccagctcaaagagaacatgtgggaatgaaaggacaggctgggcccaaaggagaaaagggtgatgctggggaggagcttcctggccctcctgaaccttctgggcctgttggacccacggcaggagcagaagcagagggctctggcctaggctggggctcggacgtcggctctggctctggtgacctggtgggcagtgagcagctgctgagaggtcctccaggacccccagggccacctggcttacctgggattccaggaaaaccaggaactgatgttttcatgggaccccctggatctcctggagaggatggacctgctggtgaacctgggcccccgggccctgagggacagcctggagttgatggagccaccggccttcccgggatgaaaggggagaagggagcaagagggcctaatggctcagttggtgaaaagggtgaccctggcaacagaggcttacctggacccccggggaaaaagggacaagctggccctcctggggtcatgggacccccagggcctcctggaccccctgggcccccaggccctggatgcacaatgggacttggattcgaggataccgaaggctctggaagcacccagctattgaatgaacccaaactctccagaccaacggctgcaattggtctcaaaggagagaaaggagaccggggacccaagggagaaagggggatggatggagccagtattgtgggaccccctgggccgagagggccacctgggcacatcaaggtcttgtctaattccttgatcaatatcacccatggattcatgaatttctcggacattcctgagctggtggggcctccggggccggacgggttgcctgggctgccaggatttccaggtcctagaggaccaaaaggtgacactggtttacctggctttccaggactaaaaggagaacagggcgagaagggagagccgggtgccatcctgacagaggacattcctctggaaaggctgatggggaaaaagggtgaacctggaatgcatggagccccaggaccaatggggcccaaaggaccaccaggacataaaggagaatttggccttcccgggcgacctggtcgcccaggactgaatggcctcaagggtaccaaaggagatccaggggtcattatgcagggcccacctggcttacctggccctccaggcccccctgggccacctggagctgtgattaacatcaaaggagccattttcccaatacccgtccgaccacactgcaaaatgccagttgatactgctcatcctgggagtccagagctcatcacttttcacggtgttaaaggagagaaaggatcctggggtcttcctggctcaaagggagaaaaaggcgaccagggagcccagggaccaccaggtcctccacttgatctagcttacctgagacactttctgaacaacttgaagggggagaatggagacaaggggttcaaaggtgaaaaaggagaaaaaggagacattaatggcagcttccttatgtctgggcctccaggcctgcccggaaatccaggcccggctggccaaaaaggggagacagtcgttgggccccaaggacccccaggtgctcctggtctgcctgggccacctggctttggaagacctggtgatcctgggccaccggggcccccggggccaccaggacctccagctatcctgggagcagctgtggcccttccaggtccccctggccctccaggacagccagggcttcccggatccagaaacctggtcacagcattcagcaacatggatgacatgctgcagaaagcgcatttggttatagaaggaacattcatctacctgagggacagcactgagtttttcattcgtgttagagatggctggaaaaaattacagctgggagaactgatccccattcctgccgacagccctccaccccctgcgctttccagcaacccacatcagcttctgcctccaccaaaccctatttcaagtgccaattatgagaagcctgctctgcatttggctgctctgaacatgccattttctggggacattcgagctgattttcagtgcttcaagcaggccagagctgcaggactgttgtccacctaccgagcattcttatcttcccatttgcaagatctgtccaccattgtgaggaaagcagagagatacagccttcccatagtgaacctcaagggccaagtactttttaataattgggactcaattttttctggccacggaggtcagttcaatatgcatattccaatatactcctttgatggtcgagacataatgacagatccttcttggccccagaaagtcatttggcatggctccagcccccatggcgtccgccttgtggataactactgtgaagcatggcgaaccgcggacacagcggtcacgggacttgcctccccgctgagcacggggaagattctggaccagaaagcatacagctgtgctaatcggctaattgtcctatgtatcgaaaacagtttcatgacagacgctaggaagtaatggccttctgatgattcttaaagagttttcaattttttcttatgtgaagagttgacactgaaatctaaaatgtttaattgttgtaaatattacagtttttttttttttactacatattctttacaacagcaaccaaagaaaacatacctcaatacactcaaaactgaagacatagaggactcagatcaaagacaaaatctgatccatatattggtgctagattctgcaggaaaccccagcagtgtgaacgcatcccaacataggttaagagcaagttgaaaacaaaggccatggcattctgccactgcatccttcatgttttcttataaagtcagtgtttagaaatgttaccctttctaagttatatacagatcaaatgcttttttctttcacgtacatccatcatttgcaactgctgttcgtacacagaaacaggactgctcaaatgatcctatttgtattttctgatgctatcagactctaatgtttttttccctaaaatattattgccatcatgctttaggaattttatatttttacacaatcatattttagtatggtgtctgtttatgtaactctgacttgctggaaaagttgaaactccaaataatctgaaactagaaaagaaatagcacataattactaccttccccttggcggctctcctccccaacccccaccccacaattttatgacttccatttggcaattgttgaattataactgcgactgaaacaaacaggttcatagagatgaattttctgagaaacatatatctacatgttgtataattggattttttttccatgtaagtgaacataaaaacatcttttccggg

SEQ ID NO: 455371 - DNA, 4308 bp, Homo sapiens
ggagtcgggtttcagagcgcgggtgactcggggcgcgggccgggagccgggattctgcccgccgccgccgctgccgagcgccgcctttgttccctgcaggaagggcgagcgcggcggccagcgctcagcgacccttcgtcctccgctaagctccaacgctctgctcgactagccgcgcgccttccggggctccgcagacccgcgagatggcaccaaggaggaacaacgggcagtgctggtgtctgctgatgctgctctcggtctccacgcccctccctgctgtcacccagacccgcggtgcgacagagactgcttcccagggtcacctggacctcacgcagctcatcggtgtcccgctgccctcgtccgtatcctttgtcacaggctatggtggcttcccggcctacagtttcgggcctggtgccaatgttggccgcccagccaggactctcatcccatccaccttcttcagggacttcgccatcaggctcgtggtgaagcccagcagcacccgtggtggcgtgctcttcgccatcactgacgccttccagaaggtcatctacctgggcctgcggctctcaggtgtggaggacggccaccagcggatcatcctctactacacggagccaggctcccatgtgtcccaagaggctgctgccttctcggtgcctgtgatgacccacaggtggaaccgcttcgccatgattgtccagggtgaggaagtgaccctcctcgtgaactgtgaggagcacagccgcatccccttccagcggtcctcccaggctttggcttttgagtccagcgctggaatcttcatgggcaatgcaggagctacagggctcgagagattcactggctccctccagcagctcaccgtgcaccccgaccccaggactcccgaggagctgtgtgaccctgaagagtcctcggcatctggagagaccagtgggctgcaggaggcagacggagtagctgagatcttagaagccgtcacctacactcaagcctcgcccaaagaagcaaaagttgaacccataaacacacctccaactccatcctccccctttgaagacatggaactttctggtgaacctgtacccgaggggaccctggaaaccaccaacatgagcatcatccagcacagcagccccaaacaagggtctggtgagatcctgaatgacacactggagggggttcattctgtggatggtgaccccattactgacagcggctcaggggctggggccttccttgacattgctgaagaaaagaatttagcagcaacagcagcggggctggccgaggtgcccatcagcactgctggagaagcagaggccagcagtgtgcccaccgggggaccaaccctctctatgtccacggagaacccagaggaaggggtcactccaggtccagataatgaagagcgtttacgcagcaacagcagcaggggaggccgaggcactcgccagcatgcctggggaagtggaggccagtggtgtggcccccggggagctggacctctccatgtccgcccagagcctcggggaagaggccactgtgggtccaagcagtgaagacagtttaacaacagctgcagctgcaaccgaagtgtccctcagtacttttgaggatgaggaagccagtggggtccccacagatggcctggctcccctcacagccaccatggcccctgagcgggcagtcacttctggtcctggtgatgaagaagacttggcagcagccacaacagaggagcccctcatcacagctgggggtgaagagtccggcagccctccccctgatgggccaccgctgcccctgcccacagtggctcctgaaagatggatcactccagctcaaagagaacatgtgggaatgaaaggacaggctgggcccaaaggagaaaagggtgatgctggggaggagcttcctggccctcctgaaccttctgggcctgttggacccacggcaggagcagaagcagagggctctggcctaggctggggctcggacgtcggctctggctctggtgacctggtgggcagtgagcagctgctgagaggtcctccaggacccccagggccacctggcttacctgggattccaggaaaaccaggaactgatgttttcatgggaccccctggatctcctggagaggatggacctgctggtgaacctgggcccccgggccctgagggacagcctggagttgatggagccaccggccttcccgggatgaaaggggagaagggagcaagagggcctaatggctcagttggtgaaaagggtgaccctggcaacagaggcttacctggacccccggggaaaaagggacaagctggccctcctggggtcatgggacccccagggcctcctggaccccctgggcccccaggccctggatgcacaatgggacttggattcgaggataccgaaggctctggaagcacccagctattgaatgaacccaaactctccagaccaacggctgcaattggtctcaaaggagagaaaggagaccggggacccaagggagaaagggggatggatggagccagtattgtgggaccccctgggccgagagggccacctgggcacatcaaggtcttgtctaattccttgatcaatatcacccatggattcatgaatttctcggacattcctgagctggtggggcctccggggccggacgggttgcctgggctgccaggatttccaggtcctagaggaccaaaaggtgacactggtttacctggctttccaggactaaaaggagaacagggcgagaagggagagccgggtgccatcctgacagaggacattcctctggaaaggctgatggggaaaaagggtgaacctggaatgcatggagccccaggaccaatggggcccaaaggaccaccaggacataaaggagaatttggccttcccgggcgacctggtcgcccaggactgaatggcctcaagggtaccaaaggagatccaggggtcattatgcagggcccacctggcttacctggccctccaggcccccctgggccacctggagctgtgattaacatcaaaggagccattttcccaatacccgtccgaccacactgcaaaatgccagttgatactgctcatcctgggagtccagagctcatcacttttcacggtgttaaaggagagaaaggatcctggggtcttcctggctcaaagggagaaaaaggcgaccagggagcccagggaccaccaggtcctccacttgatctagcttacctgagacactttctgaacaacttgaagggggagaatggagacaaggggttcaaaggtgaaaaaggagaaaaaggagacattaatggcagcttccttatgtctgggcctccaggcctgcccggaaatccaggcccggctggccaaaaaggggagacagtcgttgggccccaaggacccccaggtgctcctggtctgcctgggccacctggctttggaagacctggtgatcctgggccaccggggcccccggggccaccaggacctccagctatcctgggagcagctgtggcccttccaggtccccctggccctccaggacagccagggcttcccggatccagaaacctggtcacagcattcagcaacatggatgacatgctgcagaaagcgcatttggttatagaaggaacattcatctacctgagggacagcactgagtttttcattcgtgttagagatggctggaaaaaattacagctgggagaactgatccccattcctgccgacagccctccaccccctgcgctttccagcaacccacatcagcttctgcctccaccaaaccctatttcaagtgccaattatgagaagcctgctctgcatttggctgctctgaacatgccattttctggggacattcgagctgattttcagtgcttcaagcaggccagagctgcaggactgttgtccacctaccgagcattcttatcttcccatttgcaagatctgtccaccattgtgaggaaagcagagagatacagccttcccatagtgaacctcaaggtaaaaataaatatggttcccattgccttctgcatgcattggtcgctacagggcctggaggcagttttcattcctgacatcaacagaagactgttgacttaagcctgctctctcccttactggctatgtcactttgggtgggttctttgccttccctgaacctcagttttctttatgcttgtgtgacccttgaagcatgcaggaggagagatagtgataacttctttcattgatacagggtattaagctcatggtgctagctct

SEQ ID NO: 455372 - DNA, 138 bp, Homo sapiens
aaaaaaaaaaaagagtaaaaatctaactcatttgtaggctgatggtataatgattctaatgtggtattttgtctctatagggccaagtactttttaataattgggactcaattttttctggccacggaggtcagttca

SEQ ID NO: 455373 - DNA, 323 bp, Homo sapiens
gtctgcctgggccacctggctttggaagacctggtgatcctgggccaccggggcccccggggccaccaggacctccagctatcctgggagcaggttagtgccgtaaacagtgcccttgttcatgctgtccctaccattgtgttcaaggtcacagcatctgggtggcttgtcacagctgcactgcctaacagagggctttcctggataccgccttctttcttttttttttaattgagatacaatttgcacatcataaaattcacccacctaaagtgtctaatccagtagtttttaatatattcatgaagttatgcagtcatcac

SEQ ID NO: 455374 - DNA, 5652 bp, Homo sapiens
cacccaagactgtgctccttcattcatccagcgtttattggcatctcctactacctgagctgttttaggcagggaacaaagcacagataagccctcctggagcttacattctgatgaagggggcaggcaaggaagggcgagcgcggcggccagcgctcagcgacccttcgtcctccgctaagctccaacgctctgctcgactagccgcgcgccttccggggctccgcagacccgcgagatggcaccaaggaggaacaacgggcagtgctggtgtctgctgatgctgctctcggtctccacgcccctccctgctgtcacccagacccgcggtgcgacagagactgcttcccagggtcacctggacctcacgcagctcatcggtgtcccgctgccctcgtccgtatcctttgtcacaggctatggtggcttcccggcctacagtttcgggcctggtgccaatgttggccgcccagccaggactctcatcccatccaccttcttcagggacttcgccatcaggctcgtggtgaagcccagcagcacccgtggtggcgtgctcttcgccatcactgacgccttccagaaggtcatctacctgggcctgcggctctcaggtgtggaggacggccaccagcggatcatcctctactacacggagccaggctcccatgtgtcccaagaggctgctgccttctcggtgcctgtgatgacccacaggtggaaccgcttcgccatgattgtccagggtgaggaagtgaccctcctcgtgaactgtgaggagcacagccgcatccccttccagcggtcctcccaggctttggcttttgagtccagcgctggaatcttcatgggcaatgcaggagctacagggctcgagagattcactggctccctccagcagctcaccgtgcaccccgaccccaggactcccgaggagctgtgtgaccctgaagagtcctcggcatctggagagaccagtgggctgcaggaggcagacggagtagctgagatcttagaagccgtcacctacactcaagcctcgcccaaagaagcaaaagttgaacccataaacacacctccaactccatcctccccctttgaagacatggaactttctggtgaacctgtacccgaggggaccctggaaaccaccaacatgagcatcatccagcacagcagccccaaacaagggtctggtgagatcctgaatgacacactggagggggttcattctgtggatggtgaccccattactgacagcggctcaggggctggggccttccttgacattgctgaagaaaagaatttagcagcaacagcagcggggctggccgaggtgcccatcagcactgctggagaagcagaggccagcagtgtgcccaccgggggaccaaccctctctatgtccacggagaacccagaggaaggggtcactccaggtccagataatgaagagcgtttacgcagcaacagcagcaggggaggccgaggcactcgccagcatgcctggggaagtggaggccagtggtgtggcccccggggagctggacctctccatgtccgcccagagcctcggggaagaggccactgtgggtccaagcagtgaagacagtttaacaacagctgcagctgcaaccgaagtgtccctcagtacttttgaggatgaggaagccagtggggtccccacagatggcctggctcccctcacagccaccatggcccctgagcgggcagtcacttctggtcctggtgatgaagaagacttggcagcagccacaacagaggagcccctcatcacagctgggggtgaagagtccggcagccctccccctgatgggccaccgctgcccctgcccacagtggctcctgaaagatggatcactccagctcaaagagaacatgtgggaatgaaaggacaggctgggcccaaaggagaaaagggtgatgctggggaggagcttcctggccctcctgaaccttctgggcctgttggacccacggcaggagcagaagcagagggctctggcctaggctggggctcggacgtcggctctggctctggtgacctggtgggcagtgagcagctgctgagaggtcctccaggacccccagggccacctggcttacctgggattccaggaaaaccaggaactgatgttttcatgggaccccctggatctcctggagaggatggacctgctggtgaacctgggcccccgggccctgagggacagcctggagttgatggagccaccggccttcccgggatgaaaggggagaagggagcaagagggcctaatggctcagttggtgaaaagggtgaccctggcaacagaggcttacctggacccccggggaaaaagggacaagctggccctcctggggtcatgggacccccagggcctcctggaccccctgggcccccaggccctggatgcacaatgggacttggattcgaggataccgaaggctctggaagcacccagctattgaatgaacccaaactctccagaccaacggctgcaattggtctcaaaggagagaaaggagaccggggacccaagggagaaagggggatggatggagccagtattgtgggaccccctgggccgagagggccacctgggcacatcaaggtcttgtctaattccttgatcaatatcacccatggattcatgaatttctcggacattcctgagctggtggggcctccggggccggacgggttgcctgggctgccaggatttccaggtcctagaggaccaaaaggtgacactggtttacctggctttccaggactaaaaggagaacagggcgagaagggagagccgggtgccatcctgacagaggacattcctctggaaaggctgatggggaaaaagggtgaacctggaatgcatggagccccaggaccaatggggcccaaaggaccaccaggacataaaggagaatttggccttcccgggcgacctggtcgcccaggactgaatggcctcaagggtaccaaaggagatccaggggtcattatgcagggcccacctggcttacctggccctccaggcccccctgggccacctggagctgtgattaacatcaaaggagccattttcccaatacccgtccgaccacactgcaaaatgccagttgatactgctcatcctgggagtccagagctcatcacttttcacggtgttaaaggagagaaaggatcctggggtcttcctggctcaaagggagaaaaaggcgaccagggagcccagggaccaccaggtcctccacttgatctagcttacctgagacactttctgaacaacttgaagggggagaatggagacaaggggttcaaaggtgaaaaaggagaaaaaggagacattaatggcagcttccttatgtctgggcctccaggcctgcccggaaatccaggcccggctggccaaaaaggggagacagtcgttgggccccaaggacccccaggtgctcctggtctgcctgggccacctggctttggaagacctggtgatcctgggccaccggggcccccggggccaccaggacctccagctatcctgggagcagctgtggcccttccaggtccccctggccctccaggacagccagggcttcccggatccagaaacctggtcacagcattcagcaacatggatgacatgctgcagaaagcgcatttggttatagaaggaacattcatctacctgagggacagcactgagtttttcattcgtgttagagatggctggaaaaaattacagctgggagaactgatccccattcctgccgacagccctccaccccctgcgctttccagcaacccacatcagcttctgcctccaccaaaccctatttcaagtgccaattatgagaagcctgctctgcatttggctgctctgaacatgccattttctggggacattcgagctgattttcagtgcttcaagcaggccagagctgcaggactgttgtccacctaccgagcattcttatcttcccatttgcaagatctgtccaccattgtgaggaaagcagagagatacagccttcccatagtgaacctcaagggccaagtactttttaataattgggactcaattttttctggccacggaggtcagttcaatatgcatattccaatatactcctttgatggtcgagacataatgacagatccttcttggccccagaaagtcatttggcatggctccagcccccatggcgtccgccttgtggataactactgtgaagcatggcgaaccgcggacacagcggtcacgggacttgcctccccgctgagcacggggaagattctggaccagaaagcatacagctgtgctaatcggctaattgtcctatgtatcgaaaacagtttcatgacagacgctaggaagtaatggccttctgatgattcttaaagagttttcaattttttcttatgtgaagagttgacactgaaatctaaaatgtttaattgttgtaaatattacagtttttttttttttactacatattctttacaacagcaaccaaagaaaacatacctcaatacactcaaaactgaagacatagaggactcagatcaaagacaaaatctgatccatatattggtgctagattctgcaggaaaccccagcagtgtgaacgcatcccaacataggttaagagcaagttgaaaacaaaggccatggcattctgccactgcatccttcagacagttatatcctccttttaaaccattgttgttgagtgtaagatgtccttcatgttttcttataaagtcagtgtttagaaatgttaccctttctaagttatatacagatcaaatgcttttttctttcacgtacatccatcatttgcaactgctgttcgtacacagaaacaggactgctcaaatgatcctatttgtattttctgatgctatcagactctaatgtttttttccctaaaatattattgccatcatgctttaggaattttatatttttacacaatcatattttagtatggtgtctgtttatgtaactctgacttgctggaaaagttgaaactccaaataatctgaaactagaaaagaaatagcacataattactaccttccccttggcggctctcctccccaacccccaccccacaattttatgacttccatttggcaattgttgaattataactgcgactgaaacaaacaggttcatagagatgaattttctgagaaacatatatctacatgttgtataattggattttttttccatgtaagtgaacataaaaacatcttttccgggtgctttcttcatttgactttttcccgctagttcctttattctccatcactgatgtggaagcagacctggggtgggtttgctaatcctgccacttgtgctgcccccaggcgatgatcagagaactgaaacgttttcccatcatgctcatctgccctggctgttgtcttccacctagtggggccagtgtaggttgtgtagagcctcagagtgggaaacaggatgagctgtgattctgccaccgtctcagggcatgactttgggcaagtcggcctctgtctctcaaggagattgggataagacaagcatagtattggctaccagtcattaaatatcagacttctgatatatcccattt

SEQ ID NO: 455375 - DNA, 1591 bp, Homo sapiens
atcgagctcggtacctaatttttatttctttttgcgtgttagagatggctggaaaaaattacagctgggagaactgatccccattcctgccgacagccctccaccccctgcgctttccagcaacccacatcagcttctgcctccaccaaaccctatttcaagtgccaattatgagaagcctgctctgcatttggctgctctgaacatgccattttctggggacattcgagctgattttcagtgcttcaagcaggccagagctgcaggactgttgtccacctaccgagcattcttatcttcccatttgcaagatctgtccaccattgtgaggaaagcagagagatacagccttcccatagtgaacctcaagggccaagtactttttaataattgggactcaattttttctggccacggaggtcagttcaatatgcatattccaatatactcctttgatggtcgagacataatgacagatccttcttggccccagaaagtcatttggcatggctccagcccccatggcgtccgccttgtggataactactgtgaagcatggcgaaccgcggacacagcggtcacgggacttgcctccccgctgagcacggggaagattctggaccagaaagcatacagctgtgctaatcggctaattgtcctatgtatcgaaaacagtttcatgacagacgctaggaagtaatggccttctgatgattcttaaagagttttcaattttttcttatgtgaagagttgacactgaaatctaaaatgtttaattgttgtaaatattacagtttttttttttttactacatattctttacaacagcaaccaaagaaaacatacctcaatacactcaaaactgaagacatagaggactcagatcaaagacaaaatctgatccatatattggtgctagattctgcaggaaaccccagcagtgtgaacgcatcccaacataggttaagagcaagttgaaaacaaaggccatggcattctgccactgcatccttcagacagttatatcctccttttaaaccattgttgttgagtgtaagatgtccttcatgttttcttataaagtcagtgtttagaaatgttaccctttctaagttatatacagatcaaatgcttttttctttcacgtacatccatcatttgcaactgctgttcgtacacagaaacaggactgctcaaatgatcctatttgtattttctgatgctatcagactctaatgtttttttccctaaaatattattgccatcatgctttaggaattttatatttttacacaatcatattttagtatggtgtctgtttatgtaactctgacttgctggaaaagttgaaactccaaataatctgaaactagaaaagaaatagcacataattactaccttccccttggcggctctcctccccaacccccaccccacaattttatgacttccatttggcaattgttgaattataactgcgactgaaacaaacaggttcatagagatgaattttctgagaaacatatatctacatgttgtataattggattttttttccatgtaagtgaacataaaaacatcttttccggg

SEQ ID NO: 455376 - DNA, 1670 bp, Homo sapiens
ttttttcacctaaggaagacatttctaccacttagagctgttcagagagctgaaacaggctgcttgggagaccatagctctccttccccggaaatggtcaggcagagactgtaattccaatgtcagggagggattgaataaaatgacctccaacgtgccttccagcctaagaagtctggaatctttgcaggaatgtgagatggttctgggggctggagtttgcctttgattctgactgctctcttttgtctcacatttttcagctgcatttggctgctctgaacatgccattttctggggacattcgagctgattttcagtgcttcaagcaggccagagctgcaggactgttgtccacctaccgagcattcttatcttcccatttgcaagatctgtccaccattgtgaggaaagcagagagatacagccttcccatagtgaacctcaagggccaagtactttttaataattgggactcaattttttctggccacggaggtcagttcaatatgcatattccaatatactcctttgatggtcgagacataatgacagatccttcttggccccagaaagtcatttggcatggctccagcccccatggcgtccgccttgtggataactactgtgaagcatggcgaaccgcggacacagcggtcacgggacttgcctccccgctgagcacggggaagattctggaccagaaagcatacagctgtgctaatcggctaattgtcctatgtatcgaaaacagtttcatgacagacgctaggaagtaatggccttctgatgattcttaaagagttttcaattttttcttatgtgaagagttgacactgaaatctaaaatgtttaattgttgtaaatattacagtttttttttttttactacatattctttacaacagcaaccaaagaaaacatacctcaatacactcaaaactgaagacatagaggactcagatcaaagacaaaatctgatccatatattggtgctagattctgcaggaaaccccagcagtgtgaacgcatcccaacataggttaagagcaagttgaaaacaaaggccatggcattctgccactgcatccttcagacagttatatcctccttttaaaccattgttgttgagtgtaagatgtccttcatgttttcttataaagtcagtgtttagaaatgttaccctttctaagttatatacagatcaaatgcttttttctttcacgtacatccatcatttgcaactgctgttcgtacacagaaacaggactgctcaaatgatcctatttgtattttctgatgctatcagactctaatgtttttttccctaaaatattattgccatcatgctttaggaattttatatttttacacaatcatattttagtatggtgtctgtttatgtaactctgacttgctggaaaagttgaaactccaaataatctgaaactagaaaagaaatagcacataattactaccttccccttggcggctctcctccccaacccccaccccacaattttatgacttccatttggcaattgttgaattataactgcgactgaaacaaacaggttcatagagatgaattttctgagaaacatatatctacatgttgtataattggattttttttccatgtaagtgaacataaaaacatcttttccggg

SEQ ID NO: 455377 - DNA, 4563 bp, Homo sapiens
ggctgcggggtgagaggccagggccgagaagggcttcaggacgcgggaggcgcacttgcttcaagtcgcgggcgtgggaacggggttgcaaaacggggcctctttgtccgggcttgcttccggcgtcatggctcaaagggccttcccgaatccttatgctgattataacaaatccctggccgaaggctactttgatgctgccgggaggctgactcctgagttctcacaacgcttgaccaataagattcgggagcttcttcagcaaatggagagaggcctgaaatcagcagaccctcgggatggcaccggttacactggctgggcaggtattgctgtgctttacttacatctttatgatgtatttggggaccctgcctacctacagttagcacatggctatgtaaagcaaagtctgaactgcttaaccaagcgctccatcaccttcctttgtggggatgcaggccccctggcagtggccgctgtgctatatcacaagatgaacaatgagaagcaggcagaagattgcatcacacggctaattcacctaaataagattgatcctcatgctccaaatgaaatgctctatgggcgaataggctacatctatgctcttctttttgtcaataagaactttggagtggaaaagattcctcaaagccatattcagcagatttgtgaaacaattttaacctctggagaaaacctagctaggaagagaaacttcacggcaaagtctccactgatgtatgaatggtaccaggaatattatgtaggggctgctcatggcctggctggaatttattactacctgatgcagcccagccttcaagtgagccaagggaagttacatagtttggtcaagcccagtgtagactacgtctgccagctgaaattcccttctggcaattaccctccatgtataggtgataatcgagatctgcttgtccattggtgccatggcgcccctggggtaatctacatgctcatccaggcctataaggtattcagagaggaaaagtatctctgtgatgcctatcagtgtgctgatgtgatctggcaatatgggttgctgaagaagggatatgggctgtgccacggttctgcagggaatgcctatgccttcctgacactctacaacctcacacaggacatgaagtacctgtatagggcctgtaagtttgctgaatggtgcttagagtatggagaacatggatgcagaacaccagacacccctttctctctctttgaaggaatggctggaacaatatatttcctggctgacctgctagtccccacaaaagccaggttccctgcatttgaactctgaaaggatagcatgccacctgcaactcactgcatgaccctttctgtatattcaaacccaagctaagtgcttccgttgctttccaaggaaacaaagagtcaaactgtggacttgattttgttagcttttttcagaatttatctttcattcagttcccttccattatcatttacttttacttagaagtatccaaggaagtcttttaactttaatttccatttcttcctaaagggagagtgagtgatatgtacagtgttttgagattgtatacatatattccagaacttggaggaaatcttatttaagtttatgaatataaccatctgttactgttctaaaaatgtttaaaagaaactcaatacagataaagataaatatgtgactattattgggtattacacttcacttctctttaatatttttcctccaactggagggcagacaattttctgacttgcttttctctaggtggttcattttgaaaggggacagaaatataactaaatgcttccaggagaaaaattccaagagttacaatctggacttggtacctaaatatcattttttaaattcttgatgcctatttggactagaggtaaacatactttcagattggcctgtttttgtcggtaaggcatacagccttcagaagccaacatttttaatcaaaaacttataaaacatgatgatcattgtgaaaattctgagttgaaggttagtttaagataagctaacaataacagtctgtgttttctctaaaataatctgagttttttggaactctttatttaaatatgtgtgtttttcagtattcaaataagatcaggaagccaattttctatgtatgaatatgctttaacctaggatttcagtccactctgactgactttctaaactttaacttgggtttttacagtgactatgcattagtgctgactctttggtataagccataaaatattttccttcctatcaatttatctgaactttggtcttttcactaaattgtacagtattctacttctgtttaaaacggggagatgagaaagggaatactatctaaccaataacttgaacaaaaacactaaactaagcatttaatagaaatgctttttattgaggaggtattatccagagttcatgcttagaacaaatgcatctttgcgtatcctagacttaacaattcatcagtttctgagaccacagaatcaggttttccgtagtagataaagactctctggtgcttcaaattctgttcaagtgttttgactcatcagcttctactctttctattactgcctttgcctggcttgttttgtctctttgcaactgattttgcaaaaaaaaattgtagctttaaaataacagggtctaagtattttaaatgtgcctatttcacagctctcttggtcacaaaaacatgctatttttattggaacttcaaaccaaatccccactgagtgtgtactggttcctgcaggtagcagtctcctattatctcctgtttagcaccaaaagagctaatattattggaaactgaccttttaaaggccactggcagtaggatttaaaaagcagcccactgctcagtttccaggatcagcttcctccttctgtcacttgtgtaagttggcactaccttgtgcctctcagattgctgaagtgctgctggtaagcatgtgcatgctctgcctttcttgtgaaagttttcaatcagcgatatcagcacttacagtaagaagtaaaagtagtgcacagcaaagctaatttgcctttgcctggggtgttcagcttgaaagaataaagctcatttggtttagttaaatgtcttactctactgtgcctatgcttttagctgcgttactaagcaagggaaaaataacagtttctctgagccagagaagacttgatcacagttctccaagcatcgtgatagcaatgcttaaccccaggaagatttcaaggcagggagaagaacatttcaaataagattcttgttaacccatttatgcctagtgttccattattggaatgctaagcttgtgggagtcatttacatcctactgctcaaagtcattgccaaggtctgatttttcacacaaaaaattgcaacccccagcataaatgggttagctactgtcatcagttagcaaattcatccacacaaacacaattagagtttggtttttttttaagcttttcaaaacttactaaactggcacaattttatatgtatgctatttgttgtatttatgcttaagagcaaaaaagttttgatgggattttaaattcaggcaaagcctacaacgctgagacaatcccctaacaacatggtagtaactaaagaaacttttatactaggcttcttagttttaaaaggaagtggcatcattgtttcagttctagtttgtatttttctctcagatatttttcttctttaaaaatctttcccagaagttggttcctagaaaactcaataccatcatctcttatctctatacagggactaggtaataaaaccttcaaaggttgtcaaaggtcatcaagcagtgttcatttatcctgtcacatgtttctgtttctatagtaatttagaaattgcaaatagttaacttttcatcatgtaaaaagttaacattatcctatttccatagataccatggacggcggtgtggcctgagttgtcagtctttaatcctgagtcatgtggctctcttttcatctttgatgtcagttccaattatttggcatcaaaaaccttcatggtaggtagagttttaggtaaaagtggatctagggttactttctttattaacatttcctaaataactgaattgagagacatactctgctactatgtcctcaggttaatttttgtctgatcttacgatgccctgccttttactagctactttagaaatagaaaatgtgaagagtgactatttacatgtatactcctttggctgctagaactcatctgtagtcctttattatttacactgaattccaatttcatttctgcttccgctaagtaagagcacctcattcctgtgttttctctactattgagctgtagacgaactgtttctctaattataaagcaaactgtttgggatattcagggaaactaccccaatgttatgttgtcatttaatgggaaaggctgggatcatatgtatttctatgttctgtaaagtatttgacttactagttctcaataaaattttattaggactata

SEQ ID NO: 455378 - DNA, 370 bp, Homo sapiens
gcggccgcgactactactactagcctactactactaaattcgcggccgctcgacaaaatgtgaagagtgactatttacatgtatactcctttggctgctagaactcatctgtagtcctttattatttacactgaattccaatttcatttctgcttccgctaagtaagagcacctcattcctgtgttttctctactattgagctgtagacgaactgtttctctaattataaagcaaactgtttgggatattcagggaaactaccccaatgttatgttgtcatttaatgggaaaggctgggatcatatgtatttctatgttctgtaaagtatttgacttactagttctcaataaaattttattaggactata

SEQ ID NO: 455379 - DNA, 4498 bp, Homo sapiens
ggctgcggggtgagaggccagggccgagaagggcttcaggacgcgggaggcgcacttgcttcaagtcgcgggcgtgggaacggggttgcaaaacggggcctctttgtccgggcttgcttccggcgtcatggctcaaagggccttcccgaatccttatgctgattataacaaatccctggccgaaggctactttgatgctgccgggaggctgactcctgagttctcacaacgcttgaccaataagattcgggagcttcttcagcaaatggagagaggcctgaaatcagcagaccctcgggatggcaccggttacactggctgggcaggtattgctgtgctttacttacatctttatgatgtatttggggaccctgcctacctacagttagcacatggctatgtaaagcaaagtctgaactgcttaaccaagcgctccatcaccttcctttgtggggatgcaggccccctggcagtggccgctgtgctatatcacaagatgaacaatgagaagcaggcagaagattgcatcacacggctaattcacctaaataagattgatcctcatgctccaaatgaaatgctctatgggcgaataggctacatctatgctcttctttttgtcaataagaactttggagtggaaaagattcctcaaagccatattcagcagatttgtgaaacaattttaacctctggagaaaacctagctaggaagagaaacttcacggcaaagtctccactgatgtatgaatggtaccaggaatattatgtaggggctgctcatggcctggctggaatttattactacctgatgcagcccagccttcaagtgagccaagggaagttacatagtttggtcaagcccagtgtagactacgtctgccagctgaaattcccttctggcaattaccctccatgtataggtgataatcgagatctgcttgtccattggtgccatggcgcccctggggtaatctacatgctcatccaggcctataaggtattcagagaggaaaagtatctctgtgatgcctatcagtgtgctgatgtgatctggcaatatgggttgctgaagaagggatatgggctgtgccacggttctgcagggaatgcctatgccttcctgacactctacaacctcacacaggacatgaagtacctgtatagggcctgtaagtttgctgaatggtgcttagagtatggagaacatggatgcagaacaccagacacccctttctctctctttgaaggaatggctggaacaatatatttcctggctgacctgctagtccccacaaaagccaggttccctgcatttgaactctgaaaggatagcatgccacctgcaactcactgcatgaccctttctgtatattcaaacccaagctaagtgcttccgttgctttccaaggaaacaaagagtcaaactgtggacttgattttgttagcttttttcagaatttatctttcattcagttcccttccattatcatttacttttacttagaagtatccaaggaagtcttttaactttaatttccatttcttcctaaagggagagtgagtgatatgtacagtgttttgagattgtatacatatattccagaacttggaggaaatcttatttaagtttatgaatataaccatctgttactgttctaaaaatgtttaaaagaaactcaatacagataaagataaatatgtgactattattgggtattacacttcacttctctttaatatttttcctccaactggagggcagacaattttctgacttgcttttctctaggtggttcattttgaaaggggacagaaatataactaaatgcttccaggagaaaaattccaagagttacaatctggacttggtacctaaatatcattttttaaattcttgatgcctatttggactagaggtaaacatactttcagattggcctgtttttgtcggtaaggcatacagccttcagaagccaacatttttaatcaaaaacttataaaacatgatgatcattgtgaaaattctgagttgaaggttagtttaagataagctaacaataacagtctgtgttttctctaaaataatctgagttttttggaactctttatttaaatatgtgtgtttttcagtattcaaataagatcaggaagccaattttctatgtatgaatatgctttaacctaggatttcagtccactctgactgactttctaaactttaacttgggtttttacagtgactatgcattagtgctgactctttggtataagccataaaatattttccttcctatcaatttatctgaactttggtcttttcactaaattgtacagtattctacttctgtttaaaacggggagatgagaaagggaatactatctaaccaataacttgaacaaaaacactaaactaagcatttaatagaaatgctttttattgaggaggtattatccagagttcatgcttagaacaaatgcatctttgcgtatcctagacttaacaattcatcagtttctgagaccacagaatcaggttttccgtagtagataaagactctctggtgcttcaaattctgttcaagtgttttgactcatcagcttctactctttctattactgcctttgcctggcttgttttgtctctttgcaactgattttgcaaaaaaaaattgtagctttaaaataacagggtctaagtattttaaatgtgcctatttcacagctctcttggtcacaaaaacatgctatttttattggaacttcaaaccaaatccccactgagtgtgtactggttcctgcaggtagcagtctcctattatctcctgtttagcaccaaaagagctaatattattggaaactgaccttttaaaggccactggcagtaggatttaaaaagcagcccactgctcagtttccaggatcagcttcctccttctgtcacttgtgtaagttggcactaccttgtgcctctcagattgctgaagtgctgctggtaagcatgtgcatgctctgcctttcttgtgaaagttttcaatcagcgatatcagcacttacagtaagaagtaaaagtagtgcacagcaaagctaatttgcctttgcctggggtgttcagcttgaaagaataaagctcatttggtttagttaaatgtcttactctactgtgcctatgcttttagctgcgttactaagcaagggaaaaataacagtttctctgagccagagaagacttgatcacagttctccaagcatcgtgatagcaatgcttaaccccaggaagatttcaaggcagggagaagaacatttcaaataagattcttgttaacccatttatgcctagtgttccattattggaatgctaagcttgtgggagtcatttacatcctactgctcaaagtcattgccaaggtctgatttttcacacaaaaaattgcaacccccagcataaatgggttagctactgtcatcagttagcaaattcatccacacaaacacaattagagtttggtttttttttaagcttttcaaaacttactaaactggcacaattttatatgtatgctatttgttgtatttatgcttaagagcaaaaaagttttgatgggattttaaattcaggcaaagcctacaacgctgagacaatcccctaacaacatggtagtaactaaagaaacttttatactaggcttcttagttttaaaaggaagtggcatcattgtttcagttctagtttgtatttttctctcagatatttttcttctttaaaaatctttcccagaagttggttcctagaaaactcaataccatcatctcttatctctatacagggactaggtaataaaaccttcaaaggttgtcaaaggtcatcaagcagtgttcaatgtaaaaagttaacattatcctatttccatagataccatggacggcggtgtggcctgagttgtcagtctttaatcctgagtcatgtggctctcttttcatctttgatgtcagttccaattatttggcatcaaaaaccttcatggtaggtagagttttaggtaaaagtggatctagggttactttctttattaacatttcctaaataactgaattgagagacatactctgctactatgtcctcaggttaatttttgtctgatcttacgatgccctgccttttactagctactttagaaatagaaaatgtgaagagtgactatttacatgtatactcctttggctgctagaactcatctgtagtcctttattatttacactgaattccaatttcatttctgcttccgctaagtaagagcacctcattcctgtgttttctctactattgagctgtagacgaactgtttctctaattataaagcaaactgtttgggatattcagggaaactaccccaatgttatgttgtcatttaatgggaaaggctgggatcatatgtatttctatgttctgtaaagtatttgacttactagttctcaataaaattttattaggactata

SEQ ID NO: 455380 - DNA, 4661 bp, Homo sapiens
aggagtagagtttgggatggcagcctcagaaggacaaacttaggccaaggagggagggagttggggtggagactgagcttctccagttggaggtctggagctaggactcttcattgaaaccggagagaaggaaaaggagagagtgaggctgactttttaactgaactccaaaattctctgagcaatagaatgggcctaatatgtaccaggcttgcttccggcgtcatggctcaaagggccttcccgaatccttatgctgattataacaaatccctggccgaaggctactttgatgctgccgggaggctgactcctgagttctcacaacgcttgaccaataagattcgggagcttcttcagcaaatggagagaggcctgaaatcagcagaccctcgggatggcaccggttacactggctgggcaggtattgctgtgctttacttacatctttatgatgtatttggggaccctgcctacctacagttagcacatggctatgtaaagcaaagtctgaactgcttaaccaagcgctccatcaccttcctttgtggggatgcaggccccctggcagtggccgctgtgctatatcacaagatgaacaatgagaagcaggcagaagattgcatcacacggctaattcacctaaataagattgatcctcatgctccaaatgaaatgctctatgggcgaataggctacatctatgctcttctttttgtcaataagaactttggagtggaaaagattcctcaaagccatattcagcagatttgtgaaacaattttaacctctggagaaaacctagctaggaagagaaacttcacggcaaagtctccactgatgtatgaatggtaccaggaatattatgtaggggctgctcatggcctggctggaatttattactacctgatgcagcccagccttcaagtgagccaagggaagttacatagtttggtcaagcccagtgtagactacgtctgccagctgaaattcccttctggcaattaccctccatgtataggtgataatcgagatctgcttgtccattggtgccatggcgcccctggggtaatctacatgctcatccaggcctataaggtattcagagaggaaaagtatctctgtgatgcctatcagtgtgctgatgtgatctggcaatatgggttgctgaagaagggatatgggctgtgccacggttctgcagggaatgcctatgccttcctgacactctacaacctcacacaggacatgaagtacctgtatagggcctgtaagtttgctgaatggtgcttagagtatggagaacatggatgcagaacaccagacacccctttctctctctttgaaggaatggctggaacaatatatttcctggctgacctgctagtccccacaaaagccaggttccctgcatttgaactctgaaaggatagcatgccacctgcaactcactgcatgaccctttctgtatattcaaacccaagctaagtgcttccgttgctttccaaggaaacaaagagtcaaactgtggacttgattttgttagcttttttcagaatttatctttcattcagttcccttccattatcatttacttttacttagaagtatccaaggaagtcttttaactttaatttccatttcttcctaaagggagagtgagtgatatgtacagtgttttgagattgtatacatatattccagaacttggaggaaatcttatttaagtttatgaatataaccatctgttactgttctaaaaatgtttaaaagaaactcaatacagataaagataaatatgtgactattattgggtattacacttcacttctctttaatatttttcctccaactggagggcagacaattttctgacttgcttttctctaggtggttcattttgaaaggggacagaaatataactaaatgcttccaggagaaaaattccaagagttacaatctggacttggtacctaaatatcattttttaaattcttgatgcctatttggactagaggtaaacatactttcagattggcctgtttttgtcggtaaggcatacagccttcagaagccaacatttttaatcaaaaacttataaaacatgatgatcattgtgaaaattctgagttgaaggttagtttaagataagctaacaataacagtctgtgttttctctaaaataatctgagttttttggaactctttatttaaatatgtgtgtttttcagtattcaaataagatcaggaagccaattttctatgtatgaatatgctttaacctaggatttcagtccactctgactgactttctaaactttaacttgggtttttacagtgactatgcattagtgctgactctttggtataagccataaaatattttccttcctatcaatttatctgaactttggtcttttcactaaattgtacagtattctacttctgtttaaaacggggagatgagaaagggaatactatctaaccaataacttgaacaaaaacactaaactaagcatttaatagaaatgctttttattgaggaggtattatccagagttcatgcttagaacaaatgcatctttgcgtatcctagacttaacaattcatcagtttctgagaccacagaatcaggttttccgtagtagataaagactctctggtgcttcaaattctgttcaagtgttttgactcatcagcttctactctttctattactgcctttgcctggcttgttttgtctctttgcaactgattttgcaaaaaaaaattgtagctttaaaataacagggtctaagtattttaaatgtgcctatttcacagctctcttggtcacaaaaacatgctatttttattggaacttcaaaccaaatccccactgagtgtgtactggttcctgcaggtagcagtctcctattatctcctgtttagcaccaaaagagctaatattattggaaactgaccttttaaaggccactggcagtaggatttaaaaagcagcccactgctcagtttccaggatcagcttcctccttctgtcacttgtgtaagttggcactaccttgtgcctctcagattgctgaagtgctgctggtaagcatgtgcatgctctgcctttcttgtgaaagttttcaatcagcgatatcagcacttacagtaagaagtaaaagtagtgcacagcaaagctaatttgcctttgcctggggtgttcagcttgaaagaataaagctcatttggtttagttaaatgtcttactctactgtgcctatgcttttagctgcgttactaagcaagggaaaaataacagtttctctgagccagagaagacttgatcacagttctccaagcatcgtgatagcaatgcttaaccccaggaagatttcaaggcagggagaagaacatttcaaataagattcttgttaacccatttatgcctagtgttccattattggaatgctaagcttgtgggagtcatttacatcctactgctcaaagtcattgccaaggtctgatttttcacacaaaaaattgcaacccccagcataaatgggttagctactgtcatcagttagcaaattcatccacacaaacacaattagagtttggtttttttttaagcttttcaaaacttactaaactggcacaattttatatgtatgctatttgttgtatttatgcttaagagcaaaaaagttttgatgggattttaaattcaggcaaagcctacaacgctgagacaatcccctaacaacatggtagtaactaaagaaacttttatactaggcttcttagttttaaaaggaagtggcatcattgtttcagttctagtttgtatttttctctcagatatttttcttctttaaaaatctttcccagaagttggttcctagaaaactcaataccatcatctcttatctctatacagggactaggtaataaaaccttcaaaggttgtcaaaggtcatcaagcagtgttcatttatcctgtcacatgtttctgtttctatagtaatttagaaattgcaaatagttaacttttcatcatgtaaaaagttaacattatcctatttccatagataccatggacggcggtgtggcctgagttgtcagtctttaatcctgagtcatgtggctctcttttcatctttgatgtcagttccaattatttggcatcaaaaaccttcatggtaggtagagttttaggtaaaagtggatctagggttactttctttattaacatttcctaaataactgaattgagagacatactctgctactatgtcctcaggttaatttttgtctgatcttacgatgccctgccttttactagctactttagaaatagaaaatgtgaagagtgactatttacatgtatactcctttggctgctagaactcatctgtagtcctttattatttacactgaattccaatttcatttctgcttccgctaagtaagagcacctcattcctgtgttttctctactattgagctgtagacgaactgtttctctaattataaagcaaactgtttgggatattcagggaaactaccccaatgttatgttgtcatttaatgggaaaggctgggatcatatgtatttctatgttctgtaaagtatttgacttactagttctcaataaaattttattaggactata

SEQ ID NO: 455381 - DNA, 4770 bp, Homo sapiens
ggctgcggggtgagaggccagggccgagaagggcttcaggacgcgggaggcgcacttgcttcaagtcgcgggcgtgggaacggggttgcaaaacggggcctctttgtccgggtgggttaagggccctggcagctttttcgcgaaggcgccatgtcctagcagttgggccgcagtgggcccgaggtccactcggaccgccgagacggctcgatggccctggagctggaggaagggggatacctgggcgccgccgccgccctcgcaactcggccgaggcccctatctcaacctagtttctgtttttcccctgttctgcaggcttgcttccggcgtcatggctcaaagggccttcccgaatccttatgctgattataacaaatccctggccgaaggctactttgatgctgccgggaggctgactcctgagttctcacaacgcttgaccaataagattcgggagcttcttcagcaaatggagagaggcctgaaatcagcagaccctcgggatggcaccggttacactggctgggcaggtattgctgtgctttacttacatctttatgatgtatttggggaccctgcctacctacagttagcacatggctatgtaaagcaaagtctgaactgcttaaccaagcgctccatcaccttcctttgtggggatgcaggccccctggcagtggccgctgtgctatatcacaagatgaacaatgagaagcaggcagaagattgcatcacacggctaattcacctaaataagattgatcctcatgctccaaatgaaatgctctatgggcgaataggctacatctatgctcttctttttgtcaataagaactttggagtggaaaagattcctcaaagccatattcagcagatttgtgaaacaattttaacctctggagaaaacctagctaggaagagaaacttcacggcaaagtctccactgatgtatgaatggtaccaggaatattatgtaggggctgctcatggcctggctggaatttattactacctgatgcagcccagccttcaagtgagccaagggaagttacatagtttggtcaagcccagtgtagactacgtctgccagctgaaattcccttctggcaattaccctccatgtataggtgataatcgagatctgcttgtccattggtgccatggcgcccctggggtaatctacatgctcatccaggcctataaggtattcagagaggaaaagtatctctgtgatgcctatcagtgtgctgatgtgatctggcaatatgggttgctgaagaagggatatgggctgtgccacggttctgcagggaatgcctatgccttcctgacactctacaacctcacacaggacatgaagtacctgtatagggcctgtaagtttgctgaatggtgcttagagtatggagaacatggatgcagaacaccagacacccctttctctctctttgaaggaatggctggaacaatatatttcctggctgacctgctagtccccacaaaagccaggttccctgcatttgaactctgaaaggatagcatgccacctgcaactcactgcatgaccctttctgtatattcaaacccaagctaagtgcttccgttgctttccaaggaaacaaagagtcaaactgtggacttgattttgttagcttttttcagaatttatctttcattcagttcccttccattatcatttacttttacttagaagtatccaaggaagtcttttaactttaatttccatttcttcctaaagggagagtgagtgatatgtacagtgttttgagattgtatacatatattccagaacttggaggaaatcttatttaagtttatgaatataaccatctgttactgttctaaaaatgtttaaaagaaactcaatacagataaagataaatatgtgactattattgggtattacacttcacttctctttaatatttttcctccaactggagggcagacaattttctgacttgcttttctctaggtggttcattttgaaaggggacagaaatataactaaatgcttccaggagaaaaattccaagagttacaatctggacttggtacctaaatatcattttttaaattcttgatgcctatttggactagaggtaaacatactttcagattggcctgtttttgtcggtaaggcatacagccttcagaagccaacatttttaatcaaaaacttataaaacatgatgatcattgtgaaaattctgagttgaaggttagtttaagataagctaacaataacagtctgtgttttctctaaaataatctgagttttttggaactctttatttaaatatgtgtgtttttcagtattcaaataagatcaggaagccaattttctatgtatgaatatgctttaacctaggatttcagtccactctgactgactttctaaactttaacttgggtttttacagtgactatgcattagtgctgactctttggtataagccataaaatattttccttcctatcaatttatctgaactttggtcttttcactaaattgtacagtattctacttctgtttaaaacggggagatgagaaagggaatactatctaaccaataacttgaacaaaaacactaaactaagcatttaatagaaatgctttttattgaggaggtattatccagagttcatgcttagaacaaatgcatctttgcgtatcctagacttaacaattcatcagtttctgagaccacagaatcaggttttccgtagtagataaagactctctggtgcttcaaattctgttcaagtgttttgactcatcagcttctactctttctattactgcctttgcctggcttgttttgtctctttgcaactgattttgcaaaaaaaaattgtagctttaaaataacagggtctaagtattttaaatgtgcctatttcacagctctcttggtcacaaaaacatgctatttttattggaacttcaaaccaaatccccactgagtgtgtactggttcctgcaggtagcagtctcctattatctcctgtttagcaccaaaagagctaatattattggaaactgaccttttaaaggccactggcagtaggatttaaaaagcagcccactgctcagtttccaggatcagcttcctccttctgtcacttgtgtaagttggcactaccttgtgcctctcagattgctgaagtgctgctggtaagcatgtgcatgctctgcctttcttgtgaaagttttcaatcagcgatatcagcacttacagtaagaagtaaaagtagtgcacagcaaagctaatttgcctttgcctggggtgttcagcttgaaagaataaagctcatttggtttagttaaatgtcttactctactgtgcctatgcttttagctgcgttactaagcaagggaaaaataacagtttctctgagccagagaagacttgatcacagttctccaagcatcgtgatagcaatgcttaaccccaggaagatttcaaggcagggagaagaacatttcaaataagattcttgttaacccatttatgcctagtgttccattattggaatgctaagcttgtgggagtcatttacatcctactgctcaaagtcattgccaaggtctgatttttcacacaaaaaattgcaacccccagcataaatgggttagctactgtcatcagttagcaaattcatccacacaaacacaattagagtttggtttttttttaagcttttcaaaacttactaaactggcacaattttatatgtatgctatttgttgtatttatgcttaagagcaaaaaagttttgatgggattttaaattcaggcaaagcctacaacgctgagacaatcccctaacaacatggtagtaactaaagaaacttttatactaggcttcttagttttaaaaggaagtggcatcattgtttcagttctagtttgtatttttctctcagatatttttcttctttaaaaatctttcccagaagttggttcctagaaaactcaataccatcatctcttatctctatacagggactaggtaataaaaccttcaaaggttgtcaaaggtcatcaagcagtgttcatttatcctgtcacatgtttctgtttctatagtaatttagaaattgcaaatagttaacttttcatcatgtaaaaagttaacattatcctatttccatagataccatggacggcggtgtggcctgagttgtcagtctttaatcctgagtcatgtggctctcttttcatctttgatgtcagttccaattatttggcatcaaaaaccttcatggtaggtagagttttaggtaaaagtggatctagggttactttctttattaacatttcctaaataactgaattgagagacatactctgctactatgtcctcaggttaatttttgtctgatcttacgatgccctgccttttactagctactttagaaatagaaaatgtgaagagtgactatttacatgtatactcctttggctgctagaactcatctgtagtcctttattatttacactgaattccaatttcatttctgcttccgctaagtaagagcacctcattcctgtgttttctctactattgagctgtagacgaactgtttctctaattataaagcaaactgtttgggatattcagggaaactaccccaatgttatgttgtcatttaatgggaaaggctgggatcatatgtatttctatgttctgtaaagtatttgacttactagttctcaataaaattttattaggactata

SEQ ID NO: 455382 - DNA, 4510 bp, Homo sapiens
ggctgcggggtgagaggccagggccgagaagggcttcaggacgcgggaggcgcacttgcttcaagtcgcgggcgtgggaacggggttgcaaaacggggcctctttgtccgggcttgcttccggcgtcatggctcaaagggccttcccgaatccttatgctgattataacaaatccctggccgaaggctactttgatgctgccgggaggctgactcctgagttctcacaacgcttgaccaataagattcgggagcttcttcagcaaatggagagaggcctgaaatcagcagaccctcgggatggcaccggttacactggctgggcaggtattgctgtgctttacttacatctttatgatgtatttggggaccctgcctacctacagttagcacatggctatgtaaagcaaagtctgaactgcttaaccaagcgctccatcaccttcctttgtggggatgcaggccccctggcagtggccgctgtgctatatcacaagatgaacaatgagaagcaggcagaagattgcatcacacggctaattcacctaaataagattgatcctcatgctccaaatgaaatgctctatgggcgaataggctacatctatgctcttctttttgtcaataagaactttggagtggaaaagattcctcaaagccatattcagcagatttgtgaaacaattttaacctctggagaaaacctagctaggaagagaaacttcacggcaaagtctccactgatgtatgaatggtaccaggaatattatgtaggggctgctcatggcctggctggaatttattactacctgatgcagcccagccttcaagtgagccaagggaagttacatagtttggtcaagcccagtgtagactacgtctgccagctgaaattcccttctggcaattaccctccatgtataggtgataatcgagatctgcttgtccattggtgccatggcgcccctggggtaatctacatgctcatccaggcctataaggtattcagagaggaaaagtatctctgtgatgcctatcagtgtgctgatgtgatctggcaatatgggttgctgaagaagggatatgggctgtgccacggttctgcagggaatgcctatgccttcctgacactctacaacctcacacaggacatgaagtacctgtatagggcctgtaagtttgctgaatggtgcttagagtatggagaacatggatgcagaacaccagacacccctttctctctctttgaaggaatggctggaacaatatatttcctggctgacctgctagtccccacaaaagccaggttccctgcatttgaactctgaaaggatagcatgccacctgcaactcactgcatgaccctttctgtatattcaaacccaagctaagtgcttccgttgctttccaaggaaacaaagagtcaaactgtggacttgattttgttagcttttttcagaatttatctttcattcagttcccttccattatcatttacttttacttagaagtatccaaggaagtcttttaactttaatttccatttcttcctaaagggagagtgagtgatatgtacagtgttttgagattgtatacatatattccagaacttggaggaaatcttatttaagtttatgaatataaccatctgttactgttctaaaaatgtttaaaagaaactcaatacagataaagataaatatgtgactattattgggtattacacttcacttctctttaatatttttcctccaactggagggcagacaattttctgacttgcttttctctaggtggttcattttgaaaggggacagaaatataactaaatgcttccaggagaaaaattccaagagttacaatctggacttggtacctaaatatcattttttaaattcttgatgcctatttggactagaggtaaacatactttcagattggcctgtttttgtcggtaaggcatacagccttcagaagccaacatttttaatcaaaaacttataaaacatgatgatcattgtgaaaattctgagttgaaggttagtttaagataagctaacaataacagtctgtgttttctctaaaataatctgagttttttggaactctttatttaaatatgtgtgtttttcagtattcaaataagatcaggaagccaattttctatgtatgaatatgctttaacctaggatttcagtccactctgactgactttctaaactttaacttgggtttttacagtgactatgcattagtgctgactctttggtataagccataaaatattttccttcctatcaatttatctgaactttggtcttttcactaaattgtacagtattctacttctgtttaaaacggggagatgagaaagggaatactatctaaccaataacttgaacaaaaacactaaactaagcatttaatagaaatgctttttattgaggaggtattatccagagttcatgcttagaacaaatgcatctttgcgtatcctagacttaacaattcatcagtttctgagaccacagaatcaggttttccgtagtagataaagactctctggtgcttcaaattctgttcaagtgttttgactcatcagcttctactctttctattactgcctttgcctggcttgttttgtctctttgcaactgattttgcaaaaaaaaattgtagctttaaaataacagggtctaagtattttaaatgtgcctatttcacagctctcttggtcacaaaaacatgctatttttattggaacttcaaaccaaatccccactgagtgtgtactggttcctgcaggtagcagtctcctattatctcctgtttagcaccaaaagagctaatattattggaaactgaccttttaaaggccactggcagtaggatttaaaaagcagcccactgctcagtttccaggatcagcttcctccttctgtcacttgtgtaagttggcactaccttgtgcctctcagattgctgaagtgctgctggtaagcatgtgcatgctctgcctttcttgtgaaagttttcaatcagcgatatcagcacttacagtaagaagtaaaagtagtgcacagcaaagctaatttgcctttgcctggggtgttcagcttgaaagaataaagctcatttggtttagttaaatgtcttactctactgtgcctatgcttttagctgcgttactaagcaagggaaaaataacagtttctctgagccagagaagacttgatcacagttctccaagcatcgtgatagcaatgcttaaccccaggaagatttcaaggcagggagaagaacatttcaaataagattcttgttaacccatttatgcctagtgttccattattggaatgctaagcttgtgggagtcatttacatcctactgctcaaagtcattgccaaggtctgatttttcacacaaaaaattgcaacccccagcataaatgggttagctactgtcatcagttagcaaattcatccacacaaacacaattagagtttggtttttttttaagcttttcaaaacttactaaactggcacaattttatatgtatgctatttgttgtatttatgcttaagagcaaaaaagttttgatgggattttaaattcaggcaaagcctacaacgctgagacaatcccctaacaacatggtagtaactaaagaaacttttatactaggcttcttagttttaaaaggaagtggcatcattgtttcagttctagtttgtatttttctctcagatatttttcttctttaaaaatctttcccagaagttggttcctagaaaactcaataccatcatctcttatctctatacagggactaggtaataaaaccttcaaaggttgtcaaaggtcatcaagcagtgttcatttatcctgtcacatgtttctgtttctatagtaatttagaaattgcaaatagttaacttttcatcatgtaaaaagttaacattatcctatttccatagataccatggacggcggtgtggcctgagttgtcagtctttaatcctgagtcatgtggctctcttttcatctttgatgtcagttccaattatttggcatcaaaaaccttcatggtaggtagagttttaggtaaaagtggatctagggttactttctttattaacatttcctaaataactgaattgagagacatactctgctactatgtcctcaggttaatttttgtctgatcttacgatgccctgccttttactagctactttagaaatagaaaatgtgaagagtgactatttacatgtatactcctttggctgctagaactcatctgtagtcctttattatttacactgaattccaatttcatttctgcttccgctaagtaagagcacctcattcctgtgttttctctactattgagctgtagacgaactgtttctctaattataaagcaaactgtttgggattcatatgtatttctatgttctgtaaagtatttgacttactagttctcaataaaattttattaggactata

SEQ ID NO: 455383 - DNA, 4396 bp, Homo sapiens
ggctgcggggtgagaggccagggccgagaagggcttcaggacgcgggaggcgcacttgcttcaagtcgcgggcgtgggaacggggttgcaaaacggggcctctttgtccgggcttgcttccggcgtcatggctcaaagggccttcccgaatccttatgctgattataacaaatccctggccgaaggctactttgatgctgccgggaggctgactcctgagttctcacaacgcttgaccaataagattcgggagcttcttcagcaaatggagagaggcctgaaatcagcagaccctcgggatggcaccggttacactggctgggcaggtattgctgtgctttacttacatctttatgatgtatttggggaccctgcctacctacagttagcacatggctatgtaaagcaaagtctgaactgcttaaccaagcgctccatcaccttcctttgtggggatgcaggccccctggcagtggccgctgtgctatatcacaagatgaacaatgagaagcaggcagaagattgcatcacacggctaattcacctaaataagattgatcctcatgctccaaatgaaatgctctatgggcgaataggctacatctatgctcttctttttgtcaataagaactttggagtggaaaagattcctcaaagccatattcagcagatttgtgaaacaattttaacctctggagaaaacctagctaggaagagaaacttcacggcaaagtctccactgatgtatgaatggtaccaggaatattatgtaggggctgctcatggcctggctggaatttattactacctgatgcagcccagccttcaagtgagccaagggaagttacatagtttggtcaagcccagtgtagactacgtctgccagctgaaattcccttctggcaattaccctccatgtataggtgataatcgagatctgcttgtccattggtgccatggcgcccctggggtaatctacatgctcatccaggcctataaggtattcagagaggaaaagtatctctgtgatgcctatcagtgtgctgatgtgatctggcaatatgggttgctgaagaagggatatgggctgtgccacggttctgcagggaatgcctatgccttcctgacactctacaacctcacacaggacatgaagtacctgtatagggcctgtaagtttgctgaatggtgcttagagtatggagaacatggatgcagaacaccagacacccctttctctctctttgaaggaatggctggaacaatatatttcctggctgacctgctagtccccacaaaagccaggttccctgcatttgaactctgaaaggatagcatgccacctgcaactcactgcatgaccctttctgtatattcaaacccaagctaagtgcttccgttgctttccaaggaaacaaagagtcaaactgtggacttgattttgttagcttttttcagaatttatctttcattcagttcccttccattatcatttacttttacttagaagtatccaaggaagtcttttaactttaatttccatttcttcctaaagggagagtgagtgatatgtacagtgttttgagattgtatacatatattccagaacttggaggaaatcttatttaagtttatgaatataaccatctgttactgttctaaaaatgtttaaaagaaactcaatacagataaagataaatatgtgactattattgggtattacacttcacttctctttaatatttttcctccaactggagggcagacaattttctgacttgcttttctctaggtggttcattttgaaaggggacagaaatataactaaatgcttccaggagaaaaattccaagagttacaatctggacttggtacctaaatatcattttttaaattcttgatgcctatttggactagaggtaaacatactttcagattggcctgtttttgtcggtaaggcatacagccttcagaagccaacatttttaatcaaaaacttataaaacatgatgatcattgtgaaaattctgagttgaaggttagtttaagataagctaacaataacagtctgtgttttctctaaaataatctgagttttttggaactctttatttaaatatgtgtgtttttcagtattcaaataagatcaggaagccaattttctatgtatgaatatgctttaacctaggatttcagtccactctgactgactttctaaactttaacttgggtttttacagtgactatgcattagtgctgactctttggtataagccataaaatattttccttcctatcaatttatctgaactttggtcttttcactaaattgtacagtattctacttctgtttaaaacggggagatgagaaagggaatactatctaaccaataacttgaacaaaaacactaaactaagcatttaatagaaatgctttttattgaggaggtattatccagagttcatgcttagaacaaatgcatctttgcgtatcctagacttaacaattcatcagtttctgagaccacagaatcaggttttccgtagtagataaagactctctggtgcttcaaattctgttcaagtgttttgactcatcagcttctactctttctattactgcctttgcctggcttgttttgtctctttgcaactgattttgcaaaaaaaaattgtagctttaaaataacagggtctaagtattttaaatgtgcctatttcacagctctcttggtcacaaaaacatgctatttttattggaacttcaaaccaaatccccactgagtgtgtactggttcctgcaggtagcagtctcctattatctcctgtttagcaccaaaagagctaatattattggaaactgaccttttaaaggccactggcagtaggatttaaaaagcagcccactgctcagtttccaggatcagcttcctccttctgtcacttgtgtaagttggcactaccttgtgcctctcagattgctgaagtgctgctggtaagcatgtgcatgctctgcctttcttgtgaaagttttcaatcagcgatatcagcacttacagtaagaagtaaaagtagtgcacagcaaagctaatttgcctttgcctggggtgttcagcttgaaagaataaagctcatttggtttagttaaatgtcttactctactgtgcctatgcttttagctgcgttactaagcaagggaaaaataacagtttctctgagccagagaagacttgatcacagttctccaagcatcgtgatagcaatgcttaaccccaggaagatttcaaggcagggagaagaacatttcaaataagattcttgttaacccatttatgcctagtgttccattattggaatgctaagcttgtgggagtcatttacatcctactgctcaaagtcattgccaaggtctgatttttcacacaaaaaattgcaacccccagcataaatgggttagctactgtcatcagttagcaaattcatccacacaaacacaattagagtttggtttttttttaagcttttcaaaacttactaaactggcacaattttatatgtatgctatttgttgtatttatgcttaagagcaaaaaagttttgatgggattttaaattcaggcaaagcctacaacgctgagacaatcccctaacaacatggtagtaactaaagaaacttttatactaggcttcttagttttaaaaggaagtggcatcattgtttcagttctagtttgtatttttctctcagatatttttcttctttaaaaatctttcccagaagttggttcctagaaaactcaataccatcatctcttatctctatacagggactaggtaataaaaccttcaaaggttgtcaaaggtcatcaagcagtgttcatttatcctgtcacatgtttctgtttctatagtaatttagaaattgcaaatagttaacttttcatcatgtaaaaagttaacattatcctatttccatagataccatggacggcggtgtggcctgagttgtcagtctttaatcctgagtcatgtggctctcttttcatctttgatgtcagttccaattatttggcatcaaaaaccttcatgtgtgccggaccagtcaaagaatcccacgtcaaaattgagagaacgaacaagccttcatcgcatggcacatttgtataaaaagaaagggagagatgttgcaggaagtcagggaccccaaacagagggaccggctgaagccatggcagaagaacataaattgtgaagatttcatggacatttattagttccccaaattagtacttttataatttcttatgcctgtctttactgcaatctctgaacataaattgtgaagatttaatggacacatcacttccttaatcaatactcttgtgatttcctaaaa

SEQ ID NO: 455384 - DNA, 4336 bp, Homo sapiens
ggctgcggggtgagaggccagggccgagaagggcttcaggacgcgggaggcgcacttgcttcaagtcgcgggcgtgggaacggggttgcaaaacggggcctctttgtccgggcttgcttccggcgtcatggctcaaagggccttcccgaatccttatgctgattataacaaatccctggccgaaggctactttgatgctgccgggaggctgactcctgagttctcacaacgcttgaccaataagattcgggagcttcttcagcaaatggagagaggcctgaaatcagcagaccctcgggatggcaccggttacactggctgggcaggtattgctgtgctttacttacatctttatgatgtatttggggaccctgcctacctacagttagcacatggctatgtaaagcaaagtctgaactgcttaaccaagcgctccatcaccttcctttgtggggatgcaggccccctggcagtggccgctgtgctatatcacaagatgaacaatgagaagcaggcagaagattgcatcacacggctaattcacctaaataagattgatcctcatgctccaaatgaaatgctctatgggcgaataggctacatctatgctcttctttttgtcaataagaactttggagtggaaaagattcctcaaagccatattcagcagatttgtgaaacaattttaacctctggagaaaacctagctaggaagagaaacttcacggcaaagtctccactgatgtatgaatggtaccaggaatattatgtaggggctgctcatggcctggctggaatttattactacctgatgcagcccagccttcaagtgagccaagggaagttacatagtttggtcaagcccagtgtagactacgtctgccagctgaaattcccttctggcaattaccctccatgtataggtgataatcgagatctgcttgtccattggtgccatggcgcccctggggtaatctacatgctcatccaggcctataaggtattcagagaggaaaagtatctctgtgatgcctatcagtgtgctgatgtgatctggcaatatgggttgctgaagaagggatatgggctgtgccacggttctgcagggaatgcctatgccttcctgacactctacaacctcacacaggacatgaagtacctgtatagggcctgtaagtttgctgaatggtgcttagagtatggagaacatggatgcagaacaccagacacccctttctctctctttgaaggaatggctggaacaatatatttcctggctgacctgctagtccccacaaaagccaggttccctgcatttgaactctgaaaggatagcatgccacctgcaactcactgcatgaccctttctgtatattcaaacccaagctaagtgcttccgttgctttccaaggaaacaaagagtcaaactgtggacttgattttgttagcttttttcagaatttatctttcattcagttcccttccattatcatttacttttacttagaagtatccaaggaagtcttttaactttaatttccatttcttcctaaagggagagtgagtgatatgtacagtgttttgagattgtatacatatattccagaacttggaggaaatcttatttaagtttatgaatataaccatctgttactgttctaaaaatgtttaaaagaaactcaatacagataaagataaatatgtgactattattgggtattacacttcacttctctttaatatttttcctccaactggagggcagacaattttctgacttgcttttctctaggtggttcattttgaaaggggacagaaatataactaaatgcttccaggagaaaaattccaagagttacaatctggacttggtacctaaatatcattttttaaattcttgatgcctatttggactagaggtaaacatactttcagattggcctgtttttgtcggtaaggcatacagccttcagaagccaacatttttaatcaaaaacttataaaacatgatgatcattgtgaaaattctgagttgaaggttagtttaagataagctaacaataacagtctgtgttttctctaaaataatctgagttttttggaactctttatttaaatatgtgtgtttttcagtattcaaataagatcaggaagccaattttctatgtatgaatatgctttaacctaggatttcagtccactctgactgactttctaaactttaacttgggtttttacagtgactatgcattagtgctgactctttggtataagccataaaatattttccttcctatcaatttatctgaactttggtcttttcactaaattgtacagtattctacttctgtttaaaacggggagatgagaaagggaatactatctaaccaataacttgaacaaaaacactaaactaagcatttaatagaaatgctttttattgaggaggtattatccagagttcatgcttagaacaaatgcatctttgcgtatcctagacttaacaattcatcagtttctgagaccacagaatcaggttttccgtagtagataaagactctctggtgcttcaaattctgttcaagtgttttgactcatcagcttctactctttctattactgcctttgcctggcttgttttgtctctttgcaactgattttgcaaaaaaaaattgtagctttaaaataacagggtctaagtattttaaatgtgcctatttcacagctctcttggtcacaaaaacatgctatttttattggaacttcaaaccaaatccccactgagtgtgtactggttcctgcaggtagcagtctcctattatctcctgtttagcaccaaaagagctaatattattggaaactgaccttttaaaggccactggcagtaggatttaaaaagcagcccactgctcagtttccaggatcagcttcctccttctgtcacttgtgtaagttggcactaccttgtgcctctcagattgctgaagtgctgctggtaagcatgtgcatgctctgcctttcttgtgaaagttttcaatcagcgatatcagcacttacagtaagaagtaaaagtagtgcacagcaaagctaatttgcctttgcctggggtgttcagcttgaaagaataaagctcatttggtttagttaaatgtcttactctactgtgcctatgcttttagctgcgttactaagcaagggaaaaataacagtttctctgagccagagaagacttgatcacagttctccaagcatcgtgatagcaatgcttaaccccaggaagatttcaaggcagggagaagaacatttcaaataagattcttgttaacccatttatgcctagtgttccattattggaatgctaagcttgtgggagtcatttacatcctactgctcaaagtcattgccaaggtctgatttttcacacaaaaaattgcaacccccagcataaatgggttagctactgtcatcagttagcaaattcatccacacaaacacaattagagtttggtttttttttaagcttttcaaaacttactaaactggcacaattttatatgtatgctatttgttgtatttatgcttaagagcaaaaaagttttgatgggattttaaattcaggcaaagcctacaacgctgagacaatcccctaacaacatggtagtaactaaagaaacttttatactaggcttcttagttttaaaaggaagtggcatcattgtttcagttctagtttgtatttttctctcagatatttttcttctttaaaaatctttcccagaagttggttcctagaaaactcaataccatcatctcttatctctatacagggactaggtaataaaaccttcaaaggttgtcaaaggtcatcaagcagtgttcatttatcctgtcacatgtttctgtttctatagtaatttagaaattgcaaatagttaacttttcatcttgtcagtctttaatcctgagtcatgtggctctcttttcatctttgatgtcagttccaattatttggcatcaaaaaccttcatgtgtgccggaccagtcaaagaatcccacgtcaaaattgagagaacgaacaagccttcatcgcatggcacatttgtataaaaagaaagggagagatgttgcaggaagtcagggaccccaaacagagggaccggctgaagccatggcagaagaacataaattgtgaagatttcatggacatttattagttccccaaattagtacttttataatttcttatgcctgtctttactgcaatctctgaacataaattgtgaagatttaatggacacatcacttccttaatcaatactcttgtgatttcctaaaa

SEQ ID NO: 455385 - DNA, 4503 bp, Homo sapiens
ggctgcggggtgagaggccagggccgagaagggcttcaggacgcgggaggcgcacttgcttcaagtcgcgggcgtgggaacggggttgcaaaacggggcctctttgtccgggcttgcttccggcgtcatggctcaaagggccttcccgaatccttatgctgattataacaaatccctggccgaaggctactttgatgctgccgggaggctgactcctgagttctcacaacgcttgaccaataagattcgggagcttcttcagcaaatggagagaggcctgaaatcagcagaccctcgggatggcaccggttacactggctgggcaggtattgctgtgctttacttacatctttatgatgtatttggggaccctgcctacctacagttagcacatggctatgtaaagcaaagtctgaactgcttaaccaagcgctccatcaccttcctttgtggggatgcaggccccctggcagtggccgctgtgctatatcacaagatgaacaatgagaagcaggcagaagattgcatcacacggctaattcacctaaataagattgatcctcatgctccaaatgaaatgctctatgggcgaataggctacatctatgctcttctttttgtcaataagaactttggagtggaaaagattcctcaaagccatattcagcagatttgtgaaacaattttaacctctggagaaaacctagctaggaagagaaacttcacggcaaagtctccactgatgtatgaatggtaccaggaatattatgtaggggctgctcatggcctggctggaatttattactacctgatgcagcccagccttcaagtgagccaagggaagttacatagtttggtcaagcccagtgtagactacgtctgccagctgaaattcccttctggcaattaccctccatgtataggtgataatcgagatctgcttgtccattggtgccatggcgcccctggggtaatctacatgctcatccaggcctataaggtattcagagaggaaaagtatctctgtgatgcctatcagtgtgctgatgtgatctggcaatatgggttgctgaagaagggatatgggctgtgccacggttctgcagggaatgcctatgccttcctgacactctacaacctcacacaggacatgaagtacctgtatagggcctgtaagtttgctgaatggtgcttagagtatggagaacatggatgcagaacaccagacacccctttctctctctttgaaggaatggctggaacaatatatttcctggctgacctgctagtccccacaaaagccaggttccctgcatttgaactctgaaaggatagcatgccacctgcaactcactgcatgaccctttctgtatattcaaacccaagctaagtgcttccgttgctttccaaggaaacaaagagtcaaactgtggacttgattttgttagcttttttcagaatttatctttcattcagttcccttccattatcatttacttttacttagaagtatccaaggaagtcttttaactttaatttccatttcttcctaaagggagagtgagtgatatgtacagtgttttgagattgtatacatatattccagaacttggaggaaatcttatttaagtttatgaatataaccatctgttactgttctaaaaatgtttaaaagaaactcaatacagataaagataaatatgtgactattattgggtattacacttcacttctctttaatatttttcctccaactggagggcagacaattttctgacttgcttttctctaggtggttcattttgaaaggggacagaaatataactaaatgcttccaggagaaaaattccaagagttacaatctggacttggtacctaaatatcattttttaaattcttgatgcctatttggactagaggtaaacatactttcagattggcctgtttttgtcggtaaggcatacagccttcagaagccaacatttttaatcaaaaacttataaaacatgatgatcattgtgaaaattctgagttgaaggttagtttaagataagctaacaataacagtctgtgttttctctaaaataatctgagttttttggaactctttatttaaatatgtgtgtttttcagtattcaaataagatcaggaagccaattttctatgtatgaatatgctttaacctaggatttcagtccactctgactgactttctaaactttaacttgggtttttacagtgactatgcattagtgctgactctttggtataagccataaaatattttccttcctatcaatttatctgaactttggtcttttcactaaattgtacagtattctacttctgtttaaaacggggagatgagaaagggaatactatctaaccaataacttgaacaaaaacactaaactaagcatttaatagaaatgctttttattgaggaggtattatccagagttcatgcttagaacaaatgcatctttgcgtatcctagacttaacaattcatcagtttctgagaccacagaatcaggttttccgtagtagataaagactctctggtgcttcaaattctgttcaagtgttttgactcatcagcttctactctttctattactgcctttgcctggcttgttttgtctctttgcaactgattttgcaaaaaaaaattgtagctttaaaataacagggtctaagtattttaaatgtgcctatttcacagctctcttggtcacaaaaacatgctatttttattggaacttcaaaccaaatccccactgagtgtgtactggttcctgcaggtagcagtctcctattatctcctgtttagcaccaaaagagctaatattattggaaactgaccttttaaaggccactggcagtaggatttaaaaagcagcccactgctcagtttccaggatcagcttcctccttctgtcacttgtgtaagttggcactaccttgtgcctctcagattgctgaagtgctgctggtaagcatgtgcatgctctgcctttcttgtgaaagttttcaatcagcgatatcagcacttacagtaagaagtaaaagtagtgcacagcaaagctaatttgcctttgcctggggtgttcagcttgaaagaataaagctcatttggtttagttaaatgtcttactctactgtgcctatgcttttagctgcgttactaagcaagggaaaaataacagtttctctgagccagagaagacttgatcacagttctccaagcatcgtgatagcaatgcttaaccccaggaagatttcaaggcagggagaagaacatttcaaataagattcttgttaacccatttatgcctagtgttccattattggaatgctaagcttgtgggagtcatttacatcctactgctcaaagtcattgccaaggtctgatttttcacacaaaaaattgcaacccccagcataaatgggttagctactgtcatcagttagcaaattcatccacacaaacacaattagagtttggtttttttttaagcttttcaaaacttactaaactggcacaattttatatgtatgctatttgttgtatttatgcttaagagcaaaaaagttttgatgggattttaaattcaggcaaagcctacaacgctgagacaatcccctaacaacatggtagtaactaaagaaacttttatactaggcttcttagttttaaaaggaagtggcatcattgtttcagttctagtttgtatttttctctcagatatttttcttctttaaaaatctttcccagaagttggttcctagaaaactcaataccatcatctcttatctctatacagggactaggtaataaaaccttcaaaggttgtcaaaggtcatcaagcagtgttcatttatcctgtcacatgtttctgtttctatagtaatttagaaattgcaaatagttaacttttcatcttgtcagtctttaatcctgagtcatgtggctctcttttcatctttgatgtcagttccaattatttggcatcaaaaaccttcatggtaggtagagttttaggtaaaagtggatctagggttactttctttattaacatttcctaaataactgaattgagagacatactctgctactatgtcctcaggttaatttttgtctgatcttacgatgccctgccttttactagctactttagaaatagaaaatgtgaagagtgactatttacatgtatactcctttggctgctagaactcatctgtagtcctttattatttacactgaattccaatttcatttctgcttccgctaagtaagagcacctcattcctgtgttttctctactattgagctgtagacgaactgtttctctaattataaagcaaactgtttgggatattcagggaaactaccccaatgttatgttgtcatttaatgggaaaggctgggatcatatgtatttctatgttctgtaaagtatttgacttactagttctcaataaaattttattaggactata

SEQ ID NO: 455386 - DNA, 4536 bp, Homo sapiens
ggctgcggggtgagaggccagggccgagaagggcttcaggacgcgggaggcgcacttgcttcaagtcgcgggcgtgggaacggggcttgcttccggcgtcatggctcaaagggccttcccgaatccttatgctgattataacaaatccctggccgaaggctactttgatgctgccgggaggctgactcctgagttctcacaacgcttgaccaataagattcgggagcttcttcagcaaatggagagaggcctgaaatcagcagaccctcgggatggcaccggttacactggctgggcaggtattgctgtgctttacttacatctttatgatgtatttggggaccctgcctacctacagttagcacatggctatgtaaagcaaagtctgaactgcttaaccaagcgctccatcaccttcctttgtggggatgcaggccccctggcagtggccgctgtgctatatcacaagatgaacaatgagaagcaggcagaagattgcatcacacggctaattcacctaaataagattgatcctcatgctccaaatgaaatgctctatgggcgaataggctacatctatgctcttctttttgtcaataagaactttggagtggaaaagattcctcaaagccatattcagcagatttgtgaaacaattttaacctctggagaaaacctagctaggaagagaaacttcacggcaaagtctccactgatgtatgaatggtaccaggaatattatgtaggggctgctcatggcctggctggaatttattactacctgatgcagcccagccttcaagtgagccaagggaagttacatagtttggtcaagcccagtgtagactacgtctgccagctgaaattcccttctggcaattaccctccatgtataggtgataatcgagatctgcttgtccattggtgccatggcgcccctggggtaatctacatgctcatccaggcctataaggtattcagagaggaaaagtatctctgtgatgcctatcagtgtgctgatgtgatctggcaatatgggttgctgaagaagggatatgggctgtgccacggttctgcagggaatgcctatgccttcctgacactctacaacctcacacaggacatgaagtacctgtatagggcctgtaagtttgctgaatggtgcttagagtatggagaacatggatgcagaacaccagacacccctttctctctctttgaaggaatggctggaacaatatatttcctggctgacctgctagtccccacaaaagccaggttccctgcatttgaactctgaaaggatagcatgccacctgcaactcactgcatgaccctttctgtatattcaaacccaagctaagtgcttccgttgctttccaaggaaacaaagagtcaaactgtggacttgattttgttagcttttttcagaatttatctttcattcagttcccttccattatcatttacttttacttagaagtatccaaggaagtcttttaactttaatttccatttcttcctaaagggagagtgagtgatatgtacagtgttttgagattgtatacatatattccagaacttggaggaaatcttatttaagtttatgaatataaccatctgttactgttctaaaaatgtttaaaagaaactcaatacagataaagataaatatgtgactattattgggtattacacttcacttctctttaatatttttcctccaactggagggcagacaattttctgacttgcttttctctaggtggttcattttgaaaggggacagaaatataactaaatgcttccaggagaaaaattccaagagttacaatctggacttggtacctaaatatcattttttaaattcttgatgcctatttggactagaggtaaacatactttcagattggcctgtttttgtcggtaaggcatacagccttcagaagccaacatttttaatcaaaaacttataaaacatgatgatcattgtgaaaattctgagttgaaggttagtttaagataagctaacaataacagtctgtgttttctctaaaataatctgagttttttggaactctttatttaaatatgtgtgtttttcagtattcaaataagatcaggaagccaattttctatgtatgaatatgctttaacctaggatttcagtccactctgactgactttctaaactttaacttgggtttttacagtgactatgcattagtgctgactctttggtataagccataaaatattttccttcctatcaatttatctgaactttggtcttttcactaaattgtacagtattctacttctgtttaaaacggggagatgagaaagggaatactatctaaccaataacttgaacaaaaacactaaactaagcatttaatagaaatgctttttattgaggaggtattatccagagttcatgcttagaacaaatgcatctttgcgtatcctagacttaacaattcatcagtttctgagaccacagaatcaggttttccgtagtagataaagactctctggtgcttcaaattctgttcaagtgttttgactcatcagcttctactctttctattactgcctttgcctggcttgttttgtctctttgcaactgattttgcaaaaaaaaattgtagctttaaaataacagggtctaagtattttaaatgtgcctatttcacagctctcttggtcacaaaaacatgctatttttattggaacttcaaaccaaatccccactgagtgtgtactggttcctgcaggtagcagtctcctattatctcctgtttagcaccaaaagagctaatattattggaaactgaccttttaaaggccactggcagtaggatttaaaaagcagcccactgctcagtttccaggatcagcttcctccttctgtcacttgtgtaagttggcactaccttgtgcctctcagattgctgaagtgctgctggtaagcatgtgcatgctctgcctttcttgtgaaagttttcaatcagcgatatcagcacttacagtaagaagtaaaagtagtgcacagcaaagctaatttgcctttgcctggggtgttcagcttgaaagaataaagctcatttggtttagttaaatgtcttactctactgtgcctatgcttttagctgcgttactaagcaagggaaaaataacagtttctctgagccagagaagacttgatcacagttctccaagcatcgtgatagcaatgcttaaccccaggaagatttcaaggcagggagaagaacatttcaaataagattcttgttaacccatttatgcctagtgttccattattggaatgctaagcttgtgggagtcatttacatcctactgctcaaagtcattgccaaggtctgatttttcacacaaaaaattgcaacccccagcataaatgggttagctactgtcatcagttagcaaattcatccacacaaacacaattagagtttggtttttttttaagcttttcaaaacttactaaactggcacaattttatatgtatgctatttgttgtatttatgcttaagagcaaaaaagttttgatgggattttaaattcaggcaaagcctacaacgctgagacaatcccctaacaacatggtagtaactaaagaaacttttatactaggcttcttagttttaaaaggaagtggcatcattgtttcagttctagtttgtatttttctctcagatatttttcttctttaaaaatctttcccagaagttggttcctagaaaactcaataccatcatctcttatctctatacagggactaggtaataaaaccttcaaaggttgtcaaaggtcatcaagcagtgttcatttatcctgtcacatgtttctgtttctatagtaatttagaaattgcaaatagttaacttttcatcatgtaaaaagttaacattatcctatttccatagataccatggacggcggtgtggcctgagttgtcagtctttaatcctgagtcatgtggctctcttttcatctttgatgtcagttccaattatttggcatcaaaaaccttcatggtaggtagagttttaggtaaaagtggatctagggttactttctttattaacatttcctaaataactgaattgagagacatactctgctactatgtcctcaggttaatttttgtctgatcttacgatgccctgccttttactagctactttagaaatagaaaatgtgaagagtgactatttacatgtatactcctttggctgctagaactcatctgtagtcctttattatttacactgaattccaatttcatttctgcttccgctaagtaagagcacctcattcctgtgttttctctactattgagctgtagacgaactgtttctctaattataaagcaaactgtttgggatattcagggaaactaccccaatgttatgttgtcatttaatgggaaaggctgggatcatatgtatttctatgttctgtaaagtatttgacttactagttctcaataaaattttattaggactata

SEQ ID NO: 455387 - DNA, 4478 bp, Homo sapiens
aggagtagagtttgggatggcagcctcagaaggacaaacttaggccaaggagggagggagttggggtggagactgagcttctccagttggaggtctggagctaggactcttcattgaaaccggagagaaggaaaaggagagagtgaggctgactttttaactgaactccaaaattctctgagcaatagaatgggcctaatatgtaccaggcttgcttccggcgtcatggctcaaagggccttcccgaatccttatgctgattataacaaatccctggccgaaggctactttgatgctgccgggaggctgactcctgagttctcacaacgcttgaccaataagattcgggagcttcttcagcaaatggagagaggcctgaaatcagcagaccctcgggatggcaccggttacactggctgggcaggtattgctgtgctttacttacatctttatgatgtatttggggaccctgcctacctacagttagcacatggctatgtaaagcaaagtctgaactgcttaaccaagcgctccatcaccttcctttgtggggatgcaggccccctggcagtggccgctgtgctatatcacaagatgaacaatgagaagcaggcagaagattgcatcacacggctaattcacctaaataagattgatcctcatgctccaaatgaaatgctctatgggcgaataggctacatctatgctcttctttttgtcaataagaactttggagtggaaaagattcctcaaagccatattcagcagatttgtgaaacaattttaacctctggagaaaacctagctaggaagagaaacttcacggcaaagtctccactgatgtatgaatggtaccaggaatattatgtaggggctgctcatggcctggctggaatttattactacctgatgcaggtattcagagaggaaaagtatctctgtgatgcctatcagtgtgctgatgtgatctggcaatatgggttgctgaagaagggatatgggctgtgccacggttctgcagggaatgcctatgccttcctgacactctacaacctcacacaggacatgaagtacctgtatagggcctgtaagtttgctgaatggtgcttagagtatggagaacatggatgcagaacaccagacacccctttctctctctttgaaggaatggctggaacaatatatttcctggctgacctgctagtccccacaaaagccaggttccctgcatttgaactctgaaaggatagcatgccacctgcaactcactgcatgaccctttctgtatattcaaacccaagctaagtgcttccgttgctttccaaggaaacaaagagtcaaactgtggacttgattttgttagcttttttcagaatttatctttcattcagttcccttccattatcatttacttttacttagaagtatccaaggaagtcttttaactttaatttccatttcttcctaaagggagagtgagtgatatgtacagtgttttgagattgtatacatatattccagaacttggaggaaatcttatttaagtttatgaatataaccatctgttactgttctaaaaatgtttaaaagaaactcaatacagataaagataaatatgtgactattattgggtattacacttcacttctctttaatatttttcctccaactggagggcagacaattttctgacttgcttttctctaggtggttcattttgaaaggggacagaaatataactaaatgcttccaggagaaaaattccaagagttacaatctggacttggtacctaaatatcattttttaaattcttgatgcctatttggactagaggtaaacatactttcagattggcctgtttttgtcggtaaggcatacagccttcagaagccaacatttttaatcaaaaacttataaaacatgatgatcattgtgaaaattctgagttgaaggttagtttaagataagctaacaataacagtctgtgttttctctaaaataatctgagttttttggaactctttatttaaatatgtgtgtttttcagtattcaaataagatcaggaagccaattttctatgtatgaatatgctttaacctaggatttcagtccactctgactgactttctaaactttaacttgggtttttacagtgactatgcattagtgctgactctttggtataagccataaaatattttccttcctatcaatttatctgaactttggtcttttcactaaattgtacagtattctacttctgtttaaaacggggagatgagaaagggaatactatctaaccaataacttgaacaaaaacactaaactaagcatttaatagaaatgctttttattgaggaggtattatccagagttcatgcttagaacaaatgcatctttgcgtatcctagacttaacaattcatcagtttctgagaccacagaatcaggttttccgtagtagataaagactctctggtgcttcaaattctgttcaagtgttttgactcatcagcttctactctttctattactgcctttgcctggcttgttttgtctctttgcaactgattttgcaaaaaaaaattgtagctttaaaataacagggtctaagtattttaaatgtgcctatttcacagctctcttggtcacaaaaacatgctatttttattggaacttcaaaccaaatccccactgagtgtgtactggttcctgcaggtagcagtctcctattatctcctgtttagcaccaaaagagctaatattattggaaactgaccttttaaaggccactggcagtaggatttaaaaagcagcccactgctcagtttccaggatcagcttcctccttctgtcacttgtgtaagttggcactaccttgtgcctctcagattgctgaagtgctgctggtaagcatgtgcatgctctgcctttcttgtgaaagttttcaatcagcgatatcagcacttacagtaagaagtaaaagtagtgcacagcaaagctaatttgcctttgcctggggtgttcagcttgaaagaataaagctcatttggtttagttaaatgtcttactctactgtgcctatgcttttagctgcgttactaagcaagggaaaaataacagtttctctgagccagagaagacttgatcacagttctccaagcatcgtgatagcaatgcttaaccccaggaagatttcaaggcagggagaagaacatttcaaataagattcttgttaacccatttatgcctagtgttccattattggaatgctaagcttgtgggagtcatttacatcctactgctcaaagtcattgccaaggtctgatttttcacacaaaaaattgcaacccccagcataaatgggttagctactgtcatcagttagcaaattcatccacacaaacacaattagagtttggtttttttttaagcttttcaaaacttactaaactggcacaattttatatgtatgctatttgttgtatttatgcttaagagcaaaaaagttttgatgggattttaaattcaggcaaagcctacaacgctgagacaatcccctaacaacatggtagtaactaaagaaacttttatactaggcttcttagttttaaaaggaagtggcatcattgtttcagttctagtttgtatttttctctcagatatttttcttctttaaaaatctttcccagaagttggttcctagaaaactcaataccatcatctcttatctctatacagggactaggtaataaaaccttcaaaggttgtcaaaggtcatcaagcagtgttcatttatcctgtcacatgtttctgtttctatagtaatttagaaattgcaaatagttaacttttcatcatgtaaaaagttaacattatcctatttccatagataccatggacggcggtgtggcctgagttgtcagtctttaatcctgagtcatgtggctctcttttcatctttgatgtcagttccaattatttggcatcaaaaaccttcatggtaggtagagttttaggtaaaagtggatctagggttactttctttattaacatttcctaaataactgaattgagagacatactctgctactatgtcctcaggttaatttttgtctgatcttacgatgccctgccttttactagctactttagaaatagaaaatgtgaagagtgactatttacatgtatactcctttggctgctagaactcatctgtagtcctttattatttacactgaattccaatttcatttctgcttccgctaagtaagagcacctcattcctgtgttttctctactattgagctgtagacgaactgtttctctaattataaagcaaactgtttgggatattcagggaaactaccccaatgttatgttgtcatttaatgggaaaggctgggatcatatgtatttctatgttctgtaaagtatttgacttactagttctcaataaaattttattaggactata

SEQ ID NO: 455388 - DNA, 4086 bp, Homo sapiens
ggctgcggggtgagaggccagggccgagaagggcttcaggacgcgggaggcgcacttgcttcaagtcgcgggcgtgggaacggggttgcaaaacggggcctctttgtccgggcttgcttccggcgtcatggctcaaagggccttcccgaatccttatgctgattataacaaatccctggccgaaggctactttgatgctgccgggaggctgactcctgagttctcacaacgcttgaccaataagattcgggagcttcttcagcaaatggagagaggcctgaaatcagcagaccctcgggatggcaccggttacactggctgggcaggtattgctgtgctttacttacatctttatgatgtatttggggaccctgcctacctacagttagcacatggctatgtaaagcaaagtctgaactgcttaaccaagcgctccatcaccttcctttgtggggatgcaggccccctggcagtggccgctgtgctatatcacaagatgaacaatgagaagcaggcagaagattgcatcacacggctaattcacctaaataagattgatcctcatgctccaaatgaaatgctctatgggcgaataggctacatctatgctcttctttttgtcaataagaactttggagtggaaaagattcctcaaagccatattcagcagatttgtgaaacaattttaacctctggagaaaacctagctaggaagagaaacttcacggcaaagtctccactgatgtatgaatggtaccaggaatattatgtaggggctgctcatggcctggctggaatttattactacctgatgcagcccagccttcaagtgagccaagggaagttacatagtttggtcaagcccagtgtagactacgtctgccagctgaaattcccttctggcaattaccctccatgtataggtgataatcgagatctgcttgtccattggtgccatggcgcccctggggtaatctacatgctcatccaggcctataaggtattcagagaggaaaagtatctctgtgatgcctatcagtgtgctgatgtgatctggcaatatgggttgctgaagaagggatatgggctgtgccacggttctgcagggaatgcctatgccttcctgacactctacaacctcacacaggacatgaagtacctgtatagggcctgtaagtttgctgaatggtgcttagagtatggagaacatggatgcagaacaccagacacccctttctctctctttgaaggaatggctggaacaatatatttcctggctgacctgctagtccccacaaaagccaggttccctgcatttgaactctgaaaggatagcatgccacctgcaactcactgcatgaccctttctgtatattcaaacccaagctaagtgcttccgttgctttccaaggaaacaaagagtcaaactgtggacttgattttgttagcttttttcagaatttatctttcattcagttcccttccattatcatttacttttacttagaagtatccaaggaagtcttttaactttaatttccatttcttcctaaagggagagtgagtgatatgtacagtgttttgagattgtatacatatattccagaacttggaggaaatcttatttaagtttatgaatataaccatctgttactgttctaaaaatgtttaaaagaaactcaatacagataaagataaatatgtgactattattgggtattacacttcacttctctttaatatttttcctccaactggagggcagacaattttctgacttgcttttctctaggtggttcattttgaaaggggacagaaatataactaaatgcttccaggagaaaaattccaagagttacaatctggacttggtacctaaatatcattttttaaattcttgatgcctatttggactagaggtaaacatactttcagattggcctgtttttgtcggtaaggcatacagccttcagaagccaacatttttaatcaaaaacttataaaacatgatgatcattgtgaaaattctgagttgaaggttagtttaagataagctaacaataacagtctgtgttttctctaaaataatctgagttttttggaactctttatttaaatatgtgtgtttttcagtattcaaataagatcaggaagccaattttctatgtatgaatatgctttaacctaggatttcagtccactctgactgactttctaaactttaacttgggtttttacagtgactatgcattagtgctgactctttggtataagccataaaatattttccttcctatcaatttatctgaactttggtcttttcactaaattgtacagtattctacttctgtttaaaacggggagatgagaaagggaatactatctaaccaataacttgaacaaaaacactaaactaagcatttaatagaaatgctttttattgaggaggtattatccagagttcatgcttagaacaaatgcatctttgcgtatcctagacttaacaattcatcagtttctgagaccacagaatcaggttttccgtagtagataaagactctctggtgcttcaaattctgttcaagtgttttgactcatcagcttctactctttctattactgcctttgcctggcttgttttgtctctttgcaactgattttgcaaaaaaaaattgtagctttaaaataacagggtctaagtattttaaatgtgcctatttcacagctctcttggtcacaaaaacatgctatttttattggaacttcaaaccaaatccccactgagtgtgtactggttcctgcaggtagcagtctcctattatctcctgtttagcaccaaaagagctaatattattggaaactgaccttttaaaggccactggcagtaggatttaaaaagcagcccactgctcagtttccaggatcagcttcctccttctgtcacttgtgtaagttggcactaccttgtgcctctcagattgctgaagtgctgctggtaagcatgtgcatgctctgcctttcttgtgaaagttttcaatcagcgatatcagcacttacagtaagaagtaaaagtagtgcacagcaaagctaatttgcctttgcctggggtgttcagcttgaaagaataaagctcatttggtttagttaaatgtcttactctactgtgcctatgcttttagctgcgttactaagcaagggaaaaataacagtttctctgagccagagaagacttgatcacagttctccaagcatcgtgatagcaatgcttaaccccaggaagatttcaaggcagggagaagaacatttcaaataagattcttgttaacccatttatgcctagtgttccattattggaatgctaagcttgtgggagtcatttacatcctactgctcaaagtcattgccaaggtctgatttttcacacaaaaaattgcaacccccagcataaatgggttagctactgtcatcagttagcaaattcatccacacaaacacaattagagtttggtttttttttaagcttttcaaaacttactaaactggcacaattttatatgtatgctatttgttgtatttatgcttaagagcaaaaaagttttgatgggattttaaattcaggcaaagcctacaacgctgagacaatcccctaacaacatggtagtaactaaagaaacttttatactaggcttcttagttttaaaaggaagtggcatcattgtttcagttctagtttgtatttttctctcagatatttttcttctttaaaaatctttcccagaagttggttcctagaaaactcaataccatcatctcttatctctatacagggactaggtaataaaaccttcaaaggttgtcaaaggtcatcaagcagtgttcatttatcctgtcacatgtttctgtttctatagtaatttagaaattgcaaatagttaacttttcatcatgtaaaaagttaacattatcctatttccatagataccatggacggcggtgtggcctgagttgtcagtctttaatcctagatccacttttacctaaaactctacctaccatgaaggtttttgatgccaaataattggaacg

SEQ ID NO: 455389 - DNA, 328 bp, Homo sapiens
gcgtcatggctcaaagggccttcccgaatccttatgctgattataacaaatccctggccgaaggctactttgatgctgccgggagggtgagtttaggatatgtctgcctgcatccctgcctctccccacggtgttcggaaaggtgctcatttttgcctgagagagttgagcatccccctttaaaaaaatacatgattcgacgataaatacgtaaattatttaaaaatacatgttaatatatacaaattgagctctaacataatgttaaatgtgtcattgttaacattattaattgaaataaactcaattattgatagtataaatttta

SEQ ID NO: 455390 - DNA, 5191 bp, Homo sapiens
tgcaggagactgcgagccctgcagaactgctagctgcgggggagagggcaggggtcgggcgcctgtggcggagccgggctggggccagggcagggaggctgacaagcggcgggagaagccggcggagggcgggatcgcgcctcctgacatgttgggggtatccctggccgggccgggccggggctaagagcggcgctgcgggccggggtcggggtcgggtcgcggtccgcccccgctgtccctccgtcctgccctgtcgaggacgtgcgttccgcactcggccgcctccagagggagcgagggaagcggctagaggatcggggagaaggagcattcgccggaggctggaggaggctgacccgcgtccccgcccagcctgctcctatgcggtacttgaaggatggcgaagaggtcgcgcagtgaggatgaggatgatgaccttcagtatgccgatcatgattatgaagtaccacaacaaaaaggactgaagaaactctggaacagagtaaaatggacaagggacgaggatgataaattaaagaagttggttgaacaacatggaactgatgattggactctaattgctagtcatcttcaaaatcgctctgattttcagtgccagcatcgatggcagaaagttttaaatcctgaattgataaagggtccttggactaaagaagaagatcagagggttattgaattagttcagaaatatgggccaaaaagatggtctttaattgcaaaacatttaaaaggaagaataggcaagcagtgtagagaaagatggcataatcatctgaatcctgaggtaaagaaatcttcctggacagaagaggaggacaggatcatctatgaagcacataagcggttgggaaatcgttgggcagaaattgccaaactacttccaggaaggactgataattctatcaaaaatcattggaattctactatgcgaagaaaagtggaacaggagggctatttacaagatggaataaaatcagaacgatcttcatctaaacttcaacacaaaccttgtgcagctatggatcatatgcaaacccagaatcagttttacatacctgttcagatccctgggtatcagtatgtgtcacctgaaggcaattgtatagaacatgttcagcctacttctgcctttattcagcaacccttcattgatgaagatcctgataaggaaaagaaaataaaggaacttgagatgcttcttatgtcagctgagaatgaagttagaagaaagcgaattccatcacagcctggaagtttttctagctggtctggtagtttcctcatggatgataacatgtctaatactctaaatagccttgacgagcacactagtgagttttacagtatggatgaaaatcagcctgtgtctgctcagcagaattcacccacaaagttcctggccgtggaggcaaacgctgtgttatcctctttgcagaccatcccagaatttgcagagactctagaacttattgaatctgatcctgtagcatggagtgacgttaccagttttgatatttctgatgctgctgcttctcctatcaaatccaccccagttaaattaatgagaattcagcacaatgaaggagccatggaatgccaatttaacgtcagtcttgtacttgaagggaaaaaaaacacttgtaatggtggcaacagtgaagctgttcctttaacatccccaaatatagccaagtttagcactccaccagccatcctcagaaagaagagaaaaatgcgagtgggtcattccccaggcagcgaacttagggatggctcattgaacgatggtggtaatatggcgctaaaacatacaccactgaaaacactaccattttctccttcacagtttttcaacacatgtcctggtaatgaacaacttaatatagaaaatccttcatttacatcaacccctatttgtgggcagaaagctctcattacaactcctcttcataaggaaacaactcccaaagatcaaaaggaaaatgtagggtttagaacacctactattagaagatctatactgggtaccacaccaagaactcctactccttttaagaatgcgcttgctgctcaggagaaaaaatatggacctcttaaaattgtgtcccagccacttgctttcttggaagaagatattcgggaagttttaaaagaagaaactggaacagacctattcctcaaagaggaagatgaacctgcttacaaaagctgcaaacaagagaataccgcttctgggaagaaagtcagaaaatcactagtcttagataattgggaaaaagaagaatcaggcactcaactgttgactgaagacatttcagacatgcagtcagaaaatagatttactacatccttattaatgataccattattggaaatacatgacaataggtgcaacttgattcctgaaaaacaagatataaattcaaccaacaaaacatatacacttactaaaaagaaaccaaaccctaacacttccaaagttgtcaaattggaaaagaatcttcagtcaaattgtgaatgggaaacagtggtttatgggaagacagaagaccaacttattatgactgaacaagcaagaagatatctgagtacttacacagctaccagtagtacttcaagagctctcatactgtaattgttattaaaattgatgaaatgccccactcccttactgcagtctctactaaattaggttgcagtgaaatttttctcaattagttgtttttaaagttgtaagatagcccttttaatacagcatcttttttctattctatatagtaggcagaaagctagtaagtcacttaaggggtagatagtttcatagtttattttttaagagatgagatttttaaaaattgtttttaaagaacaagatgggaaaataatagaatgttcatggatttctaaaagtaaattctcatatattttcttcacaagatatatgttgctactctcttgatgctgcagttttgttatagataggtgtatgagtatatatgatttctgaaattagtctatgtatggaaagcacacatgattttatgaagtacttttgcccatgtgctgatttacttaggctaccatttacaaagaaacacattgaaaaggaatttaaaggaaggatagaaagttgcactactaattttttgttttttttttcagaagcagtaaaattaactacagtgttaaatgtatttatttgagcatagtactgaaaacaaaaagcattcaaaaaagagttttttctttattagtaaatagtattttcttaatctcagaggagctgagagttttgttgaatgtattgtacagtatgtaggagcaggagaactttgtaaattggaaagaagtctgtttttataatttatttttatttttaaagcttaaatgtagatatttatacgtatacagggtgcctagaagccaatgttgtttcctgttattacagctaacacagtaaagaataattttgactttaagtatgaaacagtagtaagttatagctgcaaagaatacaatatctatactgtatgtcacatctacctaaatgttgcactatgccctttaaatcatgctggttataaagtagttctaaaaatgtactaaataataatttaatattttctttttaaattatatcgggggtggtcatatacattaatctggtgatttgtatatgtgtttgaaatttttgcattttgtttaaaaaataatatggtaccttggtccctaaaaacagtctgcacttagaagtttatatttactcagtgtttcagaagtggagaacattatcttttatttataaaaatattttgtccttttttaaatgttttgtgtttctctacaggttacaacagttgcttcagttgcctgttttaggtgtttgcacttattttatttcttcttgaaagaatttttatttgcttttgtggtagagattatatgtaattttttttcagtcatataatggtgtgctgtcaacttaaacactgacaggtaaatagaattgtacactgtagtttgaattatttataattgacacactctctccctctccactcctgaagtatgctgctatagaaaatagcagaatcggcttgctgctacgagagaaggaaagagcgaccaccacttgcactgtgtgaaaagataaaaaacaaatgatggcaagttctcaagttaactaaatggaatcaaccattaccaggcaaattcttgcaaataccaaaatactactatgccttataaaacaaaatgaaagcaggttaagattttctgctctgtttgtatgttaatagaaatggaaatactaagtattttaatgcttagctcttgaacagtagacctaaaagggttttaagctatttaaatctacttgctagtttttgcatattttatatatatatatatttatatatatatatagtgagaagtgaagaaaatgtatggtactaagattatgccttattgataaatagataaaccaatttgaatcctcttagcatgtttaagtatgttgattgctttctaattaatgaacttctcacagaaatttcacttagtgaaaccaatgattgtagcaaactcatactggatcatttcagttaccttgaactaatagcacataatggttttttgttgttgttgtttttaatgtagcccttacctggatatacatagtctgcaatcaccaaagtataatatcttgtaaggctatattttttaaagcatattttttcttgagcattaaattatcctaaatggtaatatattgtggataagtctgggcttattggacataatacatatttgggttggtactggttgaatccttcagttaactgctttgttgctttttgcaagattttttatcttaaacatgtcaggcatcttaagtcacctttatactgttttgttcctctgagtttctttcagtatgttatacaaatgccagacataacatgtagcagccatacttgcatggaaactgactacacatacataatactgcattttattgtaaggttttcacattaatacagcaattaccctgactaaattgagttttgtgatatatggaaaacttcattgtaagagaatcttgcatacaatgttgacatattaacatccaaaataaagcatctgtgtacaagctgaaaaaaaaaaa

SEQ ID NO: 455391 - DNA, 5361 bp, Homo sapiens
tgcaggagactgcgagccctgcagaactgctagctgcgggggagagggcaggggtcgggcgcctgtggcggagccgggctggggccagggcagggaggctgacaagcggcgggagaagccggcggagggcgggatcgcgcctcctgacatgttgggggtatccctggccgggccgggccggggctaagagcggcgctgcgggccggggtcggggtcgggtcgcggtccgcccccgctgtccctccgtcctgccctgtcgaggacgtgcgttccgcactcggccgcctccagagggagcgagggaagcggctagaggatcggggagaaggagcattcgccggaggctggaggaggctgacccgcgtccccgcccagcctgctcctatgcggtacttgaaggatggcgaagaggtcgcgcaggtgggtggcacccctttcgcccaggcctgtcggcgccgtctcggctcagattctctttcctatcccgctgccccctcccgccataaggccctccctggcgagggcagaggtttttcttcccgcgtccccgcggccgcttggcctcgatgaccggagggcagctgcgacgtgtggagagttggggaccagggtgtttgaggcgcgggacgtaagagatgcccaggtttctcggtgactctccccgtaatgcgcgtccagatttctgacctcatgctgccacttcttcgaggcaggtttcttgccagtgaggatgaggatgatgaccttcagtatgccgatcatgattatgaagtaccacaacaaaaaggactgaagaaactctggaacagagtaaaatggacaagggacgaggatgataaattaaagaagttggttgaacaacatggaactgatgattggactctaattgctagtcatcttcaaaatcgctctgattttcagtgccagcatcgatggcagaaagttttaaatcctgaattgataaagggtccttggactaaagaagaagatcagagggttattgaattagttcagaaatatgggccaaaaagatggtctttaattgcaaaacatttaaaaggaagaataggcaagcagtgtagagaaagatggcataatcatctgaatcctgaggtaaagaaatcttcctggacagaagaggaggacaggatcatctatgaagcacataagcggttgggaaatcgttgggcagaaattgccaaactacttccaggaaggactgataattctatcaaaaatcattggaattctactatgcgaagaaaagtggaacaggagggctatttacaagatggaataaaatcagaacgatcttcatctaaacttcaacacaaaccttgtgcagctatggatcatatgcaaacccagaatcagttttacatacctgttcagatccctgggtatcagtatgtgtcacctgaaggcaattgtatagaacatgttcagcctacttctgcctttattcagcaacccttcattgatgaagatcctgataaggaaaagaaaataaaggaacttgagatgcttcttatgtcagctgagaatgaagttagaagaaagcgaattccatcaaattcacccacaaagttcctggccgtggaggcaaacgctgtgttatcctctttgcagaccatcccagaatttgcagagactctagaacttattgaatctgatcctgtagcatggagtgacgttaccagttttgatatttctgatgctgctgcttctcctatcaaatccaccccagttaaattaatgagaattcagcacaatgaaggagccatggaatgccaatttaacgtcagtcttgtacttgaagggaaaaaaaacacttgtaatggtggcaacagtgaagctgttcctttaacatccccaaatatagccaagtttagcactccaccagccatcctcagaaagaagagaaaaatgcgagtgggtcattccccaggcagcgaacttagggatggctcattgaacgatggtggtaatatggcgctaaaacatacaccactgaaaacactaccattttctccttcacagtttttcaacacatgtcctggtaatgaacaacttaatatagaaaatccttcatttacatcaacccctatttgtgggcagaaagctctcattacaactcctcttcataaggaaacaactcccaaagatcaaaaggaaaatgtagggtttagaacacctactattagaagatctatactgggtaccacaccaagaactcctactccttttaagaatgcgcttgctgctcaggagaaaaaatatggacctcttaaaattgtgtcccagccacttgctttcttggaagaagatattcgggaagttttaaaagaagaaactggaacagacctattcctcaaagaggaagatgaacctgcttacaaaagctgcaaacaagagaataccgcttctgggaagaaagtcagaaaatcactagtcttagataattgggaaaaagaagaatcaggcactcaactgttgactgaagacatttcagacatgcagtcagaaaatagatttactacatccttattaatgataccattattggaaatacatgacaataggtgcaacttgattcctgaaaaacaagatataaattcaaccaacaaaacatatacacttactaaaaagaaaccaaaccctaacacttccaaagttgtcaaattggaaaagaatcttcagtcaaattgtgaatgggaaacagtggtttatgggaagacagaagaccaacttattatgactgaacaagcaagaagatatctgagtacttacacagctaccagtagtacttcaagagctctcatactgtaattgttattaaaattgatgaaatgccccactcccttactgcagtctctactaaattaggttgcagtgaaatttttctcaattagttgtttttaaagttgtaagatagcccttttaatacagcatcttttttctattctatatagtaggcagaaagctagtaagtcacttaaggggtagatagtttcatagtttattttttaagagatgagatttttaaaaattgtttttaaagaacaagatgggaaaataatagaatgttcatggatttctaaaagtaaattctcatatattttcttcacaagatatatgttgctactctcttgatgctgcagttttgttatagataggtgtatgagtatatatgatttctgaaattagtctatgtatggaaagcacacatgattttatgaagtacttttgcccatgtgctgatttacttaggctaccatttacaaagaaacacattgaaaaggaatttaaaggaaggatagaaagttgcactactaattttttgttttttttttcagaagcagtaaaattaactacagtgttaaatgtatttatttgagcatagtactgaaaacaaaaagcattcaaaaaagagttttttctttattagtaaatagtattttcttaatctcagaggagctgagagttttgttgaatgtattgtacagtatgtaggagcaggagaactttgtaaattggaaagaagtctgtttttataatttatttttatttttaaagcttaaatgtagatatttatacgtatacagggtgcctagaagccaatgttgtttcctgttattacagctaacacagtaaagaataattttgactttaagtatgaaacagtagtaagttatagctgcaaagaatacaatatctatactgtatgtcacatctacctaaatgttgcactatgccctttaaatcatgctggttataaagtagttctaaaaatgtactaaataataatttaatattttctttttaaattatatcgggggtggtcatatacattaatctggtgatttgtatatgtgtttgaaatttttgcattttgtttaaaaaataatatggtaccttggtccctaaaaacagtctgcacttagaagtttatatttactcagtgtttcagaagtggagaacattatcttttatttataaaaatattttgtccttttttaaatgttttgtgtttctctacaggttacaacagttgcttcagttgcctgttttaggtgtttgcacttattttatttcttcttgaaagaatttttatttgcttttgtggtagagattatatgtaattttttttcagtcatataatggtgtgctgtcaacttaaacactgacaggtaaatagaattgtacactgtagtttgaattatttataattgacacactctctccctctccactcctgaagtatgctgctatagaaaatagcagaatcggcttgctgctacgagagaaggaaagagcgaccaccacttgcactgtgtgaaaagataaaaaacaaatgatggcaagttctcaagttaactaaatggaatcaaccattaccaggcaaattcttgcaaataccaaaatactactatgccttataaaacaaaatgaaagcaggttaagattttctgctctgtttgtatgttaatagaaatggaaatactaagtattttaatgcttagctcttgaacagtagacctaaaagggttttaagctatttaaatctacttgctagtttttgcatattttatatatatatatatttatatatatatatagtgagaagtgaagaaaatgtatggtactaagattatgccttattgataaatagataaaccaatttgaatcctcttagcatgtttaagtatgttgattgctttctaattaatgaacttctcacagaaatttcacttagtgaaaccaatgattgtagcaaactcatactggatcatttcagttaccttgaactaatagcacataatggttttttgttgttgttgtttttaatgtagcccttacctggatatacatagtctgcaatcaccaaagtataatatcttgtaaggctatattttttaaagcatattttttcttgagcattaaattatcctaaatggtaatatattgtggataagtctgggcttattggacataatacatatttgggttggtactggttgaatccttcagttaactgctttgttgctttttgcaagattttttatcttaaacatgtcaggcatcttaagtcacctttatactgttttgttcctctgagtttctttcagtatgttatacaaatgccagacataacatgtagcagccatacttgcatggaaactgactacacatacataatactgcattttattgtaaggttttcacattaatacagcaattaccctgactaaattgagttttgtgatatatggaaaacttcattgtaagagaatcttgcatacaatgttgacatattaacatccaaaataaagcatctgtgtacaagctgaaaaaaaaaaa

SEQ ID NO: 455392 - DNA, 4015 bp, Homo sapiens
tgtttttagcctaattgaaatgtgttgaaatctgaatttatgcctacattgagaatgacaaataatattcaaatttcttttgtacctttagcagcctggaagtttttctagctggtctggtagtttcctcatggatgataacatgtctaatactctaaatagccttgacgagcacactagtgagttttacagtatggatgaaaatcagcctgtgtctgctcagcagaattcacccacaaagttcctggccgtggaggcaaacgctgtgttatcctctttgcagaccatcccagaatttgcagagactctagaacttattgaatctgatcctgtagcatggagtgacgttaccagttttgatatttctgatgctgctgcttctcctatcaaatccaccccagttaaattaatgagaattcagcacaatgaaggagccatggaatgccaatttaacgtcagtcttgtacttgaagggaaaaaaaacacttgtaatggtggcaacagtgaagctgttcctttaacatccccaaatatagccaagtttagcactccaccagccatcctcagaaagaagagaaaaatgcgagtgggtcattccccaggcagcgaacttagggatggctcattgaacgatggtggtaatatggcgctaaaacatacaccactgaaaacactaccattttctccttcacagtttttcaacacatgtcctggtaatgaacaacttaatatagaaaatccttcatttacatcaacccctatttgtgggcagaaagctctcattacaactcctcttcataaggaaacaactcccaaagatcaaaaggaaaatgtagggtttagaacacctactattagaagatctatactgggtaccacaccaagaactcctactccttttaagaatgcgcttgctgctcaggagaaaaaatatggacctcttaaaattgtgtcccagccacttgctttcttggaagaagatattcgggaagttttaaaagaagaaactggaacagacctattcctcaaagaggaagatgaacctgcttacaaaagctgcaaacaagagaataccgcttctgggaagaaagtcagaaaatcactagtcttagataattgggaaaaagaagaatcaggcactcaactgttgactgaagacatttcagacatgcagtcagaaaatagatttactacatccttattaatgataccattattggaaatacatgacaataggtgcaacttgattcctgaaaaacaagatataaattcaaccaacaaaacatatacacttactaaaaagaaaccaaaccctaacacttccaaagttgtcaaattggaaaagaatcttcagtcaaattgtgaatgggaaacagtggtttatgggaagacagaagaccaacttattatgactgaacaagcaagaagatatctgagtacttacacagctaccagtagtacttcaagagctctcatactgtaattgttattaaaattgatgaaatgccccactcccttactgcagtctctactaaattaggttgcagtgaaatttttctcaattagttgtttttaaagttgtaagatagcccttttaatacagcatcttttttctattctatatagtaggcagaaagctagtaagtcacttaaggggtagatagtttcatagtttattttttaagagatgagatttttaaaaattgtttttaaagaacaagatgggaaaataatagaatgttcatggatttctaaaagtaaattctcatatattttcttcacaagatatatgttgctactctcttgatgctgcagttttgttatagataggtgtatgagtatatatgatttctgaaattagtctatgtatggaaagcacacatgattttatgaagtacttttgcccatgtgctgatttacttaggctaccatttacaaagaaacacattgaaaaggaatttaaaggaaggatagaaagttgcactactaattttttgttttttttttcagaagcagtaaaattaactacagtgttaaatgtatttatttgagcatagtactgaaaacaaaaagcattcaaaaaagagttttttctttattagtaaatagtattttcttaatctcagaggagctgagagttttgttgaatgtattgtacagtatgtaggagcaggagaactttgtaaattggaaagaagtctgtttttataatttatttttatttttaaagcttaaatgtagatatttatacgtatacagggtgcctagaagccaatgttgtttcctgttattacagctaacacagtaaagaataattttgactttaagtatgaaacagtagtaagttatagctgcaaagaatacaatatctatactgtatgtcacatctacctaaatgttgcactatgccctttaaatcatgctggttataaagtagttctaaaaatgtactaaataataatttaatattttctttttaaattatatcgggggtggtcatatacattaatctggtgatttgtatatgtgtttgaaatttttgcattttgtttaaaaaataatatggtaccttggtccctaaaaacagtctgcacttagaagtttatatttactcagtgtttcagaagtggagaacattatcttttatttataaaaatattttgtccttttttaaatgttttgtgtttctctacaggttacaacagttgcttcagttgcctgttttaggtgtttgcacttattttatttcttcttgaaagaatttttatttgcttttgtggtagagattatatgtaattttttttcagtcatataatggtgtgctgtcaacttaaacactgacaggtaaatagaattgtacactgtagtttgaattatttataattgacacactctctccctctccactcctgaagtatgctgctatagaaaatagcagaatcggcttgctgctacgagagaaggaaagagcgaccaccacttgcactgtgtgaaaagataaaaaacaaatgatggcaagttctcaagttaactaaatggaatcaaccattaccaggcaaattcttgcaaataccaaaatactactatgccttataaaacaaaatgaaagcaggttaagattttctgctctgtttgtatgttaatagaaatggaaatactaagtattttaatgcttagctcttgaacagtagacctaaaagggttttaagctatttaaatctacttgctagtttttgcatattttatatatatatatatttatatatatatatagtgagaagtgaagaaaatgtatggtactaagattatgccttattgataaatagataaaccaatttgaatcctcttagcatgtttaagtatgttgattgctttctaattaatgaacttctcacagaaatttcacttagtgaaaccaatgattgtagcaaactcatactggatcatttcagttaccttgaactaatagcacataatggttttttgttgttgttgtttttaatgtagcccttacctggatatacatagtctgcaatcaccaaagtataatatcttgtaaggctatattttttaaagcatattttttcttgagcattaaattatcctaaatggtaatatattgtggataagtctgggcttattggacataatacatatttgggttggtactggttgaatccttcagttaactgctttgttgctttttgcaagattttttatcttaaacatgtcaggcatcttaagtcacctttatactgttttgttcctctgagtttctttcagtatgttatacaaatgccagacataacatgtagcagccatacttgcatggaaactgactacacatacataatactgcattttattgtaaggttttcacattaatacagcaattaccctgactaaattgagttttgtgatatatggaaaacttcattgtaagagaatcttgcatacaatgttgacatattaacatccaaaataaagcatctgtgtacaagctgaaaaaaaaaaa

SEQ ID NO: 455393 - DNA, 2777 bp, Homo sapiens
ataattattgtttataaaatatctaatcagttaaaataactgactttaagagtctaattgtgatatagatagctattttaataattttcatgtcactattaatatttcctttctagtcaaattgtgaatgggaaacagtggtttatgggaagacagaagaccaacttattatgactgaacaagcaagaagatatctgagtacttacacagctaccagtagtacttcaagagctctcatactgtaattgttattaaaattgatgaaatgccccactcccttactgcagtctctactaaattaggttgcagtgaaatttttctcaattagttgtttttaaagttgtaagatagcccttttaatacagcatcttttttctattctatatagtaggcagaaagctagtaagtcacttaaggggtagatagtttcatagtttattttttaagagatgagatttttaaaaattgtttttaaagaacaagatgggaaaataatagaatgttcatggatttctaaaagtaaattctcatatattttcttcacaagatatatgttgctactctcttgatgctgcagttttgttatagataggtgtatgagtatatatgatttctgaaattagtctatgtatggaaagcacacatgattttatgaagtacttttgcccatgtgctgatttacttaggctaccatttacaaagaaacacattgaaaaggaatttaaaggaaggatagaaagttgcactactaattttttgttttttttttcagaagcagtaaaattaactacagtgttaaatgtatttatttgagcatagtactgaaaacaaaaagcattcaaaaaagagttttttctttattagtaaatagtattttcttaatctcagaggagctgagagttttgttgaatgtattgtacagtatgtaggagcaggagaactttgtaaattggaaagaagtctgtttttataatttatttttatttttaaagcttaaatgtagatatttatacgtatacagggtgcctagaagccaatgttgtttcctgttattacagctaacacagtaaagaataattttgactttaagtatgaaacagtagtaagttatagctgcaaagaatacaatatctatactgtatgtcacatctacctaaatgttgcactatgccctttaaatcatgctggttataaagtagttctaaaaatgtactaaataataatttaatattttctttttaaattatatcgggggtggtcatatacattaatctggtgatttgtatatgtgtttgaaatttttgcattttgtttaaaaaataatatggtaccttggtccctaaaaacagtctgcacttagaagtttatatttactcagtgtttcagaagtggagaacattatcttttatttataaaaatattttgtccttttttaaatgttttgtgtttctctacaggttacaacagttgcttcagttgcctgttttaggtgtttgcacttattttatttcttcttgaaagaatttttatttgcttttgtggtagagattatatgtaattttttttcagtcatataatggtgtgctgtcaacttaaacactgacaggtaaatagaattgtacactgtagtttgaattatttataattgacacactctctccctctccactcctgaagtatgctgctatagaaaatagcagaatcggcttgctgctacgagagaaggaaagagcgaccaccacttgcactgtgtgaaaagataaaaaacaaatgatggcaagttctcaagttaactaaatggaatcaaccattaccaggcaaattcttgcaaataccaaaatactactatgccttataaaacaaaatgaaagcaggttaagattttctgctctgtttgtatgttaatagaaatggaaatactaagtattttaatgcttagctcttgaacagtagacctaaaagggttttaagctatttaaatctacttgctagtttttgcatattttatatatatatatatttatatatatatatagtgagaagtgaagaaaatgtatggtactaagattatgccttattgataaatagataaaccaatttgaatcctcttagcatgtttaagtatgttgattgctttctaattaatgaacttctcacagaaatttcacttagtgaaaccaatgattgtagcaaactcatactggatcatttcagttaccttgaactaatagcacataatggttttttgttgttgttgtttttaatgtagcccttacctggatatacatagtctgcaatcaccaaagtataatatcttgtaaggctatattttttaaagcatattttttcttgagcattaaattatcctaaatggtaatatattgtggataagtctgggcttattggacataatacatatttgggttggtactggttgaatccttcagttaactgctttgttgctttttgcaagattttttatcttaaacatgtcaggcatcttaagtcacctttatactgttttgttcctctgagtttctttcagtatgttatacaaatgccagacataacatgtagcagccatacttgcatggaaactgactacacatacataatactgcattttattgtaaggttttcacattaatacagcaattaccctgactaaattgagttttgtgatatatggaaaacttcattgtaagagaatcttgcatacaatgttgacatattaacatccaaaataaagcatctgtgtacaagctgaaaaaaaaaaa

SEQ ID NO: 455394 - DNA, 3039 bp, Homo sapiens
tgcaggagactgcgagccctgcagaactgctagctgcgggggagagggcaggggtcgggcgcctgtggcggagccgggctggggccagggcagggaggctgacaagcggcgggagaagccggcggagggcgggatcgcgcctcctgacatgttgggggtatccctggccgggccgggccggggctaagagcggcgctgcgggccggggtcggggtcgggtcgcggtccgcccccgctgtccctccgtcctgccctgtcgaggacgtgcgttccgcactcggccgcctccagagggagcgagggaagcggctagaggatcggggagaaggagcattcgccggaggctggaggaggctgacccgcgtccccgcccagcctgctcctatgcggtacttgaaggatggcgaagaggtcgcgcaggtgggtggcacccctttcgcccaggcctgtcggcgccgtctcggctcagattctctttcctatcccgctgccccctcccgccataaggccctccctggcgagggcagaggtttttcttcccgcgtccccgcggccgcttggcctcgatgaccggagggcagctgcgacgtgtggagagttggggaccagggtgtttgaggcgcgggacgtaagagatgcccaggtttctcggtgactctccccgtaatgcgcgtccagatttctgacctcatgctgccacttcttcgaggcaggtttcttgccagtgaggatgaggatgatgaccttcagtatgccgatcatgattatgaagtaccacaacaaaaaggactgaagaaactctggaacagagtaaaatggacaagggacgaggatgataaattaaagaagttggttgaacaacatggaactgatgattggactctaattgctagtcatcttcaaaatcgctctgattttcagtgccagcatcgatggcagaaagttttaaatcctgaattgataaagggtccttggactaaagaagaagatcagagggttattgaattagttcagaaatatgggccaaaaagatggtctttaattgcaaaacatttaaaaggaagaataggcaagcagtgtagagaaagatggcataatcatctgaatcctgaggtaaagaaatcttcctggacagaagaggaggacaggatcatctatgaagcacataagcggttgggaaatcgttgggcagaaattgccaaactacttccaggaaggactgataattctatcaaaaatcattggaattctactatgcgaagaaaagtggaacaggagggctatttacaagatggaataaaatcagaacgatcttcatctaaacttcaacacaaaccttgtgcagctatggatcatatgcaaacccagaatcagttttacatacctgttcagatccctgggtatcagtatgtgtcacctgaaggcaattgtatagaacatgttcagcctacttctgcctttattcagcaacccttcattgatgaagatcctgataaggaaaagaaaataaaggaacttgagatgcttcttatgtcagctgagaatgaagttagaagaaagcgaattccatcacagcctggaagtttttctagctggtctggtagtttcctcatggatgataacatgtctaatactctaaatagccttgacgagcacactagtgagttttacagtatggatgaaaatcagcctgtgtctgctcagcagaattcacccacaaagttcctggccgtggaggcaaacgctgtgttatcctctttgcagaccatcccagaatttgcagagactctagaacttattgaatctgatcctgtagcatggagtgacgttaccagttttgatatttctgatgctgctgcttctcctatcaaatccaccccagttaaattaatgagaattcagcacaatgaaggagccatggaatgccaatttaacgtcagtcttgtacttgaagggaaaaaaaacacttgtaatggtggcaacagtgaagctgttcctttaacatccccaaatatagccaagtttagcactccaccagccatcctcagaaagaagagaaaaatgcgagtgggtcattccccaggcagcgaacttagggatggctcattgaacgatggtggtaatatggcgctaaaacatacaccactgaaaacactaccattttctccttcacagtttttcaacacatgtcctggtaatgaacaacttaatatagaaaatccttcatttacatcaacccctatttgtgggcagaaagctctcattacaactcctcttcataaggaaacaactcccaaagatcaaaaggaaaatgtagggtttagaacacctactattagaagatctatactgggtaccacaccaagaactcctactccttttaagaatgcgcttgctgctcaggagaaaaaatatggacctcttaaaattgtgtcccagccacttgctttcttggaagaagatattcgggaagttttaaaagaagaaactggaacagacctattcctcaaagaggaagatgaacctgcttacaaaagctgcaaacaagagaataccgcttctgggaagaaagtcagaaaatcactagtcttagataattgggaaaaagaagaatcaggcactcaactgttgactgaagacatttcagacatgcagtgactgcagcactagtattcctgatattgaagcataccttgaaaacgtctttggcaattacatatgaccaccttacatctgttttcagccactgctttctaagagccatgtagcacattctcttaatccatgtaaaatgatttgagttcctggcgtttaattaacatagaacttttggggaaagttattatatagaagatcacatctataacatagtaatctttaaaataagggaaggaaaaaaacataagcttgattttttgttatgaatatatttcctaatttgtaaataaagcattcttggctcattttttgacattacatcctctctttaaatcttttgcaaaattttgaagcaataaagactaacatttaaaaaaatgt

SEQ ID NO: 455395 - DNA, 254 bp, Homo sapiens
gggcagaaagctctcattacaactcctcttcataaggaaacaactcccaaagatcaaaaggaaaatgtagggtaagtaggtattaaataattgtgttagagaaaatggggagcacagtgttaaagtagattagctttttgtgcatataaatagcaagtatcataattcctattcctacaggacttagaattttttttgttttgttttgttttgtttgtttgagatggaattttgctctcgttgcccaggctgga

SEQ ID NO: 455396 - DNA, 410 bp, Homo sapiens
ctttttggctcagaagttgtaaaacaaagtccttttttttttctgttgggatacgaccagtgtgtaactgcaaatgaaggttggaaaaatttttactgcattaagagtttaccccagagaatttgagagttcattgagtaggaaattttcttctttatgccacagtgactgcagcactagtattcctgatattgaagcataccttgaaaacgtctttggcaattacatatgaccaccttacatctgttttcagccactgctttctaagagccatgtagcacattctcttaatccatgtaaaatgatttgagttcctggcgtttaattaacatagaacttttggggaaagttattatatagaagatcacatctataacatagtaatctttaaaataagggaaggaaaaaaa

SEQ ID NO: 455397 - DNA, 254 bp, Homo sapiens
tcctgaggtaaagaaatcttcctggacagaagaggaggacaggatcatctatgaagcacataagcggttgggaaatcgttgggcagaaattgccaaactacttccaggaaggtgcttatataaatgtatatatatttttctgtacttaaacatgacctttattaccttactgttaaatacatttgcaagtccccgatgacttattttttaaatttgtaattaaaatgtagactatataacataagcaacctttg

SEQ ID NO: 455398 - DNA, 5496 bp, Homo sapiens
tgcaggagactgcgagccctgcagaactgctagctgcgggggagagggcaggggtcgggcgcctgtggcggagccgggctggggccagggcagggaggctgacaagcggcgggagaagccggcggagggcgggatcgcgcctcctgacatgttgggggtatccctggccgggccgggccggggctaagagcggcgctgcgggccggggtcggggtcgggtcgcggtccgcccccgctgtccctccgtcctgccctgtcgaggacgtgcgttccgcactcggccgcctccagagggagcgagggaagcggctagaggatcggggagaaggagcattcgccggaggctggaggaggctgacccgcgtccccgcccagcctgctcctatgcggtacttgaaggatggcgaagaggtcgcgcaggtgggtggcacccctttcgcccaggcctgtcggcgccgtctcggctcagattctctttcctatcccgctgccccctcccgccataaggccctccctggcgagggcagaggtttttcttcccgcgtccccgcggccgcttggcctcgatgaccggagggcagctgcgacgtgtggagagttggggaccagggtgtttgaggcgcgggacgtaagagatgcccaggtttctcggtgactctccccgtaatgcgcgtccagatttctgacctcatgctgccacttcttcgaggcaggtttcttgccagtgaggatgaggatgatgaccttcagtatgccgatcatgattatgaagtaccacaacaaaaaggactgaagaaactctggaacagagtaaaatggacaagggacgaggatgataaattaaagaagttggttgaacaacatggaactgatgattggactctaattgctagtcatcttcaaaatcgctctgattttcagtgccagcatcgatggcagaaagttttaaatcctgaattgataaagggtccttggactaaagaagaagatcagagggttattgaattagttcagaaatatgggccaaaaagatggtctttaattgcaaaacatttaaaaggaagaataggcaagcagtgtagagaaagatggcataatcatctgaatcctgaggtaaagaaatcttcctggacagaagaggaggacaggatcatctatgaagcacataagcggttgggaaatcgttgggcagaaattgccaaactacttccaggaaggactgataattctatcaaaaatcattggaattctactatgcgaagaaaagtggaacaggagggctatttacaagatggaataaaatcagaacgatcttcatctaaacttcaacacaaaccttgtgcagctatggatcatatgcaaacccagaatcagttttacatacctgttcagatccctgggtatcagtatgtgtcacctgaaggcaattgtatagaacatgttcagcctacttctgcctttattcagcaacccttcattgatgaagatcctgataaggaaaagaaaataaaggaacttgagatgcttcttatgtcagctgagaatgaagttagaagaaagcgaattccatcacagcctggaagtttttctagctggtctggtagtttcctcatggatgataacatgtctaatactctaaatagccttgacgagcacactagtgagttttacagtatggatgaaaatcagcctgtgtctgctcagcagaattcacccacaaagttcctggccgtggaggcaaacgctgtgttatcctctttgcagaccatcccagaatttgcagagactctagaacttattgaatctgatcctgtagcatggagtgacgttaccagttttgatatttctgatgctgctgcttctcctatcaaatccaccccagttaaattaatgagaattcagcacaatgaaggagccatggaatgccaatttaacgtcagtcttgtacttgaagggaaaaaaaacacttgtaatggtggcaacagtgaagctgttcctttaacatccccaaatatagccaagtttagcactccaccagccatcctcagaaagaagagaaaaatgcgagtgggtcattccccaggcagcgaacttagggatggctcattgaacgatggtggtaatatggcgctaaaacatacaccactgaaaacactaccattttctccttcacagtttttcaacacatgtcctggtaatgaacaacttaatatagaaaatccttcatttacatcaacccctatttgtgggcagaaagctctcattacaactcctcttcataaggaaacaactcccaaagatcaaaaggaaaatgtagggtttagaacacctactattagaagatctatactgggtaccacaccaagaactcctactccttttaagaatgcgcttgctgctcaggagaaaaaatatggacctcttaaaattgtgtcccagccacttgctttcttggaagaagatattcgggaagttttaaaagaagaaactggaacagacctattcctcaaagaggaagatgaacctgcttacaaaagctgcaaacaagagaataccgcttctgggaagaaagtcagaaaatcactagtcttagataattgggaaaaagaagaatcaggcactcaactgttgactgaagacatttcagacatgcagtcagaaaatagatttactacatccttattaatgataccattattggaaatacatgacaataggtgcaacttgattcctgaaaaacaagatataaattcaaccaacaaaacatatacacttactaaaaagaaaccaaaccctaacacttccaaagttgtcaaattggaaaagaatcttcagtcaaattgtgaatgggaaacagtggtttatgggaagacagaagaccaacttattatgactgaacaagcaagaagatatctgagtacttacacagctaccagtagtacttcaagagctctcatactgtaattgttattaaaattgatgaaatgccccactcccttactgcagtctctactaaattaggttgcagtgaaatttttctcaattagttgtttttaaagttgtaagatagcccttttaatacagcatcttttttctattctatatagtaggcagaaagctagtaagtcacttaaggggtagatagtttcatagtttattttttaagagatgagatttttaaaaattgtttttaaagaacaagatgggaaaataatagaatgttcatggatttctaaaagtaaattctcatatattttcttcacaagatatatgttgctactctcttgatgctgcagttttgttatagataggtgtatgagtatatatgatttctgaaattagtctatgtatggaaagcacacatgattttatgaagtacttttgcccatgtgctgatttacttaggctaccatttacaaagaaacacattgaaaaggaatttaaaggaaggatagaaagttgcactactaattttttgttttttttttcagaagcagtaaaattaactacagtgttaaatgtatttatttgagcatagtactgaaaacaaaaagcattcaaaaaagagttttttctttattagtaaatagtattttcttaatctcagaggagctgagagttttgttgaatgtattgtacagtatgtaggagcaggagaactttgtaaattggaaagaagtctgtttttataatttatttttatttttaaagcttaaatgtagatatttatacgtatacagggtgcctagaagccaatgttgtttcctgttattacagctaacacagtaaagaataattttgactttaagtatgaaacagtagtaagttatagctgcaaagaatacaatatctatactgtatgtcacatctacctaaatgttgcactatgccctttaaatcatgctggttataaagtagttctaaaaatgtactaaataataatttaatattttctttttaaattatatcgggggtggtcatatacattaatctggtgatttgtatatgtgtttgaaatttttgcattttgtttaaaaaataatatggtaccttggtccctaaaaacagtctgcacttagaagtttatatttactcagtgtttcagaagtggagaacattatcttttatttataaaaatattttgtccttttttaaatgttttgtgtttctctacaggttacaacagttgcttcagttgcctgttttaggtgtttgcacttattttatttcttcttgaaagaatttttatttgcttttgtggtagagattatatgtaattttttttcagtcatataatggtgtgctgtcaacttaaacactgacaggtaaatagaattgtacactgtagtttgaattatttataattgacacactctctccctctccactcctgaagtatgctgctatagaaaatagcagaatcggcttgctgctacgagagaaggaaagagcgaccaccacttgcactgtgtgaaaagataaaaaacaaatgatggcaagttctcaagttaactaaatggaatcaaccattaccaggcaaattcttgcaaataccaaaatactactatgccttataaaacaaaatgaaagcaggttaagattttctgctctgtttgtatgttaatagaaatggaaatactaagtattttaatgcttagctcttgaacagtagacctaaaagggttttaagctatttaaatctacttgctagtttttgcatattttatatatatatatatttatatatatatatagtgagaagtgaagaaaatgtatggtactaagattatgccttattgataaatagataaaccaatttgaatcctcttagcatgtttaagtatgttgattgctttctaattaatgaacttctcacagaaatttcacttagtgaaaccaatgattgtagcaaactcatactggatcatttcagttaccttgaactaatagcacataatggttttttgttgttgttgtttttaatgtagcccttacctggatatacatagtctgcaatcaccaaagtataatatcttgtaaggctatattttttaaagcatattttttcttgagcattaaattatcctaaatggtaatatattgtggataagtctgggcttattggacataatacatatttgggttggtactggttgaatccttcagttaactgctttgttgctttttgcaagattttttatcttaaacatgtcaggcatcttaagtcacctttatactgttttgttcctctgagtttctttcagtatgttatacaaatgccagacataacatgtagcagccatacttgcatggaaactgactacacatacataatactgcattttattgtaaggttttcacattaatacagcaattaccctgactaaattgagttttgtgatatatggaaaacttcattgtaagagaatcttgcatacaatgttgacatattaacatccaaaataaagcatctgtgtacaagctgaaaaaaaaaaa

SEQ ID NO: 455399 - DNA, 1161 bp, Homo sapiens
tgcaggagactgcgagccctgcagaactgctagctgcgggggagagggcaggggtcgggcgcctgtggcggagccgggctggggccagggcagggaggctgacaagcggcgggagaagccggcggagggcgggatcgcgcctcctgacatgttgggggtatccctggccgggccgggccggggctaagagcggcgctgcgggccggggtcggggtcgggtcgcggtccgcccccgctgtccctccgtcctgccctgtcgaggacgtgcgttccgcactcggccgcctccagagggagcgagggaagcggctagaggatcggggagaaggagcattcgccggaggctggaggaggctgacccgcgtccccgcccagcctgctcctatgcggtacttgaaggatggcgaagaggtcgcgcaggtgggtggcacccctttcgcccaggcctgtcggcgccgtctcggctcagattctctttcctatcccgctgccccctcccgccataaggccctccctggcgagggcagaggtttttcttcccgcgtccccgcggccgcttggcctcgatgaccggagggcagctgcgacgtgtggagagttggggaccagggtgtttgaggcgcgggacgtaagagatgcccaggtttctcggtgactctccccgtaatgcgcgtccagatttctgacctcatgctgccacttcttcgaggcaggtttcttgccaggtaagtcgagcgcttttagggagtccgctacgcagagaaaactgactgtgtcctgccgggaggacttgaaaatggtgttcgggcgactcttttctgaatgacggtacagtcaaaataggaactccgcggtgaacctgggcggccacccctctgccaacttggctatcttgaaacgttgtggaaaatcctctggggaatagctgagaggacttttttgatgttttctgtaattcctatacccatatgctcagctttatgtatatatgtatattttaatatcctctcttgggaccatgtcacatagtaacaactagtagtaacaactagtagcttgatcttgaaataaaacaatgtgtttgattcacttaatattttgagtgtctgtgtttggctctgaccgtacctaagtgttccacagaggtaaggcacttttttc

SEQ ID NO: 455400 - DNA, 1944 bp, Homo sapiens
ggaggccgagctcggctgggcttggcgaggctgcagcgcggccaccggcgggagtgcagcggccactgtacccagagattcaaaaccccaaacccgggacttgggggcgctgagccgggccgggaagcagagcctggtcgtgaggaacagccgcccgttgctgtctgcccctttgcggacagcgtctccctcgactccgcttaggaagtggtgggggcggcgtggcccccgtcgggaggcgttcgaacgcccgctaggagagagaaaggattcccctgtgcttggagcccgcactcgggcgcggagggagcggcggcaggctctcgctttcggcaccatgggctgcacgctgagcgccgaggacaaggcggcggtggagcggagtaagatgatcgaccgcaacctccgtgaggacggcgagaaggcggcgcgcgaggtcaagctgctgctgctcggtgctggtgaatctggtaaaagtacaattgtgaagcagatgaaaattatccatgaagctggttattcagaagaggagtgtaaacaatacaaagcagtggtctacagtaacaccatccagtcaattattgctatcattagggctatggggaggttgaagatagactttggtgactcagcccgggcggatgatgcacgccaactctttgtgctagctggagctgctgaagaaggctttatgactgcagaacttgctggagttataaagagattgtggaaagatagtggtgtacaagcctgtttcaacagatcccgagagtaccagcttaatgattctgcagcatactatttgaatgacttggacagaatagctcaaccaaattacatcccgactcaacaagatgttctcagaactagagtgaaaactacaggaattgttgaaacccattttactttcaaagatcttcattttaaaatgtttgatgtgggaggtcagagatctgagcggaagaagtggattcattgcttcgaaggagtgacggcgatcatcttctgtgtagcactgagtgactacgacctggttctagctgaagatgaagaaatgaaccgaatgcatgaaagcatgaaattgtttgacagcatatgtaacaacaagtggtttacagatacatccattatactttttctaaacaagaaggatctctttgaagaaaaaatcaaaaagagccctctcactatatgctatccagaatatgcaggatcaaacacatatgaagaggcagctgcatatattcaatgtcagtttgaagacctcaataaaagaaaggacacaaaggaaatatacacccacttcacatgtgccacagatactaagaatgtgcagtttgtttttgatgctgtaacagatgtcatcataaaaaataatctaaaagattgtggtctcttttaagttttgcagttcatggtaaaatgcattttcaaaccaaatgagtacttatatatggatctctgtagactagagtcttgcagcaacacagaatgtaatataaggcaaatgcatctgggacttgaccaaagttgttctgttttgtttttttaactgaaagtaacagaaggacctttcttaaatgtgacagatggtcctgcagtgtgaaactgaaggacagtgttaaagctgggctctagtatattgatgatttctgcataagtgtaaatatgcaaatgtatgtatacatgtatttatgactttagttttcgacattatttttaggttttaagagtggcaacttaggattttagggtgatggctttggaaataacataaatataccttgtactgaatgacagactattactacgtttgccagttttaaacagctttatttatgttcatgtcctgtaaatttttaagtacagtaattaatattaggaaacattacagcccttatctagattatatgtatacttgtattaataaaaatgttatttgta

SEQ ID NO: 455401 - DNA, 474 bp, Homo sapiens
ggaggccgagctcggctgggcttggcgaggctgcagcgcggccaccggcgggagtgcagcggccactgtacccagagattcaaaaccccaaacccgggacttgggggcgctgagccgggccgggaagcagagcctggtcgtgaggaacagccgcccgttgctgtctgcccctttgcggacagcgtctccctcgactccgcttaggaagtggtgggggcggcgtggcccccgtcgggaggcgttcgaacgcccgctaggagagagaaaggattcccctgtgcttggagcccgcactcgggcgcggagggagcggcggcaggctctcgctttcggcaccatgggctgcacgctgagcgccgaggacaaggcggcggtggagcggagtaagatgatcgaccgcaacctccgtgaggacggcgagaaggcggcgcgcgaggtcaagctgctgctgctcggtaagggcggccgggtcgg

SEQ ID NO: 455402 - DNA, 464 bp, Homo sapiens
tctccaaataggacaagactatatacatatagtcttgcatatatatatatatatatatatatatacacacacacacacacacaaataaatatatatgtgtgtgtgtgtgtgtgtaaccataaactatattcatatctgtttcatttggaggattttcttctttgtaatgtaaagaaattcaaagttatcaaagttccttaaatgtgttagtttagattctttatgtgcctttcatgaaagatatgttttcattaattttactggtggacctgtaatatccacattgtgaagctgtgtatgaaattcaactataatatgaataaatttgaatcatgagaattatgggttaaaaagccacaaagaagcacatattggtgaccatcattaatgaaatcctgaactttattctgtgtaattgtgttaataaatcctaataaatttaaatttttaaaattttaaaaaac

SEQ ID NO: 455403 - DNA, 371 bp, Homo sapiens
tagaaaccttttatgttttatatttttaggtgctggtgaatctggtaaaagtacaattgtgaagcagatgaagtaagtagatttaaacaccaaatttgctgtttaagttagtgtaccgttctaccaaaggaagtaaataattcttttttttcccttttgtctcattagaattatccatgaagctggttattcagaagaggagtgtaaacaatacaaagcagtggtctacagtaacaccatccagtcaattattgctatcattagggctatggggaggttgaagatagactttggtgactcagcccgggcggtaagttattaaatttgttggagctgacctgatgggtaaaaagaataacttgtatgctaat

SEQ ID NO: 455404 - DNA, 2107 bp, Homo sapiens
ggaggccgagctcggctgggcttggcgaggctgcagcgcggccaccggcgggagtgcagcggccactgtacccagagattcaaaaccccaaacccgggacttgggggcgctgagccgggccgggaagcagagcctggtcgtgaggaacagccgcccgttgctgtctgcccctttgcggacagcgtctccctcgactccgcttaggaagtggtgggggcggcgtggcccccgtcgggaggcgttcgaacgcccgctaggagagagaaaggattcccctgtgcttggagcccgcactcgggcgcggagggagcggcggcaggctctcgctttcggcaccatgggctgcacgctgagcgccgaggacaaggcggcggtggagcggagtaagatgatcgaccgcaacctccgtgaggacggcgagaaggcggcgcgcgaggtcaagctgctgctgctcggtgctggtgaatctggtaaaagtacaattgtgaagcagatgaaaattatccatgaagctggttattcagaagaggagtgtaaacaatacaaagcagtggtctacagtaacaccatccagtcaattattgctatcattagggctatggggaggttgaagatagactttggtgactcagcccgggcggatgatgcacgccaactctttgtgctagctggagctgctgaagaaggctttatgactgcagaacttgctggagttataaagagattgtggaaagatagtggtgtacaagcctgtttcaacagatcccgagagtaccagcttaatgattctgcagcatactatttgaatgacttggacagaatagctcaaccaaattacatcccgactcaacaagatgttctcagaactagagtgaaaactacaggaattgttgaaacccattttactttcaaagatcttcattttaaaatgtttgatgtgggaggtcagagatctgagcggaagaagtggattcattgcttcgaaggagtgacggcgatcatcttctgtgtagcactgagtgactacgacctggttctagctgaagatgaagaaatgaaccgaatgcatgaaagcatgaaattgtttgacagcatatgtaacaacaagtggtttacagatacatccattatactttttctaaacaagaaggatctctttgaagaaaaaatcaaaaagagccctctcactatatgctatccagaatatgcaggatcaaacacatatgaagaggcagctgcatatattcaatgtcagtttgaagacctcaataaaagaaaggacacaaaggaaatatacacccacttcacatgtgccacagatactaagaatgtgcagtttgtttttgatgctgtaacagatgtcatcataaaaaataatctaaaagattgtggtctcttttaagttttgcagttcatggtaaaatgcattttcaaaccaaatgagtacttatatatggatctctgtagactagagtcttgcagcaacacagaatgtaatataaggcaaatgcatctgggacttgaccaaagttgttctgttttgtttttttaactgaaagtaacagaaggacctttcttaaatgtgacagatggtcctgcagtgtgaaactgaaggacagtgttaaagctgggctctagtatattgatgatttctgcataagtgtaaatatgcaaatgtatgtatacatgtatttatgactttagttttcgacattatttttaggttttaagagtggcaacttaggattttagggtgatggctttggaaataacataaatataccttgtactgaatgacagactattactacgtttgccagttttaaacagctttatttatgttcatgtcctgtaaatttttaagtacagtaattaatattaggaaacattacagcccttatctagattatatgtatacttgtattaataaaaatgttatttgtacaaacattgcacagactattttaataacatgatttgttctttaaattttatgtgttttattgaaatgttcttaagatgaatacacctgcctttggatcaactatttaaacattgtatgcattttgatttttcctactttaagaaaataaaataatttaatttt

SEQ ID NO: 455405 - DNA, 3327 bp, Homo sapiens
ggaggccgagctcggctgggcttggcgaggctgcagcgcggccaccggcgggagtgcagcggccactgtacccagagattcaaaaccccaaacccgggacttgggggcgctgagccgggccgggaagcagagcctggtcgtgaggaacagccgcccgttgctgtctgcccctttgcggacagcgtctccctcgactccgcttaggaagtggtgggggcggcgtggcccccgtcgggaggcgttcgaacgcccgctaggagagagaaaggattcccctgtgcttggagcccgcactcgggcgcggagggagcggcggcaggctctcgctttcggcaccatgggctgcacgctgagcgccgaggacaaggcggcggtggagcggagtaagatgatcgaccgcaacctccgtgaggacggcgagaaggcggcgcgcgaggtcaagctgctgctgctcggtgctggtgaatctggtaaaagtacaattgtgaagcagatgaaaattatccatgaagctggttattcagaagaggagtgtaaacaatacaaagcagtggtctacagtaacaccatccagtcaattattgctatcattagggctatggggaggttgaagatagactttggtgactcagcccgggcggatgatgcacgccaactctttgtgctagctggagctgctgaagaaggctttatgactgcagaacttgctggagttataaagagattgtggaaagatagtggtgtacaagcctgtttcaacagatcccgagagtaccagcttaatgattctgcagcatactatttgaatgacttggacagaatagctcaaccaaattacatcccgactcaacaagatgttctcagaactagagtgaaaactacaggaattgttgaaacccattttactttcaaagatcttcattttaaaatgtttgatgtgggaggtcagagatctgagcggaagaagtggattcattgcttcgaaggagtgacggcgatcatcttctgtgtagcactgagtgactacgacctggttctagctgaagatgaagaaatgaaccgaatgcatgaaagcatgaaattgtttgacagcatatgtaacaacaagtggtttacagatacatccattatactttttctaaacaagaaggatctctttgaagaaaaaatcaaaaagagccctctcactatatgctatccagaatatgcaggatcaaacacatatgaagaggcagctgcatatattcaatgtcagtttgaagacctcaataaaagaaaggacacaaaggaaatatacacccacttcacatgtgccacagatactaagaatgtgcagtttgtttttgatgctgtaacagatgtcatcataaaaaataatctaaaagattgtggtctcttttaagttttgcagttcatggtaaaatgcattttcaaaccaaatgagtacttatatatggatctctgtagactagagtcttgcagcaacacagaatgtaatataaggcaaatgcatctgggacttgaccaaagttgttctgttttgtttttttaactgaaagtaacagaaggacctttcttaaatgtgacagatggtcctgcagtgtgaaactgaaggacagtgttaaagctgggctctagtatattgatgatttctgcataagtgtaaatatgcaaatgtatgtatacatgtatttatgactttagttttcgacattatttttaggttttaagagtggcaacttaggattttagggtgatggctttggaaataacataaatataccttgtactgaatgacagactattactacgtttgccagttttaaacagctttatttatgttcatgtcctgtaaatttttaagtacagtaattaatattaggaaacattacagcccttatctagattatatgtatacttgtattaataaaaatgttatttgtacaaacattgcacagactattttaataacatgatttgttctttaaattttatgtgttttattgaaatgttcttaagatgaatacacctgcctttggatcaactatttaaacattgtatgcattttgatttttcctactttaagaaaataaaataatttaattttacattagattccacgttagatttggtttgaaaaactaaaatttcagatttctgaggatatactgtcttagacttattgtacacacttagtttttattcacttgttttcactctgaattttaatatttggctgatatgaatgcattgcctcaaaggtgatgtcatcttaatttttattcactttaaataactacatttttgtttataactaagtttggagggatcctaagagcatttttgtgggtaaaaaaaaaacctgtggacataatgaattttgagacattgattggtgaggcttttatttcccttgaggagtctcttgtacctagcatacatgatagctccttgttgggaagataacaagaaggatctttgaatactctattgctgatataatgcaagatttaaatttatacatataactaatttcaaatgtaattatcacactatgttaaaattacttttttcccttagataattcaaatttctccacttgcttgagattatatcatttctttttcaattatactattatttctgagaatgaaatggacgattacacttagaaaatgagtaatagtgtttaataagtcagtgattatatgtgtgctcaaataagtgttatgtatcagctagatactgagctttgatagaataattttcttttgattattcatgatgtgtcatctctgaccttgtttcagcaaagtaaacagcactccccaccccaccctcctttttttactcatcttggaaaaggttagtctttcagtacacgttactggtaagtagtttccaagttacgtgttgtcactgggttgaagtatatttgtgtgtgtgtgtgtgtgtgtgtgtgtgtgtgtgtgtgtgtaaccataaactatattcatatctgtttcatttggaggattttcttctttgtaatgtaaagaaattcaaagttatcaaagttccttaaatgtgttagtttagattctttatgtgcctttcatgaaagatatgttttcattaattttactggtggacctgtaatatccacattgtgaagctgtgtatgaaattcaactataatatgaataaatttgaatcatgagaattatgggttaaaaagccacaaagaagcacatattggtgaccatcattaatgaaatcctgaactttattctgtgtaattgtgttaataaatcctaataaatttaaatttttaaaattttaaaaaac

SEQ ID NO: 455406 - DNA, 381 bp, Homo sapiens
ctagcagggaggtggtggtggagtggggagaaagatgttccaagcagaggaagcaatacatggcagggcagggagatgtggctgcctcacaaaggtggggagtagttgaagaacgggctggagtgaggtgggcaaatggtaagcacgtggcacactgttcaactaagataatcacagcattagctgggatttgggggtgaaggagtaggagtgaggggagatgtgtcaatgtccctaagtccacaggggcaggacaaaatagccctatggtctgtctaggacagaggtgttcaatcttttggcttccctgggccacattggaagaagaattgacttgggcaacacataaaatacactaacaatagcagatgaagtaaaaaa

SEQ ID NO: 455407 - DNA, 628 bp, Homo sapiens
agcgggactgggaccggaagtggcgtgtgctcggcctttctgtgttcctggcccgcggccgtcgggtgtgagctgcgccgaccgctctgagggttcgtggcccaccgctccttcgcggtccctgccgccaccgtccacgctcagcgttgtagagaagatggtgggtcggaacagcgccatcgccgccggtgtatgcggggcccttttcattgggtactgcatctacttcgaccgcaaaagacgaagtgaccccaacttcaagaacaggcttcgagaacgaagaaagaaacagaagcttgccaaggagagagctgggctttccaagttacctgaccttaaagatgctgaagctgttcagaagttcttccttgaagaaatacagcttggtgaagagttactagctcaaggtgaatatgagaagggcgtagaccatctgacaaatgcaattgctgtgtgtggacagccacagcagttactgcaggtcttacagcaaactcttccaccaccagtgttccagatgcttctgactaagctcccaacaattagtcagagaattgtaagtgctcagagcttggctgaagatgatgtggaatgagaaacaaatgtcaacataataaaatctcagtta

SEQ ID NO: 455408 - DNA, 3164 bp, Homo sapiens
agcgggactgggaccggaagtggcgtgtgctcggcctttctgtgttcctggcccgcggccgtcgggtgtgagctgcgccgaccgctctgagggttcgtggcccaccgctccttcgcggtccctgccgccaccgtccacgctcagcgttgtagagaagatggtgggtcggaacagcgccatcgccgccggtgtatgcggggcccttttcattgggtactgcatctacttcgaccgcaaaagacgaagtgaccccaacttcaagaacaggcttcgagaacgaagaaagaaacagaagcttgccaaggagagagctgggctttccaagttacctgaccttaaagatgctgaagctgttcagaagttcttccttgaagaaatacagcttggtgaagagttactagctcaaggtgaatatgagaagggcgtagaccatctgacaaatgcaattgctgtgtgtggacagccacagcagttactgcaggtcttacagcaaactcttccaccaccagtgttccagatgcttctgactaagctcccaacaattagtcagagaattgtaagtgctcagagcttggctgaagatgatgtggaatgagaaacaaatgtcaacataataaaatctcagttaaaaatattttaaaaattcttggtagttgagcagctctgggggaataagggcaaatatgcttgttatgaactacactgaaatctaccaaagttaatgtttactttgtgtagatccatttgtctattttatttatttttcccagtgaaaagtgtattttgatagagaacttttcattctataaatacactatgagttactaaaatatcatggattttgtttattcctgaaacatagttacatagttaaactgtacatatgacatggcttatgttaaaaatacccagtgctcagttttgaaagataggcaaaaaaaaaaaagtataggagaaactgaagaatgtacacttttttagagggcacattttgctgtaaatctggaaatttgatagacttgactgtgtttgtgaaaactgagcattaaaggttttgattgatcctttctttccatttaatctctgagacgtaaatatgtgaggtgtgctgctgtgctgggttaacagcttccttccctttctgtgtagcagtcttgaaatgttctgtttaaatcagtaggcttaatgtgttctgggtatttatctccttgtattttaaatatatgtagttgcaaatagcaccaggaattagatttctgtacacccctaatctagccttgtgagcttcgctagttaatgtgtgctcactttccctccatttgttacgtgagagaatgcgtctgctgatcactgaagtgtcccttttagcttctgattcattgggttctgttgggcatctttaaatccaccttaacctgaggaatgtatgtgggcaaccaggccctgcatttttttatattctgaattttgcatgcttgcctgacttagtatttctgaattgatgttttttttaatggtataactatcttgattttcactgaaattatatggttctgtcactactctgtaaattaatccgaaacttttaaggtaactgggatgatctgcttgtaaaaatgcttgttgccttttgctttatcttcagtgtacctccttaatcctgcttcaacttgattatcttgtgaaacgatgagagtaagttgcaaccttgtgactgaaaacttgaaaagagtggagcaggtgggacctcttattctcaaatagtgacatattctccgtagtcacagtttcagaactgagtaaggatccttggtacttggtggcatctgttgaactgaggagcatttctcattgtaaagattgcctttgttctgtctaaaagtctggagaaatcccaaagacttttcctatgtactaggcattttattttgattgacttacaaactcttcttaatcattatcaatctcggtttttttgtggtgcagtggaaggagaaataggtctagtttctgcctctgattagccgcacagccttgaacaaatcacatttcatctttgaacttacctctactgttagactaggcgactcacatttgaggacttttctcgggtatcttgagggtttgtgatcctgaacccttaaacagtgcttttttgttacacaggagggcttttttggggggatgaccagtacagacatgccagttagttttactagtgggatcccaaatccaaagcagtgtagtggtgattggtcagtgactaaccaggcagttggggagggtagaaacgccgtttccttgggaactggagtgcagtatgagctgggtgtcacttggctctgaacatactggctttgctgtaatgcttgaaaaggcgttggtatcttcattttacagttcattaacccaagtacgttttcttatttaaatgacaactttggtgctttaaaatgaggtaccactttttaaagctagctgtgtcgagttaaagaaaaaatcagcagttttttctcccagaaatgtaattgccaaacactattcatccccatcttaagttttacaaggtgatgtaatcagcttgttgtagtgatgctggccaaatggtgctcagcaggtgagaacaaaaaaaccccagatttcagtgaactaatacacagcttgagcgtttccatgtgctaatgttgcacacttactaaaaaactttggaaatggaaaataatgtattagtgcaacagttgatgtgcttctttgggcaaagatatagttttgttccacaatttgtacttaaaagcgaaagaacattgaaaacatagacttactggctgtagcaatgctggcctgttaactgataactagaacttaggttcacgtttatgtaaagtgtgtaaaacctagtagagcttgcatagtcggcactcagtaaatgtttggttccttttgccccttggtaagtttattttaccatcctcccacctgccattctgactttattaaatcaacatgtggaccagagtgttaatgagatgttattgcagaagagattgagaaaattggtatatcatgcagataacatacaaaatctttttgtaacgtaaaaaatgcagttttattattgcttgtgcctcaactgtttaagtgaatattaaagggcttggagaaaa

SEQ ID NO: 455409 - DNA, 3003 bp, Homo sapiens
ttggtgaagagttactagctcaagtatttataggaaggaatggctaatgtaaggtcccagagaaggttaatttacctaatcaaggtcacacggtgaatatgagaagggcgtagaccatctgacaaatgcaattgctgtgtgtggacagccacagcagttactgcaggtcttacagcaaactcttccaccaccagtgttccagatgcttctgactaagctcccaacaattagtcagagaattgtaagtgctcagagcttggctgaagatgatgtggaatgagaaacaaatgtcaacataataaaatctcagttaaaaatattttaaaaattcttggtagttgagcagctctgggggaataagggcaaatatgcttgttatgaactacactgaaatctaccaaagttaatgtttactttgtgtagatccatttgtctattttatttatttttcccagtgaaaagtgtattttgatagagaacttttcattctataaatacactatgagttactaaaatatcatggattttgtttattcctgaaacatagttacatagttaaactgtacatatgacatggcttatgttaaaaatacccagtgctcagttttgaaagataggcaaaaaaaaaaaagtataggagaaactgaagaatgtacacttttttagagggcacattttgctgtaaatctggaaatttgatagacttgactgtgtttgtgaaaactgagcattaaaggttttgattgatcctttctttccatttaatctctgagacgtaaatatgtgaggtgtgctgctgtgctgggttaacagcttccttccctttctgtgtagcagtcttgaaatgttctgtttaaatcagtaggcttaatgtgttctgggtatttatctccttgtattttaaatatatgtagttgcaaatagcaccaggaattagatttctgtacacccctaatctagccttgtgagcttcgctagttaatgtgtgctcactttccctccatttgttacgtgagagaatgcgtctgctgatcactgaagtgtcccttttagcttctgattcattgggttctgttgggcatctttaaatccaccttaacctgaggaatgtatgtgggcaaccaggccctgcatttttttatattctgaattttgcatgcttgcctgacttagtatttctgaattgatgttttttttaatggtataactatcttgattttcactgaaattatatggttctgtcactactctgtaaattaatccgaaacttttaaggtaactgggatgatctgcttgtaaaaatgcttgttgccttttgctttatcttcagtgtacctccttaatcctgcttcaacttgattatcttgtgaaacgatgagagtaagttgcaaccttgtgactgaaaacttgaaaagagtggagcaggtgggacctcttattctcaaatagtgacatattctccgtagtcacagtttcagaactgagtaaggatccttggtacttggtggcatctgttgaactgaggagcatttctcattgtaaagattgcctttgttctgtctaaaagtctggagaaatcccaaagacttttcctatgtactaggcattttattttgattgacttacaaactcttcttaatcattatcaatctcggtttttttgtggtgcagtggaaggagaaataggtctagtttctgcctctgattagccgcacagccttgaacaaatcacatttcatctttgaacttacctctactgttagactaggcgactcacatttgaggacttttctcgggtatcttgagggtttgtgatcctgaacccttaaacagtgcttttttgttacacaggagggcttttttggggggatgaccagtacagacatgccagttagttttactagtgggatcccaaatccaaagcagtgtagtggtgattggtcagtgactaaccaggcagctaagaagtcttaggcagcagcccagacatgtatagaggggcagttagagggagaacaggggtgggaaagggagcaaggggcagatagctcagcaaggaaagaatgggctcagaaaaaggagggctggctggaggagtgaggggcagcttaagtttggggagggtagaaacgccgtttccttgggaactggagtgcagtatgagctgggtgtcacttggctctgaacatactggctttgctgtaatgcttgaaaaggcgttggtatcttcattttacagttcattaacccaagtacgttttcttatttaaatgacaactttggtgctttaaaatgaggtaccactttttaaagctagctgtgtcgagttaaagaaaaaatcagcagttttttctcccagaaatgtaattgccaaacactattcatccccatcttaagttttacaaggtgatgtaatcagcttgttgtagtgatgctggccaaatggtgctcagcaggtgagaacaaaaaaaccccagatttcagtgaactaatacacagcttgagcgtttccatgtgctaatgttgcacacttactaaaaaactttggaaatggaaaataatgtattagtgcaacagttgatgtgcttctttgggcaaagatatagttttgttccacaatttgtacttaaaagcgaaagaacattgaaaacatagacttactggctgtagcaatgctggcctgttaactgataactagaacttaggttcacgtttatgtaaagtgtgtaaaacctagtagagcttgcatagtcggcactcagtaaatgtttggttccttttgccccttggtaagtttattttaccatcctcccacctgccattctgactttattaaatcaacatgtggaccagagtgttaatgagatgttattgcagaagagattgagaaaattggtatatcatgcagataacatacaaaatctttttgtaacgtaaaaaatgcagttttattattgcttgtgcctcaactgtttaagtgaatattaaagggcttggagaaaa

SEQ ID NO: 455410 - DNA, 1886 bp, Homo sapiens
  misc_feature (280)..(280): n is a, c, g, or t
  misc_feature (343)..(344): n is a, c, g, or t
  misc_feature (348)..(348): n is a, c, g, or t
ggctagaacgaggctgggttgagcgatctccagctcgctgtgcctgctcaggtggacggcttggccgtggaccctgcccctggcatggtagtgcctgctgtacttccgcactctctctgtgtaccccaagtgcacagtctatggaaaacggatgcctctctccaaccctcctgtatgtacactggcaggatacttccattcttggacctcgctggactgtcctacagcgatggctcccatgttagtctcacatccctgcacctcacggcatcacggtggncgacaccataggactcgagcgatcttcgctgtggacacatgcatcgcatgctcttacttcaannttgnttagcaagtagtcatgcccttgatgcttgcctcgatgcctcacaaaacgctcatgggaacatagagtgcggccaagacgaaccctatggttccctcagtggtaacgtacgggcatttgatactcataggagtgtgacgtggatgacaacgtcttctcatacttattaatcactctcggttctggtgtggatgcagttgtggtgcagtggaaggagaaataggtctagtttctgcctctgattagccgcacagccttgaacaaatcacatttcatctttgaacttacctctactgttagactaggcgactcacatttgaggacttttctcgggtatcttgagggtttgtgatcctgaacccttaaacagtgcttttttgttacacaggagggcttttttggggggatgaccagtacagacatgccagttagttttactagtgggatcccaaatccaaagcagtgtagtggtgattggtcagtgactaaccaggcagctaagaagtcttaggcagcagcccagacatgtatagaggggcagttagagggagaacaggggtgggaaagggagcaaggggcagatagctcagcaaggaaagaatgggctcagaaaaaggagggctggctggaggagtgaggggcagcttaagtttggggagggtagaaacgccgtttccttgggaactggagtgcagtatgagctgggtgtcacttggctctgaacatactggctttgctgtaatgcttgaaaaggcgttggtatcttcattttacagttcattaacccaagtacgttttcttatttaaatgacaactttggtgctttaaaatgaggtaccactttttaaagctagctgtgtcgagttaaagaaaaaatcagcagttttttctcccagaaatgtaattgccaaacactattcatccccatcttaagttttacaaggtgatgtaatcagcttgttgtagtgatgctggccaaatggtgctcagcaggtgagaacaaaaaaaccccagatttcagtgaactaatacacagcttgagcgtttccatgtgctaatgttgcacacttactaaaaaactttggaaatggaaaataatgtattagtgcaacagttgatgtgcttctttgggcaaagatatagttttgttccacaatttgtacttaaaagcgaaagaacattgaaaacatagacttactggctgtagcaatgctggcctgttaactgataactagaacttaggttcacgtttatgtaaagtgtgtaaaacctagtagagcttgcatagtcggcactcagtaaatgtttggttccttttgccccttggtaagtttattttaccatcctcccacctgccattctgactttattaaatcaacatgtggaccagagtgttaatgagatgttattgcagaagagattgagaaaattggtatatcatgcagataacatacaaaatctttttgtaacgtaaaaaatgcagttttattattgcttgtgcctcaactgtttaagtgaatattaaagggcttggagaaaa

SEQ ID NO: 455411 - DNA, 964 bp, Homo sapiens
tcagctgtgaacaaatgggctgaaacaaccgaggtgctgcctgtacgagccacgggctgtcttacacgtgcggagttggggagggtagaaacgccgtttccttgggaactggagtgcagtatgagctgggtgtcacttggctctgaacatactggctttgctgtaatgcttgaaaaggcgttggtatcttcattttacagttcattaacccaagtacgttttcttatttaaatgacaactttggtgctttaaaatgaggtaccactttttaaagctagctgtgtcgagttaaagaaaaaatcagcagttttttctcccagaaatgtaattgccaaacactattcatccccatcttaagttttacaaggtgatgtaatcagcttgttgtagtgatgctggccaaatggtgctcagcaggtgagaacaaaaaaaccccagatttcagtgaactaatacacagcttgagcgtttccatgtgctaatgttgcacacttactaaaaaactttggaaatggaaaataatgtattagtgcaacagttgatgtgcttctttgggcaaagatatagttttgttccacaatttgtacttaaaagcgaaagaacattgaaaacatagacttactggctgtagcaatgctggcctgttaactgataactagaacttaggttcacgtttatgtaaagtgtgtaaaacctagtagagcttgcatagtcggcactcagtaaatgtttggttccttttgccccttggtaagtttattttaccatcctcccacctgccattctgactttattaaatcaacatgtggaccagagtgttaatgagatgttattgcagaagagattgagaaaattggtatatcatgcagataacatacaaaatctttttgtaacgtaaaaaatgcagttttattattgcttgtgcctcaactgtttaagtgaatattaaagggcttggagaaaa

SEQ ID NO: 455412 - DNA, 735 bp, Homo sapiens
agcgggactgggaccggaagtggcgtgtgctcggcctttctgtgttcctggcccgcggccgtcgggtgtgagctgcgccgaccgctctgagggttcgtggcccaccgctccttcgcggtccctgccgccaccgtccacgctcagcgttgtagagaagatggtgggtcggaacagcgccatcgccgccggtgtatgcggggcccttttcattgggtactgcatctacttcgaccgcaaaagacgaagtgaccccaacttcaagaacaggcttcgagaacgaagaaagaaacagaagcttgccaaggagagagctgggctttccaagttacctgaccttaaagatgctgaagctgttcagaagttcttccttgaagaaatacagcttggtgaagagttactagctcaaggtgaatatgagaagggcgtagaccatctgacaaatgcaattgctgtgtgtggacagccacagcagttactgcaggtcttacagcaaactcttccaccaccagtgttccagatgcttctgactaagctcccaacaattagtcagagaattgtaagtgctcagagcttggctgaagatgatgtggaatgagaaacaaatgtcaacataataaaatctcagttaaaaatattttaaaaattcttggtagttgagcagctctgggggaataagggcaaatgcttgctattgaaacttctaaaactaggggtacagcgctcgattcgatcatg

SEQ ID NO: 455413 - DNA, 602 bp, Homo sapiens
  misc_feature (579)..(579): n is a, c, g, or t
agcgggactgggaccggaagtggcgtgtgctcggcctttctgtgttcctggcccgcggccgtcgggtgtgagctgcgccgaccgctctgagggttcgtggcccaccgctccttcgcggtccctgccgccaccgtccacgctcagcgttgtagagaagatggtgggtcggaacagcgccatcgccgccggtgtatgcggggcccttttcattgggtactgcatctacttcgaccgcaaaagacgaagtgaccccaacttcaagaacaggcttcgagaacgaagaaagaaacagaagcttgccaaggagagagctgggctttccaagttacctgaccttaaagatgctgaagctgttcagaagttcttccttgaagaaatacagcttggtgaagagttactagctcaaggtgaatatgagaagggcgtagaccatctgacaaatgcaattgctgtgtgtggacagccacagcagttactgcaggtcttacagcaaactcttccaccaccagtgttccagatgcttctgactaagctcccaacaattagtcagagaattgtaagtgctcagagcttggctgnctcccgagtggggtcctcagagg

SEQ ID NO: 455414 - DNA, 3318 bp, Homo sapiens
agcgggactgggaccggaagtggcgtgtgctcggcctttctgtgttcctggcccgcggccgtcgggtgtgagctgcgccgaccgctctgagggttcgtggcccaccgctccttcgcggtccctgccgccaccgtccacgctcagcgttgtagagaagatggtgggtcggaacagcgccatcgccgccggtgtatgcggggcccttttcattgggtactgcatctacttcgaccgcaaaagacgaagtgaccccaacttcaagaacaggcttcgagaacgaagaaagaaacagaagcttgccaaggagagagctgggctttccaagttacctgaccttaaagatgctgaagctgttcagaagttcttccttgaagaaatacagcttggtgaagagttactagctcaaggtgaatatgagaagggcgtagaccatctgacaaatgcaattgctgtgtgtggacagccacagcagttactgcaggtcttacagcaaactcttccaccaccagtgttccagatgcttctgactaagctcccaacaattagtcagagaattgtaagtgctcagagcttggctgaagatgatgtggaatgagaaacaaatgtcaacataataaaatctcagttaaaaatattttaaaaattcttggtagttgagcagctctgggggaataagggcaaatatgcttgttatgaactacactgaaatctaccaaagttaatgtttactttgtgtagatccatttgtctattttatttatttttcccagtgaaaagtgtattttgatagagaacttttcattctataaatacactatgagttactaaaatatcatggattttgtttattcctgaaacatagttacatagttaaactgtacatatgacatggcttatgttaaaaatacccagtgctcagttttgaaagataggcaaaaaaaaaaaagtataggagaaactgaagaatgtacacttttttagagggcacattttgctgtaaatctggaaatttgatagacttgactgtgtttgtgaaaactgagcattaaaggttttgattgatcctttctttccatttaatctctgagacgtaaatatgtgaggtgtgctgctgtgctgggttaacagcttccttccctttctgtgtagcagtcttgaaatgttctgtttaaatcagtaggcttaatgtgttctgggtatttatctccttgtattttaaatatatgtagttgcaaatagcaccaggaattagatttctgtacacccctaatctagccttgtgagcttcgctagttaatgtgtgctcactttccctccatttgttacgtgagagaatgcgtctgctgatcactgaagtgtcccttttagcttctgattcattgggttctgttgggcatctttaaatccaccttaacctgaggaatgtatgtgggcaaccaggccctgcatttttttatattctgaattttgcatgcttgcctgacttagtatttctgaattgatgttttttttaatggtataactatcttgattttcactgaaattatatggttctgtcactactctgtaaattaatccgaaacttttaaggtaactgggatgatctgcttgtaaaaatgcttgttgccttttgctttatcttcagtgtacctccttaatcctgcttcaacttgattatcttgtgaaacgatgagagtaagttgcaaccttgtgactgaaaacttgaaaagagtggagcaggtgggacctcttattctcaaatagtgacatattctccgtagtcacagtttcagaactgagtaaggatccttggtacttggtggcatctgttgaactgaggagcatttctcattgtaaagattgcctttgttctgtctaaaagtctggagaaatcccaaagacttttcctatgtactaggcattttattttgattgacttacaaactcttcttaatcattatcaatctcggtttttttgtggtgcagtggaaggagaaataggtctagtttctgcctctgattagccgcacagccttgaacaaatcacatttcatctttgaacttacctctactgttagactaggcgactcacatttgaggacttttctcgggtatcttgagggtttgtgatcctgaacccttaaacagtgcttttttgttacacaggagggcttttttggggggatgaccagtacagacatgccagttagttttactagtgggatcccaaatccaaagcagtgtagtggtgattggtcagtgactaaccaggcagctaagaagtcttaggcagcagcccagacatgtatagaggggcagttagagggagaacaggggtgggaaagggagcaaggggcagatagctcagcaaggaaagaatgggctcagaaaaaggagggctggctggaggagtgaggggcagcttaagtttggggagggtagaaacgccgtttccttgggaactggagtgcagtatgagctgggtgtcacttggctctgaacatactggctttgctgtaatgcttgaaaaggcgttggtatcttcattttacagttcattaacccaagtacgttttcttatttaaatgacaactttggtgctttaaaatgaggtaccactttttaaagctagctgtgtcgagttaaagaaaaaatcagcagttttttctcccagaaatgtaattgccaaacactattcatccccatcttaagttttacaaggtgatgtaatcagcttgttgtagtgatgctggccaaatggtgctcagcaggtgagaacaaaaaaaccccagatttcagtgaactaatacacagcttgagcgtttccatgtgctaatgttgcacacttactaaaaaactttggaaatggaaaataatgtattagtgcaacagttgatgtgcttctttgggcaaagatatagttttgttccacaatttgtacttaaaagcgaaagaacattgaaaacatagacttactggctgtagcaatgctggcctgttaactgataactagaacttaggttcacgtttatgtaaagtgtgtaaaacctagtagagcttgcatagtcggcactcagtaaatgtttggttccttttgccccttggtaagtttattttaccatcctcccacctgccattctgactttattaaatcaacatgtggaccagagtgttaatgagatgttattgcagaagagattgagaaaattggtatatcatgcagataacatacaaaatctttttgtaacgtaaaaaatgcagttttattattgcttgtgcctcaactgtttaagtgaatattaaagggcttggagaaaa

SEQ ID NO: 455415 - DNA, 2115 bp, Homo sapiens
agcgggactgggaccggaagtggcgtgtgctcggcctttctgtgttcctggcccgcggccgtcgggtgtgagctgcgccgaccgctctgagggttcgtggcccaccgctccttcgcggtccctgccgccaccgtccacgctcagcgttgtagagaagatggtgggtcggaacagcgccatcgccgccggtgtatgcggggcccttttcattgggtactgcatctacttcgaccgcaaaagacgaagtgaccccaacttcaagaacaggcttcgagaacgaagaaagaaacagaagcttgccaaggagagagctgggctttccaagttacctgaccttaaagatgctgaagctgttcagaagttcttccttgaagaaatacagcttggtgaagagttactagctcaaggtgaatatgagaagggcgtagaccatctgacaaatgcaattgctgtgtgtggacagccacagcagttactgcaggtcttacagcaaactcttccaccaccagtgttccagatgcttctgactaagctcccaacaattagtcagagaattgtaagtgctcagagcttggctgaagatgatgtggaatgagaaacaaatgtcaacataataaaatctcagttaaaaatattttaaaaattcttggtagttgagcagctctgggggaataagggcaaatatgcttgttatgaactacactgaaatctaccaaagttaatgtttactttgtgtagatccatttgtctattttatttatttttcccagtgaaaagtgtattttgatagagaacttttcattctataaatacactatgagttactaaaatatcatggattttgtttattcctgaaacatagttacatagttaaactgtacatatgacatggcttatgttaaaaatacccagtgctcagttttgaaagataggcaaaaaaaaaaaagtataggagaaactgaagaatgtacacttttttagagggcacattttgctgtaaatctggaaatttgatagacttgactgtgtttgtgaaaactgagcattaaaggttttgattgatcctttctttccatttaatctctgagacgtaaatatgtgaggtgtgctgctgtgctgggttaacagcttccttccctttctgtgtagcagtcttgaaatgttctgtttaaatcagtaggcttaatgtgttctgggtatttatctccttgtattttaaatatatgtagttgcaaatagcaccaggaattagatttctgtacacccctaatctagccttgtgagcttcgctagttaatgtgtgctcactttccctccatttgttacgtgagagaatgcgtctgctgatcactgaagtgtcccttttagcttctgattcattgggttctgttgggcatctttaaatccaccttaacctgaggaatgtatgtgggcaaccaggccctgcatttttttatattctgaattttgcatgcttgcctgacttagtatttctgaattgatgttttttttaatggtataactatcttgattttcactgaaattatatggttctgtcactactctgtaaattaatccgaaacttttaaggtaactgggatgatctgcttgtaaaaatgcttgttgccttttgctttatcttcagtgtacctccttaatcctgcttcaacttgattatcttgtgaaacgatgagagtaagttgcaaccttgtgactgaaaacttgaaaagagtggagcaggtgggacctcttattctcaaatagtgacatattctccgtagtcacagtttcagaactgagtaaggatccttggtacttggtggcatctgttgaactgaggagcatttctcattgtaaagattgcctttgttctgtctaaaagtctggagaaatcccaaagacttttcctatgtactaggcattttattttgattgacttacaaactcttcttaatcattatcaatctcggtttttttgtggtgcagtggaaggagaaataggtctagtttctgcctctgattagccgcacagccttgaacaaatcacatttcatctttgaacttacctctactgttagactaggtgactcgtggaaatgtccacgggtcctgcta

SEQ ID NO: 455416 - DNA, 617 bp, Homo sapiens
agcgggactgggaccggaagtggcgtgtgctcggcctttctgtgttcctggcccgcggccgtcgggtgtgagctgcgccgaccgctctgagggttcgtggcccaccgctccttcgcggtccctgccgccaccgtccacgctcagcgttgtagagaagatggtgggtcggaacagcgccatcgccgccggtgtatgcggggcccttttcattgggtactgcatctacttcgaccgcaaaagacgaagtgaccccaacttcaagaacaggcttcgagaacgaagaaagaaacagaagcttgccaaggagagagctgggctttccaagttacctgaccttaaagatgctgaagctgttcagaagttcttccttgaagaaatacagcttggtgaagagttactagctcaaggtgaatatgagaagggcgtagaccatctgacaaatgcaattgctgtgtgtggacagccacagcagttactgcaggtcttacagcaaactcttccaccaccagtgttccagatgcttctgactaagctcccaacaattagtcagagaattgtaagtgctcagagcttggctgtagatatagaagagtgcacttttggggtcctctaagtca

SEQ ID NO: 455417 - DNA, 2690 bp, Homo sapiens
ggctagggttagttctggagctggaccaggaggagctgcagctgggccggggcggagcgccgcgtcgcgccagggccgcgaggaggggcgtgttgctgctggcccaccgcgagccgcccccagcccgcgccgaggcgccttcccgccaggccgcctgccttccgcctctttccatttccccggaatctcagcccggcgcgcctggacccctgcccctctctgggtggagaagctcccggccgcttcccggtttcactccttctcagcctgggctcccagccccctctctccttttcctggactggctctcacccccttcggtccccttcctttagctcaggctccctaccccttcctttagcccacagcccagagtcccagctcctcagtcactttcctcagccaaaggtcccagccttccttcttcctttcctttgcactatccctatcctgccccttcctctatccctagggctcagtttcccacatccgtcctcccccttcccaggcccggagttccagaccttttggtctcctttcgtggtcgttcctgggtccttgccccctttccccactttggagttccagattgcaaacccagcctccctccacccccagaaaattgcttccatggaaatgcctctctaaaacatgaacttttcctagagactacgccagtctctcttcccacttgctgaccctttgctacctatgtgcccggttttactctcatttgggtaaggtcgaggctggctctggaagcagcaccatggttctgcggtctggcatctgtggcctctctccacatcggatcttcccttccttactcgtggtggttgctttggtggggctgctgcctgttctcaggagccatggcctccagctcagcccaactgccagcaccattcgaagctcagagccaccacgagaacgctcgattggggatgtcaccaccgctccaccggaggtcaccccagagagccgccctgttaatcattccgtcactgatcatggcatgaagccgcgcaaggcctttccagtcctgggcatcgactacacacacgtgcgcacccccttcgagatctccctctggatccttctggcctgcctcatgaagataggtttccatgtgatccccactatctcaagcatcgtcccggagagctgcctgctgatcgtggtggggctgctggtggggggcctgatcaagggtgtaggcgagacaccccccttcctgcagtccgacgtcttcttcctcttcctgctgccgcccatcatcctggatgcgggctacttcctgccactgcggcagttcacagaaaacctgggcaccatcctgatctttgccgtggtgggcacgctgtggaacgccttcttcctgggcggcctcatgtacgccgtgtgcctggtgggcggtgagcagatcaacaacatcggcctcctggacaacctgctcttcggcagcatcatctcggccgtggaccccgtggcggttctggctgtctttgaggaaattcacatcaatgagctgctgcacatccttgtttttggggagtccttgctcaatgacgccgtcactgtggtcctgtatcacctctttgaggagtttgccaactacgaacacgtgggcatcgtggacatcttcctcggcttcctgagcttcttcgtggtggccctgggcggggtgcttgtgggcgtggtctacggggtcatcgcagccttcacctcccgatttacctcccacatccgggtcatcgagccgctcttcgtcttcctctacagctacatggcctacttgtcagccgagctcttccacctgtcaggcatcatggcgctcatagcctcaggagtggtgatgcgcccctatgtggaggccaacatctcccacaagtcccacaccaccatcaaatacttcctgaagatgtggagcagcgtcagcgagaccctcatcttcatcttcctcggcgtctccacggtggccggctcccaccactggaactggaccttcgtcatcagcaccctgctcttctgcctcatcgcccgcgtgctgggggtgctgggcctgacctggttcatcaacaagttccgtatcgtgaagctgacccccaaggaccagttcatcatcgcctatgggggcctgcgaggggccatcgccttctctctgggctacctcctggacaagaagcacttccccatgtgtgacctgttcctcactgccatcatcactgtcatcttcttcaccgtctttgtgcaggtgctgggcccagggcagggcaggcccttgccttggggaccctcacaggctgttcccgtggaaagagaggaaagcgtgtgattagccatgcgattctagtcccagctccaccaataacttgctgtgtgacctatggcaagccactcccccttgctgggcctcagtgtcttcaagcgtaaagtgagaattgtgatgagtcattgcagagtgactgatcagaatgtaaaggaaccagaaatgctgcccaacttaatttggaactcatagagcattaagagaagtgggtactggccgggcacggtgactcaacgcctgtaatcccagcactttgggaggctgagggggtggatcacctgaggtcaggagtttgagaccagcctgactaacatggtgaaaccccgtctctactaaaaatacaaaattagtgggcatggtg

SEQ ID NO: 455418 - DNA, 382 bp, Homo sapiens
agtgctgggaggtgggagagttctcacacccttgggtcctgggagagagcagagcagagagggcatcctagccttgggggcctggggtgagggagggaggctctgtggcctccctgcctgggtagcagaactggagtgcctgacacctgcctgccccccagggcatgaccattcggcccctggtagacctgttggctgtgaagaaaaagcaagagacgaagcgtccatcctcctctccatgcaagtgctgtttgggcaggagtcaccatgcaagggtgacatcgacaaccacgtaccaagccaccgcagctgctgccactctgctgcctgtacagaagaaactgaatctttttcatattctaataaatcaatgtgagttttt

SEQ ID NO: 455419 - DNA, 4502 bp, Homo sapiens
ggctagggttagttctggagctggaccaggaggagctgcagctgggccggggcggagcgccgcgtcgcgccagggccgcgaggaggggcgtgttgctgctggcccaccgcgagccgcccccagcccgcgccgaggcgccttcccgccaggccgcctgccttccgcctctttccatttccccggaatctcagcccggcgcgcctggacccctgcccctctctgggtggagaagctcccggccgcttcccggtttcactccttctcagcctgggctcccagccccctctctccttttcctggactggctctcacccccttcggtccccttcctttagctcaggctccctaccccttcctttagcccacagcccagagtcccagctcctcagtcactttcctcagccaaaggtcccagccttccttcttcctttcctttgcactatccctatcctgccccttcctctatccctagggctcagtttcccacatccgtcctcccccttcccaggcccggagttccagaccttttggtctcctttcgtggtcgttcctgggtccttgccccctttccccactttggagttccagattgcaaacccagcctccctccacccccagaaaattgcttccatggaaatgcctctctaaaacatgaacttttcctagagactacgccagtctctcttcccacttgctgaccctttgctacctatgtgcccggttttactctcatttgggtaaggtcgaggctggctctggaagcagcaccatggttctgcggtctggcatctgtggcctctctccacatcggatcttcccttccttactcgtggtggttgctttggtggggctgctgcctgttctcaggagccatggcctccagctcagcccaactgccagcaccattcgaagctcagagccaccacgagaacgctcgattggggatgtcaccaccgctccaccggaggtcaccccagagagccgccctgttaatcattccgtcactgatcatggcatgaagccgcgcaaggcctttccagtcctgggcatcgactacacacacgtgcgcacccccttcgagatctccctctggatccttctggcctgcctcatgaagataggtttccatgtgatccccactatctcaagcatcgtcccggagagctgcctgctgatcgtggtggggctgctggtggggggcctgatcaagggtgtaggcgagacaccccccttcctgcagtccgacgtcttcttcctcttcctgctgccgcccatcatcctggatgcgggctacttcctgccactgcggcagttcacagaaaacctgggcaccatcctgatctttgccgtggtgggcacgctgtggaacgccttcttcctgggcggcctcatgtacgccgtgtgcctggtgggcggtgagcagatcaacaacatcggcctcctggacaacctgctcttcggcagcatcatctcggccgtggaccccgtggcggttctggctgtctttgaggaaattcacatcaatgagctgctgcacatccttgtttttggggagtccttgctcaatgacgccgtcactgtggtcctgtatcacctctttgaggagtttgccaactacgaacacgtgggcatcgtggacatcttcctcggcttcctgagcttcttcgtggtggccctgggcggggtgcttgtgggcgtggtctacggggtcatcgcagccttcacctcccgatttacctcccacatccgggtcatcgagccgctcttcgtcttcctctacagctacatggcctacttgtcagccgagctcttccacctgtcaggcatcatggcgctcatagcctcaggagtggtgatgcgcccctatgtggaggccaacatctcccacaagtcccacaccaccatcaaatacttcctgaagatgtggagcagcgtcagcgagaccctcatcttcatcttcctcggcgtctccacggtggccggctcccaccactggaactggaccttcgtcatcagcaccctgctcttctgcctcatcgcccgcgtgctgggggtgctgggcctgacctggttcatcaacaagttccgtatcgtgaagctgacccccaaggaccagttcatcatcgcctatgggggcctgcgaggggccatcgccttctctctgggctacctcctggacaagaagcacttccccatgtgtgacctgttcctcactgccatcatcactgtcatcttcttcaccgtctttgtgcagggcatgaccattcggcccctggtagacctgttggctgtgaagaaaaagcaagagacgaagcgctccatcaacgaagagatccacacacagttcctggaccaccttctgacaggcatcgaagacatctgtggccactacggtcaccaccactggaaggacaagctcaaccggtttaataagaaatatgtgaagaagtgtctgatagctggcgagcgctccaaggagccccagctcattgccttctaccacaagatggagatgaagcaggccatcgagctggtggagagcgggggcatgggcaagatcccctctgccgtctccaccgtctccatgcagaacatccaccccaagtccctgccttccgagcgcatcctgccagcactgtccaaggacaaggaggaggagatccgcaaaatcctgaggaacaacttgcagaagaccaggcagcggctgcggtcctacaacagacacacgctggtggcagacccctacgaggaagcctggaaccagatgctgctccggaggcagaaggcccggcagctggagcagaagatcaacaactacctgacggtgccagcccacaagctggactcacccaccatgtctcgggcccgcatcggctcagacccactggcctatgagccgaaggaggacctgcctgtcatcaccatcgacccggcttccccgcagtcacccgagtctgtggacctggtgaatgaggagctgaagggcaaagtcttagggttgagccgggatcctgcaaaggtggctgaggaggacgaggacgacgatgggggcatcatgatgcggagcaaggagacttcgtccccaggaaccgacgatgtcttcacccccgcgcccagtgacagccccagctcccagaggatacagcgctgcctcagtgacccaggcccacaccctgagcctggggagggagaaccgttcttccccaaggggcagtaacgccagggccagcaggcagcgcctgtcccctcacagactcttccaccagagcaggggctgctgggggctccccttgcccttcctgacccggattggccctgcccctccccctaccgcatggcagctgggcccacagcccccaccccagcacagctcctcccctgccgcctcccgggaagcatcctccccaccagagctgcctccccaatccatttggcagaactgctggggctggtgaggccggccctgcccctccctagatccaggcttctcccggacctggactagggcctcggaggctcctccctctgcctcatcctcctcctcattcagaccaatcttagtttctaaccaaagagtctctggctcagctgtggtcccacccaggaagggagggagctgaggcctcccttgagtaggccctgctttatcaggggacaaaccaggggtaccaggcacatggctgggggagggactgctgacccaccaaggtctcacactcctcctgccagctctgtcaccctggccaccacccaacctgtccttactcagagctgcgggctgagggcatctctgagtgtctctgcctggagcaggggtggtttctacggtgacagtgacgtgactcagagcttttcgaactgtgctcccacggggaccactgggcccctcaggggaagctgctaggggaaggactggccgtggctccagaatgtgctgcctttttaagttttgtttgttcacactcctatatatgattgtttgcacagagggcgctcctgtttttaaaacattttgaaaacccctggctgaacagtgctctgcctctaactccctcctcacactccagaattacccttcctcatctgtgcctgtctgtccaacccctcccccacgtctctctgcctgctgggctcttaactgttgctcgaagactgtgacatcagaagtaactcccactcctaatcaagagtctctccagcctcacagatgctggcctcttggcacctgcctagctcttgggcctgacctccagtcctgctggcctgctcttacttcccccaccctgggtttggcccctggaacctttcccttgggactgggccatgggtcctcggcccatctgtccatcctcctctccatgcaagtgctgtttgggcaggagtcaccatgcaagggtgacatcgacaaccacgtaccaagccaccgcagctgctgccactctgctgcctgtacagaagaaactgaatctttttcatattctaataaatcaatgtgagttttt

SEQ ID NO: 455420 - DNA, 4142 bp, Homo sapiens
ggctagggttagttctggagctggaccaggaggagctgcagctgggccggggcggagcgccgcgtcgcgccagggccgcgaggaggggcgtgttgctgctggcccaccgcgagccgcccccagcccgcgccgaggcgccttcccgccaggccgcctgccttccgcctctttccatttccccggaatctcagcccggcgcgcctggacccctgcccctctctgggtggagaagctcccggccgcttcccggtttcactccttctcagcctgggctcccagccccctctctccttttcctggactggctctcacccccttcggtccccttcctttagctcaggctccctaccccttcctttagcccacagcccagagtcccagctcctcagtcactttcctcagccaaaggtcccagccttccttcttcctttcctttgcactatccctatcctgccccttcctctatccctagggctcagtttcccacatccgtcctcccccttcccaggcccggagttccagaccttttggtctcctttcgtggtcgttcctgggtccttgccccctttccccactttggagttccagattgcaaacccagcctccctccacccccagaaaattgcttccatggaaatgcctctctaaaacatgaacttttcctagagactacgccagtctctcttcccacttgctgaccctttgctacctatgtgcccggttttactctcatttgggtaaggtcgaggctggctctggaagcagcaccatggttctgcggtctggcatctgtggcctctctccacatcggatcttcccttccttactcgtggtggttgctttggtggggctgctgcctgttctcaggagccatggcctccagctcagcccaactgccagcaccattcgaagctcagagccaccacgagaacgctcgattggggatgtcaccaccgctccaccggaggtcaccccagagagccgccctgttaatcattccgtcactgatcatggcatgaagccgcgcaaggcctttccagtcctgggcatcgactacacacacgtgcgcacccccttcgagatctccctctggatccttctggcctgcctcatgaagataggtttccatgtgatccccactatctcaagcatcgtcccggagagctgcctgctgatcgtggtggggctgctggtggggggcctgatcaagggtgtaggcgagacaccccccttcctgcagtccgacgtcttcttcctcttcctgctgccgcccatcatcctggatgcgggctacttcctgccactgcggcagttcacagaaaacctgggcaccatcctgatctttgccgtggtgggcacgctgtggaacgccttcttcctgggcggcctcatgtacgccgtgtgcctggtgggcggtgagcagatcaacaacatcggcctcctggacaacctgctcttcggcagcatcatctcggccgtggaccccgtggcggttctggctgtctttgaggaaattcacatcaatgagctgctgcacatccttgtttttggggagtccttgctcaatgacgccgtcactgtggtcctgtatcacctctttgaggagtttgccaactacgaacacgtgggcatcgtggacatcttcctcggcttcctgagcttcttcgtggtggccctgggcggggtgcttgtgggcgtggtctacggggtcatcgcagccttcacctcccgatttacctcccacatccgggtcatcgagccgctcttcgtcttcctctacagctacatggcctacttgtcagccgagctcttccacctgtcaggcatcatggcgctcatagcctcaggagtggtgatgcgcccctatgtggaggccaacatctcccacaagtcccacaccaccatcaaatacttcctgaagatgtggagcagcgtcagcgagaccctcatcttcatcttcctcggcgtctccacggtggccggctcccaccactggaactggaccttcgtcatcagcaccctgctcttctgcctcatcgcccgcgtgctgggggtgctgggcctgacctggttcatcaacaagttccgtatcgtgaagctgacccccaaggaccagttcatcatcgcctatgggggcctgcgaggggccatcgccttctctctgggctacctcctggacaagaagcacttccccatgtgtgacctgttcctcactgccatcatcactgtcatcttcttcaccgtctttgtgcagggcatgaccattcggcccctggtagacctgttggctgtgaagaaaaagcaagagacgaagcgctccatcaacgaagagatccacacacagttcctggaccaccttctgacaggcatcgaagacatctgtggccactacggtcaccaccactggaaggacaagctcaaccggtttaataagaaatatgtgaagaagtgtctgatagctggcgagcgctccaaggagccccagctcattgccttctaccacaagatggagatgaagcaggccatcgagctggtggagagcgggggcatgggcaagatcccctctgccgtctccaccgtctccatgcagaacatccaccccaagtccctgccttccgagcgcatcctgccagcactgtccaaggacaaggaggaggagatccgcaaaatcctgaggaacaacttgcagaagaccaggcagcggctgcggtcctacaacagacacacgctggtggcagacccctacgaggaagcctggaaccagatgctgctccggaggcagaaggcccggcagctggagcagaagatcaacaactacctgacggtgccagcccacaagctggactcacccaccatgtctcgggcccgcatcggctcagacccactggcctatgagccgaaggaggacctgcctgtcatcaccatcgacccggcttccccgcagtcacccgagtctgtggacctggtgaatgaggagctgaagggcaaagtcttagggttgagccgggatcctgcaaaggtggctgaggaggacgaggacgacgatgggggcatcatgatgcggagcaaggagacttcgtccccaggaaccgacgatgtcttcacccccgcgcccagtgacagccccagctcccagaggatacagcgctgcctcagtgacccaggcccacaccctgagcctggggagggagaaccgttcttccccaaggggcagtaacgccagggccagcaggcagcgcctgtcccctcacagactcttccaccagagcaggggctgctgggggctccccttgcccttcctgacccggattggccctgcccctccccctaccgcatggcagctgggcccacagcccccaccccagcacagctcctcccctgccgcctcccgggaagcatcctccccaccagagctgcctccccaatccatttggcagaactgctggggctggtgaggccggccctgcccctccctagatccaggcttctcccggacctggactagggcctcggaggctcctccctctgcctcatcctcctcctcattcagaccaatcttagtttctaaccaaagagtctctggctcagctgtggtcccacccaggaagggagggagctgaggcctcccttgagtaggccctgctttatcaggggacaaaccaggggtaccaggcacatggctgggggagggactgctgacccaccaaggtctcacactcctcctgccagctctgtcaccctggccaccacccaacctgtccttactcagagctgcgggctgagggcatctctgagtgtctctgcctggagcaggggtggtttctacggtgacagtgacgtgactcagagcttttcgaactgtgctcccacggggaccactgggcccctcaggggaagctgctaggggaaggactggccgtggctccagaatgtgctgcctttttaagttttgtttgttcacactcctatatatgattgtttgcacagagggcgctcctgtttttaaaacattttgaaaacccctggctgaacagtgctctgcctctaactccctcctcacactccagaattacccttcctcatctgtgccccccctggcagatgttccgaactctttcagaaaaggaggccacgagttcctg

SEQ ID NO: 455421 - DNA, 4332 bp, Homo sapiens
ggctagggttagttctggagctggaccaggaggagctgcagctgggccggggcggagcgccgcgtcgcgccagggccgcgaggaggggcgtgttgctgctggcccaccgcgagccgcccccagcccgcgccgaggcgccttcccgccaggccgcctgccttccgcctctttccatttccccggaatctcagcccggcgcgcctggacccctgcccctctctgggtggagaagctcccggccgcttcccggtttcactccttctcagcctgggctcccagccccctctctccttttcctggactggctctcacccccttcggtccccttcctttagctcaggctccctaccccttcctttagcccacagcccagagtcccagctcctcagtcactttcctcagccaaaggtcccagccttccttcttcctttcctttgcactatccctatcctgccccttcctctatccctagggctcagtttcccacatccgtcctcccccttcccaggcccggagttccagaccttttggtctcctttcgtggtcgttcctgggtccttgccccctttccccactttggagttccagattgcaaacccagcctccctccacccccagaaaattgcttccatggaaatgcctctctaaaacatgaacttttcctagagactacgccagtctctcttcccacttgctgaccctttgctacctatgtgcccggttttactctcatttgggtaaggtcgaggctggctctggaagcagcaccatggttctgcggtctggcatctgtggcctctctccacatcggatcttcccttccttactcgtggtggttgctttggtggggctgctgcctgttctcaggagccatggcctccagctcagcccaactgccagcaccattcgaagctcagagccaccacgagaacgctcgattggggatgtcaccaccgctccaccggaggtcaccccagagagccgccctgttaatcattccgtcactgatcatggcatgaagccgcgcaaggcctttccagtcctgggcatcgactacacacacgtgcgcacccccttcgagatctccctctggatccttctggcctgcctcatgaagataggtttccatgtgatccccactatctcaagcatcgtcccggagagctgcctgctgatcgtggtggggctgctggtggggggcctgatcaagggtgtaggcgagacaccccccttcctgcagtccgacgtcttcttcctcttcctgctgccgcccatcatcctggatgcgggctacttcctgccactgcggcagttcacagaaaacctgggcaccatcctgatctttgccgtggtgggcacgctgtggaacgccttcttcctgggcggcctcatgtacgccgtgtgcctggtgggcggtgagcagatcaacaacatcggcctcctggacaacctgctcttcggcagcatcatctcggccgtggaccccgtggcggttctggctgtctttgaggaaattcacatcaatgagctgctgcacatccttgtttttggggagtccttgctcaatgacgccgtcactgtggtcctgtatcacctctttgaggagtttgccaactacgaacacgtgggcatcgtggacatcttcctcggcttcctgagcttcttcgtggtggccctgggcggggtgcttgtgggcgtggtctacggggtcatcgcagccttcacctcccgatttacctcccacatccgggtcatcgagccgctcttcgtcttcctctacagctacatggcctacttgtcagccgagctcttccacctgtcaggcatcatggcgctcatagcctcaggagtggtgatgcgcccctatgtggaggccaacatctcccacaagtcccacaccaccatcaaatacttcctgaagatgtggagcagcgtcagcgagaccctcatcttcatcttcctcggcgtctccacggtggccggctcccaccactggaactggaccttcgtcatcagcaccctgctcttctgcctcatcgcccgcgtgctgggggtgctgggcctgacctggttcatcaacaagttccgtatcgtgaagctgacccccaaggaccagttcatcatcgcctatgggggcctgcgaggggccatcgccttctctctgggctacctcctggacaagaagcacttccccatgtgtgacctgttcctcactgccatcatcactgtcatcttcttcaccgtctttgtgcagggcatgaccattcggcccctggtagacctgttggctgtgaagaaaaagcaagagacgaagcgctccatcaacgaagagatccacacacagttcctggaccaccttctgacaggcatcgaagacatctgtggccactacggtcaccaccactggaaggacaagctcaaccggtttaataagaaatatgtgaagaagtgtctgatagctggcgagcgctccaaggagccccagctcattgccttctaccacaagatggagatgaagcaggccatcgagctggtggagagcgggggcatgggcaagatcccctctgccgtctccaccgtctccatgcagaacatccaccccaagtccctgccttccgagcgcatcctgccagcactgtccaaggacaaggaggaggagatccgcaaaatcctgaggaacaacttgcagaagaccaggcagcggctgcggtcctacaacagacacacgctggtggcagacccctacgaggaagcctggaaccagatgctgctccggaggcagaaggcccggcagctggagcagaagatcaacaactacctgacggtgccagcccacaagctggactcacccaccatgtctcgggcccgcatcggctcagacccactggcctatgagccgaaggaggacctgcctgtcatcaccatcgacccggcttccccgcagtcacccgagtctgtggacctggtgaatgaggagctgaagggcaaagtcttagggttgagccgggatcctgcaaaggtggctgaggaggacgaggacgacgatgggggcatcatgatgcggagcaaggagacttcgtccccaggaaccgacgatgtcttcacccccgcgcccagtgacagccccagctcccagaggatacagcgctgcctcatcctcctcctcattcagaccaatcttagtttctaaccaaagagtctctggctcagctgtggtcccacccaggaagggagggagctgaggcctcccttgagtaggccctgctttatcaggggacaaaccaggggtaccaggcacatggctgggggagggactgctgacccaccaaggtctcacactcctcctgccagctctgtcaccctggccaccacccaacctgtccttactcagagctgcgggctgagggcatctctgagtgtctctgcctggagcaggggtggtttctacggtgacagtgacgtgactcagagcttttcgaactgtgctcccacggggaccactgggcccctcaggggaagctgctaggggaaggactggccgtggctccagaatgtgctgcctttttaagttttgtttgttcacactcctatatatgattgtttgcacagagggcgctcctgtttttaaaacattttgaaaacccctggctgaacagtgctctgcctctaactccctcctcacactccagaattacccttcctcatctgtgcctgtctgtccaacccctcccccacgtctctctgcctgctgggctcttaactgttgctcgaagactgtgacatcagaagtaactcccactcctaatcaagagtctctccagcctcacagatgctggcctcttggcacctgcctagctcttgggcctgacctccagtcctgctggcctgctcttacttcccccaccctgggtttggcccctggaacctttcccttgtgtgtaccacaccctgcctgctgtggaagcccattgtggaggcggtgggggggagaaggcctcccctgaggatcccctgtcccctggggctggtggattgggcagaatcctgggcccccagagacctttgcccacacacactccttccccttgtccctggggcactcccccaggattgtgcaatagtcagagtgtccctttttgcaggggactgggccatgggtcctcggcccatctgtccatcctcctctccatgcaagtgctgtttgggcaggagtcaccatgcaagggtgacatcgacaaccacgtaccaagccaccgcagctgctgccactctgctgcctgtacagaagaaactgaatctttttcatattctaataaatcaatgtgagttttt

SEQ ID NO: 455422 - DNA, 649 bp, Homo sapiens
cacatgaggctcctacacatgaggctcctacacatgaggctcctacacatgagtctctctgcctgctgggctcttaactgttgctcgaagactgtgacatcagaagtaactcccactcctaatcaagagtctctccagcctcacagatgctggcctcttggcacctgcctagctcttgggcctgacctccagtcctgctggcctgctcttacttcccccaccctgggtttggcccctggaacctttcccttgtgtgtaccacaccctgcctgctgtggaagcccattgtggaggcggtgggggggagaaggcctcccctgaggatcccctgtcccctggggctggtggattgggcagaatcctgggcccccagagacctttgcccacacacactccttccccttgtccctggggcactcccccaggattgtgcaatagtcagagtgtccctttttgcaggggactgggccatgggtcctcggcccatctgtccatcctcctctccatgcaagtgctgtttgggcaggagtcaccatgcaagggtgacatcgacaaccacgtaccaagccaccgcagctgctgccactctgctgcctgtacagaagaaactgaatctttttcatattctaataaatcaatgtgagttttt

SEQ ID NO: 455423 - DNA, 2825 bp, Homo sapiens
ggctagggttagttctggagctggaccaggaggagctgcagctgggccggggcggagcgccgcgtcgcgccagggccgcgaggaggggcgtgttgctgctggcccaccgcgagccgcccccagcccgcgccgaggcgccttcccgccaggccgcctgccttccgcctctttccatttccccggaatctcagcccggcgcgcctggacccctgcccctctctgggtggagaagctcccggccgcttcccggtttcactccttctcagcctgggctcccagccccctctctccttttcctggactggctctcacccccttcggtccccttcctttagctcaggctccctaccccttcctttagcccacagcccagagtcccagctcctcagtcactttcctcagccaaaggtcccagccttccttcttcctttcctttgcactatccctatcctgccccttcctctatccctagggctcagtttcccacatccgtcctcccccttcccaggcccggagttccagaccttttggtctcctttcgtggtcgttcctgggtccttgccccctttccccactttggagttccagattgcaaacccagcctccctccacccccagaaaattgcttccatggaaatgcctctctaaaacatgaacttttcctagagactacgccagtctctcttcccacttgctgaccctttgctacctatgtgcccggttttactctcatttgggtaaggtcgaggctggctctggaagcagcaccatggttctgcggtctggcatctgtggcctctctccacatcggatcttcccttccttactcgtggtggttgctttggtggggctgctgcctgttctcaggagccatggcctccagctcagcccaactgccagcaccattcgaagctcagagccaccacgagaacgctcgattggggatgtcaccaccgctccaccggaggtcaccccagagagccgccctgttaatcattccgtcactgatcatggcatgaagccgcgcaaggcctttccagtcctgggcatcgactacacacacgtgcgcacccccttcgagatctccctctggatccttctggcctgcctcatgaagataggtttccatgtgatccccactatctcaagcatcgtcccggagagctgcctgctgatcgtggtggggctgctggtggggggcctgatcaagggtgtaggcgagacaccccccttcctgcagtccgacgtcttcttcctcttcctgctgccgcccatcatcctggatgcgggctacttcctgccactgcggcagttcacagaaaacctgggcaccatcctgatctttgccgtggtgggcacgctgtggaacgccttcttcctgggcggcctcatgtacgccgtgtgcctggtgggcggtgagcagatcaacaacatcggcctcctggacaacctgctcttcggcagcatcatctcggccgtggaccccgtggcggttctggctgtctttgaggaaattcacatcaatgagctgctgcacatccttgtttttggggagtccttgctcaatgacgccgtcactgtggtcctgtatcacctctttgaggagtttgccaactacgaacacgtgggcatcgtggacatcttcctcggcttcctgagcttcttcgtggtggccctgggcggggtgcttgtgggcgtggtctacggggtcatcgcagccttcacctcccgatttacctcccacatccgggtcatcgagccgctcttcgtcttcctctacagctacatggcctacttgtcagccgagctcttccacctgtcaggcatcatggcgctcatagcctcaggagtggtgatgcgcccctatgtggaggccaacatctcccacaagtcccacaccaccatcaaatacttcctgaagatgtggagcagcgtcagcgagaccctcatcttcatcttcctcggcgtctccacggtggccggctcccaccactggaactggaccttcgtcatcagcaccctgctcttctgcctcatcgcccgcgtgctgggggtgctgggcctgacctggttcatcaacaagttccgtatcgtgaagctgacccccaaggaccagttcatcatcgcctatgggggcctgcgaggggccatcgccttctctctgggctacctcctggacaagaagcacttccccatgtgtgacctgttcctcactgccatcatcactgtcatcttcttcaccgtctttgtgcaggtgctgggcccagggcagggcaggcccttgccttggggaccctcacaggctgttcccgtggaaagagaggaaagcgtgtgattagccatgcgattctagtcccagctccaccaataacttgctgtgtgacctatggcaagccactcccccttgctgggcctcagtgtcttcaagcgtaaagtgagaattgtgatgagtcattgcagagtgactgatcagaatgtaaaggaaccagaaatgctgcccaacttaatttggaactcatagagcattaagagaagtgggtactggccgggcacggtgactcaacgcctgtaatcccagcactttgggaggctgagggggtggatcacctgaggtcaggagtttgagaccagcctgactaacatggtgaaaccccgtctctactaaaaatacaaaattagtgggcatggtgatgcatacctgtaattccagctacttgggaggctgaggcaggagaatcacttgaacccaggaggtggaggttgcagtgagctgagattgcgccattgcactccagcctgggtaacaagagtgaaattccatctca

SEQ ID NO: 455424 - DNA, 2445 bp, Homo sapiens
ggctagggttagttctggagctggaccaggaggagctgcagctgggccggggcggagcgccgcgtcgcgccagggccgcgaggaggggcgtgttgctgctggcccaccgcgagccgcccccagcccgcgccgaggcgccttcccgccaggccgcctgccttccgcctctttccatttccccggaatctcagcccggcgcgcctggacccctgcccctctctgggtggagaagctcccggccgcttcccggtttcactccttctcagcctgggctcccagccccctctctccttttcctggactggctctcacccccttcggtccccttcctttagctcaggctccctaccccttcctttagcccacagcccagagtcccagctcctcagtcactttcctcagccaaaggtcccagccttccttcttcctttcctttgcactatccctatcctgccccttcctctatccctagggctcagtttcccacatccgtcctcccccttcccaggcccggagttccagaccttttggtctcctttcgtggtcgttcctgggtccttgccccctttccccactttggagttccagattgcaaacccagcctccctccacccccagaaaattgcttccatggaaatgcctctctaaaacatgaacttttcctagagactacgccagtctctcttcccacttgctgaccctttgctacctatgtgcccggttttactctcatttgggtaaggtcgaggctggctctggaagcagcaccatggttctgcggtctggcatctgtggcctctctccacatcggatcttcccttccttactcgtggtggttgctttggtggggctgctgcctgttctcaggagccatggcctccagctcagcccaactgccagcaccattcgaagctcagagccaccacgagaacgctcgattggggatgtcaccaccgctccaccggaggtcaccccagagagccgccctgttaatcattccgtcactgatcatggcatgaagccgcgcaaggcctttccagtcctgggcatcgactacacacacgtgcgcacccccttcgagatctccctctggatccttctggcctgcctcatgaagataggtttccatgtgatccccactatctcaagcatcgtcccggagagctgcctgctgatcgtggtggggctgctggtggggggcctgatcaagggtgtaggcgagacaccccccttcctgcagtccgacgtcttcttcctcttcctgctgccgcccatcatcctggatgcgggctacttcctgccactgcggcagttcacagaaaacctgggcaccatcctgatctttgccgtggtgggcacgctgtggaacgccttcttcctgggcggcctcatgtacgccgtgtgcctggtgggcggtgagcagatcaacaacatcggcctcctggacaacctgctcttcggcagcatcatctcggccgtggaccccgtggcggttctggctgtctttgaggaaattcacatcaatgagctgctgcacatccttgtttttggggagtccttgctcaatgacgccgtcactgtggtcctgtatcacctctttgaggagtttgccaactacgaacacgtgggcatcgtggacatcttcctcggcttcctgagcttcttcgtggtggccctgggcggggtgcttgtgggcgtggtctacggggtcatcgcagccttcacctcccgatttacctcccacatccgggtcatcgagccgctcttcgtcttcctctacagctacatggcctacttgtcagccgagctcttccacctgtcaggcatcatggcgctcatagcctcaggagtggtgatgcgcccctatgtggaggccaacatctcccacaagtcccacaccaccatcaaatacttcctgaagatgtggagcagcgtcagcgagaccctcatcttcatcttcctcggcgtctccacggtggccggctcccaccactggaactggaccttcgtcatcagcaccctgctcttctgcctcatcgcccgcgtgctgggggtgctgggcctgacctggttcatcaacaagttccgtatcgtgaagctgacccccaaggaccagttcatcatcgcctatgggggcctgcgaggggccatcgccttctctctgggctacctcctggacaagaagcacttccccatgtgtgacctgttcctcactgccatcatcactgtcatcttcttcaccgtctttgtgcagggcatgaccattcggcccctggtagacctgttggctgtgaagaaaaagcaagagacgaagcgctccatcaacgaagagatccacacacagttcctggaccaccttctgacaggcatcgaagacatctgtggccactacggtcaccaccactggaaggacaagtaggtggcaggcctggtgggcaggcaggg

SEQ ID NO: 455425 - DNA, 1378 bp, Homo sapiens
ggctagggttagttctggagctggaccaggaggagctgcagctgggccggggcggagcgccgcgtcgcgccagggccgcgaggaggggcgtgttgctgctggcccaccgcgagccgcccccagcccgcgccgaggcgccttcccgccaggccgcctgccttccgcctctttccatttccccggaatctcagcccggcgcgcctggacccctgcccctctctgggtggagaagctcccggccgcttcccggtttcactccttctcagcctgggctcccagccccctctctccttttcctggactggctctcacccccttcggtccccttcctttagctcaggctccctaccccttcctttagcccacagcccagagtcccagctcctcagtcactttcctcagccaaaggtcccagccttccttcttcctttcctttgcactatccctatcctgccccttcctctatccctagggctcagtttcccacatccgtcctcccccttcccaggcccggagttccagaccttttggtctcctttcgtggtcgttcctgggtccttgccccctttccccactttggagttccagattgcaaacccagcctccctccacccccagaaaattgcttccatggaaatgcctctctaaaacatgaacttttcctagagactacgccagtctctcttcccacttgctgaccctttgctacctatgtgcccggttttactctcatttgggtaaggtcgaggctggctctggaagcagcaccatggttctgcggtctggcatctgtggcctctctccacatcggatcttcccttccttactcgtggtggttgctttggtggggctgctgcctgttctcaggagccatggcctccagctcagcccaactgccagcaccattcgaagctcagagccaccacgagaacgctcgattggggatgtcaccaccgctccaccggaggtcaccccagagagccgccctgttaatcattccgtcactgatcatggcatgaagccgcgcaaggcctttccagtcctgggcatcgactacacacacgtgcgcacccccttcgagatctccctctggatccttctggcctgcctcatgaagatagataattctggggtaaccacagttctgacttggatcatcatcagttgatcttacctgttcttgaacttcatctgaatggaatcataggtactcttgtgtgtctggctgcttttgctcagcctatctgtgagattcctcttcactgtcacatgtaccagaggtttgttcattttattgctgttcggtgttgcctcgtatgaatacaccacagttggctcactctcctgttgatgggcttttggattggttccctttttt

SEQ ID NO: 455426 - DNA, 4710 bp, Homo sapiens
ggctagggttagttctggagctggaccaggaggagctgcagctgggccggggcggagcgccgcgtcgcgccagggccgcgaggaggggcgtgttgctgctggcccaccgcgagccgcccccagcccgcgccgaggcgccttcccgccaggccgcctgccttccgcctctttccatttccccggaatctcagcccggcgcgcctggacccctgcccctctctgggtggagaagctcccggccgcttcccggtttcactccttctcagcctgggctcccagccccctctctccttttcctggactggctctcacccccttcggtccccttcctttagctcaggctccctaccccttcctttagcccacagcccagagtcccagctcctcagtcactttcctcagccaaaggtcccagccttccttcttcctttcctttgcactatccctatcctgccccttcctctatccctagggctcagtttcccacatccgtcctcccccttcccaggcccggagttccagaccttttggtctcctttcgtggtcgttcctgggtccttgccccctttccccactttggagttccagattgcaaacccagcctccctccacccccagaaaattgcttccatggaaatgcctctctaaaacatgaacttttcctagagactacgccagtctctcttcccacttgctgaccctttgctacctatgtgcccggttttactctcatttgggtaaggtcgaggctggctctggaagcagcaccatggttctgcggtctggcatctgtggcctctctccacatcggatcttcccttccttactcgtggtggttgctttggtggggctgctgcctgttctcaggagccatggcctccagctcagcccaactgccagcaccattcgaagctcagagccaccacgagaacgctcgattggggatgtcaccaccgctccaccggaggtcaccccagagagccgccctgttaatcattccgtcactgatcatggcatgaagccgcgcaaggcctttccagtcctgggcatcgactacacacacgtgcgcacccccttcgagatctccctctggatccttctggcctgcctcatgaagataggtttccatgtgatccccactatctcaagcatcgtcccggagagctgcctgctgatcgtggtggggctgctggtggggggcctgatcaagggtgtaggcgagacaccccccttcctgcagtccgacgtcttcttcctcttcctgctgccgcccatcatcctggatgcgggctacttcctgccactgcggcagttcacagaaaacctgggcaccatcctgatctttgccgtggtgggcacgctgtggaacgccttcttcctgggcggcctcatgtacgccgtgtgcctggtgggcggtgagcagatcaacaacatcggcctcctggacaacctgctcttcggcagcatcatctcggccgtggaccccgtggcggttctggctgtctttgaggaaattcacatcaatgagctgctgcacatccttgtttttggggagtccttgctcaatgacgccgtcactgtggtcctgtatcacctctttgaggagtttgccaactacgaacacgtgggcatcgtggacatcttcctcggcttcctgagcttcttcgtggtggccctgggcggggtgcttgtgggcgtggtctacggggtcatcgcagccttcacctcccgatttacctcccacatccgggtcatcgagccgctcttcgtcttcctctacagctacatggcctacttgtcagccgagctcttccacctgtcaggcatcatggcgctcatagcctcaggagtggtgatgcgcccctatgtggaggccaacatctcccacaagtcccacaccaccatcaaatacttcctgaagatgtggagcagcgtcagcgagaccctcatcttcatcttcctcggcgtctccacggtggccggctcccaccactggaactggaccttcgtcatcagcaccctgctcttctgcctcatcgcccgcgtgctgggggtgctgggcctgacctggttcatcaacaagttccgtatcgtgaagctgacccccaaggaccagttcatcatcgcctatgggggcctgcgaggggccatcgccttctctctgggctacctcctggacaagaagcacttccccatgtgtgacctgttcctcactgccatcatcactgtcatcttcttcaccgtctttgtgcagggcatgaccattcggcccctggtagacctgttggctgtgaagaaaaagcaagagacgaagcgctccatcaacgaagagatccacacacagttcctggaccaccttctgacaggcatcgaagacatctgtggccactacggtcaccaccactggaaggacaagctcaaccggtttaataagaaatatgtgaagaagtgtctgatagctggcgagcgctccaaggagccccagctcattgccttctaccacaagatggagatgaagcaggccatcgagctggtggagagcgggggcatgggcaagatcccctctgccgtctccaccgtctccatgcagaacatccaccccaagtccctgccttccgagcgcatcctgccagcactgtccaaggacaaggaggaggagatccgcaaaatcctgaggaacaacttgcagaagaccaggcagcggctgcggtcctacaacagacacacgctggtggcagacccctacgaggaagcctggaaccagatgctgctccggaggcagaaggcccggcagctggagcagaagatcaacaactacctgacggtgccagcccacaagctggactcacccaccatgtctcgggcccgcatcggctcagacccactggcctatgagccgaaggaggacctgcctgtcatcaccatcgacccggcttccccgcagtcacccgagtctgtggacctggtgaatgaggagctgaagggcaaagtcttagggttgagccgggatcctgcaaaggtggctgaggaggacgaggacgacgatgggggcatcatgatgcggagcaaggagacttcgtccccaggaaccgacgatgtcttcacccccgcgcccagtgacagccccagctcccagaggatacagcgctgcctcagtgacccaggcccacaccctgagcctggggagggagaaccgttcttccccaaggggcagtaacgccagggccagcaggcagcgcctgtcccctcacagactcttccaccagagcaggggctgctgggggctccccttgcccttcctgacccggattggccctgcccctccccctaccgcatggcagctgggcccacagcccccaccccagcacagctcctcccctgccgcctcccgggaagcatcctccccaccagagctgcctccccaatccatttggcagaactgctggggctggtgaggccggccctgcccctccctagatccaggcttctcccggacctggactagggcctcggaggctcctccctctgcctcatcctcctcctcattcagaccaatcttagtttctaaccaaagagtctctggctcagctgtggtcccacccaggaagggagggagctgaggcctcccttgagtaggccctgctttatcaggggacaaaccaggggtaccaggcacatggctgggggagggactgctgacccaccaaggtctcacactcctcctgccagctctgtcaccctggccaccacccaacctgtccttactcagagctgcgggctgagggcatctctgagtgtctctgcctggagcaggggtggtttctacggtgacagtgacgtgactcagagcttttcgaactgtgctcccacggggaccactgggcccctcaggggaagctgctaggggaaggactggccgtggctccagaatgtgctgcctttttaagttttgtttgttcacactcctatatatgattgtttgcacagagggcgctcctgtttttaaaacattttgaaaacccctggctgaacagtgctctgcctctaactccctcctcacactccagaattacccttcctcatctgtgcctgtctgtccaacccctcccccacgtctctctgcctgctgggctcttaactgttgctcgaagactgtgacatcagaagtaactcccactcctaatcaagagtctctccagcctcacagatgctggcctcttggcacctgcctagctcttgggcctgacctccagtcctgctggcctgctcttacttcccccaccctgggtttggcccctggaacctttcccttgtgtgtaccacaccctgcctgctgtggaagcccattgtggaggcggtgggggggagaaggcctcccctgaggatcccctgtcccctggggctggtggattgggcagaatcctgggcccccagagacctttgcccacacacactccttccccttgtccctggggcactcccccaggattgtgcaatagtcagagtgtccctttttgcaggggactgggccatgggtcctcggcccatctgtccatcctcctctccatgcaagtgctgtttgggcaggagtcaccatgcaagggtgacatcgacaaccacgtaccaagccaccgcagctgctgccactctgctgcctgtacagaagaaactgaatctttttcatattctaataaatcaatgtgagttttt

SEQ ID NO: 455427 - DNA, 1028 bp, Homo sapiens
ggctagggttagttctggagctggaccaggaggagctgcagctgggccggggcggagcgccgcgtcgcgccagggccgcgaggaggggcgtgttgctgctggcccaccgcgagccgcccccagcccgcgccgaggcgccttcccgccaggccgcctgccttccgcctctttccatttccccggaatctcagcccggcgcgcctggacccctgcccctctctgggtggagaagctcccggccgcttcccggtttcactccttctcagcctgggctcccagccccctctctccttttcctggactggctctcacccccttcggtccccttcctttagctcaggctccctaccccttcctttagcccacagcccagagtcccagctcctcagtcactttcctcagccaaaggtcccagccttccttcttcctttcctttgcactatccctatcctgccccttcctctatccctagggctcagtttcccacatccgtcctcccccttcccaggcccggagttccagaccttttggtctcctttcgtggtcgttcctgggtccttgccccctttccccactttggagttccagattgcaaacccagcctccctccacccccagaaaattgcttccatggaaatgcctctctaaaacatgaacttttcctagagactacgccagtctctcttcccacttgctgaccctttgctacctatgtgcccggttttactctcatttgggtaaggtcgaggctggctctggaagcagcaccatggttctgcggtctggcatctgtggcctctctccacatcggatcttcccttccttactcgtggtggttgctttggtggggctgctgcctgttctcaggagccatggcctccagctcagcccaactgccagcaccattcgaagctcagagccaccacgagaacgctcgattggggatgtcaccaccgctccaccggaggtcaccccagagagccgccctctgagccatttcctgcaagggcctttctgagccctgaact

SEQ ID NO: 455428 - DNA, 4233 bp, Homo sapiens
accatctgacttaggcttttaaagggatccttctggctgctttgttgaaacaataatctgggtggggaaaatggcactgcttggaccagagtgggcaatggaggtggtcagaaatggatggattctggaaatattttgaagattgaattgacactatttgtggaggattgatatgacagaaaggagccaaggatgactcaagtttttggccagagattattcgaaagcccttatgagactgcagatgtggacgtgaaatcgttttgtcgaggctggctctggaagcagcaccatggttctgcggtctggcatctgtggcctctctccacatcggatcttcccttccttactcgtggtggttgctttggtggggctgctgcctgttctcaggagccatggcctccagctcagcccaactgccagcaccattcgaagctcagagccaccacgagaacgctcgattggggatgtcaccaccgctccaccggaggtcaccccagagagccgccctgttaatcattccgtcactgatcatggcatgaagccgcgcaaggcctttccagtcctgggcatcgactacacacacgtgcgcacccccttcgagatctccctctggatccttctggcctgcctcatgaagataggtttccatgtgatccccactatctcaagcatcgtcccggagagctgcctgctgatcgtggtggggctgctggtggggggcctgatcaagggtgtaggcgagacaccccccttcctgcagtccgacgtcttcttcctcttcctgctgccgcccatcatcctggatgcgggctacttcctgccactgcggcagttcacagaaaacctgggcaccatcctgatctttgccgtggtgggcacgctgtggaacgccttcttcctgggcggcctcatgtacgccgtgtgcctggtgggcggtgagcagatcaacaacatcggcctcctggacaacctgctcttcggcagcatcatctcggccgtggaccccgtggcggttctggctgtctttgaggaaattcacatcaatgagctgctgcacatccttgtttttggggagtccttgctcaatgacgccgtcactgtggtcctgtatcacctctttgaggagtttgccaactacgaacacgtgggcatcgtggacatcttcctcggcttcctgagcttcttcgtggtggccctgggcggggtgcttgtgggcgtggtctacggggtcatcgcagccttcacctcccgatttacctcccacatccgggtcatcgagccgctcttcgtcttcctctacagctacatggcctacttgtcagccgagctcttccacctgtcaggcatcatggcgctcatagcctcaggagtggtgatgcgcccctatgtggaggccaacatctcccacaagtcccacaccaccatcaaatacttcctgaagatgtggagcagcgtcagcgagaccctcatcttcatcttcctcggcgtctccacggtggccggctcccaccactggaactggaccttcgtcatcagcaccctgctcttctgcctcatcgcccgcgtgctgggggtgctgggcctgacctggttcatcaacaagttccgtatcgtgaagctgacccccaaggaccagttcatcatcgcctatgggggcctgcgaggggccatcgccttctctctgggctacctcctggacaagaagcacttccccatgtgtgacctgttcctcactgccatcatcactgtcatcttcttcaccgtctttgtgcagggcatgaccattcggcccctggtagacctgttggctgtgaagaaaaagcaagagacgaagcgctccatcaacgaagagatccacacacagttcctggaccaccttctgacaggcatcgaagacatctgtggccactacggtcaccaccactggaaggacaagctcaaccggtttaataagaaatatgtgaagaagtgtctgatagctggcgagcgctccaaggagccccagctcattgccttctaccacaagatggagatgaagcaggccatcgagctggtggagagcgggggcatgggcaagatcccctctgccgtctccaccgtctccatgcagaacatccaccccaagtccctgccttccgagcgcatcctgccagcactgtccaaggacaaggaggaggagatccgcaaaatcctgaggaacaacttgcagaagaccaggcagcggctgcggtcctacaacagacacacgctggtggcagacccctacgaggaagcctggaaccagatgctgctccggaggcagaaggcccggcagctggagcagaagatcaacaactacctgacggtgccagcccacaagctggactcacccaccatgtctcgggcccgcatcggctcagacccactggcctatgagccgaaggaggacctgcctgtcatcaccatcgacccggcttccccgcagtcacccgagtctgtggacctggtgaatgaggagctgaagggcaaagtcttagggttgagccgggatcctgcaaaggtggctgaggaggacgaggacgacgatgggggcatcatgatgcggagcaaggagacttcgtccccaggaaccgacgatgtcttcacccccgcgcccagtgacagccccagctcccagaggatacagcgctgcctcagtgacccaggcccacaccctgagcctggggagggagaaccgttcttccccaaggggcagtaacgccagggccagcaggcagcgcctgtcccctcacagactcttccaccagagcaggggctgctgggggctccccttgcccttcctgacccggattggccctgcccctccccctaccgcatggcagctgggcccacagcccccaccccagcacagctcctcccctgccgcctcccgggaagcatcctccccaccagagctgcctccccaatccatttggcagaactgctggggctggtgaggccggccctgcccctccctagatccaggcttctcccggacctggactagggcctcggaggctcctccctctgcctcatcctcctcctcattcagaccaatcttagtttctaaccaaagagtctctggctcagctgtggtcccacccaggaagggagggagctgaggcctcccttgagtaggccctgctttatcaggggacaaaccaggggtaccaggcacatggctgggggagggactgctgacccaccaaggtctcacactcctcctgccagctctgtcaccctggccaccacccaacctgtccttactcagagctgcgggctgagggcatctctgagtgtctctgcctggagcaggggtggtttctacggtgacagtgacgtgactcagagcttttcgaactgtgctcccacggggaccactgggcccctcaggggaagctgctaggggaaggactggccgtggctccagaatgtgctgcctttttaagttttgtttgttcacactcctatatatgattgtttgcacagagggcgctcctgtttttaaaacattttgaaaacccctggctgaacagtgctctgcctctaactccctcctcacactccagaattacccttcctcatctgtgcctgtctgtccaacccctcccccacgtctctctgcctgctgggctcttaactgttgctcgaagactgtgacatcagaagtaactcccactcctaatcaagagtctctccagcctcacagatgctggcctcttggcacctgcctagctcttgggcctgacctccagtcctgctggcctgctcttacttcccccaccctgggtttggcccctggaacctttcccttgtgtgtaccacaccctgcctgctgtggaagcccattgtggaggcggtgggggggagaaggcctcccctgaggatcccctgtcccctggggctggtggattgggcagaatcctgggcccccagagacctttgcccacacacactccttccccttgtccctggggcactcccccaggattgtgcaatagtcagagtgtccctttttgcaggggactgggccatgggtcctcggcccatctgtccatcctcctctccatgcaagtgctgtttgggcaggagtcaccatgcaagggtgacatcgacaaccacgtaccaagccaccgcagctgctgccactctgctgcctgtacagaagaaactgaatctttttcatattctaataaatcaatgtgagttttt

SEQ ID NO: 455429 - DNA, 2040 bp, Homo sapiens
gtagggaaggcgccccacagcgaggcttgacttggccctgggcccctttcagttcctggaccaccttctgacaggcatcgaagacatctgtggccactacggtcaccaccactggaaggacaagctcaaccggtttaataagaaatatgtgaagaagtgtctgatagctggcgagcgctccaaggagccccagctcattgccttctaccacaagatggagatgaagcaggccatcgagctggtggagagcgggggcatgggcaagatcccctctgccgtctccaccgtctccatgcagaacatccaccccaagtccctgccttccgagcgcatcctgccagcactgtccaaggacaaggaggaggagatccgcaaaatcctgaggaacaacttgcagaagaccaggcagcggctgcggtcctacaacagacacacgctggtggcagacccctacgaggaagcctggaaccagatgctgctccggaggcagaaggcccggcagctggagcagaagatcaacaactacctgacggtgccagcccacaagctggactcacccaccatgtctcgggcccgcatcggctcagacccactggcctatgagccgaaggaggacctgcctgtcatcaccatcgacccggcttccccgcagtcacccgagtctgtggacctggtgaatgaggagctgaagggcaaagtcttagggttgagccgggatcctgcaaaggtggctgaggaggacgaggacgacgatgggggcatcatgatgcggagcaaggagacttcgtccccaggaaccgacgatgtcttcacccccgcgcccagtgacagccccagctcccagaggatacagcgctgcctcatcctcctcctcattcagaccaatcttagtttctaaccaaagagtctctggctcagctgtggtcccacccaggaagggagggagctgaggcctcccttgagtaggccctgctttatcaggggacaaaccaggggtaccaggcacatggctgggggagggactgctgacccaccaaggtctcacactcctcctgccagctctgtcaccctggccaccacccaacctgtccttactcagagctgcgggctgagggcatctctgagtgtctctgcctggagcaggggtggtttctacggtgacagtgacgtgactcagagcttttcgaactgtgctcccacggggaccactgggcccctcaggggaagctgctaggggaaggactggccgtggctccagaatgtgctgcctttttaagttttgtttgttcacactcctatatatgattgtttgcacagagggcgctcctgtttttaaaacattttgaaaacccctggctgaacagtgctctgcctctaactccctcctcacactccagaattacccttcctcatctgtgcctgtctgtccaacccctcccccacgtctctctgcctgctgggctcttaactgttgctcgaagactgtgacatcagaagtaactcccactcctaatcaagagtctctccagcctcacagatgctggcctcttggcacctgcctagctcttgggcctgacctccagtcctgctggcctgctcttacttcccccaccctgggtttggcccctggaacctttcccttgtgtgtaccacaccctgcctgctgtggaagcccattgtggaggcggtgggggggagaaggcctcccctgaggatcccctgtcccctggggctggtggattgggcagaatcctgggcccccagagacctttgcccacacacactccttccccttgtccctggggcactcccccaggattgtgcaatagtcagagtgtccctttttgcaggggactgggccatgggtcctcggcccatctgtccatcctcctctccatgcaagtgctgtttgggcaggagtcaccatgcaagggtgacatcgacaaccacgtaccaagccaccgcagctgctgccactctgctgcctgtacagaagaaactgaatctttttcatattctaataaatcaatgtgagttttt

SEQ ID NO: 455430 - DNA, 3431 bp, Homo sapiens
ggctagggttagttctggagctggaccaggaggagctgcagctgggccggggcggagcgccgcgtcgcgccagggccgcgaggaggggcgtgttgctgctggcccaccgcgagccgcccccagcccgcgccgaggcgccttcccgccaggccgcctgccttccgcctctttccatttccccggaatctcagcccggcgcgcctggacccctgcccctctctgggtggagaagctcccggccgcttcccggtttcactccttctcagcctgggctcccagccccctctctccttttcctggactggctctcacccccttcggtccccttcctttagctcaggctccctaccccttcctttagcccacagcccagagtcccagctcctcagtcactttcctcagccaaaggtcccagccttccttcttcctttcctttgcactatccctatcctgccccttcctctatccctagggctcagtttcccacatccgtcctcccccttcccaggcccggagttccagaccttttggtctcctttcgtggtcgttcctgggtccttgccccctttccccactttggagttccagattgcaaacccagcctccctccacccccagaaaattgcttccatggaaatgcctctctaaaacatgaacttttcctagagactacgccagtctctcttcccacttgctgaccctttgctacctatgtgcccggttttactctcatttgggtaaggtcgaggctggctctggaagcagcaccatggttctgcggtctggcatctgtggcctctctccacatcggatcttcccttccttactcgtggtggttgctttggtggggctgctgcctgttctcaggagccatggcctccagctcagcccaactgccagcaccattcgaagctcagagccaccacgagaacgctcgattggggatgtcaccaccgctccaccggaggtcaccccagagagccgccctgttaatcattccgtcactgatcatggcatgaagccgcgcaaggcctttccagtcctgggcatcgactacacacacgtgcgcacccccttcgagatctccctctggatccttctggcctgcctcatgaagataggtttccatgtgatccccactatctcaagcatcgtcccggagagctgcctgctgatcgtggtggggctgctggtggggggcctgatcaagggtgtaggcgagacaccccccttcctgcagtccgacgtcttcttcctcttcctgctgccgcccatcatcctggatgcgggctacttcctgccactgcggcagttcacagaaaacctgggcaccatcctgatctttgccgtggtgggcacgctgtggaacgccttcttcctgggcggcctcatgtacgccgtgtgcctggtgggcggtgagcagatcaacaacatcggcctcctggacaacctgctcttcggcagcatcatctcggccgtggaccccgtggcggttctggctgtctttgaggaaattcacatcaatgagctgctgcacatccttgtttttggggagtccttgctcaatgacgccgtcactgtggtcctgtatcacctctttgaggagtttgccaactacgaacacgtgggcatcgtggacatcttcctcggcttcctgagcttcttcgtggtggccctgggcggggtgcttgtgggcgtggtctacggggtcatcgcagccttcacctcccgatttacctcccacatccgggtcatcgagccgctcttcgtcttcctctacagctacatggcctacttgtcagccgagctcttccacctgtcaggcatcatggcgctcatagcctcaggagtggtgatgcgcccctatgtggaggccaacatctcccacaagtcccacaccaccatcaaatacttcctgaagatgtggagcagcgtcagcgagaccctcatcttcatcttcctcggcgtctccacggtggccggctcccaccactggaactggaccttcgtcatcagcaccctgctcttctgcctcatcgcccgcgtgctgggggtgctgggcctgacctggttcatcaacaagttccgtatcgtgaagctgacccccaaggaccagttcatcatcgcctatgggggcctgcgaggggccatcgccttctctctgggctacctcctggacaagaagcacttccccatgtgtgacctgttcctcactgccatcatcactgtcatcttcttcaccgtctttgtgcagggcatgaccattcggcccctggtagacctgttggctgtgaagaaaaagcaagagacgaagcgctccatcaacgaagagatccacacacagttcctggaccaccttctgacaggcatcgaagacatctgtggccactacggtcaccaccactggaaggacaagctcaaccggtttaataagaaatatgtgaagaagtgtctgatagctggcgagcgctccaaggagccccagctcattgccttctaccacaagatggagatgaagcaggccatcgagctggtggagagcgggggcatgggcaagatcccctctgccgtctccaccgtctccatgcagaacatccaccccaagtccctgccttccgagcgcatcctgccagcactgtccaaggacaaggaggaggagatccgcaaaatcctgaggaacaacttgcagaagaccaggcagcggctgcggtcctacaacagacacacgctggtggcagacccctacgaggaagcctggaaccagatgctgctccggaggcagaaggcccggcagctggagcagaagatcaacaactacctgacggtgccagcccacaagctggactcacccaccatgtctcgggcccgcatcggctcagacccactggcctatgagccgaaggaggacctgcctgtcatcaccatcgacccggcttccccgcagtcacccgagtctgtggacctggtgaatgaggagctgaagggcaaagtcttagggttgagccgggatcctgcaaaggtggctgaggaggacgaggacgacgatgggggcatcatgatgcggagcaaggagacttcgtccccaggaaccgacgatgtcttcacccccgcgcccagtgacagccccagctcccagaggatacagcgctgcctcagtgacccaggcccacaccctgagcctggggagggagaaccgttcttccccaggattgtgcaatagtcagagtgtccctttttgcaggggactgggccatgggtcctcggcccatctgtccatcctcctctccatgcaagtgctgtttgggcaggagtcaccatgcaagggtgacatcgacaaccacgtaccaagccaccgcagctgctgccactctgctgcctgtacagaagaaactgaatctttttcatattctaataaatcaatgtgagttttt

SEQ ID NO: 455431 - DNA, 1742 bp, Homo sapiens
ggctagggttagttctggagctggaccaggaggagctgcagctgggccggggcggagcgccgcgtcgcgccagggccgcgaggaggggcgtgttgctgctggcccaccgcgagccgcccccagcccgcgccgaggcgccttcccgccaggccgcctgccttccgcctctttccatttccccggaatctcagcccggcgcgcctggacccctgcccctctctgggtggagaagctcccggccgcttcccggtttcactccttctcagcctgggctcccagccccctctctccttttcctggactggctctcacccccttcggtccccttcctttagctcaggctccctaccccttcctttagcccacagcccagagtcccagctcctcagtcactttcctcagccaaaggtcccagccttccttcttcctttcctttgcactatccctatcctgccccttcctctatccctagggctcagtttcccacatccgtcctcccccttcccaggcccggagttccagaccttttggtctcctttcgtggtcgttcctgggtccttgccccctttccccactttggagttccagattgcaaacccagcctccctccacccccagaaaattgcttccatggaaatgcctctctaaaacatgaacttttcctagagactacgccagtctctcttcccacttgctgaccctttgctacctatgtgcccggttttactctcatttgggtaaggtcgaggctggctctggaagcagcaccatggttctgcggtctggcatctgtggcctctctccacatcggatcttcccttccttactcgtggtggttgctttggtggggctgctgcctgttctcaggagccatggcctccagctcagcccaactgccagcaccattcgaagctcagagccaccacgagaacgctcgattggggatgtcaccaccgctccaccggaggtcaccccagagagccgccctgttaatcattccgtcactgatcatggcatgaagccgcgcaaggcctttccagtcctgggcatcgactacacacacgtgcgcacccccttcgagatctccctctggatccttctggcctgcctcatgaagataggtttccatgtgatccccactatctcaagcatcgtcccggagagctgcctgctgatcgtggtggggctgctggtggggggcctgatcaagggtgtaggcgagacaccccccttcctgcagtccgacgtcttcttcctcttcctgctgccgcccatcatcctggatgcgggctacttcctgccactgcggcagttcacagaaaacctgggcaccatcctgatctttgccgtggtgggcacgctgtggaacgccttcttcctgggcggcctcatgtacgccgtgtgcctggtgggcggtgagcagatcaacaacatcggcctcctggacaacctgctcttcggcagcatcatctcggccgtggaccccgtggcggttctggctgtctttgaggaaattcacatcaatgagctgctgcacatccttgtttttggggagtccttgctcaatgacgccgtcactgtggtcctgtatcacctctttgaggagtttgccaactacgaacacgtgggcatcgtggacatcttcctcggcttcctgagcttcttcgtggtggcggggctggtggcctgcttcttgttgatgttcagcatcttctcttcccccaagaccccccgcttaaact

SEQ ID NO: 455432 - DNA, 164 bp, Homo sapiens
gcactgcccccacccctccatgagcagagccttccggggcccgcactgccctgacgctgtccctcccacagctgcggtcctacaacagacacacgctggtggcagacccctacgaggaagcctggaaccagatgctgctccggaggcagaaggcccggcagctg

SEQ ID NO: 455433 - DNA, 3238 bp, Homo sapiens
gaatctgcttccggatcagagggtataggccgcgagatggggaagatggcagcggccgtgggctctgtggcgactctggcgactgagcccggggaggacgcctttcggaaacttttccgcttctaccgtcagagccggcccgggaccgcagacctggaaggggtcatcgacttctcggcggcccacgcagcccgtggcaagggtcctggtgcccaaaaggtgatcaaatctcagctaaatgtgtcttctgtcagtgagcagaatgcatatagagcaggtcttcagcccgtcagcaagtggcaagcctatggactcaaaggctatcctgggtttatttttatcccaaaccccttcctcccaggttaccagtggcactgggtgaaacagtgccttaagttatattcccagaaacctaatgtatgtaacctggacaaacacatgtctaaagaagagacccaagatctgtgggaacagagcaaagagttcctgaggtataaagaagcgactaaacggagaccccgaagtttactggagaaactgcgttgggtgaccgtaggctaccattataactgggacagtaagaaatactcagcagatcattacacacctttcccttctgacctgggtttcctctcagagcaagtagccgctgcctgtggatttgaggatttccgagctgaagcagggatcctgaattactaccgcctggactccacactgggaatccacgtagacagatctgagctagatcactccaaacccttgctgtcattcagctttggacagtccgccatctttctcctgggtggtcttcaaagggatgaggcccccacggccatgtttatgcacagtggtgacatcatgataatgtcgggtttcagccgcctcttgaaccacgcagtccctcgtgtccttccaaatccagaaggggaaggcctgcctcactgcctagaggcacctctccctgctgtcctcccgagagattcaatggtagagccttgttctatggaggactggcaggtgtgtgccagctacttgaagaccgctcgtgttaacatgactgtccgacaggtcctggccacagaccagaatttccctctagaacccatcgaggatgaaaaaagagacatcagtacagaaggtttctgccatctggatgaccagaatagcgaagtaaaacgggccaggataaaccctgacagctgagacttggagatcccatcctttttactcaggcacctgcttaccgtaaatgatcatgttattgtgtattgccgtggacttcagcacccagacaagccaaaaacagagacagggaagaactcattgttgatcacactgttgccttggaacccacgcagaagtaaactcagccactttgctcagagaagtgtttgacatggtctgttcctagttacatgttggctgtaatgtatgttgagaagtcagtccaaggaggtatgttcttccacaacagccttctcagcctctgctatttcctttgaggaaggtagaagtgagtttccatgtttgcagagtatttaaatacctcagattttattaatgagaaatacagtacccctccctccactccatctggtaatttatggtaaaattgtggttctgtgaaccagctattagtctcatcttcttaactccctcaggcatcatcaaattctttgatcttctcttccacctctctggctctcatggaagaatcctttacacatgaaaacaatggaactggaaaatcttgtcttttagaaaagaaattaatcacaactatctctcttgcctaaaagataaatataggtaaacccaaggaaaggggaatttagtttctctacatgtcatttcggtctccaaactccctgttggctttttaatgcaattttaattgttggaataaaaaagtcccaagggtgttttgttactgttttctccatgaataaactcacttgattttaaattaaagatctatatctgtctttggggtttagtctatctgggattaaggtttttttttctgtttttctttgctgtattgttcatgctattgaagccctctagctgtttctgccctacaccattctgctgtgccctaagtattctttgtggctgtctcacagaagagagaacatttcttaatattccagtcactgctgttattgtctgagggtaggcagcttggaaaaatgtaggcaacaccaagttttaatctttatacccccaacaatttgactgactatatcatggtccaggttactttacatttctctggacctcggtttcctcatcataaaatgaagatactgtagactaccatcttcctaaagggatattggtatttgaaagagaattaagtgctcctttctacaaacatgatgtgccaaaattgttttattataagggctctttgaaacatcctaacttccttgtgtggaggactggctggaagcccatttggtacctactgtttgcaatgcatgttattaagtttacatgtctcctctgtcctgctctgccccttttttaaattactggcattgaatattgagttcatatggtaatagcagggtttttaaatgaataaaaattatggatttatctcttaaaagaaaaaaaacaaaaaaaaaaacaaaaaaaaaaaaaaaaaaaaaacaaaaacaaaaaaaaaaaaaaaaaaaaaaaacaaagcggggcgcgcgcgcccccaaaacccccccgcggggcgccccccctccagccgaccaccccgcagtttagctagaaacaaagggggcgcgcctccacataagagaggcagggcagccctattaataccaccagaagcgaacgagcgaggccgcgcggactaataaaaccacacacgaggaccgacgagggagaaaaacagcggcccacgagcagcaatatcacctccgattgagaagaaagaaacccaccaacaaccagcgggggggagagggcgagacaccaccatgagagtggagcgacacaaacaaccacactcaacacgagcgaagaaaaaaattagcacccgcccctaccagacggacgaagcaacaacaaaaaaaaaacaccttacacgacgagagaatgcaaaaaaggaggggcgacacacaaacacaccccagcgtgacatcacaagataacgcgcgaagcagaaaagacaaaacaaactacccgcccaccacacaaaaaggatataatatgcaagacaaacaaaaatataaag

SEQ ID NO: 455434 - DNA, 2966 bp, Homo sapiens
gaatctgcttccggatcagagggtataggccgcgagatggggaagatggcagcggccgtgggctctgtggcgactctggcgactgagcccggggaggacgcctttcggaaacttttccgcttctaccgtcagagccggcccgggaccgcagacctggaaggggtcatcgacttctcggcggcccacgcagcccgtggcaagggtcctggtgcccaaaaggtataaagaagcgactaaacggagaccccgaagtttactggagaaactgcgttgggtgaccgtaggctaccattataactgggacagtaagaaatactcagcagatcattacacacctttcccttctgacctgggtttcctctcagagcaagtagccgctgcctgtggatttgaggatttccgagctgaagcagggatcctgaattactaccgcctggactccacactgggaatccacgtagacagatctgagctagatcactccaaacccttgctgtcattcagctttggacagtccgccatctttctcctgggtggtcttcaaagggatgaggcccccacggccatgtttatgcacagtggtgacatcatgataatgtcgggtttcagccgcctcttgaaccacgcagtccctcgtgtccttccaaatccagaaggggaaggcctgcctcactgcctagaggcacctctccctgctgtcctcccgagagattcaatggtagagccttgttctatggaggactggcaggtgtgtgccagctacttgaagaccgctcgtgttaacatgactgtccgacaggtcctggccacagaccagaatttccctctagaacccatcgaggatgaaaaaagagacatcagtacagaaggtttctgccatctggatgaccagaatagcgaagtaaaacgggccaggataaaccctgacagctgagacttggagatcccatcctttttactcaggcacctgcttaccgtaaatgatcatgttattgtgtattgccgtggacttcagcacccagacaagccaaaaacagagacagggaagaactcattgttgatcacactgttgccttggaacccacgcagaagtaaactcagccactttgctcagagaagtgtttgacatggtctgttcctagttacatgttggctgtaatgtatgttgagaagtcagtccaaggaggtatgttcttccacaacagccttctcagcctctgctatttcctttgaggaaggtagaagtgagtttccatgtttgcagagtatttaaatacctcagattttattaatgagaaatacagtacccctccctccactccatctggtaatttatggtaaaattgtggttctgtgaaccagctattagtctcatcttcttaactccctcaggcatcatcaaattctttgatcttctcttccacctctctggctctcatggaagaatcctttacacatgaaaacaatggaactggaaaatcttgtcttttagaaaagaaattaatcacaactatctctcttgcctaaaagataaatataggtaaacccaaggaaaggggaatttagtttctctacatgtcatttcggtctccaaactccctgttggctttttaatgcaattttaattgttggaataaaaaagtcccaagggtgttttgttactgttttctccatgaataaactcacttgattttaaattaaagatctatatctgtctttggggtttagtctatctgggattaaggtttttttttctgtttttctttgctgtattgttcatgctattgaagccctctagctgtttctgccctacaccattctgctgtgccctaagtattctttgtggctgtctcacagaagagagaacatttcttaatattccagtcactgctgttattgtctgagggtaggcagcttggaaaaatgtaggcaacaccaagttttaatctttatacccccaacaatttgactgactatatcatggtccaggttactttacatttctctggacctcggtttcctcatcataaaatgaagatactgtagactaccatcttcctaaagggatattggtatttgaaagagaattaagtgctcctttctacaaacatgatgtgccaaaattgttttattataagggctctttgaaacatcctaacttccttgtgtggaggactggctggaagcccatttggtacctactgtttgcaatgcatgttattaagtttacatgtctcctctgtcctgctctgccccttttttaaattactggcattgaatattgagttcatatggtaatagcagggtttttaaatgaataaaaattatggatttatctcttaaaagaaaaaaaacaaaaaaaaaaacaaaaaaaaaaaaaaaaaaaaaacaaaaacaaaaaaaaaaaaaaaaaaaaaaaacaaagcggggcgcgcgcgcccccaaaacccccccgcggggcgccccccctccagccgaccaccccgcagtttagctagaaacaaagggggcgcgcctccacataagagaggcagggcagccctattaataccaccagaagcgaacgagcgaggccgcgcggactaataaaaccacacacgaggaccgacgagggagaaaaacagcggcccacgagcagcaatatcacctccgattgagaagaaagaaacccaccaacaaccagcgggggggagagggcgagacaccaccatgagagtggagcgacacaaacaaccacactcaacacgagcgaagaaaaaaattagcacccgcccctaccagacggacgaagcaacaacaaaaaaaaaacaccttacacgacgagagaatgcaaaaaaggaggggcgacacacaaacacaccccagcgtgacatcacaagataacgcgcgaagcagaaaagacaaaacaaactacccgcccaccacacaaaaaggatataatatgcaagacaaacaaaaatataaag

SEQ ID NO: 455435 - DNA, 758 bp, Homo sapiens
ctgttccggggagttctgtggattctgaaatttacccattattttcgatatatatagaagtgggaatgaatacttagcaataaaaatatgtgacaagctgtgggcactctaacatcctggaggacattgtctctctccccgggaaccgcagaagtaaactcagccactttgctcagagaagtgtttgacatggtctgttcctagttacatgttggctgtaatgtatgttgagaagtcagtccaaggaggtatgttcttccacaacagccttctcagcctctgctatttcctttgaggaaggtagaagtgagtttccatgtttgcagagtatttaaatacctcagattttattaatgagaaatacagtacccctccctccactccatctggtaatttatggtaaaattgtggttctgtgaaccagctattagtctcatcttcttaactccctcaggcatcatcaaattctttgatcttctcttccacctctctggctctcatggaagaatcctttacacatgaaaacaatggaactggaaaatcttgtcttttagaaaagaaattaatcacaactatctctcttgcctaaaagataaatataggtaaacccaaggaaaggggaatttagtttctctacatgtcatttcggtctccaaactccctgttggctttttaatgcaattttaattgttggaataaaaaagtcccaagggtgttttgttactgttttctccatgaataaactcacttgattttaa

SEQ ID NO: 455436 - DNA, 1005 bp, Homo sapiens
gaatctgcttccggatcagagggtataggccgcgagatggggaagatggcagcggccgtgggctctgtggcgactctggcgactgagcccggggaggacgcctttcggaaacttttccgcttctaccgtcagagccggcccgggaccgcagacctggaaggggtcatcgacttctcggcggcccacgcagcccgtggcaagggtcctggtgcccaaaaggtgatcaaatctcagctaaatgtgtcttctgtcagtgagcagaatgcatatagagcaggtcttcagcccgtcagcaagtggcaagcctatggactcaaaggctatcctgggtttatttttatcccaaaccccttcctcccaggttaccagtggcactgggtgaaacagtgccttaagttatattcccagaaacctaatgtatgtaacctggacaaacacatgtctaaagaagagacccaagatctgtgggaacagagcaaagagttcctgagggagtccccaaaaccacacccaaatttgatgattcgccaggaagactcaggactcagcagatggttgcacttacagatttatcacagtgaaagcatacaaagcaagatcagcaaagggaaaaggcacctggagcaaagtccaggaaaaaccaggtgcatgcctccaaaagtcctctcccaaggaagtcacaccggatatggcaatgggttgtgacaaaatctgtgaaatgtttaccaaagaaactcagtgcctaggtttttactaggagcttgtcatgtaggcagcctctgcctgacacatgccaaaatcacagactcccagaagcaaagcaggtgttgaccataaaccatattgtttgcacagtttaggtgcagtaagccactcttaacacttccagagaattgtgtgaaccttgccaaggaccatctttgtaagcagaccatcagtcaagtctgctatgtctcttctgcacacctgtcctaaataaatcagtgtgtgttcatttctttttat

SEQ ID NO: 455437 - DNA, 1968 bp, Homo sapiens
gaatctgcttccggatcagagggtataggccgcgagatggggaagatggcagcggccgtgggctctgtggcgactctggcgactgagcccggggaggacgcctttcggaaacttttccgcttctaccgtcagagccggcccgggaccgcagacctggaaggggtcatcgacttctcggcggcccacgcagcccgtggcaagggtcctggtgcccaaaaggtgatcaaatctcagctaaatgtgtcttctgtcagtgagcagaatgcatatagagcaggtcttcagcccgtcagcaagtggcaagcctatggactcaaaggctatcctgggtttatttttatcccaaaccccttcctcccaggttaccagtggcactgggtgaaacagtgccttaagttatattcccagaaacctaatgtatgtaacctggacaaacacatgtctaaagaagagacccaagatctgtgggaacagagcaaagagttcctgaggtataaagaagcgactaaacggagaccccgaagtttactggagaaactgcgttgggtgaccgtaggctaccattataactgggacagtaagaaatactcagcagatcattacacacctttcccttctgacctgggtttcctctcagagcaagtagccgctgcctgtggatttgaggatttccgagctgaagcagggatcctgaattactaccgcctggactccacactgggaatccacgtagacagatctgagctagatcactccaaacccttgctgtcattcagctttggacagtccgccatctttctcctgggtggtcttcaaagggatgaggcccccacggccatgtttatgcacagtggtgacatcatgataatgtcgggtttcagccgcctcttgaaccacgcagtccctcgtgtccttccaaatccagaaggggaaggcctgcctcactgcctagaggcacctctccctgctgtcctcccgagagattcaatggtagagccttgttctatggaggactggcaggtgtgtgccagctacttgaagaccgctcgtgttaacatgactgtccgacaggtcctggccacagaccagaatttccctctagaacccatcgaggatgaaaaaagagacatcagtacagaaggtttctgccatctggatgaccagaatagcgaagtaaaacgggccaggataaaccctgacagctgagacttggagatcccatcctttttactcaggcacctgcttaccgtaaatgatcatgttattgtgtattgccgtggacttcagcacccagacaagccaaaaacagagacagggaagaactcattgttgatcacactgttgccttggaacccacgcagaagtaaactcagccactttgctcagagaagtgtttgacatggtctgttcctagttacatgttggctgtaatgtatgttgagaagtcagtccaaggaggtatgttcttccacaacagccttctcagcctctgctatttcctttgaggaaggtagaagtgagtttccatgtttgcagagtatttaaatacctcagattttattaatgagaaatacagtacccctccctccactccatctggtaatttatggtaaaattgtggttctgtgaaccagctattagtctcatcttcttaactccctcaggcatcatcaaattctttgatcttctcttccacctctctggctctcatggaagaatcctttacacatgaaaacaatggaactggaaaatcttgtcttttagaaaagaaattaatcacaactatctctcttgcctaaaagataaatataggtaaacccaaggaaaggggaatttagtttctctacatgtcatttcggtctccaaactccctgttggctttttaatgcaattttaattgttggaataaaaaagtcccaagggtgttttgttactgttttctccatgaataaactcacttgattttaa

SEQ ID NO: 455438 - DNA, 3075 bp, Homo sapiens
gaatctgcttccggatcagagggtataggccgcgagatggggaagatggcagcggccgtgggctctgtggcgactctggcgactgagcccggggaggacgcctttcggaaacttttccgcttctaccgtcagagccggcccgggaccgcagacctggaaggggtcatcgacttctcggcggcccacgcagcccgtggcaagggtcctggtgcccaaaaggtgatcaaatctcagctaaatgtgtcttctgtcagtgagcagaatgcatatagagcaggtcttcagcccgtcagcaagtggcaagcctatggactcaaaggctatcctggtataaagaagcgactaaacggagaccccgaagtttactggagaaactgcgttgggtgaccgtaggctaccattataactgggacagtaagaaatactcagcagatcattacacacctttcccttctgacctgggtttcctctcagagcaagtagccgctgcctgtggatttgaggatttccgagctgaagcagggatcctgaattactaccgcctggactccacactgggaatccacgtagacagatctgagctagatcactccaaacccttgctgtcattcagctttggacagtccgccatctttctcctgggtggtcttcaaagggatgaggcccccacggccatgtttatgcacagtggtgacatcatgataatgtcgggtttcagccgcctcttgaaccacgcagtccctcgtgtccttccaaatccagaaggggaaggcctgcctcactgcctagaggcacctctccctgctgtcctcccgagagattcaatggtagagccttgttctatggaggactggcaggtgtgtgccagctacttgaagaccgctcgtgttaacatgactgtccgacaggtcctggccacagaccagaatttccctctagaacccatcgaggatgaaaaaagagacatcagtacagaaggtttctgccatctggatgaccagaatagcgaagtaaaacgggccaggataaaccctgacagctgagacttggagatcccatcctttttactcaggcacctgcttaccgtaaatgatcatgttattgtgtattgccgtggacttcagcacccagacaagccaaaaacagagacagggaagaactcattgttgatcacactgttgccttggaacccacgcagaagtaaactcagccactttgctcagagaagtgtttgacatggtctgttcctagttacatgttggctgtaatgtatgttgagaagtcagtccaaggaggtatgttcttccacaacagccttctcagcctctgctatttcctttgaggaaggtagaagtgagtttccatgtttgcagagtatttaaatacctcagattttattaatgagaaatacagtacccctccctccactccatctggtaatttatggtaaaattgtggttctgtgaaccagctattagtctcatcttcttaactccctcaggcatcatcaaattctttgatcttctcttccacctctctggctctcatggaagaatcctttacacatgaaaacaatggaactggaaaatcttgtcttttagaaaagaaattaatcacaactatctctcttgcctaaaagataaatataggtaaacccaaggaaaggggaatttagtttctctacatgtcatttcggtctccaaactccctgttggctttttaatgcaattttaattgttggaataaaaaagtcccaagggtgttttgttactgttttctccatgaataaactcacttgattttaaattaaagatctatatctgtctttggggtttagtctatctgggattaaggtttttttttctgtttttctttgctgtattgttcatgctattgaagccctctagctgtttctgccctacaccattctgctgtgccctaagtattctttgtggctgtctcacagaagagagaacatttcttaatattccagtcactgctgttattgtctgagggtaggcagcttggaaaaatgtaggcaacaccaagttttaatctttatacccccaacaatttgactgactatatcatggtccaggttactttacatttctctggacctcggtttcctcatcataaaatgaagatactgtagactaccatcttcctaaagggatattggtatttgaaagagaattaagtgctcctttctacaaacatgatgtgccaaaattgttttattataagggctctttgaaacatcctaacttccttgtgtggaggactggctggaagcccatttggtacctactgtttgcaatgcatgttattaagtttacatgtctcctctgtcctgctctgccccttttttaaattactggcattgaatattgagttcatatggtaatagcagggtttttaaatgaataaaaattatggatttatctcttaaaagaaaaaaaacaaaaaaaaaaacaaaaaaaaaaaaaaaaaaaaaacaaaaacaaaaaaaaaaaaaaaaaaaaaaaacaaagcggggcgcgcgcgcccccaaaacccccccgcggggcgccccccctccagccgaccaccccgcagtttagctagaaacaaagggggcgcgcctccacataagagaggcagggcagccctattaataccaccagaagcgaacgagcgaggccgcgcggactaataaaaccacacacgaggaccgacgagggagaaaaacagcggcccacgagcagcaatatcacctccgattgagaagaaagaaacccaccaacaaccagcgggggggagagggcgagacaccaccatgagagtggagcgacacaaacaaccacactcaacacgagcgaagaaaaaaattagcacccgcccctaccagacggacgaagcaacaacaaaaaaaaaacaccttacacgacgagagaatgcaaaaaaggaggggcgacacacaaacacaccccagcgtgacatcacaagataacgcgcgaagcagaaaagacaaaacaaactacccgcccaccacacaaaaaggatataatatgcaagacaaacaaaaatataaag

SEQ ID NO: 455439 - DNA, 2059 bp, Homo sapiens
ccgcggccgctgccggacttcgccagatcagacccacggggctgccctcccctgcgcactcccctcgctgcccgggcccggagcgcagcgcggccgcacagattcacaatgttgaaagcccttttcctaactatgctgactctggcgctggtcaagtcacaggacaccgaagaaaccatcacgtacacgcaatgcactgacggatatgagtgggatcctgtgagacagcaatgcaaagatattgatgaatgtgacattgtcccagacgcttgtaaaggtggaatgaagtgtgtcaaccactatggaggatacctctgccttccgaaaacagcccagattattgtcaataatgaacagcctcagcaggaaacacaaccagcagaaggaacctcaggggcaaccaccggggttgtagctgccagcagcatggcaaccagtggagtgttgcccgggggtggttttgtggccagtgctgctgcagtcgcaggccctgaaatgcagactggccgaaataactttgtcatccggcggaacccagctgaccctcagcgcattccctccaacccttcccaccgtatccagtgtgcagcaggctacgagcaaagtgaacacaacgtgtgccaagacatagacgagtgcactgcagggacgcacaactgtagagcagaccaagtgtgcatcaatttacggggatcctttgcatgtcagtgccctcctggatatcagaagcgaggggagcagtgcgtagacatagatgaatgtaccatccctccatattgccaccaaagatgcgtgaatacaccaggctcattttattgccagtgcagtcctgggtttcaattggcagcaaacaactatacctgcgtagatataaatgaatgtgatgccagcaatcaatgtgctcagcagtgctacaacattcttggttcattcatctgtcagtgcaatcaaggatatgagctaagcagtgacaggctcaactgtgaagacattgatgaatgcagaacctcaagctacctgtgtcaatatcaatgtgtcaatgaacctgggaaattctcatgtatgtgcccccagggataccaagtggtgagaagtagaacatgtcaagatataaatgagtgtgagaccacaaatgaatgccgggaggatgaaatgtgttggaattatcatggcggcttccgttgttatccacgaaatccttgtcaagatccctacattctaacaccagagaaccgatgtgtttgcccagtctcaaatgccatgtgccgagaactgccccagtcaatagtctacaaatacatgagcatccgatctgataggtctgtgccatcagacatcttccagatacaggccacaactatttatgccaacaccatcaatacttttcggattaaatctggaaatgaaaatggagagttctacctacgacaaacaagtcctgtaagtgcaatgcttgtgctcgtgaagtcattatcaggaccaagagaacatatcgtggacctggagatgctgacagtcagcagtatagggaccttccgcacaagctctgtgttaagattgacaataatagtggggccattttcattttagtcttttctaagagtcaaccacaggcatttaagtcagccaaagaatattgttaccttaaagcactattttatttatagatatatctagtgcatctacatctctatactgtacactcacccataattcaaacaattacaccatggtataaagtgggcatttaatatgtaaagattcaaagtttgtctttattactatatgtaaattagacattaatccactaaactggtcttcttcaagagagctaagtatacactatctggtgaaacttggattctttcctataaaagtgggaccaagcaatgatgatcttctgtggtgcttaaggaaacttactagagctccactaacagtctcataaggaggcagccatcataaccattgaatagcatgcaagggtaagaatgagtttttaactgctttgtaagaaaatggaaaaggtcaataaagatatatttctttagaaaatggg

SEQ ID NO: 455440 - DNA, 629 bp, Homo sapiens
  misc_feature (14)..(14): n is a, c, g, or t
  misc_feature (36)..(36): n is a, c, g, or t
acaaataccagganaaatctgggaaatgaaaaatgnagagttctaccttacgacaaacaagtcctgtaagtgcaatgcttgtgctcgtgaagtcattatcaggaccaagagaacatatcgtggacctggagatgctgacagtcagcagtatacattttagtcttttctaagagtcaaccacaggcatttaagtcagccaaagaatattgttaccttaaagcactattttatttatagatatatctagtgcatctacatctctatactgtacactcacccataattcaaacaattacaccatggtataaagtgggcatttaatatgtaaagattcaaagtttgtctttattactatatgtaaattagacattaatccactaaactggtcttcttcaagagagctaagtatacactatctggtgaaacttggattctttcctataaaagtgggaccaagcaatgatgatcttctgtggtgcttaaggaaacttactagagctccactaacagtctcataaggaggcagccatcataaccattgaatagcatgcaagggtaagaatgagtttttaactgctttgtaagaaaatggaaaaggtcaataaagatatatttctttagaaaatggg

SEQ ID NO: 455441 - DNA, 1274 bp, Homo sapiens
  misc_feature (14)..(14): n is a, c, g, or t
  misc_feature (36)..(36): n is a, c, g, or t
acaaataccagganaaatctgggaaatgaaaaatgnagagttctaccttacgacaaacaagtcctgtaagtgcaatgcttgtgctcgtgaagtcattatcaggaccaagagaacatatcgtggacctggagatgctgacagtcagcagtatacattttagtcttttctaagagtcaaccacaggcatttaagtcagccaaagaatattgttaccttaaagcactattttatttatagatatatctagtgcatctacatctctatactgtacactcacccataattcaaacaattacaccatggtataaagtgggcatttaatatgtaaagattcaaagtttgtctttattactatatgtaaattagacattaatccactaaactggtcttcttcaagagagctaagtatacactatctggtgaaacttggattctttcctataaaagtgggaccaagcaatgatgatcttctgtggtgcttaaggaaacttactagagctccactaacagtctcataaggaggcagccatcataaccattgaatagcatgcaagggtaagaatgagtttttaactgctttgtaagaaaatggaaaaggtcaataaagatatatttctttagaaaatggggatctgccatatttgtgttggtttttattttcatatccagcctaaaggtggttgtttattatatagtaataaatcattgctgtacaatatgctggtttctgtagggtatttttaattttgtcagaaattttagattgtgaatattttgtaaaaaacagtaagcaaaattttccagaattcccaaaatgaaccagatatcccctagaaaattatactattgagaaatctatggggaggatatgagaaaataaattccttctaaaccacattggaactgacctgaagaagcaaactcggaaaatataataacatccctgaattcaggacttccacaagatgcagaacaaaatggataaaaggtatttcactggagaagttttaatttctaagtaaaatttaaatcctaacacttcactaatttataactaaaatttctcatcttcgtacttgatgctcacagaggaagaaaatgatgatggtttttattcctggcatccagagtgacagtgaacttaagcaaattaccctcctacccaattctatggaatattttatacgtctccttgtttaaaatgtcactgctttactttgatgtatcatatttttaaataaaaataaatattcctttagaagatcactctaaaa

SEQ ID NO: 455442 - DNA, 584 bp, Homo sapiens
ccgcggccgctgccggacttcgccagatcagacccacggggctgccctcccctgcgcactcccctcgctgcccgggcccggagcgcagcgcggccgcacaggtatttttgctgtgctgtgcaaggaactctgctagctcaagcgtagcaggatggagtaacgtgaaatgcaattctacagcagtttttacgtctttgctgcctcgttcgttggctaccgagaaggttcaggagggggaggggagatgagaaagcagattggaagttgagtatggtggagcctcagcctctcccaccctcctttcctcgcttgtgctcactgctaaagttttgttactttcccccccgagagagcgtcccccaccgagagagcgtcgacgctctctcttacctctcacctctggggaataatcaagtcccgtaaacacttcctaggaagtgtctcacagtcttcccactcctctctatgctcctgccactatcacagttcaacttgcatcatcttttccttccaaagacccctaattgtgtcccttccttcaggattctgcaatttctagccctttccaccccacagagagagct

SEQ ID NO: 455443 - DNA, 2100 bp, Homo sapiens
ccgcggccgctgccggacttcgccagatcagacccacggggctgccctcccctgcgcactcccctcgctgcccgggcccggagcgcagcgcggccgcacaggtatttttgctgtgctgtgcaaggaactctgctagctcaagattcacaatgttgaaagcccttttcctaactatgctgactctggcgctggtcaagtcacaggacaccgaagaaaccatcacgtacacgcaatgcactgacggatatgagtgggatcctgtgagacagcaatgcaaagatattgatgaatgtgacattgtcccagacgcttgtaaaggtggaatgaagtgtgtcaaccactatggaggatacctctgccttccgaaaacagcccagattattgtcaataatgaacagcctcagcaggaaacacaaccagcagaaggaacctcaggggcaaccaccggggttgtagctgccagcagcatggcaaccagtggagtgttgcccgggggtggttttgtggccagtgctgctgcagtcgcaggccctgaaatgcagactggccgaaataactttgtcatccggcggaacccagctgaccctcagcgcattccctccaacccttcccaccgtatccagtgtgcagcaggctacgagcaaagtgaacacaacgtgtgccaagacatagacgagtgcactgcagggacgcacaactgtagagcagaccaagtgtgcatcaatttacggggatcctttgcatgtcagtgccctcctggatatcagaagcgaggggagcagtgcgtagacatagatgaatgtaccatccctccatattgccaccaaagatgcgtgaatacaccaggctcattttattgccagtgcagtcctgggtttcaattggcagcaaacaactatacctgcgtagatataaatgaatgtgatgccagcaatcaatgtgctcagcagtgctacaacattcttggttcattcatctgtcagtgcaatcaaggatatgagctaagcagtgacaggctcaactgtgaagacattgatgaatgcagaacctcaagctacctgtgtcaatatcaatgtgtcaatgaacctgggaaattctcatgtatgtgcccccagggataccaagtggtgagaagtagaacatgtcaagatataaatgagtgtgagaccacaaatgaatgccgggaggatgaaatgtgttggaattatcatggcggcttccgttgttatccacgaaatccttgtcaagatccctacattctaacaccagagaaccgatgtgtttgcccagtctcaaatgccatgtgccgagaactgccccagtcaatagtctacaaatacatgagcatccgatctgataggtctgtgccatcagacatcttccagatacaggccacaactatttatgccaacaccatcaatacttttcggattaaatctggaaatgaaaatggagagttctacctacgacaaacaagtcctgtaagtgcaatgcttgtgctcgtgaagtcattatcaggaccaagagaacatatcgtggacctggagatgctgacagtcagcagtatagggaccttccgcacaagctctgtgttaagattgacaataatagtggggccattttcattttagtcttttctaagagtcaaccacaggcatttaagtcagccaaagaatattgttaccttaaagcactattttatttatagatatatctagtgcatctacatctctatactgtacactcacccataattcaaacaattacaccatggtataaagtgggcatttaatatgtaaagattcaaagtttgtctttattactatatgtaaattagacattaatccactaaactggtcttcttcaagagagctaagtatacactatctggtgaaacttggattctttcctataaaagtgggaccaagcaatgatgatcttctgtggtgcttaaggaaacttactagagctccactaacagtctcataaggaggcagccatcataaccattgaatagcatgcaagggtaagaatgagtttttaactgctttgtaagaaaatggaaaaggtcaataaagatatatttctttagaaaatggg

SEQ ID NO: 455444 - DNA, 1998 bp, Homo sapiens
  misc_feature (17)..(17): n is a, c, g, or t
  misc_feature (20)..(20): n is a, c, g, or t
ctgtgcaagggaactcnttnagctcaagcctgctttgtagattcacaatgttgaaagcccttttcctaactatgctgactctggcgctggtcaagtcacaggacaccgaagaaaccatcacgtacacgcaatgcactgacggatatgagtgggatcctgtgagacagcaatgcaaagatattgatgaatgtgacattgtcccagacgcttgtaaaggtggaatgaagtgtgtcaaccactatggaggatacctctgccttccgaaaacagcccagattattgtcaataatgaacagcctcagcaggaaacacaaccagcagaaggaacctcaggggcaaccaccggggttgtagctgccagcagcatggcaaccagtggagtgttgcccgggggtggttttgtggccagtgctgctgcagtcgcaggccctgaaatgcagactggccgaaataactttgtcatccggcggaacccagctgaccctcagcgcattccctccaacccttcccaccgtatccagtgtgcagcaggctacgagcaaagtgaacacaacgtgtgccaagacatagacgagtgcactgcagggacgcacaactgtagagcagaccaagtgtgcatcaatttacggggatcctttgcatgtcagtgccctcctggatatcagaagcgaggggagcagtgcgtagacatagatgaatgtaccatccctccatattgccaccaaagatgcgtgaatacaccaggctcattttattgccagtgcagtcctgggtttcaattggcagcaaacaactatacctgcgtagatataaatgaatgtgatgccagcaatcaatgtgctcagcagtgctacaacattcttggttcattcatctgtcagtgcaatcaaggatatgagctaagcagtgacaggctcaactgtgaagacattgatgaatgcagaacctcaagctacctgtgtcaatatcaatgtgtcaatgaacctgggaaattctcatgtatgtgcccccagggataccaagtggtgagaagtagaacatgtcaagatataaatgagtgtgagaccacaaatgaatgccgggaggatgaaatgtgttggaattatcatggcggcttccgttgttatccacgaaatccttgtcaagatccctacattctaacaccagagaaccgatgtgtttgcccagtctcaaatgccatgtgccgagaactgccccagtcaatagtctacaaatacatgagcatccgatctgataggtctgtgccatcagacatcttccagatacaggccacaactatttatgccaacaccatcaatacttttcggattaaatctggaaatgaaaatggagagttctacctacgacaaacaagtcctgtaagtgcaatgcttgtgctcgtgaagtcattatcaggaccaagagaacatatcgtggacctggagatgctgacagtcagcagtatagggaccttccgcacaagctctgtgttaagattgacaataatagtggggccattttcattttagtcttttctaagagtcaaccacaggcatttaagtcagccaaagaatattgttaccttaaagcactattttatttatagatatatctagtgcatctacatctctatactgtacactcacccataattcaaacaattacaccatggtataaagtgggcatttaatatgtaaagattcaaagtttgtctttattactatatgtaaattagacattaatccactaaactggtcttcttcaagagagctaagtatacactatctggtgaaacttggattctttcctataaaagtgggaccaagcaatgatgatcttctgtggtgcttaaggaaacttactagagctccactaacagtctcataaggaggcagccatcataaccattgaatagcatgcaagggtaagaatgagtttttaactgctttgtaagaaaatggaaaaggtcaataaagatatatttctttagaaaatggg

SEQ ID NO: 455445 - DNA, 2082 bp, Homo sapiens
gagagagagagagagagagagagagagagagagagagagagagagagagagagagagagagaatagaatgttaaaccacccatctcatcatatatctaggactttagcacaaggattgttgccataagaatgaagcttttagagtgatttcttagggaatggacacaccaattaactgtctcctggccccacctttgatgttttcttcacagcaatgcactgacggatatgagtgggatcctgtgagacagcaatgcaaagatattgatgaatgtgacattgtcccagacgcttgtaaaggtggaatgaagtgtgtcaaccactatggaggatacctctgccttccgaaaacagcccagattattgtcaataatgaacagcctcagcaggaaacacaaccagcagaaggaacctcaggggcaaccaccggggttgtagctgccagcagcatggcaaccagtggagtgttgcccgggggtggttttgtggccagtgctgctgcagtcgcaggccctgaaatgcagactggccgaaataactttgtcatccggcggaacccagctgaccctcagcgcattccctccaacccttcccaccgtatccagtgtgcagcaggctacgagcaaagtgaacacaacgtgtgccaagacatagacgagtgcactgcagggacgcacaactgtagagcagaccaagtgtgcatcaatttacggggatcctttgcatgtcagtgccctcctggatatcagaagcgaggggagcagtgcgtagacatagatgaatgtaccatccctccatattgccaccaaagatgcgtgaatacaccaggctcattttattgccagtgcagtcctgggtttcaattggcagcaaacaactatacctgcgtagatataaatgaatgtgatgccagcaatcaatgtgctcagcagtgctacaacattcttggttcattcatctgtcagtgcaatcaaggatatgagctaagcagtgacaggctcaactgtgaagacattgatgaatgcagaacctcaagctacctgtgtcaatatcaatgtgtcaatgaacctgggaaattctcatgtatgtgcccccagggataccaagtggtgagaagtagaacatgtcaagatataaatgagtgtgagaccacaaatgaatgccgggaggatgaaatgtgttggaattatcatggcggcttccgttgttatccacgaaatccttgtcaagatccctacattctaacaccagagaaccgatgtgtttgcccagtctcaaatgccatgtgccgagaactgccccagtcaatagtctacaaatacatgagcatccgatctgataggtctgtgccatcagacatcttccagatacaggccacaactatttatgccaacaccatcaatacttttcggattaaatctggaaatgaaaatggagagttctacctacgacaaacaagtcctgtaagtgcaatgcttgtgctcgtgaagtcattatcaggaccaagagaacatatcgtggacctggagatgctgacagtcagcagtatagggaccttccgcacaagctctgtgttaagattgacaataatagtggggccattttcattttagtcttttctaagagtcaaccacaggcatttaagtcagccaaagaatattgttaccttaaagcactattttatttatagatatatctagtgcatctacatctctatactgtacactcacccataattcaaacaattacaccatggtataaagtgggcatttaatatgtaaagattcaaagtttgtctttattactatatgtaaattagacattaatccactaaactggtcttcttcaagagagctaagtatacactatctggtgaaacttggattctttcctataaaagtgggaccaagcaatgatgatcttctgtggtgcttaaggaaacttactagagctccactaacagtctcataaggaggcagccatcataaccattgaatagcatgcaagggtaagaatgagtttttaactgctttgtaagaaaatggaaaaggtcaataaagatatatttctttagaaaatggg

SEQ ID NO: 455446 - DNA, 2005 bp, Homo sapiens
ccgcggccgctgccggacttcgccagatcagacccacggggctgccctcccctgcgcactcccctcgctgcccgggcccggagcgcagcgcggccgcacagattcacaatgttgaaagcccttttcctaactatgctgactctggcgctggtcaagtcacaggacaccgaagaaaccatcacgtacacgcaatgcactgacggatatgagtgggatcctgtgagacagcaatgcaaagatattgatgaatgtgacattgtcccagacgcttgtaaaggtggaatgaagtgtgtcaaccactatggaggatacctctgccttccgacagaaggaacctcaggggcaaccaccggggttgtagctgccagcagcatggcaaccagtggagtgttgcccgggggtggttttgtggccagtgctgctgcagtcgcaggccctgaaatgcagactggccgaaataactttgtcatccggcggaacccagctgaccctcagcgcattccctccaacccttcccaccgtatccagtgtgcagcaggctacgagcaaagtgaacacaacgtgtgccaagacatagacgagtgcactgcagggacgcacaactgtagagcagaccaagtgtgcatcaatttacggggatcctttgcatgtcagtgccctcctggatatcagaagcgaggggagcagtgcgtagacatagatgaatgtaccatccctccatattgccaccaaagatgcgtgaatacaccaggctcattttattgccagtgcagtcctgggtttcaattggcagcaaacaactatacctgcgtagatataaatgaatgtgatgccagcaatcaatgtgctcagcagtgctacaacattcttggttcattcatctgtcagtgcaatcaaggatatgagctaagcagtgacaggctcaactgtgaagacattgatgaatgcagaacctcaagctacctgtgtcaatatcaatgtgtcaatgaacctgggaaattctcatgtatgtgcccccagggataccaagtggtgagaagtagaacatgtcaagatataaatgagtgtgagaccacaaatgaatgccgggaggatgaaatgtgttggaattatcatggcggcttccgttgttatccacgaaatccttgtcaagatccctacattctaacaccagagaaccgatgtgtttgcccagtctcaaatgccatgtgccgagaactgccccagtcaatagtctacaaatacatgagcatccgatctgataggtctgtgccatcagacatcttccagatacaggccacaactatttatgccaacaccatcaatacttttcggattaaatctggaaatgaaaatggagagttctacctacgacaaacaagtcctgtaagtgcaatgcttgtgctcgtgaagtcattatcaggaccaagagaacatatcgtggacctggagatgctgacagtcagcagtatagggaccttccgcacaagctctgtgttaagattgacaataatagtggggccattttcattttagtcttttctaagagtcaaccacaggcatttaagtcagccaaagaatattgttaccttaaagcactattttatttatagatatatctagtgcatctacatctctatactgtacactcacccataattcaaacaattacaccatggtataaagtgggcatttaatatgtaaagattcaaagtttgtctttattactatatgtaaattagacattaatccactaaactggtcttcttcaagagagctaagtatacactatctggtgaaacttggattctttcctataaaagtgggaccaagcaatgatgatcttctgtggtgcttaaggaaacttactagagctccactaacagtctcataaggaggcagccatcataaccattgaatagcatgcaagggtaagaatgagtttttaactgctttgtaagaaaatggaaaaggtcaataaagatatatttctttagaaaatggg

SEQ ID NO: 455447 - DNA, 2117 bp, Homo sapiens
ccgcggccgctgccggacttcgccagatcagacccacggggctgccctcccctgcgcactcccctcgctgcccgggcccggagcgcagcgcggccgcacagattcacaatgttgaaagcccttttcctaactatgctgactctggcgctggtcaagtcacaggacaccgaagaaaccatcacgtacacgcaatgcactgacggatatgagtgggatcctgtgagacagcaatgcaaagatattgatgaatgtgacattgtcccagacgcttgtaaaggtggaatgaagtgtgtcaaccactatggaggatacctctgccttccgaaaacagcccagattattgtcaataatgaacagcctcagcaggaaacacaaccagcagaaggaacctcaggggcaaccaccggggttgtagctgccagcagcatggcaaccagtggagtgttgcccgggggtggttttgtggccagtgctgctgcagtcgcaggccctgaaatgcagactggccgaaataactttgtcatccggcggaacccagctgaccctcagcgcattccctccaacccttcccaccgtatccagtgtgcagcaggctacgagcaaagtgaacacaacgtgtgccaagacatagacgagtgcactgcagggacgcacaactgtagagcagaccaagtgtgcatcaatttacggggatcctttgcatgtcagtgccctcctggatatcagaagcgaggggagcagtgcgtagacatagatgaatgtaccatccctccatattgccaccaaagatgcgtgaatacaccaggctcattttattgccagtgcagtcctgggtttcaattggcagcaaacaactatacctgcgtagatataaatgaatgtgatgccagcaatcaatgtgctcagcagtgctacaacattcttggttcattcatctgtcagtgcaatcaaggatatgagctaagcagtgacaggctcaactgtgaagacattgatgaatgcagaacctcaagctacctgtgtcaatatcaatgtgtcaatgaacctgggaaattctcatgtatgtgcccccagggataccaagtggtgagaagtagaacatgtcaagtctacttctcatgtatgtgcccccagggataccaagtggtgagaagtagaacatgtcaatataaatgagtgtgagaccacaaatgaatgccgggaggatgaaatgtgttggaattatcatggcggcttccgttgttatccacgaaatccttgtcaagatccctacattctaacaccagagaaccgatgtgtttgcccagtctcaaatgccatgtgccgagaactgccccagtcaatagtctacaaatacatgagcatccgatctgataggtctgtgccatcagacatcttccagatacaggccacaactatttatgccaacaccatcaatacttttcggattaaatctggaaatgaaaatggagagttctacctacgacaaacaagtcctgtaagtgcaatgcttgtgctcgtgaagtcattatcaggaccaagagaacatatcgtggacctggagatgctgacagtcagcagtatagggaccttccgcacaagctctgtgttaagattgacaataatagtggggccattttcattttagtcttttctaagagtcaaccacaggcatttaagtcagccaaagaatattgttaccttaaagcactattttatttatagatatatctagtgcatctacatctctatactgtacactcacccataattcaaacaattacaccatggtataaagtgggcatttaatatgtaaagattcaaagtttgtctttattactatatgtaaattagacattaatccactaaactggtcttcttcaagagagctaagtatacactatctggtgaaacttggattctttcctataaaagtgggaccaagcaatgatgatcttctgtggtgcttaaggaaacttactagagctccactaacagtctcataaggaggcagccatcataaccattgaatagcatgcaagggtaagaatgagtttttaactgctttgtaagaaaatggaaaaggtcaataaagatatatttctttagaaaatggg

SEQ ID NO: 455448 - DNA, 1321 bp, Homo sapiens
cggacgcgtgggtgccaattgaaacccaggactgcactggcagcaaacaactatatctacgcaggtatagttgtatgctgccaattgaaacccaggactgcactggcaataaacaactatacctgcgtagatataaatgaatgtgatgccagcaatcaatgtgctcagcagtgctacaacattcttggttcattcatctgtcagtgcaatcaaggatatgagctaagcagtgacaggctcaactgtgaagacattgatgaatgcagaacctcaagctacctgtgtcaatatcaatgtgtcaatgaacctgggaaattctcatgtatgtgcccccagggataccaagtggtgagaagtagaacatgtcaagatataaatgagtgtgagaccacaaatgaatgccgggaggatgaaatgtgttggaattatcatggcggcttccgttgttatccacgaaatccttgtcaagatccctacattctaacaccagagaaccgatgtgtttgcccagtctcaaatgccatgtgccgagaactgccccagtcaatagtctacaaatacatgagcatccgatctgataggtctgtgccatcagacatcttccagatacaggccacaactatttatgccaacaccatcaatacttttcggattaaatctggaaatgaaaatggagagttctacctacgacaaacaagtcctgtaagtgcaatgcttgtgctcgtgaagtcattatcaggaccaagagaacatatcgtggacctggagatgctgacagtcagcagtatagggaccttccgcacaagctctgtgttaagattgacaataatagtggggccattttcattttagtcttttctaagagtcaaccacaggcatttaagtcagccaaagaatattgttaccttaaagcactattttatttatagatatatctagtgcatctacatctctatactgtacactcacccataattcaaacaattacaccatggtataaagtgggcatttaatatgtaaagattcaaagtttgtctttattactatatgtaaattagacattaatccactaaactggtcttcttcaagagagctaagtatacactatctggtgaaacttggattctttcctataaaagtgggaccaagcaatgatgatcttctgtggtgcttaaggaaacttactagagctccactaacagtctcataaggaggcagccatcataaccattgaatagcatgcaagggtaagaatgagtttttaactgctttgtaagaaaatggaaaaggtcaataaagatatatttctttagaaaatggg

SEQ ID NO: 455449 - DNA, 2649 bp, Homo sapiens
ccgcggccgctgccggacttcgccagatcagacccacggggctgccctcccctgcgcactcccctcgctgcccgggcccggagcgcagcgcggccgcacagattcacaatgttgaaagcccttttcctaactatgctgactctggcgctggtcaagtcacaggacaccgaagaaaccatcacgtacacgcaatgcactgacggatatgagtgggatcctgtgagacagcaatgcaaagatattgatgaatgtgacattgtcccagacgcttgtaaaggtggaatgaagtgtgtcaaccactatggaggatacctctgccttccgaaaacagcccagattattgtcaataatgaacagcctcagcaggaaacacaaccagcagaaggaacctcaggggcaaccaccggggttgtagctgccagcagcatggcaaccagtggagtgttgcccgggggtggttttgtggccagtgctgctgcagtcgcaggccctgaaatgcagactggccgaaataactttgtcatccggcggaacccagctgaccctcagcgcattccctccaacccttcccaccgtatccagtgtgcagcaggctacgagcaaagtgaacacaacgtgtgccaagacatagacgagtgcactgcagggacgcacaactgtagagcagaccaagtgtgcatcaatttacggggatcctttgcatgtcagtgccctcctggatatcagaagcgaggggagcagtgcgtagacatagatgaatgtaccatccctccatattgccaccaaagatgcgtgaatacaccaggctcattttattgccagtgcagtcctgggtttcaattggcagcaaacaactatacctgcgtagatataaatgaatgtgatgccagcaatcaatgtgctcagcagtgctacaacattcttggttcattcatctgtcagtgcaatcaaggatatgagctaagcagtgacaggctcaactgtgaagacattgatgaatgcagaacctcaagctacctgtgtcaatatcaatgtgtcaatgaacctgggaaattctcatgtatgtgcccccagggataccaagtggtgagaagtagaacatgtcaagatataaatgagtgtgagaccacaaatgaatgccgggaggatgaaatgtgttggaattatcatggcggcttccgttgttatccacgaaatccttgtcaagatccctacattctaacaccagagaaccgatgtgtttgcccagtctcaaatgccatgtgccgagaactgccccagtcaatagtctacaaatacatgagcatccgatctgataggtctgtgccatcagacatcttccagatacaggccacaactatttatgccaacaccatcaatacttttcggattaaatctggaaatgaaaatggagagttctacctacgacaaacaagtcctgtaagtgcaatgcttgtgctcgtgaagtcattatcaggaccaagagaacatatcgtggacctggagatgctgacagtcagcagtatacattttagtcttttctaagagtcaaccacaggcatttaagtcagccaaagaatattgttaccttaaagcactattttatttatagatatatctagtgcatctacatctctatactgtacactcacccataattcaaacaattacaccatggtataaagtgggcatttaatatgtaaagattcaaagtttgtctttattactatatgtaaattagacattaatccactaaactggtcttcttcaagagagctaagtatacactatctggtgaaacttggattctttcctataaaagtgggaccaagcaatgatgatcttctgtggtgcttaaggaaacttactagagctccactaacagtctcataaggaggcagccatcataaccattgaatagcatgcaagggtaagaatgagtttttaactgctttgtaagaaaatggaaaaggtcaataaagatatatttctttagaaaatggggatctgccatatttgtgttggtttttattttcatatccagcctaaaggtggttgtttattatatagtaataaatcattgctgtacaatatgctggtttctgtagggtatttttaattttgtcagaaattttagattgtgaatattttgtaaaaaacagtaagcaaaattttccagaattcccaaaatgaaccagatatcccctagaaaattatactattgagaaatctatggggaggatatgagaaaataaattccttctaaaccacattggaactgacctgaagaagcaaactcggaaaatataataacatccctgaattcaggacttccacaagatgcagaacaaaatggataaaaggtatttcactggagaagttttaatttctaagtaaaatttaaatcctaacacttcactaatttataactaaaatttctcatcttcgtacttgatgctcacagaggaagaaaatgatgatggtttttattcctggcatccagagtgacagtgaacttaagcaaattaccctcctacccaattctatggaatattttatacgtctccttgtttaaaatgtcactgctttactttgatgtatcatatttttaaataaaaataaatattcctttagaagatcactctaaaa

SEQ ID NO: 455450 - DNA, 1903 bp, Homo sapiens
ccgcggccgctgccggacttcgccagatcagacccacggggctgccctcccctgcgcactcccctcgctgcccgggcccggagcgcagcgcggccgcacagattcacaatgttgaaagcccttttcctaactatgctgactctggcgctggtcaagtcacaggacaccgaagaaaccatcacgtacacgcaatgcactgacggatatgagtgggatcctgtgagacagcaatgcaaagatattgatgaatgtgacattgtcccagacgcttgtaaaggtggaatgaagtgtgtcaaccactatggaggatacctctgccttccgaaaacagcccagattattgtcaataatgaacagcctcagcaggaaacacaaccagcagaaggaacctcaggggcaaccaccggggttgtagctgccagcagcatggcaaccagtggagtgttgcccgggggtggttttgtggccagtgctgctgcagtcgcaggccctgaaatgcagactggccgaaataactttgtcatccggcggaacccagctgaccctcagcgcattccctccaacccttcccaccgtatccagtgtgcagcaggctacgagcaaagtgaacacaacgtgtgccaagacatagacgagtgcactgcagggacgcacaactgtagagcagaccaagtgtgcatcaatttacggggatcctttgcatgtcagtgccctcctggatatcagaagcgaggggagcagtgcgtagacatagatgaatgtaccatccctccatattgccaccaaagatgcgtgaatacaccaggctcattttattgccagtgcagtcctgggtttcaattggcagcaaacaactatacctgcgtagatataaatgaatgtgatgccagcaatcaatgtgctcagcagtgctacaacattcttggttcattcatctgtcagtgcaatcaaggatatgagctaagcagtgacaggctcaactgtgaagacattgatgaatgcagaacctcaagctacctgtgtcaatatcaatgtgtcaatgaacctgggaaattctcatgtatgtgcccccagggataccaagtggtgagaagtagaacatgtcaagatataaatgagtgtgagaccacaaatgaatgccgggaggatgaaatgtgttggaattatcatggcggcttccgttgttatccacgaaatccttgtcaagatccctacattctaacaccagagaaccgatgtgtttgcccagtctcaaatgccatgtgccgagaactgccccagtcaatagtctacaaatacatgagcatccgatctgataggtctgtgccatcagacatcttccagatacaggccacaactatttatgccaacaccatcaatacttttcggattaaatctggaaatgaaaatggagagttctacctacgacaaacaagtcctgtaagtgcaatgcttgtgctcgtgaagtcattatcaggaccaagagaacatatcgtggacctggagatgctgacagtcagcagtatagggaccttccgcacaagctctgtgttaagattgacaataatagtggggccattttcattttagtcttttctaagagtcaaccacaggcatttaagtcagccaaagaatattgttaccttaaagcactattttatttatagatatatctagtgcatctacatctctatactgtacactcacccataattcaaacaattacaccatggtataaagtgggcatttaatatgtaaagattcaaagtttgtctttattactatatgtaaattagacattaatccactaaactggtcttcttcaagagagctaagtatacactatctggtgaaacttggattccggggacaaggcagatgaccccggggggcgcggcctgct

SEQ ID NO: 455451 - DNA, 1528 bp, Homo sapiens
ccgcggccgctgccggacttcgccagatcagacccacggggctgccctcccctgcgcactcccctcgctgcccgggcccggagcgcagcgcggccgcacagattcacaatgttgaaagcccttttcctaactatgctgactctggcgctggtcaagtcacaggacaccgaagaaaccatcacgtacacgcaatgcactgacggatatgagtgggatcctgtgagacagcaatgcaaagatattgatgaatgtgacattgtcccagacgcttgtaaaggtggaatgaagtgtgtcaaccactatggaggatacctctgccttccgaaaacagcccagattattgtcaataatgaacagcctcagcaggaaacacaaccagcagaaggaacctcaggggcaaccaccggggttgtagctgccagcagcatggcaaccagtggagtgttgcccgggggtggttttgtggccagtgctgctgcagtcgcaggccctgaaatgcagactggccgaaataactttgtcatccggcggaacccagctgaccctcagcgcattccctccaacccttcccaccgtatccagtgtgcagcaggctacgagcaaagtgaacacaacgtgtgccaagacatagacgagtgcactgcagggacgcacaactgtagagcagaccaagtgtgcatcaatttacggggatcctttgcatgtcagtgccctcctggatatcagaagcgaggggagcagtgcgtagacatagatgaatgtaccatccctccatattgccaccaaagatgcgtgaatacaccaggctcattttattgccagtgcagtcctgggtttcaattggcagcaaacaactatacctgcgtagatataaatgaatgtgatgccagcaatcaatgtgctcagcagtgctacaacattcttggttcattcatctgtcagtgcaatcaaggatatgagctaagcagtgacaggctcaactgtgaagacattgatgaatgcagaacctcaagctacctgtgtcaatatcaatgtgtcaatgaacctgggaaattctcatgtatgtgcccccagggataccaagtggtgagaagtagaacatgtcaagatataaatgagtgtgagaccacaaatgaatgccgggaggatgaaatgtgttggaattatcatggcggcttccgttgttatccacgaaatccttgtcaagatccctacattctaacaccagagaattgaaccggatagcttgccggcaagctatccggttcaattacctgagcccatccggaccctcaagacaactggagcccaccctgccctggaaggctcagctcccctgcttgaggacgccgcacacctgttccagaacgtgacacaggctctggtccttggcctcctgctgcccaagagatctaagctgttcgaggtaggtgtgctcctggctccaggttcctgagcctcagaggtcaggggacccttgtagaactccaccagcagcatcatctcgtgaagaatgtcagtgaccgta

SEQ ID NO: 455452 - DNA, 896 bp, Homo sapiens
  misc_feature (887)..(887): n is a, c, g, or t
ccgcggccgctgccggacttcgccagatcagacccacggggctgccctcccctgcgcactcccctcgctgcccgggcccggagcgcagcgcggccgcacagattcacaatgttgaaagcccttttcctaactatgctgactctggcgctggtcaagtcacaggacaccgaagaaaccatcacgtacacgcaatgcactgacggatatgagtgggatcctgtgagacagcaatgcaaagatattgatgaatgtgacattgtcccagacgcttgtaaaggtggaatgaagtgtgtcaaccactatggaggatacctctgccttccgaaaacagcccagattattgtcaataatgaacagcctcagcaggaaacacaaccagcagaaggaacctcaggggcaaccaccggggttgtagctgccagcagcatggcaaccagtggagtgttgcccgggggtggttttgtggccagtgctgctgcagtcgcaggccctgaaatgcagactggccgaaataactttgtcatccggcggaacccagctgaccctcagcgcattccctccaacccttcccaccgtatccagtgtgcagcaggctacgagcaaagtgaacacaacgtgtgccaagacatagacgagtgcactgcagggacgcacaactgtagagcagaccaagtgtgcatcaatttacggggatcctttgcatgtcagtgccctcctggatatcagaagcgaggggagcagtgcgtagacatagatgaatgtaccatccctccatattgccaccaaagatgcgtgaatacaccaggctcattttattgccagtgcagtcctgggtttcaattggcagcaaacaactatacctgcgtagaattttaaattgaaatgtngattgccaa

SEQ ID NO: 455453 - DNA, 443 bp, Homo sapiens
tctagtattctactagaactggaagattgctctccgagttttgttttgttattttgtttaaaaaataaaaagcttgaggccaaggcaattcatattggctcacaggtatttttgctgtgctgtgcaaggaactctgctagctcaaggtgagtatactgggaaagccttaacgttctagagaacagagttttgcagccccacctccatcccccggggtgtgggactggggggcaggaaatgcaccgtcccctttgaaatggattactgttttttcctttcgaccccctctttctgcagcctgctttgtaggtgcagtataaaatgcacgctgaatgtcttttgtatgtaaacagcgtagcaggatggagtaacgtgaaatgcaattctacagcagtttttacgtctttgctgcctcgttcgttggctaccgagaaggttcagga

SEQ ID NO: 455454 - DNA, 260 bp, Homo sapiens
tggttgagaatggacccccgaagctgtccaatgcacagacttgtcttttgaaaaaaaagcgatagaatgttaaaccacccatctcatcatatatctaggactttagcacaaggattgttgccataagaatgaagcttttagagtgatttcttagggaatggacacaccaattaactgtctcctggccccacctttgatgttttcttcacagcaatgcactgacggatatgagtgggatcctgtgagacagcaatgcaaag

SEQ ID NO: 455455 - DNA, 2926 bp, Homo sapiens
cgaaggtagcgtgtcggggacccagactgataagacaaaagagaatcagtcgctttgggctgcccctccacacaacctgggacttttaaacaaagctgtgcgcagagaaaggcgtggaaatgccactttgagagtttgtgctgggggatgtgagaagctctgagacatgtgagaaggtctagtattctactagaactggaagattgctctccgagttttgttttgttattttgtttaaaaaataaaaagcttgaggccaaggcaattcatattggctcacaggtatttttgctgtgctgtgcaaggaactctgctagctcaagattcacaatgttgaaagcccttttcctaactatgctgactctggcgctggtcaagtcacaggacaccgaagaaaccatcacgtacacgcaatgcactgacggatatgagtgggatcctgtgagacagcaatgcaaagatattgatgaatgtgacattgtcccagacgcttgtaaaggtggaatgaagtgtgtcaaccactatggaggatacctctgccttccgaaaacagcccagattattgtcaataatgaacagcctcagcaggaaacacaaccagcagaaggaacctcaggggcaaccaccggggttgtagctgccagcagcatggcaaccagtggagtgttgcccgggggtggttttgtggccagtgctgctgcagtcgcaggccctgaaatgcagactggccgaaataactttgtcatccggcggaacccagctgaccctcagcgcattccctccaacccttcccaccgtatccagtgtgcagcaggctacgagcaaagtgaacacaacgtgtgccaagacatagacgagtgcactgcagggacgcacaactgtagagcagaccaagtgtgcatcaatttacggggatcctttgcatgtcagtgccctcctggatatcagaagcgaggggagcagtgcgtagacatagatgaatgtaccatccctccatattgccaccaaagatgcgtgaatacaccaggctcattttattgccagtgcagtcctgggtttcaattggcagcaaacaactatacctgcgtagatataaatgaatgtgatgccagcaatcaatgtgctcagcagtgctacaacattcttggttcattcatctgtcagtgcaatcaaggatatgagctaagcagtgacaggctcaactgtgaagacattgatgaatgcagaacctcaagctacctgtgtcaatatcaatgtgtcaatgaacctgggaaattctcatgtatgtgcccccagggataccaagtggtgagaagtagaacatgtcaagatataaatgagtgtgagaccacaaatgaatgccgggaggatgaaatgtgttggaattatcatggcggcttccgttgttatccacgaaatccttgtcaagatccctacattctaacaccagagaaccgatgtgtttgcccagtctcaaatgccatgtgccgagaactgccccagtcaatagtctacaaatacatgagcatccgatctgataggtctgtgccatcagacatcttccagatacaggccacaactatttatgccaacaccatcaatacttttcggattaaatctggaaatgaaaatggagagttctacctacgacaaacaagtcctgtaagtgcaatgcttgtgctcgtgaagtcattatcaggaccaagagaacatatcgtggacctggagatgctgacagtcagcagtatagggaccttccgcacaagctctgtgttaagattgacaataatagtggggccattttcattttagtcttttctaagagtcaaccacaggcatttaagtcagccaaagaatattgttaccttaaagcactattttatttatagatatatctagtgcatctacatctctatactgtacactcacccataattcaaacaattacaccatggtataaagtgggcatttaatatgtaaagattcaaagtttgtctttattactatatgtaaattagacattaatccactaaactggtcttcttcaagagagctaagtatacactatctggtgaaacttggattctttcctataaaagtgggaccaagcaatgatgatcttctgtggtgcttaaggaaacttactagagctccactaacagtctcataaggaggcagccatcataaccattgaatagcatgcaagggtaagaatgagtttttaactgctttgtaagaaaatggaaaaggtcaataaagatatatttctttagaaaatggggatctgccatatttgtgttggtttttattttcatatccagcctaaaggtggttgtttattatatagtaataaatcattgctgtacaatatgctggtttctgtagggtatttttaattttgtcagaaattttagattgtgaatattttgtaaaaaacagtaagcaaaattttccagaattcccaaaatgaaccagatatcccctagaaaattatactattgagaaatctatggggaggatatgagaaaataaattccttctaaaccacattggaactgacctgaagaagcaaactcggaaaatataataacatccctgaattcaggacttccacaagatgcagaacaaaatggataaaaggtatttcactggagaagttttaatttctaagtaaaatttaaatcctaacacttcactaatttataactaaaatttctcatcttcgtacttgatgctcacagaggaagaaaatgatgatggtttttattcctggcatccagagtgacagtgaacttaagcaaattaccctcctacccaattctatggaatattttatacgtctccttgtttaaaatgtcactgctttactttgatgtatcatatttttaaataaaaataaatattcctttagaagatcactctaaaa

SEQ ID NO: 455456 - DNA, 3154 bp, Homo sapiens
ccgcggccgctgccggacttcgccagatcagacccacggggctgccctcccctgcgcactcccctcgctgcccgggcccggagcgcagcgcggccgcacagattcacaatgttgaaagcccttttcctaactatgctgactctggcgctggtcaagtcacaggacaccgaagaaaccatcacgtacacggtaaggggtgatggaatttgaaataagtacggttcagcgggattctgtgacaaaaaaagactttacacacccctgccagtgtatttgggctatactctgctgagggtgataaattaaacaacacttcattcatgcttcatatctaagattcgttgtaaattgcccccttgatcctttcaaaagttcattgggctcaccacctaagataggaaccaacatgtaatcatttgtgcagggctaaaaatgggatccgttcaaaaactaaaaccaaagaaagttacatgtttccaaaacattcaacaaattaatgggtgtaaggaactggaaaacctggactcctaccacatgcagataaaaccaatacgtgcagaataagactcaagtcaagtaagaacgttaaacaccataaagacacatggccttctttgtgtacatgacatgcattctcaacaatgcactgacggatatgagtgggatcctgtgagacagcaatgcaaagatattgatgaatgtgacattgtcccagacgcttgtaaaggtggaatgaagtgtgtcaaccactatggaggatacctctgccttccgaaaacagcccagattattgtcaataatgaacagcctcagcaggaaacacaaccagcagaaggaacctcaggggcaaccaccggggttgtagctgccagcagcatggcaaccagtggagtgttgcccgggggtggttttgtggccagtgctgctgcagtcgcaggccctgaaatgcagactggccgaaataactttgtcatccggcggaacccagctgaccctcagcgcattccctccaacccttcccaccgtatccagtgtgcagcaggctacgagcaaagtgaacacaacgtgtgccaagacatagacgagtgcactgcagggacgcacaactgtagagcagaccaagtgtgcatcaatttacggggatcctttgcatgtcagtgccctcctggatatcagaagcgaggggagcagtgcgtagacatagatgaatgtaccatccctccatattgccaccaaagatgcgtgaatacaccaggctcattttattgccagtgcagtcctgggtttcaattggcagcaaacaactatacctgcgtagatataaatgaatgtgatgccagcaatcaatgtgctcagcagtgctacaacattcttggttcattcatctgtcagtgcaatcaaggatatgagctaagcagtgacaggctcaactgtgaagacattgatgaatgcagaacctcaagctacctgtgtcaatatcaatgtgtcaatgaacctgggaaattctcatgtatgtgcccccagggataccaagtggtgagaagtagaacatgtcaagatataaatgagtgtgagaccacaaatgaatgccgggaggatgaaatgtgttggaattatcatggcggcttccgttgttatccacgaaatccttgtcaagatccctacattctaacaccagagaaccgatgtgtttgcccagtctcaaatgccatgtgccgagaactgccccagtcaatagtctacaaatacatgagcatccgatctgataggtctgtgccatcagacatcttccagatacaggccacaactatttatgccaacaccatcaatacttttcggattaaatctggaaatgaaaatggagagttctacctacgacaaacaagtcctgtaagtgcaatgcttgtgctcgtgaagtcattatcaggaccaagagaacatatcgtggacctggagatgctgacagtcagcagtatagggaccttccgcacaagctctgtgttaagattgacaataatagtggggccattttcattttagtcttttctaagagtcaaccacaggcatttaagtcagccaaagaatattgttaccttaaagcactattttatttatagatatatctagtgcatctacatctctatactgtacactcacccataattcaaacaattacaccatggtataaagtgggcatttaatatgtaaagattcaaagtttgtctttattactatatgtaaattagacattaatccactaaactggtcttcttcaagagagctaagtatacactatctggtgaaacttggattctttcctataaaagtgggaccaagcaatgatgatcttctgtggtgcttaaggaaacttactagagctccactaacagtctcataaggaggcagccatcataaccattgaatagcatgcaagggtaagaatgagtttttaactgctttgtaagaaaatggaaaaggtcaataaagatatatttctttagaaaatggggatctgccatatttgtgttggtttttattttcatatccagcctaaaggtggttgtttattatatagtaataaatcattgctgtacaatatgctggtttctgtagggtatttttaattttgtcagaaattttagattgtgaatattttgtaaaaaacagtaagcaaaattttccagaattcccaaaatgaaccagatatcccctagaaaattatactattgagaaatctatggggaggatatgagaaaataaattccttctaaaccacattggaactgacctgaagaagcaaactcggaaaatataataacatccctgaattcaggacttccacaagatgcagaacaaaatggataaaaggtatttcactggagaagttttaatttctaagtaaaatttaaatcctaacacttcactaatttataactaaaatttctcatcttcgtacttgatgctcacagaggaagaaaatgatgatggtttttattcctggcatccagagtgacagtgaacttaagcaaattaccctcctacccaattctatggaatattttatacgtctccttgtttaaaatgtcactgctttactttgatgtatcatatttttaaataaaaataaatattcctttagaagatcactctaaaa

SEQ ID NO: 455457 - DNA, 1779 bp, Homo sapiens
tcgagctcggccctgtttcatctggaggatacctctgccttccgaaaacagcccagattattgtcaataatgaacagcctcagcaggaaacacaaccagcagaaggaacctcaggggcaaccaccggggttgtagctgccagcagcatggcaaccagtggagtgttgcccgggggtggttttgtggccagtgctgctgcagtcgcaggccctgaaatgcagactggccgaaataactttgtcatccggcggaacccagctgaccctcagcgcattccctccaacccttcccaccgtatccagtgtgcagcaggctacgagcaaagtgaacacaacgtgtgccaagacatagacgagtgcactgcagggacgcacaactgtagagcagaccaagtgtgcatcaatttacggggatcctttgcatgtcagtgccctcctggatatcagaagcgaggggagcagtgcgtagacatagatgaatgtaccatccctccatattgccaccaaagatgcgtgaatacaccaggctcattttattgccagtgcagtcctgggtttcaattggcagcaaacaactatacctgcgtagatataaatgaatgtgatgccagcaatcaatgtgctcagcagtgctacaacattcttggttcattcatctgtcagtgcaatcaaggatatgagctaagcagtgacaggctcaactgtgaagacattgatgaatgcagaacctcaagctacctgtgtcaatatcaatgtgtcaatgaacctgggaaattctcatgtatgtgcccccagggataccaagtggtgagaagtagaacatgtcaagatataaatgagtgtgagaccacaaatgaatgccgggaggatgaaatgtgttggaattatcatggcggcttccgttgttatccacgaaatccttgtcaagatccctacattctaacaccagagaaccgatgtgtttgcccagtctcaaatgccatgtgccgagaactgccccagtcaatagtctacaaatacatgagcatccgatctgataggtctgtgccatcagacatcttccagatacaggccacaactatttatgccaacaccatcaatacttttcggattaaatctggaaatgaaaatggagagttctacctacgacaaacaagtcctgtaagtgcaatgcttgtgctcgtgaagtcattatcaggaccaagagaacatatcgtggacctggagatgctgacagtcagcagtatagggaccttccgcacaagctctgtgttaagattgacaataatagtggggccattttcattttagtcttttctaagagtcaaccacaggcatttaagtcagccaaagaatattgttaccttaaagcactattttatttatagatatatctagtgcatctacatctctatactgtacactcacccataattcaaacaattacaccatggtataaagtgggcatttaatatgtaaagattcaaagtttgtctttattactatatgtaaattagacattaatccactaaactggtcttcttcaagagagctaagtatacactatctggtgaaacttggattctttcctataaaagtgggaccaagcaatgatgatcttctgtggtgcttaaggaaacttactagagctccactaacagtctcataaggaggcagccatcataaccattgaatagcatgcaagggtaagaatgagtttttaactgctttgtaagaaaatggaaaaggtcaataaagatatatttctttagaaaatggg

SEQ ID NO: 455458 - DNA, 1819 bp, Homo sapiens
ccgcggccgctgccggacttcgccagatcagacccacggggctgccctcccctgcgcactcccctcgctgcccgggcccggagcgcagcgcggccgcacagattcacaatgttgaaagcccttttcctaactatgctgactctggcgctggtcaagtcacaggacaccgaagaaaccatcacgtacacgcaatgcactgacggatatgagtgggatcctgtgagacagcaatgcaaagatattgatgaatgtgacattgtcccagacgcttgtaaaggtggaatgaagtgtgtcaaccactatggaggatacctctgccttccgaaaacagcccagattattgtcaataatgaacagcctcagcaggaaacacaaccagcagaaggaacctcaggggcaaccaccggggttgtagctgccagcagcatggcaaccagtggagtgttgcccgggggtggttttgtggccagtgctgctgcagtcgcaggccctgaaatgcagactggccgaaataactttgtcatccggcggaacccagctgaccctcagcgcattccctccaacccttcccaccgtatccagtgtgcagcaggctacgagcaaagtgaacacaacgtgtgccaagacatagacgagtgcactgcagggacgcacaactgtagagcagaccaagtgtgcatcaatttacggggatcctttgcatgtcagtgccctcctggatatcagaagcgaggggagcagtgcgtagacattgatgaatgcagaacctcaagctacctgtgtcaatatcaatgtgtcaatgaacctgggaaattctcatgtatgtgcccccagggataccaagtggtgagaagtagaacatgtcaagatataaatgagtgtgagaccacaaatgaatgccgggaggatgaaatgtgttggaattatcatggcggcttccgttgttatccacgaaatccttgtcaagatccctacattctaacaccagagaaccgatgtgtttgcccagtctcaaatgccatgtgccgagaactgccccagtcaatagtctacaaatacatgagcatccgatctgataggtctgtgccatcagacatcttccagatacaggccacaactatttatgccaacaccatcaatacttttcggattaaatctggaaatgaaaatggagagttctacctacgacaaacaagtcctgtaagtgcaatgcttgtgctcgtgaagtcattatcaggaccaagagaacatatcgtggacctggagatgctgacagtcagcagtatagggaccttccgcacaagctctgtgttaagattgacaataatagtggggccattttcattttagtcttttctaagagtcaaccacaggcatttaagtcagccaaagaatattgttaccttaaagcactattttatttatagatatatctagtgcatctacatctctatactgtacactcacccataattcaaacaattacaccatggtataaagtgggcatttaatatgtaaagattcaaagtttgtctttattactatatgtaaattagacattaatccactaaactggtcttcttcaagagagctaagtatacactatctggtgaaacttggattctttcctataaaagtgggaccaagcaatgatgatcttctgtggtgcttaaggaaacttactagagctccactaacagtctcataaggaggcagccatcataaccattgaatagcatgcaagggtaagaatgagtttttaactgctttgtaagaaaatggaaaaggtcaataaagatatatttctttagaaaatggg

SEQ ID NO: 455459 - DNA, 2745 bp, Homo sapiens
  misc_feature (1877)..(1877): n is a, c, g, or t
  misc_feature (1888)..(1888): n is a, c, g, or t
  misc_feature (1898)..(1899): n is a, c, g, or t
ccgcggccgctgccggacttcgccagatcagacccacggggctgccctcccctgcgcactcccctcgctgcccgggcccggagcgcagcgcggccgcacagattcacaatgttgaaagcccttttcctaactatgctgactctggcgctggtcaagtcacaggacaccgaagaaaccatcacgtacacgcaatgcactgacggatatgagtgggatcctgtgagacagcaatgcaaagatattgatgaatgtgacattgtcccagacgcttgtaaaggtggaatgaagtgtgtcaaccactatggaggatacctctgccttccgaaaacagcccagattattgtcaataatgaacagcctcagcaggaaacacaaccagcagaaggaacctcaggggcaaccaccggggttgtagctgccagcagcatggcaaccagtggagtgttgcccgggggtggttttgtggccagtgctgctgcagtcgcaggccctgaaatgcagactggccgaaataactttgtcatccggcggaacccagctgaccctcagcgcattccctccaacccttcccaccgtatccagtgtgcagcaggctacgagcaaagtgaacacaacgtgtgccaagacatagacgagtgcactgcagggacgcacaactgtagagcagaccaagtgtgcatcaatttacggggatcctttgcatgtcagtgccctcctggatatcagaagcgaggggagcagtgcgtagacatagatgaatgtaccatccctccatattgccaccaaagatgcgtgaatacaccaggctcattttattgccagtgcagtcctgggtttcaattggcagcaaacaactatacctgcgtagatataaatgaatgtgatgccagcaatcaatgtgctcagcagtgctacaacattcttggttcattcatctgtcagtgcaatcaaggatatgagctaagcagtgacaggctcaactgtgaagacattgatgaatgcagaacctcaagctacctgtgtcaatatcaatgtgtcaatgaacctgggaaattctcatgtatgtgcccccagggataccaagtggtgagaagtagaacatgtcaagatataaatgagtgtgagaccacaaatgaatgccgggaggatgaaatgtgttggaattatcatggcggcttccgttgttatccacgaaatccttgtcaagatccctacattctaacaccagagaaccgatgtgtttgcccagtctcaaatgccatgtgccgagaactgccccagtcaatagtctacaaatacatgagcatccgatctgataggtctgtgccatcagacatcttccagatacaggccacaactatttatgccaacaccatcaatacttttcggattaaatctggaaatgaaaatggagagttctacctacgacaaacaagtcctgtaagtgcaatgcttgtgctcgtgaagtcattatcaggaccaagagaacatatcgtggacctggagatgctgacagtcagcagtatagggaccttccgcacaagctctgtgttaagattgacaataatagtggggccattttcattttagtcttttctaagagtcaaccacaggcatttaagtcagccaaagaatattgttaccttaaagcactattttatttatagatatatctagtgcatctacatctctatactgtacactcacccataattcaaacaattacaccatggtataaagtgggcatttaatatgtaaagattcaaagtttgtctttattactatatgtaaattagacattaatccactaaactggtcttcttcaagagagctaagtatacactatctggtgaaacttggattcctccctttggggnggggtttgggnaaaaaaaaanncttggatttcctataaaagtgggaccaagcaatgatgatcttctgtggtgcttaaggaaacttactagagctccactaacagtctcataaggaggcagccatcataaccattgaatagcatgcaagggtaagaatgagtttttaactgctttgtaagaaaatggaaaaggtcaataaagatatatttctttagaaaatggggatctgccatatttgtgttggtttttattttcatatccagcctaaaggtggttgtttattatatagtaataaatcattgctgtacaatatgctggtttctgtagggtatttttaattttgtcagaaattttagattgtgaatattttgtaaaaaacagtaagcaaaattttccagaattcccaaaatgaaccagatatcccctagaaaattatactattgagaaatctatggggaggatatgagaaaataaattccttctaaaccacattggaactgacctgaagaagcaaactcggaaaatataataacatccctgaattcaggacttccacaagatgcagaacaaaatggataaaaggtatttcactggagaagttttaatttctaagtaaaatttaaatcctaacacttcactaatttataactaaaatttctcatcttcgtacttgatgctcacagaggaagaaaatgatgatggtttttattcctggcatccagagtgacagtgaacttaagcaaattaccctcctacccaattctatggaatattttatacgtctccttgtttaaaatgtcactgctttactttgatgtatcatatttttaaataaaaataaatattcctttagaagatcactctaaaa

SEQ ID NO: 455460 - DNA, 1965 bp, Homo sapiens
ccgcggccgctgccggacttcgccagatcagacccacggggctgccctcccctgcgcactcccctcgctgcccgggcccggagcgcagcgcggccgcacagattcacaatgttgaaagcccttttcctaactatgctgactctggcgctggtcaagtcacaggacaccgaagaaaccatcacgtacacgcaatgcactgacggatatgagtgggatcctgtgagacagcaatgcaaagatattgatgaatgtgacattgtcccagacgcttgtaaaggtggaatgaagtgtgtcaaccactatggaggatacctctgccttccgaaaacagcccagattattgtcaataatgaacagcctcagcaggaaacacaaccagcagaaggaacctcaggggcaaccaccggggttgtagctgccagcagcatggcaaccagtggagtgttgcccgggggtggttttgtggccagtgctgctgcagtcgcaggccctgaaatgcagactggccgaaataactttgtcatccggcggaacccagctgaccctcagcgcattccctccaacccttcccaccgtatccagtgtgcagcaggctacgagcaaagtgaacacaacgtgtgccaagacatagacgagtgcactgcagggacgcacaactgtagagcagaccaagtgtgcatcaatttacggggatcctttgcatgtcagtgccctcctggatatcagaagcgaggggagcagtgcgtagacatagatgaatgtaccatccctccatattgccaccaaagatgcgtgaatacaccaggctcattttattgccagtgcagtcctgggtttcaattggcagcaaacaactatacctgcgtagatataaatgaatgtgatgccagcaatcaatgtgctcagcagtgctacaacattcttggttcattcatctgtcagtgcaatcaaggatatgagctaagcagtgacaggctcaactgtgaagacattgatgaatgcagaacctcaagctacctgtgtcaatatcaatgtgtcaatgaacctgggaaattctcatgtatgtgcccccagggataccaagtggtgagaagtagaacatgtcaagatataaatgagtgtgagaccacaaatgaatgccgggaggatgaaatgtgttggaattatcatggcggcttccgttgttatccacgaaatccttgtcaagatccctacattctaacaccagagaaccgatgtgtttgcccagtctcaaatgccatgtgccgagaactgccccagtcaatagtctacaaatacatgagcatccgatctgataggtctgtgccatcagacatcttccagatacaggccacaactatttatgccaacaccatcaatacttttcggattaaatctggaaatgaaaatggagagttctacctacgacaaacaagtcctgtaagtgcaatgcttgtgctcgtgaagtcattatcaggaccaagagaacatatcgtggacctggagatgctgacagtcagcagtatagggaccttccgcacaagctctgtgttaagattgacaataatagtggggccattttcattttagtcttttctaagagtcaaccacaggcatttaagtcagccaaagaatattgttaccttaaagcactattttatttatagatatatctagtgcatctacatctctatactgtacactcacccataattcaaacaattacaccatggtataaagtgggcatttaatatgtaaagattcaaagtttgtctttattactatatgtaaattagacattaatccactaaactggtcttcttcaagagagctaagtatacactatctggtgaaacttggattctattccactacagcctcttaaggaggacgcatataacccttaatacatgcaagggggaaagagttttactgcttgtagaaagagaaggcagtgagttttta

SEQ ID NO: 455461 - DNA, 747 bp, Homo sapiens
agttcgacggagactctccattcatcttccagatacaggccacaactatttatgccaacaccatcaatacttttcggattaaatctggaaatgaaaatggagagttctacctacgacaaacaagtcctgtaagtgcaatgcttgtgctcgtgaagtcattatcaggaccaagagaacatatcgtggacctggagatgctgacagtcagcagtatagggaccttccgcacaagctctgtgttaagattgacaataatagtggggccattttcattttagtcttttctaagagtcaaccacaggcatttaagtcagccaaagaatattgttaccttaaagcactattttatttatagatatatctagtgcatctacatctctatactgtacactcacccataattcaaacaattacaccatggtataaagtgggcatttaatatgtaaagattcaaagtttgtctttattactatatgtaaattagacattaatccactaaactggtcttcttcaagagagctaagtatacactatctggtgaaacttggattctttcctataaaagtgggaccaagcaatgatgatcttctgtggtgcttaaggaaacttactagagctccactaacagtctcataaggaggcagccatcataaccattgaatagcatgcaagggtaagaatgagtttttaactgctttgtaagaaaatggaaaaggtcaataaagatatatttctttagaaaatggg

SEQ ID NO: 455462 - DNA, 432 bp, Homo sapiens
ccgcggccgctgccggacttcgccagatcagacccacggggctgccctcccctgcgcactcccctcgctgcccgggcccggagcgcagcgcggccgcacaggtatttttgctgtgctgtgcaaggaactctgctagctcaagattcacaatgttgaaagcccttttcctaactatgctgactctggcgctggtcaagtcacaggacaccgaagaaaccatcacgtacacgcaatgcactgacggatatgagtgggatcctgtgagacagcaatgcaaagatattgatgaatgtgacattgtcccagacgcttgtaaaggtggaatgaagtgtgtcaaccactattgaaagcccttttcctaactatgctgactctggcgctggtcaagtcacaggacaccgaagaaaccattgcgtgtacgtgatatcacgt

SEQ ID NO: 455463 - DNA, 1158 bp, Homo sapiens
attgtgaagcgcagcccagaattattttgctggttctgccttcaaagaacttccagtccacaggtcagaaaattaattgttttggatccaaagaaacggctgactacatttcaagctctccagcatccgtgggtcacaggtaaagcagccaattttgtacacatggataccgctcaaaagaagctccaagaattcaatgcccggcgtaagcttaaggcagcggtgaaggctgtggtggcctcttcccgcctgggaagtgccagcagcagccatggcagcatccaggagagccacaaggctagccgagacccttctccaatccaagatggcaacgaggacatgaaagctattccagaaggagagaaaattcaaggcgatggggcccaagccgcagttaagggggcacaggctgagctgatgaaggtgcaagccttagagaaagttaaaggtgcagatataaatgctgaagaggcccccaaaatggtgcccaaggcagtggaggatgggataaaggtggctgacctggaactagaggagggcctagcagaggagaagctgaagactgtggaggaggcagcagctcccagagaagggcaaggaagctctgctgtgggttttgaagttccacagcaagatgtgatcctgccagagtactaaacagcttccttcagatctggaagccaaacaccggcattttatgtactttgtccttcagcaagaaaggtgtggaagcatgatatgtactatagtgattctgtttttgaggtgcaaaaaacatacatatataccagttggtaattctaacttcaatgcatgtgactgctttatgaaaataatagtgtcttctatggcatgtaatggatacctaataccgatgagttaaatcttgcaagttaacacaacgtaacacttaaaagcatacattttcagcaaccagtggcacatatttgaagtgaatagtagcaaattgtttttgctttgaaaatctagccatcctacatcctttggatttcttcacaaggcagtaattcctttgaactactgcttagctaatactaggtagtgctaaaagacatgttcccataacttttacaacattttactttttatcattgatgtgttcaaactgtttacaaggagatgcttatagatgatagt

SEQ ID NO: 455464 - DNA, 2028 bp, Homo sapiens
agcggctctctcgctcctgcgttcgcaggcggcggctggcggccggcttctcgctcgggcagcggcggcggcggcggcggcggcttccggagtcccgctgcgaagatgctcaaagtcacggtgccctcctgctccgcctcgtcctgctcttcggtcaccgccagtgcggccccggggaccgcgagcctcgtcccggattactggatcgacggctccaacagggatgcgctgagcgatttcttcgaggtggagtcggagctgggacggggtgctacatccattgtgtacagatgcaaacagaaggggacccagaagccttatgctctcaaagtgttaaagaaaacagtggacaaaaaaatcgtaagaactgagataggagttcttcttcgcctctcacatccaaacattataaaacttaaagagatatttgaaacccctacagaaatcagtctggtcctagaactcgtcacaggaggagaactgtttgataggattgtggaaaagggatattacagtgagcgagatgctgcagatgccgttaaacaaatcctggaggcagttgcttatctacatgaaaatgggattgtccatcgtgatctcaaaccagagaatcttctttatgcaactccagccccagatgcaccactcaaaatcgctgattttggactctctaaaattgtggaacatcaagtgctcatgaagacagtatgtggaaccccagggtactgcgcacctgaaattcttagaggttgtgcctatggacctgaggtggacatgtggtctgtaggaataatcacctacatcttactttgtggatttgaaccattctatgatgaaagaggcgatcagttcatgttcaggagaattctgaattgtgaatattactttatctccccctggtgggatgaagtatctctaaatgccaaggacttggtcagaaaattaattgttttggatccaaagaaacggctgactacatttcaagctctccagcatccgtgggtcacaggtaaagcagccaattttgtacacatggataccgctcaaaagaagctccaagaattcaatgcccggcgtaagcttaaggcagcggtgaaggctgtggtggcctcttcccgcctgggaagtgccagcagcagccatggcagcatccaggagagccacaaggctagccgagacccttctccaatccaagatggcaacgaggacatgaaagctattccagaaggagagaaaattcaaggcgatggggcccaagccgcagttaagggggcacaggctgagctgatgaaggtgcaagccttagagaaagttaaaggtgcagatataaatgctgaagaggcccccaaaatggtgcccaaggcagtggaggatgggataaaggtggctgacctggaactagaggagggcctagcagaggagaagctgaagactgtggaggaggcagcagctcccagagaagggcaaggaagctctgctgtgggttttgaagttccacagcaagatgtgatcctgccagagtactaaacagcttccttcagatctggaagccaaacaccggcattttatgtactttgtccttcagcaagaaaggtgtggaagcatgatatgtactatagtgattctgtttttgaggtgcaaaaaacatacatatataccagttggtaattctaacttcaatgcatgtgactgctttatgaaaataatagtgtcttctatggcatgtaatggatacctaataccgatgagttaaatcttgcaagttaacacaacgtaacacttaaaagcatacattttcagcaaccagtggcacatatttgaagtgaatagtagcaaattgtttttgctttgaaaatctagccatcctacatcctttggatttcttcacaaggcagtaattcctttgaactactgcttagctaatactaggtagtgctaaaagacatgttcccataacttttacaacattttactttttatcattgatgtgttcaaactgtttacaaggagatgcttatagatgatagt

SEQ ID NO: 455465 - DNA, 2517 bp, Homo sapiens
agcggctctctcgctcctgcgttcgcaggcggcggctggcggccggcttctcgctcgggcagcggcggcggcggcggcggcggcttccggagtcccgctgcgaagatgctcaaagtcacggtgccctcctgctccgcctcgtcctgctcttcggtcaccgccagtgcggccccggggaccgcgagcctcgtcccggattactggatcgacggctccaacagggatgcgctgagcgatttcttcgaggtggagtcggagctgggacggggtgctacatccattgtgtacagatgcaaacagaaggggacccagaagccttatgctctcaaagtgttaaagaaaacagtggacaaaaaaatcgtaagaactgagataggagttcttcttcgcctctcacatccaaacattataaaacttaaagagatatttgaaacccctacagaaatcagtctggtcctagaactcgtcacaggaggagaactgtttgataggattgtggaaaagggatattacagtgagcgagatgctgcagatgccgttaaacaaatcctggaggcagttgcttatctacatgaaaatgggattgtccatcgtgatctcaaaccagagaatcttctttatgcaactccagccccagatgcaccactcaaaatcgctgattttggactctctaaaattgtggaacatcaagtgctcatgaagacagtatgtggaaccccagggtactgcgcacctgaaattcttagaggttgtgcctatggacctgaggtggacatgtggtctgtaggaataatcacctacatcttactttgtggatttgaaccattctatgatgaaagaggcgatcagttcatgttcaggagaattctgaattgtgaatattactttatctccccctggtgggatgaagtatctctaaatgccaaggacttggtcagaaaattaattgttttggatccaaagaaacggctgactacatttcaagctctccagcatccgtgggtcacaggtaaagcagccaattttgtacacatggataccgctcaaaagaagctccaagaattcaatgcccggcgtaagcttaaggcagcggtgaaggctgtggtggcctcttcccgcctgggaagtgccagcagcagccatggcagcatccaggagagccacaaggctagccgagacccttctccaatccaagatggcaacgaggacatgaaagctattccagaaggagagaaaattcaaggcgatggggcccaagccgcagttaagggggcacaggctgagctgatgaaggtgcaagccttagagaaagttaaaggtgcagatataaatgctgaagaggcccccaaaatggtgcccaaggcagtggaggatgggataaaggtggctgacctggaactagaggagggcctagcagaggagaagctgaagactgtggaggaggcagcagctcccagagaagggcaaggaagctctgctgtgggttttgaagttccacagcaagatgtgatcctgccagagtactaaacagcttccttcagatctggaagccaaacaccggcattttatgtactttgtccttcagcaagaaagaggtccaccagggcaaaatagaagccttgccgagaaagtgaactgtcttactccttcaaaggaatcagatgttgctctagagaagactccaggcatctacctggttgagctcaaatgaggcaagtgggagaaaacctcttctcatcctctgattgaaagtgatacaatttgaatattggtatattgtcattggtcagtaatggaaaaatgagattcccacccagtgggttactcttttccttgtcttggtttgctatgccttatcccagatcagtgttttgttccatccctatggtcatctctaaagccctgacaggagcatcccagactggagaaatgcagcgtatctgtggcccagaattttgtttgatactctaaacagcaatgcaaagactgcaaaatcacactattctaaacagttgttttcagctcattttgaagattgacctggaaaacatatagatacagaatatatacatttaatcgttgcttgtgattcattgtgtcaaaataacatttaattttcactctgattaatctttattttccatttaaaagattatttcaggctacttaaatacaagaccttgcattctaatttttgaaagcggttgttttccctgagctctctctcaactttgacagtttgtgaatgataaaaagttactaggtttgtcctttccttgatagatgtagagcagttcatctgttttgtaaaggtacagttaagcataactataggctgggcgtgatagttcatgcctgtaatcccaacactttgggaggccgaggttggcagatcacctgaggtcaggagtttgagaccagcctggccaacgtggtgaaacccctaatacaaaaattagctgggcatggtggcacgctcctgtaatctcagctactcaggaggctgaggcaggagaa

SEQ ID NO: 455466 - DNA, 5027 bp, Homo sapiens
cgggattcggctggctctgccacaccaccgcgcgcccccgctccgcccgcccctccgggcgcgtcttttccgggctcgcgctgagtcccgcctccgccggctgtccgggtgcgcgcgcgccgctgcggctttttctctggcctccgccgcgcgctcctcctcgtcccagcgctagcgggcacgcggttcctttttgcgagctttccgagtgccaggcgccggccggctgcgaagacgcggtgggccgcccctccgattgaaatcacagaagatattcgtgttcttcttaagagaaaaagaggacatttaagaaaaacgctatggcaaagagaataaaagctaagcccacttcagacaaacctggaagtccatatcgctctgtcacacacttcgactcactagctgtaatagacatccctggagcagatactctggataaattatttgaccatgctgtatccaagtttgggaagaaggacagccttgggaccagggaaatcctaagtgaagaaaatgaaatgcagccaaatggaaaagtttttaagaagttaattcttgggaattataaatggatgaactatcttgaagtgaatcgcagagtgaataactttggtagtggactcactgcactgggactaaaaccaaagaacaccattgccatcttctgtgagaccagggccgaatggatgattgcagcacagacctgctttaagtacaactttcctcttgtgactttatatgccacacttggcaaagaagcagtagttcatgggctaaatgaatctgaggcttcctatctgattaccagtgttgaacttctggaaagtaaacttaagactgcattgttagatatcagttgtgttaaacatatcatttatgtggacaataaggctatcaataaagcagagtaccctgaaggatttgagattcacagcatgcaatcagtagaagagttgggatctaacccagaaaacttgggcattcctccaagtagaccaacgccttcagacatggccattgttatgtatactagtggttctactggccgacctaagggagtgatgatgcatcatagcaatttgatagctggaatgacaggccagtgtgaaagaatacctggactgggaccgaaggacacatatattggctacttgcctttggctcatgtgctagaactgacagcagagatatcttgctttacctatggctgcaggattggatattcttctccgcttacactctctgaccagtccagcaaaattaaaaaaggaagcaaaggagactgtactgtactgaagcccacacttatggctgctgttccggaaatcatggatagaatttataagaatgttatgagcaaagtccaagagatgaattatattcagaaaactctgttcaagatagggtatgattacaaattggaacagatcaaaaagggatatgatgcacctctttgcaatctgttactgtttaaaaaggtcaaggccctgctgggagggaatgtccgcatgatgctgtctggaggggccccgctatctcctcagacacaccgattcatgaatgtctgcttctgctgcccaattggccagggttatggactgacagaatcatgtggtgctgggacagttactgaagtaactgactatactactggcagagttggagcacctcttatttgctgtgaaattaagctaaaagactggcaagaaggcggttatacaattaatgacaagccaaaccccagaggtgaaatcgtaattggtggacagaacatctccatgggatattttaaaaatgaagagaaaacagcagaagattattctgtggatgaaaatggacaaaggtggttttgcactggtgatattggagaattccatcccgatggatgtttacagattatagatcgtaagaaagatctagtgaagttacaagcaggagagtatgtatctcttgggaaagtagaagctgcactgaagaattgtccacttattgacaacatctgtgcttttgccaaaagtgatcagtcctatgtgatcagttttgtggttcctaaccagaaaaggttgacacttttggcacaacagaaaggggtagaaggaacttgggttgatatctgcaataatcctgctatggaagctgaaatactgaaagaaattcgagaagctgcaaatgccatgaaattggagcgatttgaaattccaatcaaggttcgattaagcccagagccatggacccctgaaactggtttggtaactgatgctttcaaactgaaaaggaaggagctgaggaaccattacctcaaagacattgaacgaatgtatgggggcaaataaaatgttgttgtcttattgacagttgtgcaggaggtagcctggtggttttcaacctctagaattttaagcctttgttgaactgttagaatgtaaggtatatcattctaaagatagagtaaaaagaaaacaaaaccaaaagttattaaaattgttgtccggtttactttaacttagttttgcatagttctagtgcagctgaaattgaaaagttatttccctttagctgtgttattatagagcagaaattctgtttttaaaaattagcctaagatatacttgtttttgtaaagaaaaatatttaatgttgaacaaaataaattggagttggagtagaatgtagtttgaggaaatttgcagcttccaatgcctcttgtcttcctatttcagaagtttaaatattaagcatgacagaaaatatgtattaacactactcaaagcaaaagtgctgcagggctttaaaattctcttccaaccatttatcttgaaggaaaaattcaatagtaatataatacacaaaatcaaataataccttagaaggtattaagattataattgttgcataggttagatatagagtcattgtaatgttgtgaataattacagtgcctaaaataagaatagaacaacatatacaacaccaaaaaatatctagtaatatatttaaagggaaattgagctgctttttttgaaactttgagatctaaaaataactgtaattatttgaatgactaagaggaaagtacattttttgaaatgctgaaaattgcctttctgtgtttattcaaactgaaaagctgagaccaagagcaaggaaggtaaaaagttaacaggcaaacattttctcttagaaaaggtgataaaatcataagtatttggaattagaacccttgcacagcactgaacctgggaaagagatttaaactctgaatttatctttgataacagggattgattttaaaatgtacatgtattaaattacatttgtaatttaaggtctgtttgctgttgctgattttattcttgatcagtagtttgcatttcagaaagcctttcattttgctttaattttagcaaagcgggttataatgaatgacttccccaatatcttgcttgaacttacaggtgattaacttggatgagttttgggaagttaaagggaagaaaacactgttatcattttttcctgtttgggaagagcttagaaactggaaatactagatttgggagaagggcagagttacttgataagggactgatgtttgtgcagtaacttgggagtgtggtttctttttgaatctttaattaaaacctgggattatatatccctgataaatattcacacttgaaccatagttactgtaaaatgcaaaaaatcttaatactgttattctttgcactttttcttaatcattttttatatatatgcatatatatatgtgtgtgtgtgtgttgcttatgttgttttgtacagatgtgggccaccattgcaacaaaatacattctttttgctctaaaatatttatgaagaaaatacttaaatgttatgtatatggtggtaataagggaaaaatcaagtattataaacaagaatgaaggtttttgtaaagatttctgttcagcgttttgcaaggtaaaattttaggcaagttttccctgaagttatgtgtatgtgagtattctcattcttcccaacttgcctttgaagagtgaaataccattattatcaagtagactactgttcagcttttattcctgccctgctgtttatcccttaagaatgagtttcttagacttttccaatatgtgattttttttcccatttagaatggtgattttaaatgtgtgagtgcatgtactatcttatctcagatatttgcacccccaatctgcccccaactcccaaaagctagaacactgccaactgatctgttataggtcctttagaaacacataattaacacttaaggttgggtgctgctaattctttgcaaaaatccaaatattgttaagggaccagggagatgccactaccccttgattttccatctaaaaatatacatgtttatgtaaacaaatctttccatatccatagtgacttttcaagtatttaagcctaaagattttgatctcacatttttatacctgtttaaattgctcacagttattacatacacatcagccatcaactaaagttgtactttaaaaatttactacaatatgtacatttctaagtcaaacacttgtgacttttgctttaattccatgaatgttcctgcctccttgatatttgtatttattctttttttctctagagtagaggtataattgtgtgatatttcagaaatacagataaatgattcaaaaagtcacagttaaggagaatcatgtttctttgatcatgaataactgattagtaagtcttgcctatattttcctgatagcatatgacaaatgtttctaaggtaacaagatgagaacagataaagattgtgtggtgttttggatttggagagaaatattttaatttttaaatgcagttacaaattataatgtattcatatttgtactttctgttaaaatgcatgattgcagaattgtttagattttgtgtttattcttgatgaaaagctttgtttgttcttgtttttaagtttgcactcaaatcttaagaaataaatccacccatgttatcaa

SEQ ID NO: 455467 - DNA, 4973 bp, Homo sapiens
cgggattcggctggctctgccacaccaccgcgcgcccccgctccgcccgcccctccgggcgcgtcttttccgggctcgcgctgagtcccgcctccgccggctgtccgggtgcgcgcgcgccgctgcggctttttctctggcctccgccgcgcgctcctcctcgtcccagcgctagcgggcacgcggttcctttttgcgagctttccgagtgccaggcgccggccggctgcgaagacgcggtgggccgcccctccgattgaaatcacagaagatattcgtgttcttcttaagagaaaaagaggacatttaagaaaaacgctatggcaaagagaataaaagctaagcccacttcagacaaacctggaagtccatatcgctctgtcacacacttcgactcactagctgtaatagacatccctggagcagatactctggataaattatttgaccatgctgtatccaagtttgggaagaaggacagccttgggaccagggaaatcctaagtgaagaaaatgaaatgcagccaaatggaaaagtttttaagaagttaattcttgggaattataaatggatgaactatcttgaagtgaatcgcagagtgaataactttggtagtggactcactgcactgggactaaaaccaaagaacaccattgccatcttctgtgagaccagggccgaatggatgattgcagcacagacctgctttaagtacaactttcctcttgtgactttatatgccacacttggcaaagaagcagtagttcatgggctaaatgaatctgaggcttcctatctgattaccagtgttgaacttctggaaagtaaacttaagactgcattgttagatatcagttgtgttaaacatatcatttatgtggacaataaggctatcaataaagcagagtaccctgaaggatttgagattcacagcatgcaatcagtagaagagttgggatctaacccagaaaacttgggcattcctccaagtagaccaacgccttcagacatggccattgttatgtatactagtggttctactggccgacctaagggagtgatgatgcatcatagcaatttgatagctggaatgacaggccagtgtgaaagaatacctggactgggaccgaaggacacatatattggctacttgcctttggctcatgtgctagaactgacagcagagatatcttgctttacctatggctgcaggattggatattcttctccgcttacactctctgaccagtccagcaaaattaaaaaaggaagcaaaggagactgtactgtactgaagcccacacttatggctgctgttccggaaatcatggatagaatttataagaatgttatgagcaaagtccaagagatgaattatattcagaaaactctgttcaagatagggtatgattacaaattggaacagatcaaaaagggatatgatgcacctctttgcaatctgttactgtttaaaaaggtcaaggccctgctgggagggaatgtccgcatgatgctgtctggaggggccccgctatctcctcagacacaccgattcatgaatgtctgcttctgctgcccaattggccagggttatggactgacagaatcatgtggtgctgggacagttactgaagtaactgactatactactggcagagttggagcacctcttatttgctgtgaaattaagctaaaagactggcaagaaggcggttatacaattaatgacaagccaaaccccagaggtgaaatcgtaattggtggacagaacatctccatgggatattttaaaaatgaagagaaaacagcagaagattattctgtggatgaaaatggacaaaggtggttttgcactggtgatattggagaattccatcccgatggatgtttacagattatagatcgtaagaaagatctagtgaagttacaagcaggagagtatgtatctcttgggaaagtagaagctgcactgaagaattgtccacttattgacaacatctgtgcttttgccaaaagtgatcagtcctatgtgatcagttttgtggttcctaaccagaaaaggttgacacttttggcacaacagaaaggggtagaaggaacttgggttgatatctgcaataatcctgctatggaagctgaaatactgaaagaaattcgagaagctgcaaatgccatgaaattggagcgatttgaaattccaatcaaggttcgattaagcccagagccatggacccctgaaactggtttggtaactgatgctttcaaactgaaaaggaaggagctgaggaaccattacctcaaagacattgaacgaatgtatgggggcaaataaaatgttgttgtcttattgacagttgtgcaggaggtagcctggtggttttcaacctctagaattttaagcctttgttgaactgttagaatgtaaggtatatcattctaaagatagagtaaaaagaaaacaaaaccaaaagttattaaaattgttgtccggtttactttaacttagttttgcatagttctagtgcagctgaaattgaaaagttatttccctttagctgtgttattatagagcagaaattctgtttttaaaaattagcctaagatatacttgtttttgtaaagaaaaatatttaatgttgaacaaaataaattggagttggagtagaatgtagtttgaggaaatttgcagcttccaatgcctcttgtcttcctatttcagaagtttaaatattaagcatgacagaaaatatgtattaacactactcaaagcaaaagtgctgcagggctttaaaattctcttccaaccatttatcttgaaggaaaaattcaatagtaatataatacacaaaatcaaataataccttagaaggtattaagattataattgttgcataggttagatatagagtcattgtaatgttgtgaataattacagtgcctaaaataagaatagaacaacatatacaacaccaaaaaatatctagtaatatatttaaagggaaattgagctgctttttttgaaactttgagatctaaaaataactgtaattatttgaatgactaagaggaaagtacattttttgaaatgctgaaaattgcctttctgtgtttattcaaactgaaaagctgagaccaagagcaaggaaggtaaaaagttaacaggcaaacattttctcttagaaaaggtgataaaatcataagtatttggaattagaacccttgcacagcactgaacctgggaaagagatttaaactctgaatttatctttgataacagggattgattttaaaatgtacatgtattaaattacatttgtaatttaaggtctgtttgctgttgctgattttattcttgatcagtagtttgcatttcagaaagcctttcattttgctttaattttagcaaagcgggttataatgaatgacttccccaatatcttgcttgaacttacaggtgattaacttggatgagttttgggaagttaaagggaagaaaacactgttatcattttttcctgtttgggaagagcttagaaactggaaatactagatttgggagaagggcagagttacttgataagggactgatgtttgtgcagtaacttgggagtgtggtttctttttgaatctttaattaaaacctgggattatatatccctgataaatattcacacttgaaccatagttactgtaaaatgcaaaaaatcttaatactgttattctttgcactttttcttaatcattttttatatatatgcatatatatatgtgtgtgtgtgtgttgcttatgttgttttgtacagatgtgggccaccattgcaacaaaatacattctttttgctctaaaatatttatgaagaaaatacttaaatgttatgtatatggtggtaataagggaaaaatcaagtattataaacaagaatgaaggtttttgtaaagatttctgttcagcgttttgcaagcttcccaacttgcctttgaagagtgaaataccattattatcaagtagactactgttcagcttttattcctgccctgctgtttatcccttaagaatgagtttcttagacttttccaatatgtgattttttttcccatttagaatggtgattttaaatgtgtgagtgcatgtactatcttatctcagatatttgcacccccaatctgcccccaactcccaaaagctagaacactgccaactgatctgttataggtcctttagaaacacataattaacacttaaggttgggtgctgctaattctttgcaaaaatccaaatattgttaagggaccagggagatgccactaccccttgattttccatctaaaaatatacatgtttatgtaaacaaatctttccatatccatagtgacttttcaagtatttaagcctaaagattttgatctcacatttttatacctgtttaaattgctcacagttattacatacacatcagccatcaactaaagttgtactttaaaaatttactacaatatgtacatttctaagtcaaacacttgtgacttttgctttaattccatgaatgttcctgcctccttgatatttgtatttattctttttttctctagagtagaggtataattgtgtgatatttcagaaatacagataaatgattcaaaaagtcacagttaaggagaatcatgtttctttgatcatgaataactgattagtaagtcttgcctatattttcctgatagcatatgacaaatgtttctaaggtaacaagatgagaacagataaagattgtgtggtgttttggatttggagagaaatattttaatttttaaatgcagttacaaattataatgtattcatatttgtactttctgttaaaatgcatgattgcagaattgtttagattttgtgtttattcttgatgaaaagctttgtttgttcttgtttttaagtttgcactcaaatcttaagaaataaatccacccatgttatcaa

SEQ ID NO: 455468 - DNA, 5161 bp, Homo sapiens
cgggattcggctggctctgccacaccaccgcgcgcccccgctccgcccgcccctccgggcgcgtcttttccgggctcgcgctgagtcccgcctccgccggctgtccgggtgcgcgcgcgccgctgcggctttttctctggcctccgccgcgcgctcctcctcgtcccagcgctagcgggcacgcggttcctttttgcgagctttccgagtgccaggcgccggccggctgcgaagacgcggtgggccgcccctccgattgaaatcacagaagatattcgtgttcttcttaagagaaaaagaggacatttaagaaaaacgctatggcaaagagaataaaagctaagcccacttcagacaaacctggaagtccatatcgctctgtcacacacttcgactcactagctgtaatagacatccctggagcagatactctggataaattatttgaccatgctgtatccaagtttgggaagaaggacagccttgggaccagggaaatcctaagtgaagaaaatgaaatgcagccaaatggaaaagtttttaagaagttaattcttgggaattataaatggatgaactatcttgaagtgaatcgcagagtgaataactttggtagtggactcactgcactgggactaaaaccaaagaacaccattgccatcttctgtgagaccagggccgaatggatgattgcagcacagacctgctttaagtacaactttcctcttgtgactttatatgccacacttggcaaagaagcagtagttcatgggctaaatgaatctgaggcttcctatctgattaccagtgttgaacttctggaaagtaaacttaagactgcattgttagatatcagttgtgttaaacatatcatttatgtggacaataaggctatcaataaagcagagtaccctgaaggatttgagattcacagcatgcaatcagtagaagagttgggatctaacccagaaaacttgggcattcctccaagtagaccaacgccttcagacatggccattgttatgtatactagtggttctactggccgacctaagggagtgatgatgcatcatagcaatttgatagctggaatgacaggccagtgtgaaagaatacctggactgggaccgaaggacacatatattggctacttgcctttggctcatgtgctagaactgacagcagagatatcttgctttacctatggctgcaggattggatattcttctccgcttacactctctgaccagtccagcaaaattaaaaaaggaagcaaaggagactgtactgtactgaagcccacacttatggctgctgttccggaaatcatggatagaatttataagaatgttatgagcaaagtccaagagatgaattatattcagaaaactctgttcaagatagggtatgattacaaattggaacagatcaaaaagggatatgatgcacctctttgcaatctgttactgtttaaaaaggtcaaggccctgctgggagggaatgtccgcatgatgctgtctggaggggccccgctatctcctcagacacaccgattcatgaatgtctgcttctgctgcccaattggccagggttatggactgacagaatcatgtggtgctgggacagttactgaagtaactgactatactactggcagagttggagcacctcttatttgctgtgaaattaagctaaaagactggcaagaaggcggttatacaattaatgacaagccaaaccccagaggtgaaatcgtaattggtggacagaacatctccatgggatattttaaaaatgaagagaaaacagcagaagattattctgtggatgaaaatggacaaaggtggttttgcactggtgatattggagaattccatcccgatggatgtttacagattatagatcgtaagaaagatctagtgaagttacaagcaggagagtatgtatctcttgggaaagtagaagctgcactgaagaattgtccacttattgacaacatctgtgcttttgccaaaagtgatcagtcctatgtgatcagttttgtggttcctaaccagaaaaggttgacacttttggcacaacagaaaggggtagaaggaacttgggttgatatctgcaataatcctgctatggaagctgaaatactgaaagaaattcgagaagctgcaaatgccatgaaattggagcgatttgaaattccaatcaaggttcgattaagcccagagccatggacccctgaaactggtttggtaactgatgctttcaaactgaaaaggaaggagctgaggaaccattacctcaaagacattgaacgaatgtatgggggcaaataaaatgttgttgtcttattgacagttgtgcaggaggtagcctggtggttttcaacctctagaattttaagcctttgttgaactgttagaatgtaaggtatatcattctaaagatagagtaaaaagaaaacaaaaccaaaagttattaaaattgttgtccggtttactttaacttagttttgcatagttctagtgcagctgaaattgaaaagttatttccctttagctgtgttattatagagcagaaattctgtttttaaaaattagcctaagatatacttgtttttgtaaagaaaaatatttaatgttgaacaaaataaattggagttggagtagaatgtagtttgaggaaatttgcagcttccaatgcctcttgtcttcctatttcagaagtttaaatattaagcatgacagaaaatatgtattaacactactcaaagcaaaagtgctgcagggctttaaaattctcttccaaccatttatcttgaaggaaaaattcaatagtaatataatacacaaaatcaaataataccttagaaggtattaagattataattgttgcataggttagatatagagtcattgtaatgttgtgaataattacagtgcctaaaataagaatagaacaacatatacaacaccaaaaaatatctagtaatatatttaaagggaaattgagctgctttttttgaaactttgagatctaaaaataactgtaattatttgaatgactaagaggaaagtacattttttgaaatgctgaaaattgcctttctgtgtttattcaaactgaaaagctgagaccaagagcaaggaaggtaaaaagttaacaggcaaacattttctcttagaaaaggtgataaaatcataagtatttggaattagaacccttgcacagcactgaacctgggaaagagatttaaactctgaatttatctttgataacagggattgattttaaaatgtacatgtattaaattacatttgtaatttaaggtctgtttgctgttgctgattttattcttgatcagtagtttgcatttcagaaagcctttcattttgctttaattttagcaaagcgggttataatgaatgacttccccaatatcttgcttgaacttacaggtgattaacttggatgagttttgggaagttaaagggaagaaaacactgttatcattttttcctgtttgggaagagcttagaaactggaaatactagatttgggagaagggcagagttacttgataagggactgatgtttgtgcagtaacttgggagtgtggtttctttttgaatctttaattaaaacctgggattatatatccctgataaatattcacacttgaaccatagttactgtaaaatgcaaaaaatcttaatactgttattctttgcactttttcttaatcattttttatatatatgcatatatatatgtgtgtgtgtgtgttgcttatgttgttttgtacagatgtgggccaccattgcaacaaaatacattctttttgctctaaaatatttatgaagaaaatacttaaatgttatgtatatggtggtaataagggaaaaatcaagtattataaacaagaatgaaggtttttgtaaagatttctgttcagcgttttgcaaggtaaaattttaggcaagttttccctgaagttatgtgtatgtgagtattctcattcttcccaacttgcctttgaagagtgaaataccattattatcaagtagactactgttcagcttttattcctgccctgctgtttatcccttaagaatgagtttcttagacttttccaatatgtgattttttttcccatttagaatggtgattttaaatgtgtgagtgcatgtactatcttatctcagatatttgcacccccaatctgcccccaactcccaaaagctagaacactgccaactgatctgttataggtcctttagaaacacataattaacacttaaggttgggtgctgctaattctttgcaaaaatccaaatattgttaagggaccagggagatgccactaccccttgattttccatctaaaaatatacatgtttatgtaaacaaatctttccatatccatagtgacttttcaagtatttaagcctaaagattttgatctcacatttttatacctgtttaaattgctcacagttattacatacacatcagccatcaactaaagttgtactttaaaaatttactacaatatgtacatttctaagtcaaacacttgtgacttttgctttaattccatgaatgttcctgcctccttgatatttgtatttattctttttttctctagagtagaggtataattgtgtgatatttcagaaatacagataaatgattcaaaaagtcacagttaaggagaatcatgtttctttgatcatgaataactgattagtaagtcttgcctatattttcctgatagcatatgacaaatgtttctaaggtaacaagatgagaacagataaagattgtgtggtgttttggatttggagagaaatattttaatttttaaatgcagttacaaattataatgtattcatatttgtactttctgttaaaatgcatgattgcagaattgtttagattttgtgtttattcttgatgaaaaggcttgtggtctgttttagttgcctccattctagaattatccccctgtttccaaaaaatagtgtataaaaataaaaagcaataaaatgacatcaataaaaaggggggcggatattcggaggacaccatttaaagaaaagaataagggggacaaagaagtagtctaacgcttgtgtcaacgattttttgtgtttatagaaga

SEQ ID NO: 455469 - DNA, 1361 bp, Homo sapiens
aatacatcccatcctcgaaagaatttaagtgaacaaactttaaaaagaaaaaaaaaatagatacagccttcatcttttacaaatatatttccttcccaatatcttcccaatataaacactgtggagtgtttatatattcagtgcaagaaacagtatcatcggtacattctttttgctctaaaatatttatgaagaaaatacttaaatgttatgtatatggtggtaataagggaaaaatcaagtattataaacaagaatgaaggtttttgtaaagatttctgttcagcgttttgcaaggtaaaattttaggcaagttttccctgaagttatgtgtatgtgagtattctcattcttcccaacttgcctttgaagagtgaaataccattattatcaagtagactactgttcagcttttattcctgccctgctgtttatcccttaagaatgagtttcttagacttttccaatatgtgattttttttcccatttagaatggtgattttaaatgtgtgagtgcatgtactatcttatctcagatatttgcacccccaatctgcccccaactcccaaaagctagaacactgccaactgatctgttataggtcctttagaaacacataattaacacttaaggttgggtgctgctaattctttgcaaaaatccaaatattgttaagggaccagggagatgccactaccccttgattttccatctaaaaatatacatgtttatgtaaacaaatctttccatatccatagtgacttttcaagtatttaagcctaaagattttgatctcacatttttatacctgtttaaattgctcacagttattacatacacatcagccatcaactaaagttgtactttaaaaatttactacaatatgtacatttctaagtcaaacacttgtgacttttgctttaattccatgaatgttcctgcctccttgatatttgtatttattctttttttctctagagtagaggtataattgtgtgatatttcagaaatacagataaatgattcaaaaagtcacagttaaggagaatcatgtttctttgatcatgaataactgattagtaagtcttgcctatattttcctgatagcatatgacaaatgtttctaaggtaacaagatgagaacagataaagattgtgtggtgttttggatttggagagaaatattttaatttttaaatgcagttacaaattataatgtattcatatttgtactttctgttaaaatgcatgattgcagaattgtttagattttgtgtttattcttgatgaaaagctttgtttgttcttgtttttaagtttgcactcaaatcttaagaaataaatccacccatgttatcaa

SEQ ID NO: 455470 - DNA, 399 bp, Homo sapiens
taggtaaatcctgaaaaactcatattttattaattgcttctccttccccttctttccccgtccccactcctttctcgtctctttccccccctctccttttctcccatctttcacttctaatttcagtgaaattggagcgatttgaaattccaatcaaggttcgattaagcccagagccatggacccctgaaactggtttggtaactgatgctttcaaactgaaaaggaaggagctgaggaaccattacctcaaagacattgaacgaatgtatgggggcaaataaaatgttgttgtcttattgacagttgtgcaggaggtagcctggtggttttcaacctctagaattttaagcctttgttgaactgttagaatgtaaggtatatcattctaaagataga

SEQ ID NO: 455471 - DNA, 5336 bp, Homo sapiens
cgggattcggctggctctgccacaccaccgcgcgcccccgctccgcccgcccctccgggcgcgtcttttccgggctcgcgctgagtcccgcctccgccggctgtccgggtgcgcgcgcgccgctgcggctttttctctggcctccgccgcgcgctcctcctcgtcccagcgctagcgggcacgcggttcctttttgcgagctttccgagtgccaggcgccggccggctgcgaagacgcggtgggccgcccctccgattgaaatcacagaagatattcgtgttcttcttaagagaaaaagaggacattttagctttctcagttgaaggcgtactttattgtcggcttccaaagattactaacttttatctgtatcactaagattgaactgccttggctgtactgctattcttactgctgcttctattattgccttcttcagcacaataaggctttcaaaagccaaagaataacaagaaataagcaccattttagaagcctttccactatgaaacttaagctaaatgtgctcaccattattttgctgcctgtccacttgttaataacaatatacagtgcccttatatttattccatggtattttcttaccaatgccaagaagaaaaacgctatggcaaagagaataaaagctaagcccacttcagacaaacctggaagtccatatcgctctgtcacacacttcgactcactagctgtaatagacatccctggagcagatactctggataaattatttgaccatgctgtatccaagtttgggaagaaggacagccttgggaccagggaaatcctaagtgaagaaaatgaaatgcagccaaatggaaaagtttttaagaagttaattcttgggaattataaatggatgaactatcttgaagtgaatcgcagagtgaataactttggtagtggactcactgcactgggactaaaaccaaagaacaccattgccatcttctgtgagaccagggccgaatggatgattgcagcacagacctgctttaagtacaactttcctcttgtgactttatatgccacacttggcaaagaagcagtagttcatgggctaaatgaatctgaggcttcctatctgattaccagtgttgaacttctggaaagtaaacttaagactgcattgttagatatcagttgtgttaaacatatcatttatgtggacaataaggctatcaataaagcagagtaccctgaaggatttgagattcacagcatgcaatcagtagaagagttgggatctaacccagaaaacttgggcattcctccaagtagaccaacgccttcagacatggccattgttatgtatactagtggttctactggccgacctaagggagtgatgatgcatcatagcaatttgatagctggaatgacaggccagtgtgaaagaatacctggactgggaccgaaggacacatatattggctacttgcctttggctcatgtgctagaactgacagcagagatatcttgctttacctatggctgcaggattggatattcttctccgcttacactctctgaccagtccagcaaaattaaaaaaggaagcaaaggagactgtactgtactgaagcccacacttatggctgctgttccggaaatcatggatagaatttataagaatgttatgagcaaagtccaagagatgaattatattcagaaaactctgttcaagatagggtatgattacaaattggaacagatcaaaaagggatatgatgcacctctttgcaatctgttactgtttaaaaaggtcaaggccctgctgggagggaatgtccgcatgatgctgtctggaggggccccgctatctcctcagacacaccgattcatgaatgtctgcttctgctgcccaattggccagggttatggactgacagaatcatgtggtgctgggacagttactgaagtaactgactatactactggcagagttggagcacctcttatttgctgtgaaattaagctaaaagactggcaagaaggcggttatacaattaatgacaagccaaaccccagaggtgaaatcgtaattggtggacagaacatctccatgggatattttaaaaatgaagagaaaacagcagaagattattctgtggatgaaaatggacaaaggtggttttgcactggtgatattggagaattccatcccgatggatgtttacagattatagatcgtaagaaagatctagtgaagttacaagcaggagagtatgtatctcttgggaaagtagaagctgcactgaagaattgtccacttattgacaacatctgtgcttttgccaaaagtgatcagtcctatgtgatcagttttgtggttcctaaccagaaaaggttgacacttttggcacaacagaaaggggtagaaggaacttgggttgatatctgcaataatcctgctatggaagctgaaatactgaaagaaattcgagaagctgcaaatgccatgaaattggagcgatttgaaattccaatcaaggttcgattaagcccagagccatggacccctgaaactggtttggtaactgatgctttcaaactgaaaaggaaggagctgaggaaccattacctcaaagacattgaacgaatgtatgggggcaaataaaatgttgttgtcttattgacagttgtgcaggaggtagcctggtggttttcaacctctagaattttaagcctttgttgaactgttagaatgtaaggtatatcattctaaagatagagtaaaaagaaaacaaaaccaaaagttattaaaattgttgtccggtttactttaacttagttttgcatagttctagtgcagctgaaattgaaaagttatttccctttagctgtgttattatagagcagaaattctgtttttaaaaattagcctaagatatacttgtttttgtaaagaaaaatatttaatgttgaacaaaataaattggagttggagtagaatgtagtttgaggaaatttgcagcttccaatgcctcttgtcttcctatttcagaagtttaaatattaagcatgacagaaaatatgtattaacactactcaaagcaaaagtgctgcagggctttaaaattctcttccaaccatttatcttgaaggaaaaattcaatagtaatataatacacaaaatcaaataataccttagaaggtattaagattataattgttgcataggttagatatagagtcattgtaatgttgtgaataattacagtgcctaaaataagaatagaacaacatatacaacaccaaaaaatatctagtaatatatttaaagggaaattgagctgctttttttgaaactttgagatctaaaaataactgtaattatttgaatgactaagaggaaagtacattttttgaaatgctgaaaattgcctttctgtgtttattcaaactgaaaagctgagaccaagagcaaggaaggtaaaaagttaacaggcaaacattttctcttagaaaaggtgataaaatcataagtatttggaattagaacccttgcacagcactgaacctgggaaagagatttaaactctgaatttatctttgataacagggattgattttaaaatgtacatgtattaaattacatttgtaatttaaggtctgtttgctgttgctgattttattcttgatcagtagtttgcatttcagaaagcctttcattttgctttaattttagcaaagcgggttataatgaatgacttccccaatatcttgcttgaacttacaggtgattaacttggatgagttttgggaagttaaagggaagaaaacactgttatcattttttcctgtttgggaagagcttagaaactggaaatactagatttgggagaagggcagagttacttgataagggactgatgtttgtgcagtaacttgggagtgtggtttctttttgaatctttaattaaaacctgggattatatatccctgataaatattcacacttgaaccatagttactgtaaaatgcaaaaaatcttaatactgttattctttgcactttttcttaatcattttttatatatatgcatatatatatgtgtgtgtgtgtgttgcttatgttgttttgtacagatgtgggccaccattgcaacaaaatacattctttttgctctaaaatatttatgaagaaaatacttaaatgttatgtatatggtggtaataagggaaaaatcaagtattataaacaagaatgaaggtttttgtaaagatttctgttcagcgttttgcaaggtaaaattttaggcaagttttccctgaagttatgtgtatgtgagtattctcattcttcccaacttgcctttgaagagtgaaataccattattatcaagtagactactgttcagcttttattcctgccctgctgtttatcccttaagaatgagtttcttagacttttccaatatgtgattttttttcccatttagaatggtgattttaaatgtgtgagtgcatgtactatcttatctcagatatttgcacccccaatctgcccccaactcccaaaagctagaacactgccaactgatctgttataggtcctttagaaacacataattaacacttaaggttgggtgctgctaattctttgcaaaaatccaaatattgttaagggaccagggagatgccactaccccttgattttccatctaaaaatatacatgtttatgtaaacaaatctttccatatccatagtgacttttcaagtatttaagcctaaagattttgatctcacatttttatacctgtttaaattgctcacagttattacatacacatcagccatcaactaaagttgtactttaaaaatttactacaatatgtacatttctaagtcaaacacttgtgacttttgctttaattccatgaatgttcctgcctccttgatatttgtatttattctttttttctctagagtagaggtataattgtgtgatatttcagaaatacagataaatgattcaaaaagtcacagttaaggagaatcatgtttctttgatcatgaataactgattagtaagtcttgcctatattttcctgatagcatatgacaaatgtttctaaggtaacaagatgagaacagataaagattgtgtggtgttttggatttggagagaaatattttaatttttaaatgcagttacaaattataatgtattcatatttgtactttctgttaaaatgcatgattgcagaattgtttagattttgtgtttattcttgatgaaaagctttgtttgttcttgtttttaagtttgcactcaaatcttaagaaataaatccacccatgttatcaa

SEQ ID NO: 455472 - DNA, 5320 bp, Homo sapiens
cgggattcggctggctctgccacaccaccgcgcgcccccgctccgcccgcccctccgggcgcgtcttttccgggctcgcgctgagtcccgcctccgccggctgtccgggtgcgcgcgcgccgctgcggctttttctctggcctccgccgcgcgctcctcctcgtcccagcgctagcgggcacgcggttcctttttgcgagctttccgagtgccaggcgccggccggctgcgaagacgcggtgggccgcccctccgattgaaatcacagaagatattcgtgttcttcttaagagaaaaagaggacatttaggcgtactttattgtcggcttccaaagattactaacttttatctgtatcactaagattgaactgccttggctgtactgctattcttactgctgcttctattattgccttcttcagcacaataaggctttcaaaagccaaagaataacaagaaataagcaccattttagaagcctttccactatgaaacttaagctaaatgtgctcaccattattttgctgcctgtccacttgttaataacaatatacagtgcccttatatttattccatggtattttcttaccaatgccaagaagaaaaacgctatggcaaagagaataaaagctaagcccacttcagacaaacctggaagtccatatcgctctgtcacacacttcgactcactagctgtaatagacatccctggagcagatactctggataaattatttgaccatgctgtatccaagtttgggaagaaggacagccttgggaccagggaaatcctaagtgaagaaaatgaaatgcagccaaatggaaaagtttttaagaagttaattcttgggaattataaatggatgaactatcttgaagtgaatcgcagagtgaataactttggtagtggactcactgcactgggactaaaaccaaagaacaccattgccatcttctgtgagaccagggccgaatggatgattgcagcacagacctgctttaagtacaactttcctcttgtgactttatatgccacacttggcaaagaagcagtagttcatgggctaaatgaatctgaggcttcctatctgattaccagtgttgaacttctggaaagtaaacttaagactgcattgttagatatcagttgtgttaaacatatcatttatgtggacaataaggctatcaataaagcagagtaccctgaaggatttgagattcacagcatgcaatcagtagaagagttgggatctaacccagaaaacttgggcattcctccaagtagaccaacgccttcagacatggccattgttatgtatactagtggttctactggccgacctaagggagtgatgatgcatcatagcaatttgatagctggaatgacaggccagtgtgaaagaatacctggactgggaccgaaggacacatatattggctacttgcctttggctcatgtgctagaactgacagcagagatatcttgctttacctatggctgcaggattggatattcttctccgcttacactctctgaccagtccagcaaaattaaaaaaggaagcaaaggagactgtactgtactgaagcccacacttatggctgctgttccggaaatcatggatagaatttataagaatgttatgagcaaagtccaagagatgaattatattcagaaaactctgttcaagatagggtatgattacaaattggaacagatcaaaaagggatatgatgcacctctttgcaatctgttactgtttaaaaaggtcaaggccctgctgggagggaatgtccgcatgatgctgtctggaggggccccgctatctcctcagacacaccgattcatgaatgtctgcttctgctgcccaattggccagggttatggactgacagaatcatgtggtgctgggacagttactgaagtaactgactatactactggcagagttggagcacctcttatttgctgtgaaattaagctaaaagactggcaagaaggcggttatacaattaatgacaagccaaaccccagaggtgaaatcgtaattggtggacagaacatctccatgggatattttaaaaatgaagagaaaacagcagaagattattctgtggatgaaaatggacaaaggtggttttgcactggtgatattggagaattccatcccgatggatgtttacagattatagatcgtaagaaagatctagtgaagttacaagcaggagagtatgtatctcttgggaaagtagaagctgcactgaagaattgtccacttattgacaacatctgtgcttttgccaaaagtgatcagtcctatgtgatcagttttgtggttcctaaccagaaaaggttgacacttttggcacaacagaaaggggtagaaggaacttgggttgatatctgcaataatcctgctatggaagctgaaatactgaaagaaattcgagaagctgcaaatgccatgaaattggagcgatttgaaattccaatcaaggttcgattaagcccagagccatggacccctgaaactggtttggtaactgatgctttcaaactgaaaaggaaggagctgaggaaccattacctcaaagacattgaacgaatgtatgggggcaaataaaatgttgttgtcttattgacagttgtgcaggaggtagcctggtggttttcaacctctagaattttaagcctttgttgaactgttagaatgtaaggtatatcattctaaagatagagtaaaaagaaaacaaaaccaaaagttattaaaattgttgtccggtttactttaacttagttttgcatagttctagtgcagctgaaattgaaaagttatttccctttagctgtgttattatagagcagaaattctgtttttaaaaattagcctaagatatacttgtttttgtaaagaaaaatatttaatgttgaacaaaataaattggagttggagtagaatgtagtttgaggaaatttgcagcttccaatgcctcttgtcttcctatttcagaagtttaaatattaagcatgacagaaaatatgtattaacactactcaaagcaaaagtgctgcagggctttaaaattctcttccaaccatttatcttgaaggaaaaattcaatagtaatataatacacaaaatcaaataataccttagaaggtattaagattataattgttgcataggttagatatagagtcattgtaatgttgtgaataattacagtgcctaaaataagaatagaacaacatatacaacaccaaaaaatatctagtaatatatttaaagggaaattgagctgctttttttgaaactttgagatctaaaaataactgtaattatttgaatgactaagaggaaagtacattttttgaaatgctgaaaattgcctttctgtgtttattcaaactgaaaagctgagaccaagagcaaggaaggtaaaaagttaacaggcaaacattttctcttagaaaaggtgataaaatcataagtatttggaattagaacccttgcacagcactgaacctgggaaagagatttaaactctgaatttatctttgataacagggattgattttaaaatgtacatgtattaaattacatttgtaatttaaggtctgtttgctgttgctgattttattcttgatcagtagtttgcatttcagaaagcctttcattttgctttaattttagcaaagcgggttataatgaatgacttccccaatatcttgcttgaacttacaggtgattaacttggatgagttttgggaagttaaagggaagaaaacactgttatcattttttcctgtttgggaagagcttagaaactggaaatactagatttgggagaagggcagagttacttgataagggactgatgtttgtgcagtaacttgggagtgtggtttctttttgaatctttaattaaaacctgggattatatatccctgataaatattcacacttgaaccatagttactgtaaaatgcaaaaaatcttaatactgttattctttgcactttttcttaatcattttttatatatatgcatatatatatgtgtgtgtgtgtgttgcttatgttgttttgtacagatgtgggccaccattgcaacaaaatacattctttttgctctaaaatatttatgaagaaaatacttaaatgttatgtatatggtggtaataagggaaaaatcaagtattataaacaagaatgaaggtttttgtaaagatttctgttcagcgttttgcaaggtaaaattttaggcaagttttccctgaagttatgtgtatgtgagtattctcattcttcccaacttgcctttgaagagtgaaataccattattatcaagtagactactgttcagcttttattcctgccctgctgtttatcccttaagaatgagtttcttagacttttccaatatgtgattttttttcccatttagaatggtgattttaaatgtgtgagtgcatgtactatcttatctcagatatttgcacccccaatctgcccccaactcccaaaagctagaacactgccaactgatctgttataggtcctttagaaacacataattaacacttaaggttgggtgctgctaattctttgcaaaaatccaaatattgttaagggaccagggagatgccactaccccttgattttccatctaaaaatatacatgtttatgtaaacaaatctttccatatccatagtgacttttcaagtatttaagcctaaagattttgatctcacatttttatacctgtttaaattgctcacagttattacatacacatcagccatcaactaaagttgtactttaaaaatttactacaatatgtacatttctaagtcaaacacttgtgacttttgctttaattccatgaatgttcctgcctccttgatatttgtatttattctttttttctctagagtagaggtataattgtgtgatatttcagaaatacagataaatgattcaaaaagtcacagttaaggagaatcatgtttctttgatcatgaataactgattagtaagtcttgcctatattttcctgatagcatatgacaaatgtttctaaggtaacaagatgagaacagataaagattgtgtggtgttttggatttggagagaaatattttaatttttaaatgcagttacaaattataatgtattcatatttgtactttctgttaaaatgcatgattgcagaattgtttagattttgtgtttattcttgatgaaaagctttgtttgttcttgtttttaagtttgcactcaaatcttaagaaataaatccacccatgttatcaa

SEQ ID NO: 455473 - DNA, 2292 bp, Homo sapiens
ggaattcccgcccggcccggccccgcgccccgcgcagccccgggcgccgcgcgtcctgcccggcctgcggcccagcccttgcgccgctcgtccgacccgcgatcgtccaccagaccgtgcctcccggccgcccggccgccccgcgtgcatgcttcggtctgggccagcctctgggccgtccgtccccactggccgggccatgccgagtcgccgcgtcgccagaccgccggctgcgccggagctgggggccttagggtcccccgacctctcctcactctcgctcgccgtttccaggagcacagatgaattggagatcatcgacgagtacatcaaggagaacggcttcggcctggacgggggacagccgggcccgggcgaggggctgccacgcctggtgtctcgcggggctgcgtccctgagcacggtcaccctgggccctgtggcgcccccagccacgccgccgccttggggctgccccctgggccgactagtgtccccagcgccgggcccgggcccgcagccgcacctggtcatcacggagcagcccaagcagcgcggcatgcgcttccgctacgagtgcgagggccgctcggccggcagcatccttggggagagcagcaccgaggccagcaagacgctgcccgccatcgagctccgggattgtggagggctgcgggaggtggaggtgactgcctgcctggtgtggaaggactggcctcaccgagtccacccccacagcctcgtggggaaagactgcaccgacggcatctgcagggtgcggctccggcctcacgtcagcccccggcacagttttaacaacctgggcatccagtgtgtgaggaagaaggagattgaggctgccattgagcggaagattcaactgggcattgacccctacaacgctgggtccctgaagaaccatcaggaagtagacatgaatgtggtgaggatctgcttccaggcctcatatcgggaccagcagggacagatgcgccggatggatcctgtgctttccgagcccgtctatgacaagaaatccacaaacacatcagagctgcggatttgccgaattaacaaggaaagcgggccgtgcaccggtggcgaggagctctacttgctctgcgacaaggtgcagaaagaggacatatcagtggtgttcagcagggcctcctgggaaggtcgggctgacttctcccaggccgacgtgcaccgccagattgccattgtgttcaagacgccgccctacgaggacctggagattgtcgagcccgtgacagtcaacgtcttcctgcagcggctcaccgatggggtctgcagcgagccattgcctttcacgtacctgcctcgcgaccatgacagctacggcgtggacaagaagcggaaacgggggatgcccgacgtccttggggagctgaacagctctgacccccatggcatcgagagcaaacggcggaagaaaaagccggccatcctggaccacttcctgcccaaccacggctcaggcccgttcctcccgccgtcagccctgctgccagaccctgacttcttctctggcaccgtgtccctgcccggcctggagccccctggcgggcctgacctcctggacgatggctttgcctacgaccctacggcccccacactcttcaccatgctggacctgctgcccccggcaccgccacacgctagcgctgttgtgtgcagcggaggtgccggggccgtggttggggagacccccggccctgaaccactgacactggactcgtaccaggccccgggccccggggatggaggcaccgccagccttgtgggcagcaacatgttccccaatcattaccgcgaggcggcctttgggggcggcctcctatccccggggcctgaagccacgtagccccgcgatgccagaggaggggcactgggtggggagggaggtggaggagccgtgcaatcccaaccaggatgtctagcacccccatccccttggcccttcctcatgcttctgaagtggacatattcagccttggcgagaagctccgttgcacgggtttccccttgagcccattttacagatgaggaaactgagtccggagaggaaaagggacatggctcccgtgcactagcttgttacagctgcctctgtccccacatgtgggggcaccttctccagtaggattcggaaaagattgtacatatgggaggagggggcagattcctggccctccctccccagacttgaaggtggggggtaggttggttgttcagagtcttcccaataaagatgagtttttgagcctc

SEQ ID NO: 455474 - DNA, 2466 bp, Homo sapiens
ggaattcccgcccggcccggccccgcgccccgcgcagccccgggcgccgcgcgtcctgcccggcctgcggcccagcccttgcgccgctcgtccgacccgcgatcgtccaccagaccgtgcctcccggccgcccggccgccccgcgtgcatgcttcggtctgggccagcctctgggccgtccgtccccactggccgggccatgccgagtcgccgcgtcgccagaccgccggctgcgccggagctgggggccttagggtcccccgacctctcctcactctcgctcgccgtttccaggagcacagatgaattggagatcatcgacgagtacatcaaggagaacggcttcggcctggacgggggacagccgggcccgggcgaggggctgccacgcctggtgtctcgcggggctgcgtccctgagcacggtcaccctgggccctgtggcgcccccagccacgccgccgccttggggctgccccctgggccgactagtgtccccagcgccgggcccgggcccgcagccgcacctggtcatcacggagcagcccaagcagcgcggcatgcgcttccgctacgagtgcgagggccgctcggccggcagcatccttggggagagcagcaccgaggccagcaagacgctgcccgccatcgagctccgggattgtggagggctgcgggaggtggaggtgactgcctgcctggtgtggaaggactggcctcaccgagtccacccccacagcctcgtggggaaagactgcaccgacggcatctgcagggtgcggctccggcctcacgtcagcccccggcacagttttaacaacctgggcatccagtgtgtgaggaagaaggagattgaggctgccattgagcggaagattcaactgggcattgacccctacaacgctgggtccctgaagaaccatcaggaagtagacatgaatgtggtgaggatctgcttccaggcctcatatcgggaccagcagggacagatgcgccggatggatcctgtgctttccgagcccgtctatgacaagaaatccacaaacacatcagagctgcggatttgccgaattaacaaggaaagcgggccgtgcaccggtggcgaggagctctacttgctctgcgacaaggtgcagaaagaggacatatcagtggtgttcagcagggcctcctgggaaggtcgggctgacttctcccaggccgacgtgcaccgccagattgccattgtgttcaagacgccgccctacgaggacctggagattgtcgagcccgtgacagtcaacgtcttcctgcagcggctcaccgatggggtctgcagcgagccattgcctttcacgtacctgcctcgcgaccatgacagctacggcgtggacaagaagcggaaacgggggatgcccgacgtccttggggagctgaacagctctgacccccatggcatcgagagcaaacggcggaagaaaaagccggccatcctggaccacttcctgcccaaccacggctcaggcccgttcctcccgccgtcagccctgctgccagaccctgacttcttctctggcaccgtgtccctgcccggcctggagccccctggcgggcctgacctcctggacgatggctttgcctacgaccctacggcccccacactcttcaccatgctggacctgctgcccccggcaccgccacacgctagcgctgttgtgtgcagcggaggtgccggggccgtggttggggagacccccggccctgaaccactgacactggactcgtaccaggccccgggccccggggatggaggcaccgccagccttgtgggcagcaacatgttccccaatcattaccgcgaggcggcctttgggggcggcctcctatccccggggcctgaagccacgtagccccgcgatgccagaggaggggcactgggtggggagggaggtggaggagccgtgcaatcccaaccaggatgtctagcacccccatccccttggcccttcctcatgcttctgaagtggacatattcagccttggcgagaagctccgttgcacgggtttccccttgagcccattttacagatgaggaaactgagtccggagaggaaaagggacatggctcccgtgcactagcttgttacagctgcctctgtccccacatgtgggggcaccttctccagtaggattcggaaaagattgtacatatgggaggagggggcagattcctggccctccctccccagacttgaaggtggggggtaggttggttgttcagagtcttcccaataaagatgagtttttgagcctccggggtttcgtctgttctgggcttgggaaacgccctagtcccttagtagcaaagaaagcctccaggctgggggctcaggcctgtcatcccagcactttgggagccaccccacagagagagcgcaccccacagagagagcgtcccccacagagagaacgtcgggccagctcatca

SEQ ID NO: 455475 - DNA, 998 bp, Homo sapiens
ggaattcccgcccggcccggccccgcgccccgcgcagccccgggcgccgcgcgtcctgcccggcctgcggcccagcccttgcgccgctcgtccgacccgcgatcgtccaccagaccgtgcctcccggccgcccggccgccccgcgtgcatgcttcggtctgggccagcctctgggccgtccgtccccactggccgggccatgccgagtcgccgcgtcgccagaccgccggctgcgccggagctgggggccttagggtcccccgacctctcctcactctcgctcgccgtttccaggagcacagatgaattggagatcatcgacgagtacatcaaggagaacggcttcggcctggacgggggacagccgggcccgggcgaggggctgccacgcctggtgtctcgcggggctgcgtccctgagcacggtcaccctgggccctgtggcgcccccagccacgccgccgccttggggctgccccctgggccgactagtgtccccagcgccgggcccgggcccgcagccgcacctggtcatcacggagcagcccaagcagcgcggcatgcgcttccgctacgagtgcgagggccgctcggccggcagcatccttggggagagcagcaccgaggccagcaagacgctgcccgccatcgagctccgggattgtggagggctgcgggaggtggaggtgactgcctgcctggtgtggaaggactggcctcaccgagtccacccccacagcctcgtggggaaagactgcaccgacggcatctgcagggtgcggctccggcctcacgtcagcccccggcacagttaacaactgggcatcagtgttgaagaacaaggggatcggggtgcattgagcggagatcaaggggcatgacccacaggtgggccggagacatcagagtagacatacgggtcagatcgccaggcaaacggacgagggcaacccgaggacgggccgcgcgagaaagccaggtcacggcgaggaaaagaag

SEQ ID NO: 455476 - DNA, 1402 bp, Homo sapiens
aaaattttaaaaagggggaatattagtcttgattttaggggaggctgggcaagttgggagcacagtggtccagatgtcctggcttagctgatgtcccccgtttcctgccagaggacatatcagtggtgttcagcagggcctcctgggaaggtcgggctgacttctcccaggccgacgtgcaccgccagattgccattgtgttcaagacgccgccctacgaggacctggagattgtcgagcccgtgacagtcaacgtcttcctgcagcggctcaccgatggggtctgcagcgagccattgcctttcacgtacctgcctcgcgaccatgacagctacggcgtggacaagaagcggaaacgggggatgcccgacgtccttggggagctgaacagctctggtgtgtgccctctgcccctttccacccccatccccaggttctggggaggggacagctgaccccactgccctgtcccaccccaggctggggaggaagggctgtcggggaacaggggtcctcatctctgccttccctcagacccccatggcatcgagagcaaacggcggaagaaaaagccggccatcctggaccacttcctgcccaaccacggctcaggcccgttcctcccgccgtcagccctgctgccagaccctgacttcttctctggcaccgtgtccctgcccggcctggagccccctggcgggcctgacctcctggacgatggctttgcctacgaccctacggcccccacactcttcaccatgctggacctgctgcccccggcaccgccacacgctagcgctgttgtgtgcagcggaggtgccggggccgtggttggggagacccccggccctgaaccactgacactggactcgtaccaggccccgggccccggggatggaggcaccgccagccttgtgggcagcaacatgttccccaatcattaccgcgaggcggcctttgggggcggcctcctatccccggggcctgaagccacgtagccccgcgatgccagaggaggggcactgggtggggagggaggtggaggagccgtgcaatcccaaccaggatgtctagcacccccatccccttggcccttcctcatgcttctgaagtggacatattcagccttggcgagaagctccgttgcacgggtttccccttgagcccattttacagatgaggaaactgagtccggagaggaaaagggacatggctcccgtgcactagcttgttacagctgcctctgtccccacatgtgggggcaccttctccagtaggattcggaaaagattgtacatatgggaggagggggcagattcctggccctccctccccagacttgaaggtggggggtaggttggttgttcagagtcttcccaataaagatgagtttttgagcctc

SEQ ID NO: 455477 - DNA, 278 bp, Homo sapiens
atttttctcatgtataaaactaggaatcctctatcacaggagcctggttggaggattcctagttttatacatgagaaatagaatgcagatttctctgaagagtgtttaaagaaggaatggtagttgagggggcttatttcccaggctcctgtgatagagttcttttaagcccaagattttttatttgagggttttttgttttttaaaaaaaaattgaacaaagactactaatgactttgtttgaattatccacatgaaaataaagagccatagtttca

SEQ ID NO: 455478 - DNA, 1791 bp, Homo sapiens
  misc_feature (1491)..(1491): n is a, c, g, or t
acccacgtgggggctcagcgtgcacccttctttgtgctcgggttaggaggagctaggctgccatcgggccggtgcagatacggggttgctcttttgctcataagaggggcttcgctggcagtctgaacggcaagcttgagtcaggacccttaattaagatcctcaattggctggagggcagatctcgcgagtagggcaacgcggtaaaaatattgcttcggtgggtgacgcggtacagctgcccaagggcgttcgtaacgggaatgccgaagcgtgggaaaaagggagcggtggcggaagacggggatgagctcaggacagagccagaggccaagaagagtaagacggccgcaaagaaaaatgacaaagaggcagcaggagagggcccagccctgtatgaggaccccccagatcagaaaacctcacccagtggcaaacctgccacactcaagatctgctcttggaatgtggatgggcttcgagcctggattaagaagaaaggattagattgggtaaaggaagaagccccagatatactgtgccttcaagagaccaaatgttcagagaacaaactaccagctgaacttcaggagctgcctggactctctcatcaatactggtcagctccttcggacaaggaagggtacagtggcgtgggcctgctttcccgccagtgcccactcaaagtttcttacggcataggcgatgaggagcatgatcaggaaggccgggtgattgtggctgaatttgactcgtttgtgctggtaacagcatatgtacctaatgcaggccgaggtctggtacgactggagtaccggcagcgctgggatgaagcctttcgcaagttcctgaagggcctggcttcccgaaagccccttgtgctgtgtggagacctcaatgtggcacatgaagaaattgaccttcgcaaccccaaggggaacaaaaagaatgctggcttcacgccacaagagcgccaaggcttcggggaattactgcaggctgtgccactggctgacagctttaggcacctctaccccaacacaccctatgcctacaccttttggacttatatgatgaatgctcgatccaagaatgttggttggcgccttgattactttttgttgtcccactctctgttacctgcattgtgtgacagcaagatccgttccaaggccctcggcagtgatcactgtcctatcaccctatacctagcactgtgacaccacccctaaatcactttgagcctgggaaataagccccctcaactaccattccttctttaaacactcttcagagaaatctgcattctatttctcatgtataaaactaggaatcctccaaccaggctcctgtgatagagttcttttaagcccaagattttttatttgagggttttttgttttttaaaaaaaaattgaacaaagactactaatgactttgtttgaattatccacatgaaaataaagagccatagtttcaaaaaaaaaaaanaaaaaaaaaaaaaaaaaaaaaaaaaaaaaaaaaaaaaaaaaaaaagagaaagagagaagagagaaaaaaagaaaaaaaaaaagagagaaaaagaacaaaagcaacaaaaaagagtaacgacactcaaagaagctacacacaactgcataacagcaacggcaaatgcctactgtaccaacccaccgcgaaccgcgataacccttacacccaaaaccccaacccgcgccggaccaccggcccccaccctactgccacaccccgcccccccccccgcccccacccatcccaccacaggagcga

SEQ ID NO: 455479 - DNA, 1541 bp, Homo sapiens
acccacgtgggggctcagcgtgcacccttctttgtgctcgggttaggaggagctaggctgccatcgggccggtgcagatacggggttgctcttttgctcataagaggggcttcgctggcagtctgaacggcaagcttgagtcaggacccttaattaagatcctcaattggctggagggcagatctcgcgagtagggcaacgcggtaaaaatattgcttcggtgggtgacgcggtacagctgcccaagggcgttcgtaacgggaatgccgaagcgtgggaaaaagggagcggtggcggaagacggggatgagctcaggacagagccagaggccaagaagagtaagacggccgcaaagaaaaatgacaaagaggcagcaggagagggcccagccctgtatgaggaccccccagatcagaaaacctcacccagtggcaaacctgccacactcaagatctgctcttggaatgtggatgggcttcgagcctggattaagaagaaaggattagattgggtaaaggaagaagccccagatatactgtgccttcaagagaccaaatgttcagagaacaaactaccagctgaacttcaggagctgcctggactctctcatcaatactggtcagctccttcggacaaggaagggtacagtggcgtgggcctgctttcccgccagtgcccactcaaagtttcttacggcataggcgatgaggagcatgatcaggaaggccgggtgattgtggctgaatttgactcgtttgtgctggtaacagcatatgtacctaatgcaggccgaggtctggtacgactggagtaccggcagcgctgggatgaagcctttcgcaagttcctgaagggcctggcttcccgaaagccccttgtgctgtgtggagacctcaatgtggcacatgaagaaattgaccttcgcaaccccaaggggaacaaaaagaatgctggcttcacgccacaagagcgccaaggcttcggggaattactgcaggctgtgccactggctgacagctttaggcacctctaccccaacacaccctatgcctacaccttttggacttatatgatgaatgctcgatccaagaatgttggttggcgccttgattactttttgttgtcccactctctgttacctgcattgtgtgacagcaagatccgttccaaggccctcggcagtgatcactgtcctatcaccctatacctagcactgtgacaccacccctaaatcactttgagcctgggaaataagccccctcaactaccattccttctttaaacactcttcagagaaatctgcattctatttctcatgtataaaactaggaatcctccaaccaggctcctgtgatagagttcttttaagcccaagattttttatttgagggttttttgttttttaaaaaaaaattgaacaaagactactaatgactttgtttgaattatccacatgaaaataaagagccatagtttcaaaaaaaaaaaacactggcccgcggttaccaccgggggactgggccctggcgtacccctttcc

SEQ ID NO: 455480 - DNA, 1423 bp, Homo sapiens
acccacgtgggggctcagcgtgcacccttctttgtgctcgggttaggaggagctaggctgccatcgggccggtgcagatacggggttgctcttttgctcataagaggggcttcgctggcagtctgaacggcaagcttgagcaacgcggtaaaaatattgcttcggtgggtgacgcggtacagctgcccaagggcgttcgtaacgggaatgccgaagcgtgggaaaaagggagcggtggcggaagacggggatgagctcaggacagagccagaggccaagaagagtaagacggccgcaaagaaaaatgacaaagaggcagcaggagagggcccagccctgtatgaggaccccccagatcagaaaacctcacccagtggcaaacctgccacactcaagatctgctcttggaatgtggatgggcttcgagcctggattaagaagaaaggattagattgggtaaaggaagaagccccagatatactgtgccttcaagagaccaaatgttcagagaacaaactaccagctgaacttcaggagctgcctggactctctcatcaatactggtcagctccttcggacaaggaagggtacagtggcgtgggcctgctttcccgccagtgcccactcaaagtttcttacggcataggcgatgaggagcatgatcaggaaggccgggtgattgtggctgaatttgactcgtttgtgctggtaacagcatatgtacctaatgcaggccgaggtctggtacgactggagtaccggcagcgctgggatgaagcctttcgcaagttcctgaagggcctggcttcccgaaagccccttgtgctgtgtggagacctcaatgtggcacatgaagaaattgaccttcgcaaccccaaggggaacaaaaagaatgctggcttcacgccacaagagcgccaaggcttcggggaattactgcaggctgtgccactggctgacagctttaggcacctctaccccaacacaccctatgcctacaccttttggacttatatgatgaatgctcgatccaagaatgttggttggcgccttgattactttttgttgtcccactctctgttacctgcattgtgtgacagcaagatccgttccaaggccctcggcagtgatcactgtcctatcaccctatacctagcactgtgacaccacccctaaatcactttgagcctgggaaataagccccctcaactaccattccttctttaaacactcttcagagaaatctgcattctatttctcatgtataaaactaggaatcctccaaccaggctcctgtgatagagttcttttaagcccaagattttttatttgagggttttttgttttttaaaaaaaaattgaacaaagactactaatgactttgtttgaattatccacatgaaaataaagagccatagtttca

SEQ ID NO: 455481 - DNA, 1454 bp, Homo sapiens
gagctcgaagtttgtaactcactaggtctaggttttcaccgtgtcagatcgtatacggggttgctcttttgctcataagaggggcttcgctggcagtctgaacggcaagcttgagtcaggacccttaattaagatcctcaattggctggagggcagatctcgcgagtagggcaacgcggtaaaaatattgcttcggtgggtgacgcggtacagctgcccaagggcgttcgtaacgggaatgccgaagcgtgggaaaaagggagcggtggcggaagacggggatgagctcaggacagagccagaggccaagaagagtaagacggccgcaaagaaaaatgacaaagaggcagcaggagagggcccagccctgtatgaggaccccccagatcagaaaacctcacccagtggcaaacctgccacactcaagatctgctcttggaatgtggatgggcttcgagcctggattaagaagaaaggattagattgggtaaaggaagaagccccagatatactgtgccttcaagagaccaaatgttcagagaacaaactaccagctgaacttcaggagctgcctggactctctcatcaatactggtcagctccttcggacaaggaagggtacagtggcgtgggcctgctttcccgccagtgcccactcaaagtttcttacggcataggcgatgaggagcatgatcaggaaggccgggtgattgtggctgaatttgactcgtttgtgctggtaacagcatatgtacctaatgcaggccgaggtctggtacgactggagtaccggcagcgctgggatgaagcctttcgcaagttcctgaagggcctggcttcccgaaagccccttgtgctgtgtggagacctcaatgtggcacatgaagaaattgaccttcgcaaccccaaggggaacaaaaagaatgctggcttcacgccacaagagcgccaaggcttcggggaattactgcaggctgtgccactggctgacagctttaggcacctctaccccaacacaccctatgcctacaccttttggacttatatgatgaatgctcgatccaagaatgttggttggcgccttgattactttttgttgtcccactctctgttacctgcattgtgtgacagcaagatccgttccaaggccctcggcagtgatcactgtcctatcaccctatacctagcactgtgacaccacccctaaatcactttgagcctgggaaataagccccctcaactaccattccttctttaaacactcttcagagaaatctgcattctatttctcatgtataaaactaggaatcctccaaccaggctcctgtgatagagttcttttaagcccaagattttttatttgagggttttttgttttttaaaaaaaaattgaacaaagactactaatgactttgtttgaattatccacatgaaaataaagagccatagtttca

SEQ ID NO: 455482 - DNA, 1418 bp, Homo sapiens
acccacgtgggggctcagcgtgcacccttctttgtgctcgggttaggaggagctaggctgccatcgggccggtgcagatacggggttgctcttttgctcataagaggggcttcgctggcagtctgaacggcaagcttgagtcaggacccttaattaagatcctcaattggctggagggcagatctcgcgagtagggcaacgcggtaaaaatattgcttcggtgggtgacgcggtacagctgcccaagggcgttcgtaacgggaatgccgaagcgtgggaaaaagggagcggtggcggaagacggggatgagctcaggacagagccagaggccaagaagagtaagacggccgcaaagaaaaatgacaaagaggcagcaggagagggcccagccctgtatgaggaccccccagatcagaaaacctcacccagtggcaaacctgccacactcaagatctgctcttggaatgtggatgggcttcgagcctggattaagaagaaaggattagattgggtaaaggaagaagccccagatatactgtgccttcaagagaccaaatgttcagagaacaaactaccagctgaacttcaggagctgcctggactctctcatcaatactggtcagctccttcggacaaggaagggtacagtggcgtgggcctgctttcccgccagtgcccactcaaagtttcttacggcataggcgatgaggagcatgatcaggaaggccgggtgattgtggctgaatttgactcgtttgtgctggtaacagcatatgtacctaatgcaggccgaggtctggtacgactggagtaccggcagcgctgggatgaagcctttcgcaagttcctgaagggcctggcttcccgaaagccccttgtgctgtgtggagacctcaatgtggcacatgaagaaattgaccttcgcaaccccaaggggaacaaaaagaatgctggcttcacgccacaagagcgccaaggcttcggggaattactgcaggctgtacttatatgatgaatgctcgatccaagaatgttggttggcgccttgattactttttgttgtcccactctctgttacctgcattgtgtgacagcaagatccgttccaaggccctcggcagtgatcactgtcctatcaccctatacctagcactgtgacaccacccctaaatcactttgagcctgggaaataagccccctcaactaccattccttctttaaacactcttcagagaaatctgcattctatttctcatgtataaaactaggaatcctccaaccaggctcctgtgatagagttcttttaagcccaagattttttatttgagggttttttgttttttaaaaaaaaattgaacaaagactactaatgactttgtttgaattatccacatgaaaataaagagccatagtttca

SEQ ID NO: 455483 - DNA, 1295 bp, Homo sapiens
  misc_feature (1178)..(1179): n is a, c, g, or t
  misc_feature (1182)..(1182): n is a, c, g, or t
  misc_feature (1184)..(1184): n is a, c, g, or t
  misc_feature (1186)..(1186): n is a, c, g, or t
  misc_feature (1193)..(1193): n is a, c, g, or t
  misc_feature (1195)..(1195): n is a, c, g, or t
  misc_feature (1206)..(1206): n is a, c, g, or t
  misc_feature (1219)..(1219): n is a, c, g, or t
  misc_feature (1222)..(1222): n is a, c, g, or t
  misc_feature (1227)..(1227): n is a, c, g, or t
  misc_feature (1238)..(1238): n is a, c, g, or t
acccacgtgggggctcagcgtgcacccttctttgtgctcgggttaggaggagctaggctgccatcgggccggtgcagatacggggttgctcttttgctcataagaggggcttcgctggcagtctgaacggcaagcttgagtcaggacccttaattaagatcctcaattggctggagggcagatctcgcgagtagggcaacgcggtaaaaatattgcttcggtgggtgacgcggtacagctgcccaagggcgttcgtaacgggaatgccgaagcgtgggaaaaagggagcggtggcggaagacggggatgagctcaggacagagccagaggccaagaagagtaagacggccgcaaagaaaaatgacaaagaggcagcaggagagggcccagccctgtatgaggaccccccagatcagaaaacctcacccagtggcaaacctgccacactcaagatctgctcttggaatgtggatgggcttcgagcctggattaagaagaaaggattagattgggtaaaggaagaagccccagatatactgtgccttcaagagaccaaatgttcagagaacaaactaccagctgaacttcaggagctgcctggactctctcatcaatactggtcagctccttcggacaaggaagggtacagtggcgtgggcctgctttcccgccagtgcccactcaaagtttcttacggcataggcgatgaggagcatgatcaggaaggccgggtgattgtggctgaatttgactcgtttgtgctggtaacagcatatgtacctaatgcaggccgaggtctggtacgactggagtaccggcagcgctgggatgaagcctttcgcaagttcctgaagggcctggcttcccgaaagccccttgtgctgtgtggagacctcaatgtggcacatgaagaaattgaccttcgcaaccccaaggggaacaaaaagaatgctggcttcacgccacaagagcgccaaggcttcggggaattactgcaggctgtgccactggctgacagctttaggcacctctaccccaacacaccctatgcctacaccttttggacttatatgatgaatgctcgatccaagaatgttggttggcgccttgattactttttgttgtcccactctctgttacctgcattgtgtgacagcaagatccgttccaaggcaagnnagncnanactaacnanggaacaccaanattgacgggaaanccnaaaanttttaactcanaaaggttttcgttaaaggaccacagggcgtggagtaccgcatgggggtaaaggaccg

SEQ ID NO: 455484 - DNA, 1662 bp, Homo sapiens
acccacgtgggggctcagcgtgcacccttctttgtgctcgggttaggaggagctaggctgccatcgggccggtgcagatacggggttgctcttttgctcataagaggggcttcgctggcagtctgaacggcaagcttgagtcaggacccttaattaagatcctcaattggctggagggcagatctcgcgagtagggtacaaggcactatgaaatgatctagtttcgtgggtgaggggctgaagggcctatgatgcacggaggcggggaaaggatttagagataacgtggtttgaaaggcgggacctggtgcggggacgctcttgggaggagtcttctccccagccttagctggtttcatgatttctttgcgtctgtaggcaacgcggtaaaaatattgcttcggtgggtgacgcggtacagctgcccaagggcgttcgtaacgggaatgccgaagcgtgggaaaaagggagcggtggcggaagacggggatgagctcaggacagagccagaggccaagaagagtaagacggccgcaaagaaaaatgacaaagaggcagcaggagagggcccagccctgtatgaggaccccccagatcagaaaacctcacccagtggcaaacctgccacactcaagatctgctcttggaatgtggatgggcttcgagcctggattaagaagaaaggattagattgggtaaaggaagaagccccagatatactgtgccttcaagagaccaaatgttcagagaacaaactaccagctgaacttcaggagctgcctggactctctcatcaatactggtcagctccttcggacaaggaagggtacagtggcgtgggcctgctttcccgccagtgcccactcaaagtttcttacggcataggcgatgaggagcatgatcaggaaggccgggtgattgtggctgaatttgactcgtttgtgctggtaacagcatatgtacctaatgcaggccgaggtctggtacgactggagtaccggcagcgctgggatgaagcctttcgcaagttcctgaagggcctggcttcccgaaagccccttgtgctgtgtggagacctcaatgtggcacatgaagaaattgaccttcgcaaccccaaggggaacaaaaagaatgctggcttcacgccacaagagcgccaaggcttcggggaattactgcaggctgtgccactggctgacagctttaggcacctctaccccaacacaccctatgcctacaccttttggacttatatgatgaatgctcgatccaagaatgttggttggcgccttgattactttttgttgtcccactctctgttacctgcattgtgtgacagcaagatccgttccaaggccctcggcagtgatcactgtcctatcaccctatacctagcactgtgacaccacccctaaatcactttgagcctgggaaataagccccctcaactaccattccttctttaaacactcttcagagaaatctgcattctatttctcatgtataaaactaggaatcctccaaccaggctcctgtgatagagttcttttaagcccaagattttttatttgagggttttttgttttttaaaaaaaaattgaacaaagactactaatgactttgtttgaattatccacatgaaaataaagagccatagtttca

SEQ ID NO: 455485 - DNA, 1321 bp, Homo sapiens
acccacgtgggggctcagcgtgcacccttctttgtgcgcaacgcggtaaaaatattgcttcggtgggtgacgcggtacagctgcccaagggcgttcgtaacgggaatgccgaagcgtgggaaaaagggagcggtggcggaagacggggatgagctcaggacagagccagaggccaagaagagtaagacggccgcaaagaaaaatgacaaagaggcagcaggagagggcccagccctgtatgaggaccccccagatcagaaaacctcacccagtggcaaacctgccacactcaagatctgctcttggaatgtggatgggcttcgagcctggattaagaagaaaggattagattgggtaaaggaagaagccccagatatactgtgccttcaagagaccaaatgttcagagaacaaactaccagctgaacttcaggagctgcctggactctctcatcaatactggtcagctccttcggacaaggaagggtacagtggcgtgggcctgctttcccgccagtgcccactcaaagtttcttacggcataggcgatgaggagcatgatcaggaaggccgggtgattgtggctgaatttgactcgtttgtgctggtaacagcatatgtacctaatgcaggccgaggtctggtacgactggagtaccggcagcgctgggatgaagcctttcgcaagttcctgaagggcctggcttcccgaaagccccttgtgctgtgtggagacctcaatgtggcacatgaagaaattgaccttcgcaaccccaaggggaacaaaaagaatgctggcttcacgccacaagagcgccaaggcttcggggaattactgcaggctgtgccactggctgacagctttaggcacctctaccccaacacaccctatgcctacaccttttggacttatatgatgaatgctcgatccaagaatgttggttggcgccttgattactttttgttgtcccactctctgttacctgcattgtgtgacagcaagatccgttccaaggccctcggcagtgatcactgtcctatcaccctatacctagcactgtgacaccacccctaaatcactttgagcctgggaaataagccccctcaactaccattccttctttaaacactcttcagagaaatctgcattctatttctcatgtataaaactaggaatcctccaaccaggctcctgtgatagagttcttttaagcccaagattttttatttgagggttttttgttttttaaaaaaaaattgaacaaagactactaatgactttgtttgaattatccacatgaaaataaagagccatagtttca

SEQ ID NO: 455486 - DNA, 1488 bp, Homo sapiens
gagctcgaagtttgtaactcactaggtctaggttttcaccgtgtcagatcgtatacggggttgctcttttgctcataagaggggcttcgctggcagtctgaacggcaagcttgagtcaggacccttaattaagatcctcaattggctggagggcagatctcgcgagtagggtacaaggcactatgaaatgatctagtttcgtgggcaacgcggtaaaaatattgcttcggtgggtgacgcggtacagctgcccaagggcgttcgtaacgggaatgccgaagcgtgggaaaaagggagcggtggcggaagacggggatgagctcaggacagagccagaggccaagaagagtaagacggccgcaaagaaaaatgacaaagaggcagcaggagagggcccagccctgtatgaggaccccccagatcagaaaacctcacccagtggcaaacctgccacactcaagatctgctcttggaatgtggatgggcttcgagcctggattaagaagaaaggattagattgggtaaaggaagaagccccagatatactgtgccttcaagagaccaaatgttcagagaacaaactaccagctgaacttcaggagctgcctggactctctcatcaatactggtcagctccttcggacaaggaagggtacagtggcgtgggcctgctttcccgccagtgcccactcaaagtttcttacggcataggcgatgaggagcatgatcaggaaggccgggtgattgtggctgaatttgactcgtttgtgctggtaacagcatatgtacctaatgcaggccgaggtctggtacgactggagtaccggcagcgctgggatgaagcctttcgcaagttcctgaagggcctggcttcccgaaagccccttgtgctgtgtggagacctcaatgtggcacatgaagaaattgaccttcgcaaccccaaggggaacaaaaagaatgctggcttcacgccacaagagcgccaaggcttcggggaattactgcaggctgtgccactggctgacagctttaggcacctctaccccaacacaccctatgcctacaccttttggacttatatgatgaatgctcgatccaagaatgttggttggcgccttgattactttttgttgtcccactctctgttacctgcattgtgtgacagcaagatccgttccaaggccctcggcagtgatcactgtcctatcaccctatacctagcactgtgacaccacccctaaatcactttgagcctgggaaataagccccctcaactaccattccttctttaaacactcttcagagaaatctgcattctatttctcatgtataaaactaggaatcctccaaccaggctcctgtgatagagttcttttaagcccaagattttttatttgagggttttttgttttttaaaaaaaaattgaacaaagactactaatgactttgtttgaattatccacatgaaaataaagagccatagtttca

SEQ ID NO: 455487 - DNA, 1872 bp, Homo sapiens
acccacgtgggggctcagcgtgcacccttctttgtgctcgggttaggaggagctaggctgccatcgggccggtgcagatacggggttgctcttttgctcataagaggggcttcgctggcagtctgaacggcaagcttgagtcaggacccttaattaagatcctcaattggctggagggcagatctcgcgagtagggtacaaggcactatgaaatgatctagtttcgtgggtgaggggctgaagggcctatgatgcacggaggcggggaaaggatttagagataacgtggtttgaaaggcgggacctggtgcggggacgctcttgggaggagtcttctccccagccttagctggtttcatgatttctttgcgtctgtaggcaacgcggtaaaaatattgcttcggtgggtgacgcggtacagctgcccaagggcgttcgtaacgggaatgccgaagcgtgggaaaaagggagcggtggcggaagacggggatgagctcaggacaggtaagggaatgaaatcagcccttcttcctagaagctgcggcgggggtgtttgtcattcccttgatgtacggtaagtacgggccgactcatttttgcaggggtttgtgaagaagtcgcaggaaccgtaggctttcgttgggtctatagttaacgccggatcgcagttggaaaccaccagctttttgtcagtatatattactcattttatagagccagaggccaagaagagtaagacggccgcaaagaaaaatgacaaagaggcagcaggagagggcccagccctgtatgaggaccccccagatcagaaaacctcacccagtggcaaacctgccacactcaagatctgctcttggaatgtggatgggcttcgagcctggattaagaagaaaggattagattgggtaaaggaagaagccccagatatactgtgccttcaagagaccaaatgttcagagaacaaactaccagctgaacttcaggagctgcctggactctctcatcaatactggtcagctccttcggacaaggaagggtacagtggcgtgggcctgctttcccgccagtgcccactcaaagtttcttacggcataggcgatgaggagcatgatcaggaaggccgggtgattgtggctgaatttgactcgtttgtgctggtaacagcatatgtacctaatgcaggccgaggtctggtacgactggagtaccggcagcgctgggatgaagcctttcgcaagttcctgaagggcctggcttcccgaaagccccttgtgctgtgtggagacctcaatgtggcacatgaagaaattgaccttcgcaaccccaaggggaacaaaaagaatgctggcttcacgccacaagagcgccaaggcttcggggaattactgcaggctgtgccactggctgacagctttaggcacctctaccccaacacaccctatgcctacaccttttggacttatatgatgaatgctcgatccaagaatgttggttggcgccttgattactttttgttgtcccactctctgttacctgcattgtgtgacagcaagatccgttccaaggccctcggcagtgatcactgtcctatcaccctatacctagcactgtgacaccacccctaaatcactttgagcctgggaaataagccccctcaactaccattccttctttaaacactcttcagagaaatctgcattctatttctcatgtataaaactaggaatcctccaaccaggctcctgtgatagagttcttttaagcccaagattttttatttgagggttttttgttttttaaaaaaaaattgaacaaagactactaatgactttgtttgaattatccacatgaaaataaagagccatagtttca

SEQ ID NO: 455488 - DNA, 1425 bp, Homo sapiens
acccacgtgggggctcagcgtgcacccttctttgtgctcgggttaggaggagctaggctgccatcgggccggtgcagatacggggttgctcttttgctcataagaggggcttcgctggcagtctgaacggcaagcttgagtcaggacccttaattaagatcctcaattggctggagggcagatctcgcgagtagggcaacgcggtaaaaatattgcttcggtgggtgacgcggtacagctgcccaagggcgttcgtaacgggaatgccgaagcgtgggaaaaagggagcggtggcggaagacggggatgagctcaggacagagccagaggccaagaagagtaagacggccgcaaagaaaaatgacaaagaggcagcaggagagggcccagccctgtatgaggaccccccagatcaggatgggcttcgagcctggattaagaagaaaggattagattgggtaaaggaagaagccccagatatactgtgccttcaagagaccaaatgttcagagaacaaactaccagctgaacttcaggagctgcctggactctctcatcaatactggtcagctccttcggacaaggaagggtacagtggcgtgggcctgctttcccgccagtgcccactcaaagtttcttacggcataggcgatgaggagcatgatcaggaaggccgggtgattgtggctgaatttgactcgtttgtgctggtaacagcatatgtacctaatgcaggccgaggtctggtacgactggagtaccggcagcgctgggatgaagcctttcgcaagttcctgaagggcctggcttcccgaaagccccttgtgctgtgtggagacctcaatgtggcacatgaagaaattgaccttcgcaaccccaaggggaacaaaaagaatgctggcttcacgccacaagagcgccaaggcttcggggaattactgcaggctgtgccactggctgacagctttaggcacctctaccccaacacaccctatgcctacaccttttggacttatatgatgaatgctcgatccaagaatgttggttggcgccttgattactttttgttgtcccactctctgttacctgcattgtgtgacagcaagatccgttccaaggccctcggcagtgatcactgtcctatcaccctatacctagcactgtgacaccacccctaaatcactttgagcctgggaaataagccccctcaactaccattccttctttaaacactcttcagagaaatctgcattctatttctcatgtataaaactaggaatcctccaaccaggctcctgtgatagagttcttttaagcccaagattttttatttgagggttttttgttttttaaaaaaaaattgaacaaagactactaatgactttgtttgaattatccacatgaaaataaagagccatagtttca

SEQ ID NO: 455489 - DNA, 1803 bp, Homo sapiens
gagctcgaagtttgtaactcactaggtctaggttttcaccgtgtcagatcgtatacggggttgctcttttgctcataagaggggcttcgctggcagtctgaacggcaagcttgagtcaggacccttaattaagatcctcaattggctggagggcagatctcgcgagtagggtacaaggcactatgaaatgatctagtttcgtgggtgaggggctgaagggcctatgatgcacggaggcggggaaaggatttagagataacgtggtttgaaaggcgggacctggtgcggggacgctcttgggaggagtcttctccccagccttagctggtttcatgatttctttgcgtctgtaggcaacgcggtaaaaatattgcttcggtgggtgacgcggtacagctgcccaagggcgttcgtaacgggaatgccgaagcgtgggtaagggaatgaaatcagcccttcttcctagaagctgcggcgggggtgtttgtcattcccttgatgtacggtaagtacgggccgactcatttttgcaggggtttgtgaagaagtcgcaggaaccgtaggctttcgttgggtctatagttaacgccggatcgcagttggaaaccaccagctttttgtcagtatatattactcattttatagagccagaggccaagaagagtaagacggccgcaaagaaaaatgacaaagaggcagcaggagagggcccagccctgtatgaggaccccccagatcagaaaacctcacccagtggcaaacctgccacactcaagatctgctcttggaatgtggatgggcttcgagcctggattaagaagaaaggattagattgggtaaaggaagaagccccagatatactgtgccttcaagagaccaaatgttcagagaacaaactaccagctgaacttcaggagctgcctggactctctcatcaatactggtcagctccttcggacaaggaagggtacagtggcgtgggcctgctttcccgccagtgcccactcaaagtttcttacggcataggcgatgaggagcatgatcaggaaggccgggtgattgtggctgaatttgactcgtttgtgctggtaacagcatatgtacctaatgcaggccgaggtctggtacgactggagtaccggcagcgctgggatgaagcctttcgcaagttcctgaagggcctggcttcccgaaagccccttgtgctgtgtggagacctcaatgtggcacatgaagaaattgaccttcgcaaccccaaggggaacaaaaagaatgctggcttcacgccacaagagcgccaaggcttcggggaattactgcaggctgtgccactggctgacagctttaggcacctctaccccaacacaccctatgcctacaccttttggacttatatgatgaatgctcgatccaagaatgttggttggcgccttgattactttttgttgtcccactctctgttacctgcattgtgtgacagcaagatccgttccaaggccctcggcagtgatcactgtcctatcaccctatacctagcactgtgacaccacccctaaatcactttgagcctgggaaataagccccctcaactaccattccttctttaaacactcttcagagaaatctgcattctatttctcatgtataaaactaggaatcctccaaccaggctcctgtgatagagttcttttaagcccaagattttttatttgagggttttttgttttttaaaaaaaaattgaacaaagactactaatgactttgtttgaattatccacatgaaaataaagagccatagtttca

SEQ ID NO: 455490 - DNA, 1389 bp, Homo sapiens
acccacgtgggggctcagcgtgcacccttctttgtgctcgggttaggaggagctaggctgccatcgggccggtgcagatacggggttgctcttttgctcataagaggggcttcgctggcagtctgaacggcaagcttgagtcaggacccttaattaagatcctcaattggctggagggcagatctcgcgagtaggctgcggcgggggtgtttgtcattcccttgatgtacgagccagaggccaagaagagtaagacggccgcaaagaaaaatgacaaagaggcagcaggagagggcccagccctgtatgaggaccccccagatcagaaaacctcacccagtggcaaacctgccacactcaagatctgctcttggaatgtggatgggcttcgagcctggattaagaagaaaggattagattgggtaaaggaagaagccccagatatactgtgccttcaagagaccaaatgttcagagaacaaactaccagctgaacttcaggagctgcctggactctctcatcaatactggtcagctccttcggacaaggaagggtacagtggcgtgggcctgctttcccgccagtgcccactcaaagtttcttacggcataggcgatgaggagcatgatcaggaaggccgggtgattgtggctgaatttgactcgtttgtgctggtaacagcatatgtacctaatgcaggccgaggtctggtacgactggagtaccggcagcgctgggatgaagcctttcgcaagttcctgaagggcctggcttcccgaaagccccttgtgctgtgtggagacctcaatgtggcacatgaagaaattgaccttcgcaaccccaaggggaacaaaaagaatgctggcttcacgccacaagagcgccaaggcttcggggaattactgcaggctgtgccactggctgacagctttaggcacctctaccccaacacaccctatgcctacaccttttggacttatatgatgaatgctcgatccaagaatgttggttggcgccttgattactttttgttgtcccactctctgttacctgcattgtgtgacagcaagatccgttccaaggccctcggcagtgatcactgtcctatcaccctatacctagcactgtgacaccacccctaaatcactttgagcctgggaaataagccccctcaactaccattccttctttaaacactcttcagagaaatctgcattctatttctcatgtataaaactaggaatcctccaaccaggctcctgtgatagagttcttttaagcccaagattttttatttgagggttttttgttttttaaaaaaaaattgaacaaagactactaatgactttgtttgaattatccacatgaaaataaagagccatagtttca

SEQ ID NO: 455491 - DNA, 1369 bp, Homo sapiens
acccacgtgggggctcagcgtgcacccttctttgtgctcgggttaggaggagctaggctgccatcgggccggtgcagatacggggttgctcttttgctcataagaggggcttcgctggcagtctgaacggcaagcttgagcaacgcggtaaaaatattgcttcggtgggtgacgcggtacagctgcccaagggcgttcgtaacgggaatgccgaagcgtgggaaaaagggagcggtggcggaagacggggatgagctcaggacagagccagaggccaagaagagtaagacggccgcaaagaaaaatgacaaagaggcagcaggagagggcccagccctgtatgaggaccccccagatcaggatgggcttcgagcctggattaagaagaaaggattagattgggtaaaggaagaagccccagatatactgtgccttcaagagaccaaatgttcagagaacaaactaccagctgaacttcaggagctgcctggactctctcatcaatactggtcagctccttcggacaaggaagggtacagtggcgtgggcctgctttcccgccagtgcccactcaaagtttcttacggcataggcgatgaggagcatgatcaggaaggccgggtgattgtggctgaatttgactcgtttgtgctggtaacagcatatgtacctaatgcaggccgaggtctggtacgactggagtaccggcagcgctgggatgaagcctttcgcaagttcctgaagggcctggcttcccgaaagccccttgtgctgtgtggagacctcaatgtggcacatgaagaaattgaccttcgcaaccccaaggggaacaaaaagaatgctggcttcacgccacaagagcgccaaggcttcggggaattactgcaggctgtgccactggctgacagctttaggcacctctaccccaacacaccctatgcctacaccttttggacttatatgatgaatgctcgatccaagaatgttggttggcgccttgattactttttgttgtcccactctctgttacctgcattgtgtgacagcaagatccgttccaaggccctcggcagtgatcactgtcctatcaccctatacctagcactgtgacaccacccctaaatcactttgagcctgggaaataagccccctcaactaccattccttctttaaacactcttcagagaaatctgcattctatttctcatgtataaaactaggaatcctccaaccaggctcctgtgatagagttcttttaagcccaagattttttatttgagggttttttgttttttaaaaaaaaattgaacaaagactactaatgactttgtttgaattatccacatgaaaataaagagccatagtttca

SEQ ID NO: 455492 - DNA, 1583 bp, Homo sapiens
gagctcgaagtttgtaactcactaggtctaggttttcaccgtgtcagatcgtatacggggttgctcttttgctcataagaggggcttcgctggcagtctgaacggcaagcttgagtcaggacccttaattaagatcctcaattggctggagggcagatctcgcgagtagggtacaaggcactatgaaatgatctagtttcgtgggtgaggggctgaagggcctatgatgcacggaggcggggaaaggatttagagataacgtggtttgaaaggcgggacctggtgcggggacgctcttgggaggagtcttctccccagccttagctggtttcatgatttctttgcgtctgtaggcaacgcggtaaaaatattgcttcggtgggtgacgcggtacagctgcccaagggcgttcgtaacgggaatgccgaagcgtgggaaaaagggagcggtggcggaagacggggatgagctcaggacagagccagaggccaagaagagtaagacggccgcaaagaaaaatgacaaagaggcagcaggagagggcccagccctgtatgaggaccccccagatcaggatgggcttcgagcctggattaagaagaaaggattagattgggtaaaggaagaagccccagatatactgtgccttcaagagaccaaatgttcagagaacaaactaccagctgaacttcaggagctgcctggactctctcatcaatactggtcagctccttcggacaaggaagggtacagtggcgtgggcctgctttcccgccagtgcccactcaaagtttcttacggcataggcgatgaggagcatgatcaggaaggccgggtgattgtggctgaatttgactcgtttgtgctggtaacagcatatgtacctaatgcaggccgaggtctggtacgactggagtaccggcagcgctgggatgaagcctttcgcaagttcctgaagggcctggcttcccgaaagccccttgtgctgtgtggagacctcaatgtggcacatgaagaaattgaccttcgcaaccccaaggggaacaaaaagaatgctggcttcacgccacaagagcgccaaggcttcggggaattactgcaggctgtgccactggctgacagctttaggcacctctaccccaacacaccctatgcctacaccttttggacttatatgatgaatgctcgatccaagaatgttggttggcgccttgattactttttgttgtcccactctctgttacctgcattgtgtgacagcaagatccgttccaaggccctcggcagtgatcactgtcctatcaccctatacctagcactgtgacaccacccctaaatcactttgagcctgggaaataagccccctcaactaccattccttctttaaacactcttcagagaaatctgcattctatttctcatgtataaaactaggaatcctccaaccaggctcctgtgatagagttcttttaagcccaagattttttatttgagggttttttgttttttaaaaaaaaattgaacaaagactactaatgactttgtttgaattatccacatgaaaataaagagccatagtttca

SEQ ID NO: 455493 - DNA, 1014 bp, Homo sapiens
  misc_feature (826)..(826): n is a, c, g, or t
  misc_feature (832)..(832): n is a, c, g, or t
  misc_feature (1012)..(1013): n is a, c, g, or t
acccacgtgggggctcagcgtgcacccttctttgtgctcgggttaggaggagctaggctgccatcgggccggtgcagatacggggttgctcttttgctcataagaggggcttcgctggcagtctgaacggcaagcttgagtcaggacccttaattaagatcctcaattggctggagggcagatctcgcgagtagggcaacgcggtaaaaatattgcttcggtgggtgacgcggtacagctgcccaagggcgttcgtaacgggaatgccgaagcgtgggaaaaagggagcggtggcggaagacggggatgagctcaggacagagccagaggccaagaagagtaagacggccgcaaagaaaaatgacaaagaggcagcaggagagggcccagccctgtatgaggaccccccagatcagaaaacctcacccagtggcaaacctgccacactcaagatctgctcttggaatgtggatgggcttcgagcctggattaagaagaaaggattagattgggtaaaggaagaagccccagatatactgtgccttcaagagaccaaatgttcagagaacaaactaccagctgaacttcaggagctgcctggactctctcatcaatactggtcagctccttcggacaaggaagggtacagtggcgtgggcctgctttcccgccagtgcccactcaaagtttcttacggcataggcgatgaggagcatgatcaggaaggccgggtgattgtggctgaatttgactcgtttgtgctggtaacagcatatgtacctaatgcaggccgaggtctggtacgactggagtaccggcagcgctngctggngaagctgtggaagtccgagggctggttccaaagcctggctggtggactatgggctggaatgtctccccgggacagagtggttcgccagcgcgtcggattcggggccgggctggctcccccgtgctgggtagtgcgggggttgcctcgcgggccggtgcttccctttcgctccctttccgnnc

SEQ ID NO: 455494 - DNA, 444 bp, Homo sapiens
acccacgtgggggctcagcgtgcacccttctttgtgctcgggttaggaggagctaggctgccatcgggccggtgcagatacggggttgctcttttgctcataagaggggcttcgctggcagtctgaacggcaagcttgagtcaggacccttaattaagatcctcaattggctggagggcagatctcgcgagtagggcaacgcggtaaaaatattgcttcggtgggtgacgcggtacagctgcccaagggcgttcgtaacgggaatgccgaagcgtgggaaaaagggagcggtggcggaagacggggatgagctcaggacagagcccgaggccaagaagagtacgacgccccacgatgacatacaggcaccggcagaggccccagccctgatgagtgaccctccacatagattacctaccagcgctctgcccactcacgtctgtc

SEQ ID NO: 455495 - DNA, 1479 bp, Homo sapiens
acccacgtgggggctcagcgtgcacccttctttgtgctcgggttaggaggagctaggctgccatcgggccggtgcagatacggggttgctcttttgctcataagaggggcttcgctggcagtctgaacggcaagcttgagtcaggacccttaattaagatcctcaattggctggagggcagatctcgcgagtagggcaacgcggtaaaaatattgcttcggtgggtgacgcggtacagctgcccaagggcgttcgtaacgggaatgccgaagcgtgggaaaaagggagcggtggcggaagacggggatgagctcaggacagagccagaggccaagaagagtaagacggccgcaaagaaaaatgacaaagaggcagcaggagagggcccagccctgtatgaggaccccccagatcagaaaacctcacccagtggcaaacctgccacactcaagatctgctcttggaatgtggatgggcttcgagcctggattaagaagaaaggattagattgggtaaaggaagaagccccagatatactgtgccttcaagagaccaaatgttcagagaacaaactaccagctgaacttcaggagctgcctggactctctcatcaatactggtcagctccttcggacaaggaagggtacagtggcgtgggcctgctttcccgccagtgcccactcaaagtttcttacggcataggcgatgaggagcatgatcaggaaggccgggtgattgtggctgaatttgactcgtttgtgctggtaacagcatatgtacctaatgcaggccgaggtctggtacgactggagtaccggcagcgctgggatgaagcctttcgcaagttcctgaagggcctggcttcccgaaagccccttgtgctgtgtggagacctcaatgtggcacatgaagaaattgaccttcgcaaccccaaggggaacaaaaagaatgctggcttcacgccacaagagcgccaaggcttcggggaattactgcaggctgtgccactggctgacagctttaggcacctctaccccaacacaccctatgcctacaccttttggacttatatgatgaatgctcgatccaagaatgttggttggcgccttgattactttttgttgtcccactctctgttacctgcattgtgtgacagcaagatccgttccaaggccctcggcagtgatcactgtcctatcaccctatacctagcactgtgacaccacccctaaatcactttgagcctgggaaataagccccctcaactaccattccttctttaaacactcttcagagaaatctgcattctatttctcatgtataaaactaggaatcctccaaccaggctcctgtgatagagttcttttaagcccaagattttttatttgagggttttttgttttttaaaaaaaaattgaacaaagactactaatgactttgtttgaattatccacatgaaaataaagagccatagtttca

SEQ ID NO: 455496 - DNA, 1553 bp, Homo sapiens
acccacgtgggggctcagcgtgcacccttctttgtgctcgggttaggaggagctaggctgccatcgggccggtgcagatacggggttgctcttttgctcataagaggggcttcgctggcagtctgaacggcaagcttgagtcaggacccttaattaagatcctcaattggctggagggcagatctcgcgagtagggcaacgcggtaaaaatattgcttcggtgggtgacgcggtacagctgcccaagggcgttcgtaacgggaatgccgaagcgtgggaaaaagggagcggtggcggaagacggggatgagctcaggacagagccagaggccaagaagagtaagacggccgcaaagaaaaatgacaaagaggcagcaggagagggcccagccctgtatgaggaccccccagatcagaaaacctcacccagtggcaaacctgccacactcaagatctgctcttggaatgtggatgggcttcgagcctggattaagaagaaaggattagattgggtaaaggaagaagccccagatatactgtgccttcaagagaccaaatgttcagagaacaaactaccagctgaacttcaggagctgcctggactctctcatcaatactggtcagctccttcggacaaggaagggtacagtggcgtgggcctgctttcccgccagtgcccactcaaagtttcttacggcataggcgatgaggagcatgatcaggaaggccgggtgattgtggctgaatttgactcgtttgtgctggtaacagcatatgtacctaatgcaggccgaggtctggtacgactggagtaccggcagcgctgggatgaagcctttcgcaagttcctgaagggcctggcttcccgaaagccccttgtgctgtgtggagacctcaatgtggcacatgaagaaattgaccttcgcaaccccaaggggaacaaaaagaatgctggcttcacgccacaagagcgccaaggcttcggggaattactgcaggctgtgccactggctgacagctttaggcacctctaccccaacacaccctatgcctacaccttttggacttatatgatgaatgctcgatccaagaatgttggttggcgccttgattactttttgttgtcccactctctgttacctgcattgtgtgacagcaagatccgttccaaggccctcggcagtgatcactgtcctatcaccctatacctagcactgtgacaccacccctaaatcactttgagcctgggaaataagccccctcaactaccattccttctttaaacactcttcagagaaatctgcattctatttctcatgtataaaactaggaatcctccaaccaggctcctgtgatagagttcttttaagcccaagattttttatttgagggttttttgttttttaaaaaaaaattgaacaaagactactaatgactttgtttgaattatccacatgaaaataaagagccatagtttcaaaaaaaaaaacaagagcaaaaacaaacacaaattttgaggggaggctgggacctaagagaaggtttcaagacag

SEQ ID NO: 455497 - DNA, 1418 bp, Homo sapiens
acccacgtgggggctcagcgtgcacccttctttgtgctcgggttaggaggagctaggctgccatcgggccggtgcagatacggggttgctcttttgctcataagaggggcttcgctggcagtctgaacggcaagcttgagtcaggacccttaattaagatcctcaattggctggagggcagatctcgcgagtagggcaacgcggtaaaaatattgcttcggtgggtgacgcggtacagctgcccaagggcgttcgtaacgggaatgccgaagcgtgggaaaaagggagcggtggcggaagacggggatgagctcaggacagagccagaggccaagaagagtaagacggccgcaaagaaaaatgacaaagaggcagcaggagagggcccagccctgtatgaggaccccccagatcagaaaacctcacccagtggcaaacctgccacactcaagatctgctcttggaatgtggatgggcttcgagcctggattaagaagaaaggattagattgggtaaaggaagaagccccagatatactgtgccttcaagagaccaaatgttcagagaacaaactaccagctgaacttcaggagctgcctggactctctcatcaatactggtcagctccttcggacaaggaagggtacagtggcgtgggcctgctttcccgccagtgcccactcaaagtttcttacggcataggcgatgaggagcatgatcaggaaggccgggtgattgtggctgaatttgactcgtttgtgctggtaacagcatatgtacctaatgcaggccgaggtctggtacgactggagtaccggcagcgctgggatgaagcctttcgcaagttcctgaagggcctggcttcccgaaagccccttgtgctgtgtggagacctcaatgtggcacatgaagaaattgaccttcgcaaccccaaggggaacagccactggctgacagctttaggcacctctaccccaacacaccctatgcctacaccttttggacttatatgatgaatgctcgatccaagaatgttggttggcgccttgattactttttgttgtcccactctctgttacctgcattgtgtgacagcaagatccgttccaaggccctcggcagtgatcactgtcctatcaccctatacctagcactgtgacaccacccctaaatcactttgagcctgggaaataagccccctcaactaccattccttctttaaacactcttcagagaaatctgcattctatttctcatgtataaaactaggaatcctccaaccaggctcctgtgatagagttcttttaagcccaagattttttatttgagggttttttgttttttaaaaaaaaattgaacaaagactactaatgactttgtttgaattatccacatgaaaataaagagccatagtttca

SEQ ID NO: 455498 - DNA, 1499 bp, Homo sapiens
acccacgtgggggctcagcgtgcacccttctttgtgctcgggttaggaggagctaggctgccatcgggccggtgcagatacggggttgctcttttgctcataagaggggcttcgctggcagtctgaacggcaagcttgagtcaggacccttaattaagatcctcaattggctggagggcagatctcgcgagtagggcaacgcggtaaaaatattgcttcggtgggtgacgcggtacagctgcccaagggcgttcgtaacgggaatgccgaagcgtgggaaaaagggagcggtggcggaagacggggatgagctcaggacagagccagaggccaagaagagtaagacggccgcaaagaaaaatgacaaagaggcagcaggagagggcccagccctgtatgaggaccccccagatcagaaaacctcacccagtggcaaacctgccacactcaagatctgctcttggaatgtggatgggcttcgagcctggattaagaagaaaggattagattgggtaaaggaagaagccccagatatactgtgccttcaagagaccaaatgttcagagaacaaactaccagctgaacttcaggagctgcctggactctctcatcaatactggtcagctccttcggacaaggaagggtacagtggcgtgggcctgctttcccgccagtgcccactcaaagtttcttacggcataggcgatgaggagcatgatcaggaaggccgggtgattgtggctgaatttgactcgtttgtgctggtaacagcatatgtacctaatgcaggccgaggtctggtacgactggagtaccggcagcgctgggatgaagcctttcgcaagttcctgaagggcctggcttcccgaaagccccttgtgctgtgtggagacctcaatgtggcacatgaagaaattgaccttcgcaaccccaaggggaacaaaaagaatgctggcttcacgccacaagagcgccaaggcttcggggaattactgcaggctgtgccactggctgacagctttaggcacctctaccccaacacaccctatgcctacaccttttggacttatatgatgaatgctcgatccaagaatgttggttggcgccttgattactttttgttgtcccactctctgttacctgcattgtgtgacagcaagatccgttccaaggccctcggcagtgatcactgtcctatcaccctatacctagcactgtgacaccacccctaaatcactttgagcctgggaaataagccccctcaactaccattccttctttaaacactcttcagagaaatctgcattctatttctcatgtatattttttatttgagggttttttgttttttaaaaaaaaattgaacaaagactactaatgactttgtttgaattatccacatgaaaataaagagccatagtttcaaaaaaaaaaacaagagcaaaaacaaacacaaattttgaggggaggctgggacctaagagaaggtttcaagacag

SEQ ID NO: 455499 - DNA, 1407 bp, Homo sapiens
acccacgtgggggctcagcgtgcacccttctttgtgctcgggttaggaggagctaggctgccatcgggccggtgcagatacggggttgctcttttgctcataagaggggcttcgctggcagtctgaacggcaagcttgagtcaggacccttaattaagatcctcaattggctggagggcagatctcgcgagtagggcaacgcggtaaaaatattgcttcggtgggtgacgcggtacagctgcccaagggcgttcgtaacgggaatgccgaagcgtgggaaaaagggagcggtggcggaagacggggatgagctcaggacagagccagaggccaagaagagtaagacggccgcaaagaaaaatgacaaagaggcagcaggagagggcccagccctgtatgaggaccccccagatcagaaaacctcacccagtggcaaacctgccacactcaagatctgctcttggaatgtggatgggcttcgagcctggattaagaagaaaggattagattgggtaaaggaagaagccccagatatactgtgccttcaagagaccaaatgttcagagaacaaactaccagctgaacttcaggagctgcctggactctctcatcaatactggtcagctccttcggacaaggaagggtacagtggcgtgggcctgctttcccgccagtgcccactcaaagtttcttacggcatagatgtacctaatgcaggccgaggtctggtacgactggagtaccggcagcgctgggatgaagcctttcgcaagttcctgaagggcctggcttcccgaaagccccttgtgctgtgtggagacctcaatgtggcacatgaagaaattgaccttcgcaaccccaaggggaacaaaaagaatgctggcttcacgccacaagagcgccaaggcttcggggaattactgcaggctgtgccactggctgacagctttaggcacctctaccccaacacaccctatgcctacaccttttggacttatatgatgaatgctcgatccaagaatgttggttggcgccttgattactttttgttgtcccactctctgttacctgcattgtgtgacagcaagatccgttccaaggccctcggcagtgatcactgtcctatcaccctatacctagcactgtgacaccacccctaaatcactttgagcctgggaaataagccccctcaactaccattccttctttaaacactcttcagagaaatctgcattctatttctcatgtataaaactaggaatcctccaaccaggctcctgtgatagagttcttttaagcccaagattttttatttgagggttttttgttttttaaaaaaaaattgaacaaagactactaatgactttgtttgaattatccacatgaaaataaagagccatagtttca

SEQ ID NO: 455500 - DNA, 1425 bp, Homo sapiens
acgtcgctgagaatatacgcgtagggctcatctcttacacgcaggtctcggttataaccgctggcagtctgaacggcaagcttgagtcaggacccttaattaagatcctcaattggctggagggcagatctcgcgagtagggcaacgcggtaaaaatattgcttcggtgggtgacgcggtacagctgcccaagggcgttcgtaacgggaatgccgaagcgtgggaaaaagggagcggtggcggaagacggggatgagctcaggacagagccagaggccaagaagagtaagacggccgcaaagaaaaatgacaaagaggcagcaggagagggcccagccctgtatgaggaccccccagatcagaaaacctcacccagtggcaaacctgccacactcaagatctgctcttggaatgtggatgggcttcgagcctggattaagaagaaaggattagattgggtaaaggaagaagccccagatatactgtgccttcaagagaccaaatgttcagagaacaaactaccagctgaacttcaggagctgcctggactctctcatcaatactggtcagctccttcggacaaggaagggtacagtggcgtgggcctgctttcccgccagtgcccactcaaagtttcttacggcataggcgatgaggagcatgatcaggaaggccgggtgattgtggctgaatttgactcgtttgtgctggtaacagcatatgtacctaatgcaggccgaggtctggtacgactggagtaccggcagcgctgggatgaagcctttcgcaagttcctgaagggcctggcttcccgaaagccccttgtgctgtgtggagacctcaatgtggcacatgaagaaattgaccttcgcaaccccaaggggaacaaaaagaatgctggcttcacgccacaagagcgccaaggcttcggggaattactgcaggctgtgccactggctgacagctttaggcacctctaccccaacacaccctatgcctacaccttttggacttatatgatgaatgctcgatccaagaatgttggttggcgccttgattactttttgttgtcccactctctgttacctgcattgtgtgacagcaagatccgttccaaggccctcggcagtgatcactgtcctatcaccctatacctagcactgtgacaccacccctaaatcactttgagcctgggaaataagccccctcaactaccattccttctttaaacactcttcagagaaatctgcattctatttctcatgtataaaactaggaatcctccaaccaggctcctgtgatagagttcttttaagcccaagattttttatttgagggttttttgttttttaaaaaaaaattgaacaaagactactaatgactttgtttgaattatccacatgaaaataaagagccatagtttca

SEQ ID NO: 455501 - DNA, 1050 bp, Homo sapiens
acccacgtgggggctcagcgtgcacccttctttgtgctcgggttaggaggagctaggctgccatcgggccggtgcagatacggggttgctcttttgctcataagaggggcttcgctggcagtctgaacggcaagcttgagtcaggacccttaattaagatcctcaattggctggagggcagatctcgcgagtagggcaacgcggtaaaaatattgcttcggtgggtgacgcggtacagctgcccaagggcgttcgtaacgggaatgccgaagcgtgggaaaaagggagcggtggcggaagacggggatgagctcaggacagagccagaggccaagaagagtaagacggccgcaaagaaaaatgacaaagaggcagcaggagagggcccagccctgtatgaggaccccccagatcagaaaacctcacccagtggcaaacctgccacactcaagatctgctcttggaatgtggatgggcttcgagcctggattaagaagaaaggattagattgggtaaaggaagaagccccagatatactgtgccttcaagagaccaaatgttcagagaacaaactaccagctgaacttcaggagctgcctggactctctcatcaatactggtcagctccttcggacaaggaagggtacagtggcgtgggcctgctttcccgccagtgcccactcaaagtttcttacggcataggcgatgaggagcatgatcaggaaggccgggtgattgtggctgaatttgactcgtttgtgctggtaacagcatatgtacctaatgcaggccgaggtctggtacgactggagtaccggcagcgctgggatgaagcctttcgcaagttcctgaagggcctggcttcccgaaagccccttgtgctgtgtggagacctcaatgtggcacatgaagaaattgaccttcgcaaccccaaggggaacaaaaagaatgctggcttcacgccaagagggcaggttgggattttgcggctgtgccgtgtgcagttggcccttccaaacctgctccttggtttttttgccccccagtgtg
